United States Patent Application Publication US 2026/0103690 A1 - sequence listing, part 13

SEQ ID NO: 49310 - protein, 351 aa, unidentified
MLIIGVDYHPSDQYIAFVDPETGECGEQRLNHQNGEAEQFYRDLKQRGVSVRVGMEATGYSRWFERLLADLGIEVWIGDAAKIKTKRVRKQKTDRQDAQLLLKLLLENNFPRVWVPSPENRDLRQLLWHRHRLVQMRTRIMNQLQALAMNEGNRRKKKLWSALGRAQLEKLPLATWASRRRQDLLELLDRMNPSIEALTAAVEQEAKKRPEVLRLMTHPGVGSITALAFVLIIGTPERFQCGKQIGSYVGLIPSEDSSAGRQRLGHISKQGNALLRYLLGEAAQAAVRCDSDWRRRYVHLAMRREKSIAKVAMARRIAVRLYWMWRNGWEYAQSVNFGSNAGQLATGHGMN

SEQ ID NO: 49311 - protein, 339 aa, unidentified
MKKVFIGIDFSKLKFDAAIYSVDTKAIVATEVFDNEQSGYVDFLQWVKATTRCQKSGMLFCGEHTGYYSGNLSVFLYESGYDMWLVSGLEIKLTQGIKRTKTDRVDACKIAEHAYRYQDKVVLFQPVSKSLDEIRELLSYRERLVETRKMLTTSAKEMKRVKDNASCDYIYRDSIEYIKTLNASVRDCEKRIEALLKQDISLKTNYKLVSSVVGIGLVNAALILVATDNFTKFDNPRKFGCYCGVVPFEHSSGTSVRGKTRVSKMANKDLKTKLTLAAQNAVRFDPDLKEYYQRKRSEGKNNWLVLNNVKNKLIHRIFAVVRDGQMYEKQYVHPLKQVA

SEQ ID NO: 49312 - protein, 394 aa, unidentified
MKLIGIDIGKNKHFFCVMDQQTGEIISQPVSFSNDKEGFDFLVQEIKSYPKDSILIGMEDTGHYHFALLKHLLDLQYTVALINPKTTDFNRKMQGGITKNDKLDTINICDVLDTPERKKQYRITKVNSFDLYEQKQLTRHHHNLKEEENVYKNRLQKCIDIVFPEFNKLFNSKYGIVYMNILKMFGSAENIANTDIRTIRKCFEIEGRGNRISLTPERLKECARSSIGISSSAEVIQIKHLTAQIELIEEQLTEIDKKIEEFSIQNNSPILSIPGISHFSGTSILAELGDISNYSKPSQIIKFAGVAPLHYESSQFNAQHTAITKKGSKYLRKTLYQIILPVIRHNPVFNKYYQLKISQGKGHRCAQGHCVRKLLRIIYHLLKTNQQFDPQLLR

SEQ ID NO: 49313 - protein, 357 aa, unidentified
MEHTQPDFTGQHVFTGLDVALRAWKVCVLVGEAYHRRFAMEPEPEGLVRYLKRHFPGAIYHCVYEAGYCGYWIYDELTRLGVDCIVVNPADVPTSDKERRTKTDHVDAGKLARHLRSGELRGIYIPPPWCREDRTLVRTRAQCVRKQTRCKNQIKSLLRFYGEKCPEERSERYWSGPYIRWLERLAGERTSRGDSLEALVQELVFLRAQITRLTRQIRTLSHQEPYQKKVQLLCTIPGISIITGMTLLTELMRVDRFRSLDELSSYAGLVPGERSSGEEEHDTGMTPRRNPAMRHMLIESAWVAARQDPALMMAFRTLSARMPRNQAIVRIARKLLNRIRYVLKNEQPYVEAVLETA

SEQ ID NO: 49314 - protein, 326 aa, unidentified
MVAILRSYGEIISKPFEVKHTVSGIRSLIEQIQSIDGESRIVMEHTGRYYEPLVRELSKADLFVSAINPKLIKDFGDNSLRKVKSDKADAVKIARYTLDSWTELRQYSLMDEIRNQLKTMNRQFDFYMKHKTAMKNNLISILDQTYPGANTYFDSPAREDGSQKWVDFSATYWHVDCVRKLSLNAFIDHYQKWCKRRKYNFSRSKAVEIYEASKELVSILPKDDLTKLIIKQAVEQLNTASQTVEQLRTMMNEAASKLPEYPVVMAMKGVGKSLGPQLMAEIGDVSRFTHKGAITAFAGVDPGVNESGSYEQKKRSCFQARFQYSS

SEQ ID NO: 49315 - protein, 464 aa, unidentified
MGSELVSESGNGSRFAPRIVPSLWALGRTLNRNKDENRAVIHCQGVFSMDNEVYYERCAGIDVHKKLIVVCLRIGRKSEVREFGTLTHELREIVAWLKVNGCQMVAMESTGSYWKPIYNIFEQEGLPAMVCNAYHIKNVPGRKTDVNDAQWLARCLSQGLLNPSFVPDREQRELRDMTRFRKSQIEERSRNINRLQKFLEGANVKLGSWLSDVEGKSATELLELVIGKPDFTVDDVAACMHGRMKSSAEELFLSLEGSITPTQREFFAHVMTVIREQTAQIEKTDTMIQNSLNSNYKAAVEALDALPGIGRVSAEQILAETSADISRFKNQQSLCKWAGVCPGNNESAGKRKSGKTPPGNKTLKSTLTQCAKSAKKNKNSFFNAQYNRLVSHRGKNRATMAVAHSMLIAIYFVLSGYEFQDLGANYYNQFNREKKINSHVKQLSKLGVTIPDEILRAAIDRPPD

SEQ ID NO: 49316 - protein, 316 aa, unidentified
MTGTPTYAGIDVAKDRLDVVLRPSGEYVEATNDERGIRSVVRRLRKDDVALAVLEATGGLEQPAAAALALAGVPVAVVNPRQVRDFAKATGKLGKTDRLDAAVLAHFAEAVRPEPRPLADEHTRELSAVVLRRRQILAMTTAEANRARTAPKAVSKRIEAHLRWLRKELARVDGELKRVVEESLVWKERAALLMSVPGVGPTLSATLLAELPELEHLDRRRLAALVGVAPLNRDSGTLRGIRTVWGGRSGVRTTLYMATLCATRHNPAIREFYGCLVASGKPKKVALTACMRKLLTILAAILRNRTPWQPRLLPDS

SEQ ID NO: 49317 - protein, 439 aa, unidentified
MDEYGEVVELEQAVEQVARVAAIDIAKASAMVCTRLPGERNPERRVQRTWPVASSTNAIAELADHLVCQGVQLVVMEATSDYWRPFFYLLEARGLICWLVNARDVKNVPGRPKTDKLDAIWLAKLAERGMLRASFVPPKPIRRLRDLTRLRTTLTQDRARYRNRIEKILEDAQIKVSVVASDLFGASGRSMLDALVAGQRNPRALAELAQGRMRSKIPALVEALTGAFEEHHGYLIALLLEDHDRLTAQIDELTARIEAAIAELDPTPPPDGDHPGRMPLLDRLDEIPGIGRDTAAAIIAEIGVDMTAFPTPGHLASWAKLVPRTVQSGARSTHGPTGKGNRWLKGPLGQAAVNAGRTNTFLGARYRRIVKHAPAKKAMVAVARNILEIAWILIEDPDARFCDLGPDWHDRHVNRTRKTRQAVRELQHLGYTVTLAEAA

SEQ ID NO: 49318 - protein, 340 aa, unidentified
MEYKRISVDTSKTVFTIHGIDSAERAIIRRELKRDKFLAFFEKLPPTEVAMEACGASYHWARQLTAMGHRPKLIAPQYVKPYVKRGKNDRNDAEAICEAAGRPNMRFVPVKTEAQQADAMALSVRDLLVRQRTQLVNALRGHAAEFGIVAPRGLDRIEGLRAKIAQREGLPAPAQRMLELLGTQIDGLDQQLAELDKQLLAHHKANPISKFLAGIPGVGMIAALTLATKIDATQFASGRHLAAWIGLTPKEHSTGGRQRLGGISREGNERLRQLLVVGAMAVIRHAKPGSKSASPWLLNLLERRPKKLAAVALANKMARIVWAMLTSGEAYRAPTCPKAA

SEQ ID NO: 49319 - protein, 386 aa, unidentified
MQTLNDLSRSLIALEPASTLIAVIEMSLSSWLVAGIVPGIERQPLKKLAVDESALLRLLHRWREEAEKAGCRIERIVVAFEAGRDGFWLARWLKARSIEAHVIHAASVAVSREHRRAKTDRLDAELLKRAFLGWLRGERNHCKVVAIPTLKDEDAKRPSRERESLVGEQSRIVNRMKAALIRLGIRGFNPKLKRAAGRLDSLRTPEGEPIPPNTLAELRRDMERRRLISNQIRQIEEARLKRFEQAPNDGPHAMVRLLARVIGVGIETADMLVHEVLSRNMHDRRAIARYAGLTGSPDESGRKRREKGLARSGNGRVRRGMVQLAWRFLTYQKESALAQWYRARTENARGARKPMIVALARKLLIALWRFVWQGVVPDGIVLRPAQ

SEQ ID NO: 49320 - protein, 346 aa, unidentified
MTIVEDARAITGGVDTHSEVHVAAALDPVGGLLGTREFPASEAGYAGLLDWLDGFGDLALVGVEGTGSYGAGLATYLAAHGVRVVEVDRADRQDRRRKGKSDPLDAVSAARAAQSGRASGLPKGRDGAVEAIRALMVAKRSARNERTQAINQARALILTGPDELRARFAGHRAAALAAAIAALRPRPGDAAEYAVRVALRELGRRVEFLDAQIQRLDDLIVPLVTVRAPGLLSLYGVGPDTAAMLLIAAGDRPGRLRSEAAWAHMCAVAPIPASSGKTRRHRLNRGGNREANHALWRIVITRMCAHPATRAYVERRTAEGLSKKDIIRCLKRYVAREVYPYLRAGR

SEQ ID NO: 49321 - protein, 344 aa, unidentified
MIGLDLAKNVFQVHGIDEAGSVVVRRQLRRPQLERFLAALPPGVVVGMEACSGAHHWGRVIEKLGHEARMMPAAYVKPYVKRNKNDGRDAEGVCEAMTRPTMRFVRVKSLDSQAVAVLHRTRRLLVRQRTMSGNAFRSALAEFGLVAAQGLKGLRSLMAMLEDPASAIPDKARMPLNVLARQWEGLNADICKLEAEIVRAAKGDEVARRLMAIPGLGPIGASAILAAVPDARVFKTARDFAAWLGLTPRQFGTGGKQRSGGISKQGDRTLRTLLTVGATSYLRIERARGAKDPWVRDLLQRRPFKVAAVAYAAKMARMIWAMLVTGEFYRAPNRSRSVVAQAAA

SEQ ID NO: 49322 - protein, 419 aa, unidentified
MKGNHTKKVKHINNKTLIVTLDIGKTVHYGYMRTPTGAEVKSFPFYNARKGFNELWDKVCQFKRAQGLKDIVVGFESTGPYAEPLFHFLRKKPLHLVQVNPLHSKKLKELTGNSPCKTDKKDPRVIADIISLGHALTLVVPEGAAAHLRRLTQARERAIQRRTAMLNQLQHLVFVLFPEFLNVLKNVHSKTSLYLLQHHPTPQDIVAVGSESLALILRRVSRGKVTRERARQLFEAAQVSVGITEGRESILVEVKHLIAAIEHEDHLIHGVEEQMNYYVKQIPYSHSMLSIKGMGIITVAGLIGEVGNFETFSTIAEIMKLAGLDLYEVSSGNHRGRHHISKRGRALMRKLLYFAALSVVRKKGIMHEDYQKMLARGMPKIKALVAISRKLLRLVFALARDHTVYVNNYCQKSTLEIAA

SEQ ID NO: 49323 - protein, 425 aa, unidentified
MRVSPLILKQDMTHKAARTVCKTIFWMVVTMFIVGIDIAKRTHVVSVMTSEGQIVCKPFSIRNNCSGYNLLLERLRKISNIKSAFTLAMESTAHYWLPLYTRLRREGWNVVVMNPLQTHAVRELLIRETKTDAVDAQLIAEVIRFGRVRSSSVPQEELLALRELCRNRFYLMDLASDLKRKITALLDQVFPEFEAQFDSIFCKSGLAVLRRYPTPERLAKAQLGKLTEILRTASNGRFGEWKAQEVRECARTSFGLPDSEGVYSALILMYLEQMQHLIDAAAILESHISEHFSRFQTTLTSIPGVGPVLGAVIPSEIRDISVFSSSDKLAAYAGVDPRVKQSGEMKLGGVHMSKRGSPYLRRAIWRASVVAVQHDPMFKAYYEKKAAEGMRYMNIIGHVTRKMTAVIFAVMRDNKAYLPIMPSVA

SEQ ID NO: 49324 - protein, 348 aa, unidentified
MTEAYDGREVVGIDLHRRRSVLVRMTGDGRKLETARITNSPAELRRQIARAGKSPRVVLEATYGWYWAADTLAAAGAEVHLAHPLGVKGFAYRRVKNDERDAADLADLLRMGRLPEAWVAPHQVRELRELTRYRHKLVRIRTSVKDQVHAILAKLGIPVTCTDIFGVWGSAWPGELVLPQPYAGKVASLRKVCAVLADEIALLETAIAGLLEDHPGYQAVRALPGIGPVPVAVIVAEIGDVTRFPRPAELCSWAGLTPRHRESDVKVSRGHITKQGSRVLRWALIEAIQHVPAGHPLRERKDDIIARRGVQARNIAKVAAARQLLTWVFYAMRDGQVRSLAAAARQAA

SEQ ID NO: 49325 - protein, 357 aa, unidentified
MRKRLNADKVNVNGKTVNVGIDVHKVSWHVTALVEGIVVESATIKPSYRVLKKLLAPYKGARIRIAYEAGFSGFNLYDELVADGMECIVVSPSLIPVESGNRVKTDKRDSRKLAQYLENNHLKKVYVLSKEERAHRQFVRTRRQLSDHRTDVMRQIKSLLLFHGLPTFDGNRGFWTRPVLRALRSITPDEYVSHSLNKLIDVYEYLTQQVKHMTREVRRLARAERYARRVELLTSIPGVGVLSAMEILTELQDVSRFATADQIAAFLGLTPSQYSSGQHVRMGKITHAGNHRLRTRMVECSWIAIKKDPGLYKTYEAIKKRRGGKRAIVAVSRKLIIRIRRILLDGVTYRTEFATAA

SEQ ID NO: 49326 - protein, 385 aa, unidentified
MSKKRNKVCGIDVHKRFLVASILDNEGNCETKRFEQDLDELISLKNWILDSGCESVAMESTAEYWRPAYGILNPEINITIGNAYHMKGIPGKKTDVLDSQWIAELELNNLITPSRVFTGDLYELRTLTRARNKMVNNSTVFKNKILHQLDVCSIRLCTVLKDVFGKSGYALLKGIVERKTQDEIIKALPAKTRKIAPVFFEQIPEYIPDSAIFLIDSMLKIYDNLQVEIKRIEERIKFYLKDKENELRILMSVPGIGIVIGSNLLAEIGDIRDFPTADKLAKWAGLTPSVYQSANTNYTGPITKQGSKYLRWALIEAAHSAIRRPGKLNDYFNGLLPRKGYKKAIVAVARKILRIVWHLLINNEIFEDGIPRVKTVKIPKFPEKN

SEQ ID NO: 49327 - protein, 388 aa, unidentified
MNVGADKSEPLTAVHTDLGAIFVSLELSRSSWLITSLSPGGGEKMSKHSVPGGDFAGLMERFAQLQEKARLRTGQSFRIIVIQEAGLDGFWIHRALQNEGIESHVVDAASIATSRRRRRAKTDKIDGETLVRALLAYKRGEPRVCAMVKAPTPGEEDRRHLCRERKALTAERVRHVNRIKGLLFSQGISGYQPLRRDRRQRLEELQTGDGRAFPQHLKALVNRELDRLELLLKQIKTVEAARDALLAEGQTAKPAMAAMLLDIRGIGPEFAAILWSEGLFRHFENRRQIAAYAGLAPTPWQSGAVDREQGVSKAGNPRLRTTLIQLAWLWLRNQPRSALSVWFHERVSRNGGRLRKTTIVALARKLLVALWKYVTAGVVIEGVTMKVA

SEQ ID NO: 49328 - protein, 352 aa, unidentified
MAKGNKLDFTGQHIYVGMDIHKKSWSVSIYTEHFEHKTFTQPPEVKKLTNYLQRNFPGATYHCVYEAGFSGFWIHDRLTEEGIHCMVVNPADVPTKHKEKAGKADKVDCRKLARNLRSGDIKGIYVPFRVQAEDRHLIRTRQSMVRKQTRCKNQIKAILFFYGILIPEEGHWSRNFINWIETIRMERASGDLALKVHLEELKHLRQIIAGLNKAILALSRADTYRDKVLLLRSVPGISTLTAMTLLTELYDISRFSSLDKLASYAGLVPDIKSSGEKEHTSGITHRRNPALRAVLIEASWVAARKDPALIMAFHKFSLRMKKTAAIVHIARKLLNRVRFVLMNQERYVPAIV

SEQ ID NO: 49329 - protein, 394 aa, unidentified
MACRRRLLGDGQVESEVLEFGTTTLQLRSLSKWLSEWGCSHVAMESTGVLWIPVWNVLEGDFKLLLTNARQLKKVPGRKKDVTDAEWVGQLMQCGLLKGSFVPSREVRHWRTLTRQRMKLIDQRTGVVNRMHKILQQGNIKLSSVATDVMGVSGRAMIQAMIEGESDPETLASLAKGRLKSKHEQLVESLEGRLNQDDRWVMKELWEQMEYLEEEIARYDDQIKEKMSPYEESLERLMTIDLIERRSAENILAEIGPDMSFFPSDDNLVSWAGLCPGSEESAKKNRSGKTPKGDQWLRRALVEPAWGAARRKDGYLGAMYRGIAVRRGEKRAVIAVARTILQAAWHVLSKGEKYKERGGDYFDRINSEQTKIKLIRRLERLGFEVELKPKQATV

SEQ ID NO: 49330 - protein, 330 aa, unidentified
MKNYKEVVGIDVSKKTIDAYCYHGQVHKEFVNDIVGYKSLIKWVFKVCKEDTVFYCFENTGYYSLKLALYLSSQNIVYVEESPLKIKRSSGIVKEKTDVLDACLIARYAWLYREELKPSTVKSTSHLELGRLLALRDQIVRNNAGLKGTLKEMKVLLSSPTTDAGCISLKRSIEYLTKQVTCIEKRIKEIMSEDTSMQKNYELLTSLKGFGLVVASQLIYHTGNFTRFDNWRAFSSYCGTAPFEHRSGTSIHRRKQCHYLGDRKMKSLLSMASVSAIQHDSELRLYYNKKLAEGKDKMLAVNNVRNKLIARAFAVVKRGTPYVVLQQHAA

SEQ ID NO: 49331 - protein, 405 aa, unidentified
MAAVMIGVDPHKASHTAAAIGPAEEPLGGIQVRAVASQAAQLLAWAAAWPERTWAVEGATGLGNLPAQQLVTAGEVVLDVQPKMAARVRLLASGNTNKNDPGDAGSVAVAALRSRAPRRVTAEDHTAVLKVWSKRYRDLGRARTQVACRLHAVLADLVPGGFSREITAGQGASMLKRIRPSGPAARARRELAAEFLGLRRLDGQIRDTRNKLAAAVQASGTTLTGIFGVGPVIAAAILGEAGDTTRFGDRDRFAACNGTAPIEVSSGGRKIHRLSLRGNRRPGHAIHMAAVTQIRYAHSPGRAYFDRKLAEGKTGKEALRCLKRQISDAIYARLVADAAPRSTPAQAEGPGGQPGNGSVSSAAGSHPGRRLFGKATPGPHPSLRPAATARRAVQATALKTSHRSP

SEQ ID NO: 49332 - protein, 452 aa, unidentified
MKKEAVKKSVVKMATGLPVFNPHAAGIDIGDTLHCVAINDGNGGHEVKTTSAFTCDLHEIVDYCISNGVTTAAMESTGVYWLVLYILLEEAGIDVYLVNAKHVKNVTGRKKDDTDAIWIQKLHTCGLLQKSFQPDNEIRQLRNYTRQRKNLILLGSDAVRRMQKALELMNIKIHTVISDILGKTGMKMVKAIIAGERDPQILATLCDPRIKASQEEIIKSLQGIWKEEYLFMLEQAVENYEFHQKQIMSCEEKIKQQLLKQVAIIKEGDITCLQETKKKSKAKPKNNQFNFAVSPYLIAMAGVDLCKIPGINEVTALGFISEVGLDMSKWKSAKHFAAWLNLTPNTKISGGKIISSKMMKKKNKAGQYLRQAASCLSTNKTPIGDYYRRMRARLGGRGAALTTAHKLSRVIYTMLLKQTEYNAGMILDNQEKFREEKIKKLEKQLARLKQAA

SEQ ID NO: 49333 - protein, 412 aa, unidentified
MTHAQLTHFAGFDWAGDHHDVIIVDTGGQLVADFRFEHNAAGWQHWREKIAAWPHLGVAIETSFGAVVEQLINSGISVYPVTPSSAKGYRQRKYPGGTKTDRHDAWALADALRTDGHAWRTLCAKDPIIEELRMLCRDEVALIEERTALVNQARQAAREYYPAVLEAFEDWTLPGTWAFIERFPDTQAMLKAGRRAWEKFFHTHKLYRPETTARRIAVLEAAGQWHIAAHMINAKRLYLLTKIKQLRALQMQLEEYRRRIEAVFASHPDSGMFGSLPGAGAKLAPRLLGEIGSDRALYADAQSLQSMSGTAPVSYQSGKLHKVQMRRACNRHLRHTMHLFSDLSRARCAWARVYYDGLKSRGKTHAQALRSLGQRWLNIIFRMWQTRTAYDAELHTRNQLQHGSWVLQHTPS

SEQ ID NO: 49334 - protein, 412 aa, unidentified
MKKHTYRSKNVNKINFTQVKERLANEPVVFAIDIAKEKQYGLLSNASGTVSELIWWTHTEQTVELLSALKELECPLDIVIESTGTYGDALRFQFRDCGFEIYQMNAKRVKDASEIYDGVPSMHDAKSATIITRLHRDGLSKLWVELNDDERTMNALRREYDMHQSQYQRNQGRLEAYLSRHWPEVSYLLSPDSVTLEKLLIEYGSPASIAADAKNAANNMRLWGKHLLSDGKIEAVISSACNSLGQPCIESELRYLQALAKELQHSRLQQKQAKQALEESIKSKDDLRELGALIGMVTTAVLFSCHLDPRKYDCARSYQKALGLNLKEKSSGRHVGQLKITKRGSSVARSYLYFAALRLIKNNSVVKAWYLNKVDPRAKNKTVIAVMRKLSKSLWYVGRGDKFDATKLFTVA

SEQ ID NO: 49335 - protein, 339 aa, unidentified
MAIVGGLDLHRKQITFDVLDTVSAEVRRGRISPADRQLFRGWPAGWAGQHVELAVEGCTGWRFVIEECQAAGVVAHLAEPAEVAGLRGRRRHAKTDRIDARHLRDLLLQGRLPECWIPPQVVLETRAKVRLCKDLADQRTGWQQRLHATLYHLGAPAQRDLLSGDRDRLTRIAGLSPAARQAITVALSMIAALDAQIEPLRAELIGFARRQPGCRAIAAEYGIGALTSVVIWSEMGDARRFAHSRDAVGHAGLDITVYSSDSKRSPGRLSRHGSPLLRWALYEAARCSARTASPDHDYYRQVAERLGGQRAALSVARKLARRCHHRLRALGEHALAPPA

SEQ ID NO: 49336 - protein, 355 aa, unidentified
MLSVKYIGMDVHKETVSIAVLNSSGKLMMELILETKANTIIQFVEGLRGDLRVTLEEGTWAAWLYDLLRPHVTEVVVCDPRKNALLKVGNKSDRIDARKLAELLYLDRLKPVYHGEHGVRTLKELSRSYLAISGDQARVMTRIKALYRSWAIPCAGKQVYASRCRSEWLDKITEAGVRRRAEFYYQQLDALRGLRQQVRRELLAESGKHQASKLLCEIPAIGPIRAAQLIAILQTPYRFRTKRQLWAYGGLGIETHSSADHRYVDGQLQPSKRQVSLRGLNRNHNHELKNIFKGAAIIAATKPGPLQQFYDELVAKGMRPEMARLTLARKIAAIILIVWKKGVCFDAQYLKPQTA

SEQ ID NO: 49337 - protein, 530 aa, unidentified
MGREGRLTIGASCPCRSLVSGVSAFATGDVLIRESGCDPDKELAAISHPCAHNLLGPFSVTPERENKIISPQAKKQSAKANEFTVADLPRHLRHINVNAAGIDIGSDRHLVAVPEGRDVVSVREFKAFTADLHALADWLSQCGITTVAMESTGVYWIPLYEILEQRGFEVYLVDARRVKNVSGRKSDVLDCQWTQELHTYGLLVQAFRPPEEVCVLRSYLRQKEMLVQAAAEHIQHMQKALQQMNLLLHNVVSDITGVTGMKILKAIIAGERNAQVLAALRDPHCQNSVETIAKSLVGNYREEHLFALRQALELYETYQVKIADCDAAIAAYLLRQEHHTDDEPPAPQKPIPARNRLRAGVDVRDQLYKMSGVDLFRVSGLAADTLLTLAGEVGFDMSPWQSVKHFTSWLALCPGTKQSGKRVLSRKTKPGANRAAQAFRMAAVTQARAKTALGAFYRRIRGRSGGREAVTATAHKIARIFYSLLKHGSAYVEQGEAAYEQQFKERRLKALKKQAIALGYQLSPLTATSF

SEQ ID NO: 49338 - protein, 453 aa, unidentified
MAEGFRGNRGLVPSSPSVRLLNLLPSPRRIPNLAVWEGETSAVEVVHARCAGLDISKRDAKVCVRVAGAGRRKTVETVTTWGSVTSQILALRDHLIAERITCAVMEATSDYWKPFYYLLEDAGFDVLLVNAWHVKNLPGRKTDVADATWLAQLGAHGLVRGSFVPPEPIRQLRDLTRMRTAITRERSREVQRLEKLLEDAGIKLSAVASDILGVSGRAMLESLIAGNRDPAALADLAKRRLRSKIPALTEALSGRFSEHHAFLARVHLDLIDQHTAAIADITTRIEATIAPFRGFRDLICTIPGVSTLTADVIIAETGADLTRFPTAGHLASWAGTTPGHNESAGKVKSSQTRPGNPYLQGALGAAAMACAQNPRTYLGARYRRIASRRGPQKANVAIQHSMLIAIWNMGTNGCLYDDPGADYFNRLHPARAKKRAIRQLEAMGYNVTLTHAS

SEQ ID NO: 49339 - protein, 342 aa, unidentified
MRSVKRAGRSCHFMSALVCGLDVHKDSTYATILNSEGKIVNQTRMSNERVLLYLSYFDVGKVGMESSNQIAPLFRKLTAKGYNVVVSHPKKTRYIAEAKIKSDRVDSKAIAELVRLDALPLAYFPEGEISKLREKVRRRAFLVRSRVKLRVKIKSVLTYEGLKWPTDHGLFTQKGVEWLHGLNLDSVECYLRVLKPLDEEIKLLSKELVGIAEDDEEVKLLMTIPGIGYYSAVLMKSEIGDIARFPFGERLCSYAGLVPSTHASGKTVWHGGITKEGSRWLRWVMVEAAQTHVHKYDTSITRAYNRIAEKRGKKIATVAAARRLLMCSYSVLKNKKPYYDQT

SEQ ID NO: 49340 - protein, 345 aa, unidentified
MELEKQYVGIDLHRRRSVIVRRNSESETLEVTHVDNDDVAAFARAVMAAGEHPEVVLEACYGWYWATDLLQELGCEVHLAHPLGNNWGHRRVKNDTRDAEDLADLLRLGRLAEAWIAPPAVRELRELVRYRAKLVALRTNCKLQTYAVLAKEGVAVPMTDLFGVAGTELIETCTLAPAYRTRVESLRDLVEVFDREIQKLETDVRHELRGHAGYQAIQQIPGVGPLFAAIFVAEIGDVTRFRSPAQLASWAGLTPKHRESDMTVHRGPITKQGSRLVRWAAVEAAQRQAGGTKLRADFTRIAANHGDSAGARKIARVAVARKIVTLVFYGLRDGTIRSLAVSEAA

SEQ ID NO: 49341 - protein, 290 aa, unidentified
MSIFVGVDVAKRSFDIATTLPNGKKRTKAKLPNDSGGFAQFSDWLERHAEPGTWIVMEATGTYHEALAEHCHAQGYRVCILNPAVISKFADVELRRVKTDKADAKVIAAYSQQNAASLRQWEPEPPAQRRLRALVRRLDDLKEMRQMEQNRLDVARDAVQQSIRDIIGHITEELEKTKKAIEQTIDDDPDLRNRRDLITSIDGLGETTAALLLAELGDPLKYQSPSAIVAFSGLNPVVQQSGEFTGQSTISRTGSSRLRVGLVDVRRCLNQAQPSRKGAGRAVEQPAQGV

SEQ ID NO: 49342 - protein, 392 aa, unidentified
MHISIGIDIAKEVHWVTAIDADGVIHLDRKLENTPTAIAGLIAELTQLGGSVRIGLDVVGGIAGLAEAMLAEAGFALVHVPGLAVNRARQGTAGGEHKSDPRDARVIADQVRIRRDLRPIEPATELDLELRLLAGRRRDLVDAQTQRLGRMHDLLVGIFPGLERSLDLTTKGPLVLLTKFVTPAELRAAGRKRLVRHLQAAGGLPNVEVLADRALAAAHEQTISVPAERMTAHFVKELAAEALAVRTRLAALDRELEALLDRHPDAALIRSLPGMGVVLTAELLAEAGSFSRFRSADALAAAAGIAPVLRQSGKVRFLKRPLGGNKGLKRVFYQSAFCSLSHPDSRAFYDRKRREGKRHHQAVLALARRRINVLWAMLNNRQAFQTNFKLAA

SEQ ID NO: 49343 - protein, 414 aa, unidentified
MALPESAYHVGIDWGSAEHAVCVLTEAGRPKTRFTISHTAAESADLARRLARLGAAEDIPAAIERPDGRLVDGLLEAGQPVVPVKSNAIKAWRDVEVLSGAKSDPGDAMVIAEYLRLRHHKLGPGHPFSDQTKALRTVVRTRDDVVRQPVMATNMLSALLDAFWPGVKALFKDMESPIALEFPTRYPTPASAAALGEKRMAACCAKHGRSGRRTAEELVSCLRAAPPGVTAEHHAEAGRDAVMALVAVPRTPAGVKKDLDRSVDAHLGRHPDGRIFASLPRAGRVNAAQTLAEWGDSLDAYDSPDVVSAFAGVAPVAKGSGRVRGVCYRWACNERLRQAITTFADNSRHESAWAADIHHRARGRGMDHPHATRLLARAWVRVFHRCRLDHEPYDPARHGAAQHFLPQPEWVQAV

SEQ ID NO: 49344 - protein, 356 aa, unidentified
MSHEVKYIGMDVHKEAIVIAVLNGSGKLIMETILETKASSILEFIHGLRGELHVTWEEGTWAAWLYDLLQPQVQEVVVCNPRRNALLKEGSKSDKVDARKLADLLRTGMLRPVYHGENGLRTLRELARSYQTISKDLTRVMNRLKAVYRGWGIPCAGTQVYAPRYREEWLGKIPQTGVRRRAELLYQQRDGLQALRREVRGEFLAESRKQKAAKLLRKIPCIGPIRAGLLIALMQTPYRFRSKRQLWTYSGLGIETHDSAQFRFVRGQLQRSKKPQQLRGLNRNHNHAMKEIFKGAATRASCGTGPFHDFYAALLATGMKPEMARLTLARKIAAITLTLWKKEERFDAEQLKTQAA

SEQ ID NO: 49345 - protein, 438 aa, unidentified
MKRKHKKGVSPRRAKLRLTKHLEQVNLYAAGIDIGSREHYVAVPEGLDDEPVRSFGCFTTDLEWLADWLVRIGIQTVVMESTGVYWIPLFEILEERGLETHLVDARQTKHVTGRKSDVQDCQWLQQLHTYGLLRSAFRPPEAICTLRAYLRQRSNLVSQVGTHIQHMQKALRQMNVLLDNVISDITGVTGMKIIRAIVAGERNAKRLAQYRDGRCKNDVATIEKSLRGHYREEHLFALRQAVELYDIYQEKIHACDEATERHLDCFQSKAAPGDLPKKPKRKHNNATAFDGRGHLYRITGVDLTQIGGIDESIALKALSETGMDMNRWKTKKHFSSWLALSPCNKISGGKILSSRTKRTSNRATQAFRMAAYSVTNANSALGAYYRRMRSRLGGPKAITATAHKIAHIYYSMLKHGTEYVDKGQQYYERQYQDRALKP

SEQ ID NO: 49346 - protein, 313 aa, unidentified
MTFKRNGCYAGLDVGKQWLDLAIHDVDGTRQFSNSPAGVKKLIIHLSRLDPALVVVEATGGYEQLIVQAMFSAGIPVHVANPTRIRSYARAKGVLAKTDTIDAVIITEYGYMLNPEPQNAKSEEEIRLRSMIMRREQLVEIRAAESNRLHTVHLCMKSSVEDHLRWLSGQIEELDVQIQALIHALPAVQASVNLLKGIPGVGPITAATVQAEMPELGQVNRQQIAALAGLAPYNRDSGKKRGRRRIFGGRKSVRRVLYMACISGIRHNPVIRKMYEQKIAEGKPFKVAITACMRKLLVIMNAMVRDGTAWSYT

SEQ ID NO: 49347 - protein, 319 aa, unidentified
MSGDVSFGIDVDAMRLMVARDGSESVESVGNEARSIRAWLKRIPACSRIGVESTSSYHQRVVQLAQSAGHRVYVLNARDVRYYAKGVGRRGKTDRVDAQVIARYVAKEADHLHVYVPRSPEQQALHVLQQQRSAVQRSVTQLRQALTAHGPLGERFRPLMQAARDAQRDLDRQIRACTDHGPHAALFRRLMTVPGIGPVVAACVVQHLTRWPLTHVDAWVACTGLDPRPNDSGRKIGRRILSKRGDATLRQMLFMAAMSFARNPVGKAIASRYRQRLSSTATYNCLARMLARIVWSLSKSGNDFALDRFAHDHRVIVAA

SEQ ID NO: 49348 - protein, 341 aa, unidentified
MKNKSFIGIDISKNVIDASIFCEGTPIKDFPHAVFNNSRKGFGEMCTWLKKNHVVLSNCLFGMEFTGSYSMELEKFLNARKFQFCMLSTHVVKHHPMGPKDKSDKIDSAKIADFLYRYDGTECVKPYKMPDKTMQRLKALTNERKFLVEQRTCFMNRRQLCTTKEAAQLYDGYIKEFSHDIENIELKMQNLLETDDSLSTTYKNLLTIPGIGFVNAMNVIVITRNFTAFETARQYASYIGVAPHFHTSGTSVKWRPRPSARCDGQAKADLSMAATVAVQYDAELQSFYNRKLGGKQDSDTKRKALNAVKFKLILRMFAIGKQNRKWDPLNSKSSNEKLAIS

SEQ ID NO: 49349 - protein, 416 aa, unidentified
MSPESSLPIERYLGIDLHKHYLVIGGVNAKQEIVLPPRRLDLDDWPKWAKAHLTKSDLGVVEATTNAWDFYEVTCPFVQRVVVANAAKIALIAKTRVKTDQKDVMVLARLLAAGLIPEVWVPPMEVRELRALISHRRRVIDVRTAIKNRLQSVLHRHHLVLPSGHPFAAIHRAWWDTLAVSPTERLPLKHDLATVAQLDTQIAEIDVELQRLSCVAPWSERVTYLIQLPGVGLITAMTILSAIGDITRFEHAKEVVGYAGLGASIHDSGQTHHTGRITKQGRKELRTVLVEAAWSAVEYSAFWKAEFERLGRRLDQMKAIVAIARKLLVVVWHVLTEQAADKHAEVKLLATKLMRWSWELTDAQRGGFTTRQFVRLQLMRLKLGEDLTHFTYGGMPRRIASVEEVLALKPERRRDA

SEQ ID NO: 49350 - protein, 343 aa, unidentified
MKITTIGLDLAKNVIQVHGVDEQGKAVLRKQLKRHQMTLFFTNLPACLVGMEACSSAHHWARQLERLGHKVKLMAPQFVKPYVKTNKHDAADAEAICEAVNRPNMRFVPIKNAEQQAVLALHRARQGFVKARTAQANQIRGLLGEYGIVVPQGIVYIAKRLPAILEDGENELPGSFRQLLARLGDHLKELVRQVVELEKQIQRWHRENEASRKLEQIPGIGPLSASALVATIGDARQFENARQLAAWLGLVPRQHSSGGKPMLLGISKRGDAYLRTLLIHGARSVVRVAEGKVDEGQRWLVQLIGRRHKNVAAVALANKNARIIWALLAHDRHYQADYAAKAA

SEQ ID NO: 49351 - protein, 370 aa, unidentified
MVWTAPYGIDCARMRLSRSHTREPSVSEIIRIGMDTSKYIFVLHGVDAEERTVLRKRLSRKAMLEFFAKLPPTLVAIEACGASHYWARELAKLGHEVRQIAPQLVKPYVARNKNDGRDAEGLCEAVSRPRMRFVPTKTAEQQAAVMLLGVREQLVTRRTQLANAIRGHATEFGLIAAQGLDKLASLLERIAQDEGLPELARGLFTMLGRQYEQVQVELKAIEAKLMAWHRADATCRRLAEIPGIGPVTAAALVMKAPDPHAFRSGRLFAAWLGLTPKDHSTAGKTRLGTITRAGDETLRSLLVVGATSVVKLAKGPKQRGPRWLIELLKRKSPKLAAVALANKMARIAWKLMTTGESYRARIDAAAPTPA

SEQ ID NO: 49352 - protein, 412 aa, unidentified
MDVIVERCAGLDVHRDSVVATVRVPGTGKSRRRRGQQTHTFGATIAQLEQLGDWLEGFGVTLVGMEATGVYWKPVFTVLERRFECWLINAEHLHNVPGRKSDVLDSRWLCELLELGLVRPSFVPPPEIRRLRDLTRLRSTQAQERTRAIQRLEKVLQDAGIKLTSVASKTYSVSARAMLEALLGGVSDPVCLAELAKGRLRAKIPQLTEALANRFDTAHHGVLVAGLLAHVDALDQAVATLDARIAAATDAELIELLSTIPGVKRHTAEVLIAECGLDMSVFGSAQRLVSWAGICPGTNQSGRRRRRSKTRPGDSWLRTALTQAAHAAARSKNTYLASHYWQIRGRRGDAKAIGATRHDILIAYYHITRDRVPFRELGPDWLARRHSPEHRTRRLVKQLEALGHTVTLEAAA

SEQ ID NO: 49353 - protein, 385 aa, unidentified
MNRELCLKTASSPYLDTLAFLNGDLYKKLTFLLLRFLGDVQYPFPLQIAKHKDMENFYFIGVDVSKKKLDFCVLLNGTIVLEEVVNNNIPSIRRFLETFLVDFKTSIDNLLVCAEHTGQYTFPLSIACQSLSCGLWLENPAQIKYSSGFSRGKNDKVDAHRIARYASRFSDNARYYQRPREEIERLKQLRNEQDLYKSDLAKYKGQLSDQREFMLDRVYQEKAQRLERLIEELEKLIKDIDLLVETIIRSCRVLWRQRELLLSVEGVGPSVALCLIIETEAFTRFDDPRKFACHAGVAPFRYTSGSSQHSRNKVSQRANKQIKTLLHMAALSITGRKSGELKAYYERKVKEGKNKMTVINAIRAKLIARMFAVIKKDQFYTPVYS

SEQ ID NO: 49354 - protein, 343 aa, unidentified
MVKISTIGLDLAKNVFQVHGVDESGAVVVRRQLKRAAVEKFFGQLPPCLVGMEACGSAHHWARVIGRYGHEVRLMPPAYVKPYVKRNKNDGRDAEGVCEAVTRPTMRFVPVKSITQQATLAVHGARALLVRQRTMVANALRAALSELGIVAAQGCQGLCELMAKLEEPSEEIPEMMRGALLMLARHWQALNTDERVLERQIAKAARCDRDAKRLMEVPSVGPIIASTVLAKVPDPKVFRSGRDFAAWIGLTGKDHGTGGKHRPGRISKQGDRVLRALLISGASAHLRQQKARGVGDPWLRDLLGRRPYKVAMVAFAAKTARIIWAMLVKGEAYRDRASAPAAA

SEQ ID NO: 49355 - protein, 494 aa, unidentified
MGACELESGDVALAAIPIRKMTIGIAQTLLLIIEWRIAMPKRTAGDRPELRPVNVGAAAIDIGSKMHMAAVNPACTDVPVRSFGTFTQDLHDLADWFKACGVTSVAMESTGVYWIPVYEILEQRGFDVILVNARFAKNVPGRKTDVSDAAWLRQLHSYGLLRGSFRPDAEIATLRAYLRQRERLVEYAAAHIQHMQKALMEMNLQLHHVVSDITGATGMRIIRAIVAGERNPDVLATYRDVRCHSSAETIRAALVGNDRDEHVFALSQSLELYDVYQAKMLDCDRKLEVLIAALSSKGAKPVGKLSKPRIKTKQVNTPTFDVRTALFSVLGVDMTEIHGLGPSLALKLVGECGTDLRAWPSAKHFTSWLCLAPGNKISGGKVLSSRTRRSSSRAAALLRLAATTVGRSETALGAFYRRLATRAGKSKAVTATARKIAVLFYNTLRHGMSYKDPGADQYEQQYRSRVLSNLQRRAKSLGFVLQAIPGEDANPAVS

SEQ ID NO: 49356 - protein, 347 aa, unidentified
MKRSPKFAQENILKYSVGIDMSKDKFDAGIGVINEQQVVKIIGTRSFTNEPKGFAQFSSWVKAKCKWDVDVFFTMEATGVYYESLAWFLYRQDLYVSVVLPNKARRFMESLGLKSKNDKIDAKGLAWMGAVQRLQQWQAPDETFVQLRSLTRHRQSLQESRTVFNNQLDSIQCREFVDPVLVNQLNSLIDQLDKYIKEAEKETKAVVARQPEMMEKVEKITRIKGVGFISAITVLAETGGFSLFKNQRQLVSFAGYDIVENSSGKHVGKTRISKKGNAHIRRILHMPAFCVVKYKEPAFKALYDRVYETTHMKMKAYVAVQRKLLVLIYTLWKNGQDYIPNLPVSLS

SEQ ID NO: 49357 - protein, 347 aa, unidentified
MKRIAVDLAKSVYQVAESVRSGQVVQRNRLNREAFRRYIQEQVEPVEWVMEACGTAHYWGRLAQSLGHQVRLLHPRYVRPYRRRNKTDRNDCDAMLEAARCTDIHPVPVKSHDQQQLQQLHGLRETWKKSRTQRINLLRGMLREAGIEAPTSTAAFIRAASELVDQPEFTSLNRLLHIVLAEINLYEQCMAECEQQLQRWHADDDIVRKLDEVSGIGLLTASALTAAVGKPERFANGRQLSAWLGMTPREFSSGNSRKLGHISRQGNVYVRTLLIHGSRAALLAAQRCQARTPEKLTQLQRWAVQTAARIGHNKAAVALANKLVRICWAVWCHERRFNGNWQSVKPA

SEQ ID NO: 49358 - protein, 378 aa, unidentified
MNDSTKYVGLDVSKEKIAVAVAEEGRNQPQYIAMIPYRPEAIRKQMSRLGDPSQLRVCYEAGPTGYGLYRLLKAMDIYCEVIAPSLIPQKPGNRVKTDRRDALQLAKLYRAGELTPIYVPSEDDEALRDLVRAREDVKEDELRAKHRLTKFLLRNEIKEPSGVRKWTRAYKDWLDKLSFEKSASLVVFQEYLHTLKDIELRLNRLEKEIERQAKEGHHASMIQALQVFRGISIITATSLVAEIGSFQRFQTARQFMAYTGLIPSEHSSGESRRQGKITKTGNRHVRRLLIESAWSYRYQPAVKGALKKRQENQPPQLLGIAWKAQTRLHTKYFRLMGRGKEAGKVVTAIARELAGFVWALTQQLDEPKTVTLNEERTA

SEQ ID NO: 49359 - protein, 592 aa, unidentified
MNPVNIQNPVLIGVGFDTSRYGHHVTFLRADLQPACPAFEFLESRQGYDRVRLQFDQLARPDANVHFHIRLDTAGQYAVNLETFLRALPFPKTLTLGEPLRNAHYRQALFPKRKADPTESLCAARFALVEQPQATPVIAAPFMMLREIAQRLQAEVRQSTRLTNQLHNLLARVFPELALIVPDLQAGYILELLRRYPTPAQLARARSAALAAIAHLHADVALRLQTQAASSVASYQGDDAAALVRRLVKQLQASAAAQADLLKQLTTAYRQLPQANHLDTIPGIGVATAAILTAKIVSIERFQTPAQLVNYFGVFPEEESSGVDKNGVPRPGRHTHMSRKGDDLVRMYLWNAARCGVRYNPAVRALFLRLRARGCRGAVALGQCMRKLLHLVFAIWKSGKPFDANHYPWHSAGAGHEKTAGHNQDVNPEELVVAAVSSKLPPPPDTHQSNPQPPAPPTPAAACGNIDFAALRKQISMEQVLAQLGCLSQLRGAGPQRRGPCPIHGKQQPRQRSFSVHLGKGVFQCFHPPCAAKGNLLDLWAMVHRLALKEAAQHLAQTLGISLPLRTREEEPVAGTRKQTSKSEPTPIRGNP

SEQ ID NO: 49360 - protein, 348 aa, unidentified
MTNQPHIIGVDLGKHWFHVIGLDREGAIVLRKKLSRAQLRAFAATIPRSIVAMEACCGSQYWGRVFAHAGHEVRIMPAQFVKPYVKTNKNDFNDAEAIAEAASRATMRFVPLKTTEQLELQASHRIRRRLVHERTAVVNQLRALLLEYGIVTPVGRETFARRWSQTLGSASEQLSPRLLVLIQRLRAHWVTLDGQIAEATQELTAWADGSPLCQRVATVPGVGPMIATALVSAVGDARMFARGRDMAAWLGLVPRQHSTGGKSTLGRISRRGNGYLRQLFLQGAVSAYLWMKRDRSALGAWLQQLDRRRHRPVVITALANKLVRICWKVLTSDTPFRLHPARPVEHAV

SEQ ID NO: 49361 - protein, 407 aa, unidentified
MELPAIFPCVVGLDVHQAKISACAMIEQPDGTLTVEHREFGAFKRDRRALAEWVRTLGPDLVVMESTGIYWKSPYAALEQVGIAAWVVNARHVKNVPGRKTDVADAQWLATLARAGLLRASFVPPADIRHLRLIARQRQKLSGMLASEKNRLHKLLADAGIRLNVLVSDIHGQAGRAMVKALIEGQPLPEILDLAGRLRASREELFEALQPEQLSDAHRFVLSEIMAHIDEIEARMGRFEQTLLAGLAAWEPQLVLLQTLPGVDRIGAAMLLVEIGTDMASFASAEKLASWVGICPGNNESAGKRKSGKIRKGNAWVRRLLCEFAQAASRSRCGLKEKFKALSIRKGHKKAIVALAHKMLRIIFAMLKNHTPYQDQAVDYEALLVQRNAPRWIKMLLKHGFISPAST

SEQ ID NO: 49362 - protein, 319 aa, unidentified
MAQNDLVVAGIDVAKDKVDVCIRSLSLKRTFASTAEDRRKLASWLRRNKVGKAVMEASGGYEREWAKALRDARIEVRIVDPKRVRSFARSAGRLAKNDTIDAEMIAWFAETFAEARGQAHDVTREQLHQMVHARQALKDMQSKLTSQGEHAVPAAVQRSHAEISKTIAVELVKIEAAISALIEATPHFAELAEIIESVPGIAGTTSAALIADMPELGQANNKIVASLLGVAPYDDDSGRRRGERHIKGGRRRTRNIFYMACLGAATRHNPMLKAFYDRLVAKGKLKKVALTACMRKLISILNTMIERRQKWDAKRYSVS

SEQ ID NO: 49363 - protein, 427 aa, unidentified
MDRCPASTDLWGVAREGNATLEVALPSLRSDGSERGGSVGKVVMGVDPHKRLNAVVVVNAKGKVLARQQFSNSAEGFRELRSFARQWRPRTWAIEGCNGVGKHLAQRLVAVGERVVDVSTRRAALVRVFAGGNGRKNDDVDAHSIALVGLHTPDLPEVREDNRSAALRLMANRRKELVDLRTQCVNRLHRDLVGLIPGGAPRALTAAKAKALLASVRPRDEVGRLRRRLAADQLADLVGLDNKLAAVEAEIRALVKRTPTGLPSIYGIGPVITATILGEIGDVARFRDRHHFASYNGTAPDDKGSAGRPVHCVNLKGNRRLNHAIHMAAITQIRNRRSPGRAYYDRKLAEAKTKKEALRCLKRRISDVIYRQLIADAERQAMAGPGGQTGTTLQSSVTGPTPTTGSSDKPQPGPTPETTPTPLANTA

SEQ ID NO: 49364 - protein, 343 aa, unidentified
MQTVTTIGLDIAKSVFQVHGVDAAGQVVVRRQLKRRYVLAFFEKLPPCLIGVEACASSHHWSRELRALGHKVRLMPPAYVRPYVKRQKNDAADAEAICEAVTRANMRFVETKTPEQQSCLMLHRTRHLFIRQQTAAINAIRAHLAEFGIVAPVGRNGVEELLGVVADASDKRLPEIARACLAALGAQLRMLKAQILEFDRMINAWHRSNETSKRLDEIPGVGPALATALVASVADPRAFRSGRDFSAWIGLVPKQHSSGGKDKLGGISKQGDRYLRSLFTAGALAVIRYAKIHGAKHRPWLTALLARRPTKVAAVALANKIARMAWAMMARGERYKEPVALAA

SEQ ID NO: 49365 - protein, 407 aa, unidentified
MGIWVGVDWGSGAHAVCVIDAKGMVLDRFEVGHDRAGLTALVTRLQRHGAAAAIPVAIERPSGLLVDTLVEAGFVVVPIHPNVVKACRSRYRAVAAKSDPGDAFILADILRTDGHRLRPLVPQSDAIKALRGLVRGRDDLVGTRVALANQLSALLESFWPGAARIFSDLASPIALAFLERYPTPESAARLGPKRLAGFLAQHRYCGRRTPETLLARLRSAPQGGAGDAEGEAKGELVRALARTLQALVAEIAKLSSRIAHAIAALPDGRIVMSFPRAGNICAAQILAELGDVRARFPTEHQLAAEAGVAPVTYQSGKSRGVGWRWACNKRLRAALTCMADNSRHHSPWAADVYRRARARGCDHPHAIRILARAWARVLWRAWTDRQPYDPAKHAAAKPFLPLASTTR

SEQ ID NO: 49366 - protein, 366 aa, unidentified
MKSLVCAPLEMQGSRAAVPRPHPGQDVYVAVDLSRSKWVYGVRWGAAHQRTLSSPAGLAHLQALLAEYGQCTLHVVYEACGFGYEIAWWLEEHGIDGMVIAPSRVERVPGRRVKTDRLDVRAMGRKREQGQLKGIYVPRRAEHERRQLSRTYAQALKECKRARVRVRSLLQEQGRIGPAPRAGWTVYQQWVAAQELAAPVQLCVRELLQMRQAALASARHLKAAILELAAAPEYAPVVATLEQQPGVGTFTAIRLVLELGDITRFATVGAIVNYVGFTPSQYSSGELDQRGHICKTGPGYLRAWLLQCAWAAIRGKNADPELKPCFERLGGRVGRKRAIVAVARRLAVRLRARWLEALAAAVAVAA

SEQ ID NO: 49367 - protein, 393 aa, unidentified
MNSTQNERITQITASTLIVGVDIAKFKHVARAQDYRGVELGRPITFENNREGFEMFVRWFRKIATEQGFKDAIVGMEPTGHYWLNLAYYLGEQQVLCGVVNPLHVKKSKELDDNSPTKNDIKDAKVIAQLVKDGRYAVPNLLQGKYAELREAMKIRDHLSTDLRVVQGRVHNWLDRYFPEFLTVFKDWECKSARQMLSLCLLPHELVAQSEEALLRHLREVAKRGLGMERMRCLKVAASRSVGIREGTELAKLELKLLLTQYELLESKFAELEAKLDELLEQIPHVKQLMAIKGIGRDSIAGFLAEVGDIERYRHPKQIIKLAGLNLKENTSGKHRGQTKITKRGRKRLRALLFRVMMPLVAKNRAFKVLHQYYTKRPTNPLKKNAVTHCALR

SEQ ID NO: 49368 - protein, 405 aa, unidentified
MRFIGLDVHLDFCEVAICEAGRVRSGGRVPTSPQGLAILANSLGPDDHVALEATGNALAIARRLEPHVARVVVATRTELRAITEAKVKTDRRDARTLARLLAAGLLGGCWLPDEQTRALRRRLARRAQLVRQRTGCKNEVHAVLMRTLKGRPPMSDVFGRGGRVWLAELELPADERETVDGCLRQIDFLDGEIAILERGIAEHALGSDAIKRLMTVPGVSLMTASTFIAAVGDIRRFHEPRKLVSYLGLDPKVRQSGSGAARHGRISKQGASQVRQMLAEAAFVAVSTAGPMRAFYERVRARRGHQIAIVAVARKLVVLFWHLLTREQDYAFQRPSLTRKKLRGLELRAGAERHPGRRDLPTKNSYSQHAERARERELSEQAEVAYRRLVTDWKATGTSKAAAVT

SEQ ID NO: 49369 - protein, 316 aa, unidentified
MDGANLTWIGIDVAKAALDLHFLPSGQAHSLTNDSAGHQQLKRLLPEPANCRIVLEATGGYERKLVAHLLDAGYHVAVVNPRRVRDFARSLNLIAKTDRLDARVLARFAEAIKPASIEKTPEKQAEIQQLVARRRQLIDLRTMESNRLETTHAKTARQSIQAILKMLERQINGIEAAIERLVESDDDWRQKTQLVKSVPGLGGVTATTLVADVPELGKLNRQQISALVGLAPFNRDSGKHHGKRSISGGRKSVRCVLYMAALAARRCNPVIKAFADRLAQHGKPFKVVLTACMRKLLVIVNALVKSGQAWNPQSAS

SEQ ID NO: 49370 - protein, 386 aa, unidentified
MTVRVINPPAAMHVETARCLFAIELSKQSWVIGFITPFSSKVSRRTLNGGDWKGLLKLIEEVQTRVSREAGRAVDAMSCYEAGYDGFWLHRLLEAHGIRNYVIDPASLQVDRRARSVKTDRIDTERLLRSLMAYLRGEPKVWSVVQVPSIAEEDARRLHRERDRLISERVQHVNRIKGLCALHGIYDYQPLRPQAMARLEQLRTAEGISLPPRLKSEIKRELQRLELVVEMIATLEAERDAIVEDAASTHINAKKIRDLHKLKAIGPEFAAVLVGEIFHRTFNNRRQLASYVGYAPSPFQSGNVARDQGISKAGNSKGRTTGIELAWLWLRYQPGSDLSVWFSARVGATKGRIRRIAIVALARKLLVALWRYLETGLVPQGAVFKS

SEQ ID NO: 49371 - protein, 349 aa, unidentified
MKNKEVTKQVVGIDIGMESFYVCYKVQYGNGRVVIKGTKSFYNTALGMKDFFLWTEKRNKNLEISLVFVMEATGVYYEELAYFLHYKKQKISVQLAQKIKYFAKSCNLKTKNDKVDSKMIAEFGIEKNLSKIDFWTPPSKNFKMIRDLSREHTSLKQSIVGIKSQLHALNFAHETNKEVVKMKKQQIVFYEKQIISVEKAMRKLVKADSKLYEKIKKIETVKGLAFVSIIKVISEVNGFLLFNNIRQLVSYAGLDVIEKESGKFIGKTKISKKGNAQIRTALYMPAMSAMQHNRTLKTFYERVNEGRTIKKQGVIAVMRKLLILIYTLWKKDEEYIEDYQQKITEKKAA

SEQ ID NO: 49372 - protein, 379 aa, unidentified
MEKSSTLYVGLDVHKDSIDIAVADAPRDAEVRHLGSVAGGVTAVSKSMRRLVSTGHRLHIVYEAGPCGFVLQRHFTALGWRCDVVAPSSIPHPCGERIKTDRRDAMKLARLARSNDLAVVRVPDGADEAIRDLVRARDDAVREQRNGRHRLKALLLRNGTPYAGKCSWTAAHLRWLATVKLEHAAQQISFQEYLHSITESGARIGRLEQAMRDALPDWSLRPLVQALQALRGVQLIAAMTLVAELQDFLRFDNARKLMAYVGLVPGEHSSGPKRRQGSITKAGNSAARRMLVEIAWHYQQGARVSASIATRQADLPAAVTAIAWAAQLRLSAKFKRLVARRVMKTKVVVAIARELAGFVWAIGREVQISGWQGVKPATA

SEQ ID NO: 49373 - protein, 297 aa, unidentified
MYYIGLDVHKKTISYCVKDASGQAHQEGKVGATRCELDAWIRTLPRPWTVAMEATIFTGWIYDHLLPHATQVKVAHPLMLRAIAAAKKKNDRIDAGKIADRLRCDFLPECHMASTQIRDRRRTLRYRHLLVRQMVQMKNRISGLLMETGVSHNKKRLHKVGYFRELLSANEEVQESIRPLLRLSRDTIVRMQKAEYALVSSLQRDPLLAERIKRLRTVPGVGPITALTWALEMGDVSRFRSSRQAISYCGLCGDEKSSAEKVTRTPLSKQRNKHIQRVLVEAAKLAPSAGSHFGSGL

SEQ ID NO: 49374 - protein, 414 aa, unidentified
MDVIVERCAGLDVHRDSVVATVRVPGKGKSRRRRAQETRTFATTIAQLEQLGDWLESFGVTLVGMEATGVYWKPVFYVLERRFECWLLNAQHLHNVPGRKSDVIDSRWCCELVELGLVRPSFVPPPEIRRLRDLTRLRATEVQERSRSIQRLEKVLQDAGIKLTSVASATYSVSARAMLEALLGGVTDPVALAELAKGRLRTKIPQLEEALASRFDVAHHGVLVAGLLAHIDALDQAVATLEARIGIATRPYADLIELLCTIPGVGVRLAEILIAECGLDMTVFPTAAHFVSWAAICPGTNQSGRKRRSGKTRHGDTWLRTALTEAAHAAVRTKNTYLAAHYWQLRGRRGQFKAIGATRHDILIAYYHITRDRVPYHELGPDWLARRHSPEHRTRRLVKQLEALGHRVTLEAAA

SEQ ID NO: 49375 - protein, 339 aa, unidentified
MNITTVGLDLAKNVFHVVCLNEHNKEVKKRMLRRKQVRLFFAQLPSCTVAMEACATSHYWGRELIALGHDVKLIPPQHVKPMVQGNKNDYNDALAIAETVNRPKTTFVAVKTVEEHDMQAIHRMRTQCIRDRTALSNSTRGLLGEYGISFSKGLATLRRKIPEFLEDAENGLSMRFRNLLARRYEQLVELDEHIAFYTKELELLSQQDEACQRLQTIPGFGPIVASAFRSTIGDGSAYTRGRNAAASLGLVPRQYSSGGKNVLLGISKRGDRYLRKLLVHGARTVVLHAANRDDPLSRWINRIRERRGYNRAAVAMANKMARMGWAILRNNTSYGPTLA

SEQ ID NO: 49376 - protein, 338 aa, unidentified
MTQHNIIGIDLAKSVFYLFEINQNGKNVGRHKITRNKLLQCIANKPCATIAMEACSSAHYWAREFSKLGHSVILYPPQHVKKQRRKQKNDYNDAEAIAEVALIGRAFPVQAKSIAQQDVQSLIRMRRLLVSERTRMINQIRGLIAEYGIVIPVGKSAFCKAIPHILEDADNQLSSIMRELIHCQFERYHELNEQIDWFDRKLEQTAKSFDNAQRLMTIPGYGTITSQAVAVWLGSGEQFHNGRDASAAMGLVPKQDTTGGKVQLLGITKTGNTYIRSLLIHGARAALRRAKFKSDKFSKWMLEVAERRGPNRAAVAIANKLMRIAWAIITKKETYQPA

SEQ ID NO: 49377 - protein, 410 aa, unidentified
MEVVHPICAGLDVHKETVVACVRHMNGGKVKTEVRTFATTTGALLELSAWLGAGQATHIAMEATGVYWKPVWHIPADGDFELLLANAAHVKNVPGRKTDVKDAEWLADLLAHGLIRASFVPDQPTQQMRDLLRTRKQLVRERISHTQRIQKTLEDANIKLDTVVTNILGLTGRRILQRLIDGETLPEALAMLAHRNIQASRDRLEAALRGRVTPHHRFLLKLHLDQIDALDAAIASIDKEVEGNLEPFRAATELLSAIPGISQLSARVILSEIGLDMSRFETAGHLVSWAGLCPRNDESAGKRRSTRLRKGAPWLKTILVQCGWAAMRTKGSYFQAQYYRLRSRRGSRKAICAVAASLLTTAYHMLKNGACYQDLGANHFDQRAKTKHIQHLVNRLESLGYDVKILPKAA

SEQ ID NO: 49378 - protein, 342 aa, unidentified
MQITTIGLDIAKNVFQVHGIDASEKVFVRKQLRRSQVLAFFKALPPCLFGIEACATAHYWARELTKLGHQVRLMPAKDVKAYVKRNKNDAADAEAICEAVRRPTMRFVQVKSAEQQGRLMQHRTRDLLMRQRTQVINALRAHMAELGIVATQGREGIKELLTIIASEEDARLPVDAHASLVVLAAGLQAVQTMIGSIEKRIIVQHRSNEASKRLETIPGIGVIGATAIAATVPDPKAFRSGRDLAAWIGLVPRQDSTGGKQKLGPISKQGDQYLRRILVVGAHAVLRRARQQPEKYPWLTQLLARKPFKVVAVALANKMARIAWALLAKGGTYRAPALAAGA

SEQ ID NO: 49379 - protein, 353 aa, unidentified
MKTLFKFTLGVDLGDKQSAVCVIDSTGEIVERLKVPTTMKAFKKYFSSYAGQLIAIENGTHSPWASRLLEGLGCDVLVGNARKLPSIWRSPIKTDFRDAEMLARIARFDPKLLYPIFHRDEHAQADLAIIKARDMLIQARSGLINHVRGCVKSMGCRIPACSAEAFHKRAKDHVPEILKPALMLLLDQIEQLTKKIKEYSRQIENLSKEKYTETEVLRQVTGVGPITALAFILTLEDPARFQKSREVGPALGLVPRKDQSGETDKQLRITKCGNIYLRQLLVNCAHYILGPLGPDCELKRFGERISQRGGKIAKMRAIIAVARKLAVLLHRLWVTGEVYDPFYNQRATMKKAA

SEQ ID NO: 49380 - protein, 304 aa, unidentified
MFGIGIDVSKATLDVAVHEEQFRQFSNDKRGFVTLIRWLKKWPIKQVVLEASGGYEHAVLDALHAAGLPMVRINPARARRFAQGTGRAAKTDRLDATVLAEMAHLLKLTRYVPPAPWQQRLAEFAQCRRHLVQMRVSETQRLRRLVDPALIAIKQRHIAQLSEDLKQLDRAIAEQLEGQPGWKEIGSLKGVGPILVSTLACELPELGSLGGKAIASLVGVAPMNRESGTWHGQRRISGGRAVVREALYMAALTAIRYEPKLRDFYAGLKAKGKASKVALVAVMRKMLVILNARKRDAEVALGSP

SEQ ID NO: 49381 - protein, 361 aa, unidentified
MNRIIKIGMDVHTTNYTLCIFEPSFEHDGTVHCITQVKPEVKNIIHVIETFKKKHENEELNIVCGYEAGCLGYSLYHELKEKGIECAILAPTTMKTEKGGRKLKNDYRDAKMIAECLAYGGYSMREDIKENLKSIKQQIIAFLTRNGKQFEGKSYWTRKHIDWINTVSFSEPLLQDTLNEYMIEYNHLCDRVEILDRQIEEISLKEEYVEKVQQLQCLIGIKTHTALSLIVETSDFNRFKKGNMYSAYLGLIPGDDSSGGHEKKLGITKAGNNHLRRLLVEAAQGYTRGRVGFKSKDLKARQEKCGSEVVAYADRANERLRRKYYRMTLRGKKYNVAKTAIARELACFVWGIMTDHIDLCS

SEQ ID NO: 49382 - protein, 350 aa, unidentified
MDKELYIGVDVSKQTLDLAYYDGESIDWKKAHIKVSNNNAGFKKIGSWVAKVSKGFDIVLFCMEYTGLYTQNFRLWLEEKHYIYRMVEPRKMHRFEPDLDDGLRSLDRIKTDELDSFRIAIYCEQNHRKILRNPSKLPPPVYFKLKRLLAERKQTVKQSVLYKQQLHDICAYDTDLSVERKNGQLKTLNDALKGIDNEIDMYIKEDADISKNFSLLTSIPGIGRVVALETIVLTENFMAIDNPRKYACYIGVAPFKKESGTSVRKGSSVSKKGFKQAKADLSIACLVCMQHIPNIRDYWERKRKEKCSGIVFNAIKFKMIPRMFAVIKRGTPYVETDNYRNGKNKQPGVN

SEQ ID NO: 49383 - protein, 355 aa, unidentified
MPFAGVDAHKRYSRVVVKDETGSLLCRASLQNDVASFREFFGAIDGPTKAVLEAGRDWGVIYDLLEGIEVEPVLANPLKTRAIAEARIKTDTVDATILADLLRADLIPVVHVPSREVRSQKNLLRQRLWLVELKTRIKNRIHNILDRNHAGPPPAADLFGKAGRRFLDQLHLPSPDDRLLKAHLELLDLVQNQIGRSEEWIEEALSQRPELAIMRTLPGFGKILAAVVALEVDDVRRFHHPSKLCAYAGLVPTTYASGGKVRHGRLLPSCNRWLRWAFVEAAWAAQRHSAYCHAYFERIKRRKGANCAISALARRLCEITWHCLTGSRPYEERKMTATTEPARSPSKVLGRLGTS

SEQ ID NO: 49384 - protein, 452 aa, unidentified
MVQRSGLTRGDRRRNDRIEVLRRVVTPDRAVLAIDLGEDKQVAALMDHDGRVLGRRTVTVKAYGLGALLGWAAGQAARYGFVSVVVGCEPTGHRWRSVMQLADDAGLGFVCVQSLKVHRAREADDYTRDKTDHKDAVLIGKLIARLECYLPERADADWARLRHLGARRARLVTEATRCQQQIADLLGCCWPAALAAAAKPLDSTTWLACLSVVADADADLAALAVAGLDAFTAAARARLARFGVSRLYHRIVRAFFTALSDPSGVVAQRPGALERVGLVLADWQHINARLAEVEARMVGVLDAMGLTALVTSIPGLSAVGAAVILAETGDLSRFASARSVVKHAGLNPAENTSATFRGQTHLSRRGRPGLRLAAWRAVWGALPHNPVLHAKFTHLTRRDTDRLHAAQARAACAATLLRWLYAIVTRRQPFQPDIAAGLRRAGARPTSTAVAA

SEQ ID NO: 49385 - protein, 381 aa, unidentified
MKKDSIAKLQGTESQKRRMAAKQRLTVGLDLGDRSSRYCILNEAGGKAIEDQLPTTKAGLNSIFAKMAPCRIALEVGTHSPWVSRQLAAMGHEVIVANPRKVRLITQSVKKNDRMDAEQLARLARVDPKLLAPIRHRGPEAQGDLAVIRARAELVDCRTALINTARGLAKPMGERLKSCDADYVKESLADGLSEATQNAIRPLLKSVEEITKQIGVYDKKIQEIEKRYPETKVLKQVNGVGTLIALTFILTLEDAERFAHSREVGPYLGLTRKLRDSGESQPELGISKAGDMLLRRLLVQAAHCILRDGAPDSDLKVWGLTKVQAGAGKKGSKRRKKKAAVAVARKLAVLLHRLWVTGEVYDPQYNRKAVEAAKGKGKAAA

SEQ ID NO: 49386 - protein, 345 aa, unidentified
MHIASIGIDLGKTTFHLVALGERSKVLLRKKFSRAQLLAYTATLPHSLIGLEACAGAHFMGGRLREQGHQVRLIPAQFVKPYRKSNKNDFLDAEAIAEAVTKQNMRFAQLKTQEQLDWQAMHRVRDRLVQRRTALINEIRGFLLDRGITFPAQPIHLRKNLPTVVEDAEQNLSPRLRWLLNRMWQEWKQIDTEVQAITEEIERISKDDARCQQLRQIPGFGPLISTATVAAIGNGAAFRRGRNFAAWVGVVPRQHSTGGKQKLYGISKRGNVYLRRMLIHGARSVLFRVKYDTGGFGQWVRRLAQRAPSNKVVVAIANKLARIAWAVLSSGRDYRHQPLPHPAVA

SEQ ID NO: 49387 - protein, 351 aa, unidentified
MSQNPNTAIAIVGIDIGKNSFHIVGLDQCGAIVLRQKWSRGQVEARFANMPPCLIGMEACVGAHHLSRKLKALGHDARLMPAKYVRPYSKGQKNDFRDAEAIAEAVQRPTMKFVATKTAGQLDLQALHRVRERLVSQRTGIINQIRAFLLERGVAVRQGLRFLRAELPRILATPPDVLSPRMVRIIEDLAGDWRRLDERVQNLSDEIETVARQDGGCERLMSVPGVGPIISSAMVAAIGTGDGFSKGRDFAAWLGLVPKQISTGDRTILGKISRRGNRYLRVLFVQAAWVVLIKPKSWERHGLKPWIDAAKKRLHRNVLAIALANKLARIAWSVLARGRSFEARPAVASAA

SEQ ID NO: 49388 - protein, 349 aa, unidentified
MTEAYDGRQVVGMDLHRRRSVIVRMTEDGRKLETVRITNSPAALRAVIAKAGKNPRVIIEATHGWYWAVDVLEAAGAEVHLAHPLGVKAFSYRRVKNDERDAADLADLLRMGRLPEAWIAPPEIRELRELTRYRHQLVKARTSVKDQVHGVLAKLGIPVTHSDIFGVHGQAWLDELPMPQPYAGKVASLRQLAGDLAGEITLLDTVLADLLAGHEGYAAIQQLPGIGPVLAAVIVAEIGDIRRFPRPGQLGSWAGLTPRHYESDTKVIRGHVTKQGSRMLRWAVTEAIQRQPAGSRPREVKDAIIARRSKEAKNIAKIAAARELLTLVFYGMRDGRIRRPARQQPPSAA

SEQ ID NO: 49389 - protein, 438 aa, unidentified
MSNKIIFNLDELFISLGIDVGADFSWMSIALPNQQLVGKPFKILHNSMNSLLTTVSKIKEAEELYSLESRIFLESTGIYHYPLFCYLRDKGFNCSVINPIITKNSTNINIRKVHNDRFDSKKAALVGLKPDLKVSLMPSDLALNCRNLCREYYDLMDNRSAYVNKLQGELRMVFPQYLDIFSKVTINTSLTLLETYTSPSAFLKADKQEIIDIIKSTARFGLTYAQNKYNAIIQAATDANQFGYIIDSNIKRIRLYISFIRKYDEEINSILESLHELVDANEDADFVKQIHLIETFKGAGFLSAVSIMGEIGDFSAFSKPKQLFAYFGLDPAVKQSGKFEGTKVQMSKRGSAIARRVIHTLTLQSISISRNGEAKNPVLREYYLKKCDSKPKLVAMGAVSHKVCNMIFAILRDNKPFKIIAPQEHIKQYNAAKCDIAA

SEQ ID NO: 49390 - protein, 323 aa, unidentified
MTRIICGVDISSTSLDARIGREGAFAQFPNTTEGINALAGFCQAHQVELVAMEATGGYEQQAFAQLSAQGLPIAILNPRAVRQFAQSMGSLEKTDRIDAGMIAWYAEVKKSPPACLAPESQQHLRALVTRLRQLTDIRTAQLNQQRLVTDRAVKASFKKLLAVLERQIHQLEQRIAALIAEDPLWRQLNQTFRTIKGVADRTVCRLMAEMPEIGTLSNKTISKLAGVAPLASDSGKHHGKRAVRGGRASVREILFIVASVVGRHEPDFIAFQQRLSAAGKPRKVIRIALAHKLLVRLNAKAREVRQRMAALQPDRMALPAGSL

SEQ ID NO: 49391 - protein, 343 aa, unidentified
MNKFTVIVGIDVAKKTLAVCLFCQEKVEDFTLDNDLKGLSDLVNKLYKIEPDPGKVLICCENTGHYSEKLAMIATGEGYFVWVVSPVVISRYEVNLVRVKTDLDDARKIKDFAFAHQHLATQYQIPDAQSQKLKELFQCRKHYVDARQRETNFLKSSQDAANPSGFCLDMCKRTIAELNAKVIEIEKIIKGLITKTPEYNRQYQLLKSVPGIGPISAERFLYVTECFTKFKTWKQLACYIGSAPFEHQSGTSVKRKPRTSKKRHRSFKADLFEGMTSTATRKGQFYYAYYTRMIALNYEHPKIINNIINMALKVIYTLIKNDTPFDKKIFLSQKKSWINLEMS

SEQ ID NO: 49392 - protein, 322 aa, unidentified
MSSELPQDRPSVVIGIDVAKDKLDVHAWPTQQTLSVPNTPAGIDALVAELTPLRISLIVIEATGRYERRVAFELMGRGYEVAIVNPRQPRDFARASGQLAKTDAIDAKILAQFGALIGPRKSEKPSENQVRLDELVTRRRQLVEMITAERQRMEHVFDKRLRGSIKNHLDSLADHRDHVEKQIADLIERDDDWRERLTVLKSVPGVGAATAATLIAELPELGALNRQQIAALVGVAPMNRDSGAMRGQRHIAGGRKSVRDMLYMATLTARSHNPLIKAMAARLSRAGKPFKVMMTACMRKLLTMLNVMIRSKQPWRSPTCPA

SEQ ID NO: 49393 - protein, 420 aa, unidentified
MPATFSIPRTNDLERAMTAVMIGVDPHKGSHTAVVISPAEEPLGEIRVRASAAQAGKLAEWASAWPERTWAVEGAAGVGRLLAQQLVAAGERVLDVQPKLASRVRLLQAGDTNKNDPNDALSVAIAALRSRTCREVAAEDHPAVLKVWSKRHRDLARLRNQVACRLHAVLCDLVPGGIAKEISAAQAARILGQATPSGAVEVARAELAAEFLEDMRRLDAQLRGTRKKLAAAVKVSGTTLTQVFGVGPVIAGTIIGDIADVSRFPGRDHFASYNGTAPVEVSSGNRKIHRLSLHGNRRINHAIHMAAITQLRHKHSEGRAYYEKKLAEGKTHKEALRSLKRKISDAIFARLQADARQAAAAAPKGPGGHPGNDSASSAAGSHPARQLFGQATPGPGTSLRPATPAGTPSKPVPRKTQATT

SEQ ID NO: 49394 - protein, 332 aa, unidentified
MMAQNDRVVVGIDVAKDKVDACIRSLSQEQTFLSTAEGQRALIRWLRKHKVGKAAMEASGGYERDWAKTLREAGIEVRIVDPKRVRSFARSAGRLAKNDAIDAEMIAWFAETFTDAPGQAYDAAREKLVQIVNARQRLLDLQTSLQNRGEHSTPEVVQKMQARLLKTIALEVAKLEAAIAAMIKVTPHFAELAEIIESVPGLGKIASAGLIAAMPELGQVSDNIVAALLGVAPYDDDSGQRRGGRHIKGGRRKVRNLFYMPCLGAATQHNPVLKAFYDRLIAKGKEPKVALTACMRKLIVILNTMIARRQKWDVTRYKVSDPARLPPSACPA

SEQ ID NO: 49395 - protein, 340 aa, unidentified
MNGLYAGCDLHGNNNLIGIIDGEGKRVFKKKLPNDLAMVRDTLKAFQEKLVGIVVESTYNWYWMVDGLMEKGYKVHLANPSAIQQYSGLKHSDDQHDAFWLAEMLRLGILPEGYIYPKEERPVRDLLRKRGHLVKLRTSLIISLQNILSRNLGRRVKVNDVKALKEDRISHLLEKNEDLALAGRVSKEAIDHLTGQIRKIEGVVEKKIRLKEEYRYLLTLYGVGKILSLTIMLETGPISRFETVGDYVSYCRKVPSQWTSNGKRKGSGNSKNGNKYLAWAYSEASEYARQLYPEPRAYYNRKMQKTNAAVAHSALANKLSRAGYYVMRNQVPFEPEKLFG

SEQ ID NO: 49396 - protein, 340 aa, unidentified
MDVRTLGNDLAKNLFQVHGVDGQGRTVVQRQLRRRQLMPFVAQLQPCLVAMEACGGAHHWAREIARRGHEVKLMSPRLVRPYVKSNKNDARDAEAICEAVGRPSMRFVAVKSQAQQDMLALHRVRSLLIRERTALMNQMRGLLAEYGIVVAQGATPLRRALALIMEDRENGTSELLRELLAEMSERLRLFEERLKRYDRRIAEFARADERAGRLMAVEGVGPLTATALIAAVGNARQFRSGRELSAWLGLVPRQYSSGGRSVLLGISKRGDRYLRTLLIHGARATLRFAARKRDPRSRWIGAVRERRGANIAAVALANKNARVLWALLARNEDYRVPAAA

SEQ ID NO: 49397 - protein, 458 aa, unidentified
MGACELESGDVALAAIPIRKMTIGIAQTLLLIIDWRIAMPKRTTGGRPELKAVNVGAAAIDIGSKMHMAAVNSACADVPVRSFGTFTQDLHDLADWFKACSVTSVAMESTGVYWIPVYEILEQRGFDVILVNARYAKNVPGRKTDVSDAAWLRELHSFGLLRGSFRPDAEIATLRAYLRQRERLVEYAAAHIQHMQKALMEMNLQLHHVVSDITGATGMRIIRAIVAGERNPDVLATYRDVRCHSSIETIRAALVGNDRHEHVFALTQSLELYDVYQAKMLDCDRKLEVLIAALNNKGEKSVGKLSKPRVKTKQVNTPTFDVRTALYGVLGVDLTEIHGLGPSLALKLVGECGTDLRAWPSAKHFTSWLCLAPGNKISGGKVLSSRTRRSSSRAAALLRLAATTVGRSDTALGAFYRRLSSRAGKSKAVTATARKIAVLFYNTLRPWHELQGSGRRPL

SEQ ID NO: 49398 - protein, 346 aa, unidentified
MNVTTIGIDLAKNIFQVHGVDSHGHAVLRKQLKRPQLLPYFANLPPCLVGMESCCGAHYFARRLEGFGHTVKLIAPQFVKPYVKTNKNDAADAEAICEAVARPNMRFVPAKNMEQQSVLMLHRAREGFIGQRTAQVNQLRGLLMEFGIVFPKGFTVARTTIPTILADETNELPPRARQLFRRLFDHVRELDRQAKEIEEQIQIWHRDDPASQRLRKIPGVGFITATALTASIGDVRAFRNGRQMAAWLGLVPKQYSSGGKQVLRRISKRGDVYLRKLLVVGARAVLRHLKAKPEQEPGWVDRLLTRRHSNIAAVALANKNARIAWALLAHDREYSADYHRGQAQAA

SEQ ID NO: 49399 - protein, 325 aa, unidentified
MNQPILYCGIDMSADSFDICYLQPGGELASDKLPNTSSGFKQLLKLCPPNYRFVMEATGAFHLPLCFFLHEKKCFYSVVNALQIKRYIQMQLERSKTDKKDARHICMYGIERHPNQYQMPDQQYFECRTINNAIEAITAHIVSYNNKIYAARKLKIDADVTLKSYQQIVKTFKNELKKLQAELDQKLIEWQPDLLKQIKSVKAIGKRVAASLIVFTQGFRHTHSYQQLISYAGLSPKEFTSGKSIRGKVRISKIGGKQLRHILYMAALNAKKTNPACKALFDRLVLKGKNKKLAIIAVCNKLLKQVFAVVKSGVPYSDQYYKIIA

SEQ ID NO: 49400 - protein, 409 aa, unidentified
MEVIYPRCCGVDVHKREVVACVVSTGPDGTPSKTIRAFGTMTPDILALADWLATHEVSHVAMESTGVYWKPIWNLLEDQFALLLVNARHVKAVPGRKTDIRDCEWLAELLRHGLLTGSFVPDRPQRELRELTRYRTSLVRERTAAANRLQKTLEGANIKLASVATDILGKSGREILAALVAGETDGAELAQFAQGRLREKIPQLARALVGRVGLHQRFLVAEQVAHVDFLEAAIARVSTEIAERVQPDEDAITRLDTIPGVGRSVAEVLVAEIGPDVGRVPSPQHLASWAGLCPGNHESAGNRRSGRTRKGSPWLRACLVQAAHAAARTKGTYLAAQYRRLATRRGRATAAVAVAHSILIIAYHVLTEGTVYCDLGGNSFDERDRQAVERRLVHRRQGLGYTVSLIPAA

SEQ ID NO: 49401 - protein, 355 aa, unidentified
MKIFVGIDIAKLNHFAAAISSDGEILIEPFKFTNDADGFQLLVSKLESFDKNSIIIGLESTAHYGDNLVRYLVAEFYQVCVLNPIKTCQMRKNNVRKTKTDKVDTFVIAKTLMMQDDLRFVSFYDLDMMDLKALGRFRQKTIKQRTRLKIQLTTYVDQVFPEIQYFFKSGLHQHAVYALLKEAPSPKEIASMHMTHLANLLKVNSHGHFTKEQAKELRVLAQKSVGANDSSISIQITQTIQQIELLDSQLEKIEAEMTDIMRFNDSVIMTIPGIGYINGGMILGEIGDIHRFSNPNKLLAFAGLDPSVYQSGNFQAKTTRMSKRGSRVLRYALVNAAWNVVRNNATFKLIMMPRG

SEQ ID NO: 49402 - protein, 343 aa, unidentified
MQAITTIGLDIAKSVFQVHAVDAKGNVVLRRQIKRRYVLAFFQKLPPCLVGIEACASAHHWSRELQALSHTVRLMPPAYVTPYVKRHKNDAIDAEAICEAVTRPNMRFVATKTREQQSCLTLHRTRHLLIRQQTSVINAIRAHLAEFGIVAPVGRNGVDQLLGIVADASDKRLPELARACVAALGTQLGTLKAQILQFDRLIMAWHRSSEASRRLDDIPGVGPALATALVATVADPRAFRSGRNFSAWIGLVPKQHSSGGKNRLGSISKRGDRYLRFLFVAGALAVIRYAKIHGTKHRPWLTALLARRHTKVAAIALANKIARMAWAIMAKGEHYKEPVALAA

SEQ ID NO: 49403 - protein, 372 aa, unidentified
MILVGVDVAKDKHDCYIMTSEGEVLFKSFTIANNMEGFNQLYEKILSVIDNFDNVKIGLEATGHYSYNILGYLLDKGLTPYVINPLHSNLYRKSLSLRKTKTDKVDSRIIASMLMSDVSLKPYSNTLYHNEELKSLTRYRFTKVQERAKLKISISRLVTILFPELEKLVPTLQMNSIYALLYEFPSAHAISKAHLTRLTNLLNTTSKGHYTKDKAVLIREAAKNSIGSNMPAKSLELKHTIKLIKELTSEINEIEEEIKIIMNKINSPILTIPGIGLSTGAQILAEIGDFKNFSSPDKLLAFAGLSPSTYQSGNMYSSNAKMEKRGSKYLRFALFNAAIYVSYWEPTFSQYLKKKRVEGKHYYVAISHVVKN

SEQ ID NO: 49404 - protein, 389 aa, unidentified
MKIYVGIDIAKLNHFAAAISSDGEIIIEPFKFTNDADGFQLLVSKLESFDKNSLIIGLESTAHYGDNLVRFLVTELYQVCVLNPIKTCQMRKNNVRKTKTDKVDTYVIAKTLMMQDNLRFVSFFDLDMMDLKALGRFRQKTIKQRTRLKIQLTTYVDQVFPEIQYFFKSGLHQHAVYALLKEAPSPKEIASMHMTHLANLLKVNSHGHFTKEQAKELRVLAQKSVGANDSAISIQITQTIQQIELLDSQLEKIEAEMTDIMKFNDSVIMTIPGIGYINGGMILGEIGDIHRFSNPNKLLAFAGLDPSVYQSGNFQAKTTRMSKRGSRVLRYALVNAAWNVVRNNATFKAYYDAKRAEGRSHYNALGHCAGKLVRVIWKMLTGEVEFNLE

SEQ ID NO: 49405 - protein, 346 aa, unidentified
MPYSTTVGVDLAKNVIQISVVSGRGKELSNRSLTRRKFAEFLGKQKPSLVAFESCASAHYWARAAKRHGHEARIIPAKAVAPFRQGHKTDSNDALAVAEAARRPNIKEAPMKSVEQQGLQAMQRSRELLIQECTALSNHLRGLLLEFGVTIPQGFASLLRALPEILEDGDNELPDLYRPTLHRMYTRLVELREDIDAMTKEIGLLVKQHPVCQRLTAIEGIGPIGALSLYAVLGTGNAFTKSREFSAYLGLTPRQFSSGGKTNIVGISKKVGNRRLRSILIQGARAYVYRMKEPRSLKDCWLKDLIERAGPNRAAVALANKNVRTAWAMVTQGTEYQRRLQLEMAA

SEQ ID NO: 49406 - protein, 361 aa, unidentified
MMIIGCDYHPAFQQIAFVDTESGELQERRLQHCEEAEKFYRNLAAQGIKVRVGMEASGHARWFERLLAELNFELWIGDAAEIRTKRVRKQKTDRQDAQLILKLMLKDDFPQIWVPSWENRDLRQLLWHRHRMVQARTRIMNQLQAVALNEGLRCKKRLWREAGREQLEAIRLAPWASRRRRDLLELLDRLNPTITDLTQTIEQEVEKCPEAQRLMTHPGVGPLTALAFVLIIGTAERFQCGKQIASYLGLVPLEESSGNRRRLGHITKQGNALLRFLLVEAAQVSARSIPEWRNKYFHLAMRRGRKIAKVAMARRLAVQMFWIAVQMFWMWRKGWEYEQVRKFGSHAGQPGNRDGVHSNTE

SEQ ID NO: 49407 - protein, 315 aa, unidentified
MSAPTFVGVDVSKLLLDVAIRPSGELWQFGYDDRGIAALIKRLTPLQPQLVILEATGGLEAPLVAALSHAGLPVVIVNPRQVRDFARATGRLAKTDKIDAHVLALFGERVQPEVRPLPDETALAFHALLTRRRQIIGMLSEEKQRFSQAAKGPLRTGIAKHVRWLERQIKAVDADINDTMKKSPIWRAKDALLQSAPGVGRVLSCTLLAGLPELGRINRKEIAALVGVAPHACESGSLRGRRMIWGGRAAVREVLYMSALAATRFNPVVRAFYKRLLDAGKPKKLALIACMRKLLVILNAMVRENTPWRESLSML

SEQ ID NO: 49408 - protein, 370 aa, unidentified
MGNRSMFVGLDVHKETIDVSIADGERQGEVRHYGVIASDLEPLDKVVRALRAPDRRLHFVYEAGPCGFGIYRHLTRRGEDCVVVSPSMIPKRSGDRVKTDRRDSQMLARLHRAGELRAIYVPDDTDEAIRDLVRAREDAVSVGTQAKYRLKAFLLRQGRRYPGRDGWTLPYRRWLTDLSFPSAAQHIALQEYRDAIGETEQRIDRLTEQLRQLAPTWRWAPVVAALQALRGVSFLTAVALVAELGDLTRFRHPRELMAYLGLVPSEHSSGASVRRGAITKAGNPHVRRLLAESAWAYQGIPRIGRQHAYRQEALPKIVCDIAWKAQLRLTTRFRRLVARGKAKPKVATAIARELSGFVWAIAQEVSPTPR

SEQ ID NO: 49409 - protein, 377 aa, unidentified
MYRILKIGMDVHTTNYTLCAMEPVIGEEDRIFATIKVTPDYKNILMFIESLKMKLGIDNKYDIQCGYEAGCLGYSLYNQLTAAGVKCVILAPTTMLTPQGVRIKTDARDALMIAQCLSYGGYHAVYIPTEEDDSVKEYLRMRNDHKLALKKVKQQINAFCIRHGHHYEGTKWTIAHMKWLKQLEVKDLYRETLEEYMASYEEQEAKIERFDQRIEEIAAQERYRERVKRLGCFLGVKTHTALSLIVETGDFMRFAKGNVYAAYLGLAPGENSSSDSINRTGITKAGNSHLRLLLIEAAGGICKGAVGHKSKDLRARQNGNTAEVIAYADKANTRLRSKYYKMIRHGKKRNVAVAAVARELACFVWGMMTDNIGVKAA

SEQ ID NO: 49410 - protein, 427 aa, unidentified
MKQNHPSTNFAATLGLDWADKKHDVWIQPADGGKPEHRVIDQTPEALHQWVAQMRARFPKGPIAIALETSRGPVIAALGGYDFIVLFPINPAMLCSYRQAFCVSGAKDDRTDAMLLEEYVRLHPAKLVPLEPDTELTRKLARLVENRRGLVDERTRLVNQLHSLVKTYHPLVEVLFEDLALPLVAHFLLKWPDLAALQKATLANVRKFFYGHNCRSEKTMEERLQAIQKAQPLTQDPALIEPAVLQAQALAGMLQVLHQSIDEIESKIEQTTDAHPDAALFRSFPCAGQALAPRLWVAFGTNRARFESAQEVQQLYGIAPVRKQSGQSEVIHMRYRCPKFVRQTFHENAGHVVRKEGWAKTFYEQQRAKKKGHHACVRAAAFKLMRIYFRRWKDNKCYDANLYEEALKKHGSGLASQLKKTDPTNGE

SEQ ID NO: 49411 - protein, 398 aa, unidentified
MDVHKETVVVTIRGKGIKSVTKSYSTFTSSLIKLKEWLKKHGITHIAMESTGIYWKPVFNVLGDDFVILLVNARHVKNVPGHKTDKKDSRWLVKLLLSGLLKGSFIPERPFRELRDLTRYRKKLVQQVTADKNRFLKILEDSNIKLSMVLSNVFGVSGTKMINHILSVESYRPEELMQYVHGKVKASRADIQEALTGYITDHHKFMLRTILGNMAKTESTIAEIDQKLDAVLEPYNLERELLETIPGVGREVAIAIIAEIGTDMSRFPDQKHLASWAGMSPGSNESAGKNKSGRITHGNKHLRGHLTEGGWAAAKTKNTYFSSKYKSLVGRRGKKKAIIALGHKILIAAYFIIKDKVEYKELGEDYLDNFRKDKLIAYYRKQIERLDPNLEFDKEEAA

SEQ ID NO: 49412 - protein, 329 aa, unidentified
MDSPSPFPVVGIDVSKATLAVCYHLDDQLKHLEVSNSKAGFQQLVKTCGAHCRFVLEATGTYNLALAYYLHEQGGQVAVLNPLVIKRFIQMYLSKGKSDRKDAQWLLRYGQQQPVNVWQPDETVLVECRQLEQVSEQLLKQKTMVSNALEALQRQPIISKRALKRLQQMRKTLTKQVEAVGAELLVLLEQRFAAEMTLLCSIPGIGRKTAGMLLLFAGGFTHLDNYRQLIAMAGLSPREHTSGTSICGKVRITKMGGGLIRGRLFMCSFSAKKTNAACQALFDRLVAKGKNKKLALIAVCNKLLKQAFAIVKSGVPYQADFSSKLVPTL

SEQ ID NO: 49413 - protein, 398 aa, unidentified
MKRYIGLDVHKNFIMIAAVDRGQETIMAPRKVNMTQFDDWIAGHITPEDTVALEVSNGSWEIHDRLRQHTKNILVANSNKLKVISRSSVKTDKRDAMVLARLTSANILPTIWVPPEAVRELRSLIAQRKNHIKARTRVKNRMHGILMRRHIYRPPENIFSDKYITWWQNLQITKVEKLQVKQGLEQIQFLRHQIKELEECIVDLSVEPPWKEQVVYVLQIVGIGVISAMTILSAIGDIYRFSTAKELVGYSGLGSRVHASGDSFRTGKISKTGRKELRTALVECAWVAIRFSDHWRSKYDELIKRKDPQKAITIIARKMLVVIWHVLTKKAKNIHVSAETIARKILKWAMSYRLATKQGVSRPAFVRRELDRLKVGSQLKFLIYGNRKFVFPEPQLAS

SEQ ID NO: 49414 - protein, 362 aa, unidentified
MTIVTEHDQLRRVIVGVDTHKDVHVAAAIDDRGALLDVREFVASPAGYLELIAWSEAATAGLGADVLQYGVEGTGSYGAALVTAIEPSGRQVYEVSRPNRRDRRLRGKTDSFDAENAARAVLAGTATATPKSANGTIEMIRVIKVTKAAAVKARSQAMISLKHLIVTAPAELREDLRNLTRMALIRRCAGLRPGAVTDPRSAVKYALRAMARRWLSLDEEIKEHESRLDELTTTVAPLLRQGCGIGADSAAEILSLFGDNPERLRSEAALAKLCGVNPIPASSGKTNRHRLNRGGHRHVNAALYRIVIVRMRLDERTKTYVARRIAEGKTKAEIIRCLKRHLIREIWRNTRHLRHQTLTLAA

SEQ ID NO: 49415 - protein, 353 aa, unidentified
MKPKMEFDTASLAVIGVDIGKEVFHLVGVGVDGKIAFRKKIRRLGLKDAFEKLPPCIVGMEACLSAHFVSRALRALGHQPRIIPAIYVKPFVKGQKNDYNDAEAIAEAALRPNLRFVQEKSQDQLDLQACHRVRSRLVSRRTATINQIRAFLIEQGIAVRSGLRTLRKSLFAILENRKDEISPRTAKLILGLYGDWCGLDERIETVTEEIEELSQVEAKCQRLMTVPGIGPVISTGLVAAIGTGEAFERGRDFAAWLGLVPRQYSTGGRSVLGRISKRGSKYLRTLLIQAAKVLLMRPHNWPRYSFGAWLKAASQRLHKNKLAVALANKLARIAWSVLRNDKAFHTHLVAEAI

SEQ ID NO: 49416 - protein, 392 aa, unidentified
MIYVGIDVAKDKHDCCIFDSDSNNFIERITIANNADGFNTLLETALKAAGGDIDSIRVGLENTGHYHITIFDFLVQHGLNVVSFNPMLTGQCRKRASIRKTKTDKLDAETIAYMLIEDYPHSNALYHNSELKSLTRYRFKLISQCSAQKVSLSRLVHIVFPELAGFVSTVNCVSVYALFSKYPSAKKIASARLNTIVKLLCDASKGRIKAETAQNIYNAAKRSVGITNTALELEIRHTIRYIKTIEDDVAEIDEELNNYLEDADEPLLTLPGIGTVTAAMILAEVGDFNRFSNPDQLLAYAGCSPTTYQSGKMYSNHAKMEKRGSRYLRYALFCVAKAVVRYEPTFMKYYDKKRSEGKHYYVVISHVMKKLVRVIYHLQTTGETYKTQEILS

SEQ ID NO: 49417 - protein, 411 aa, unidentified
MRIIGLDIHRAFAEAVAWQEGKLKRIGRIDMHRGRLTAFAASLLNTDVVVVEATGNAAAVAAVIRPHVKRVVIANPKQVRVIAHAKIKTDTIDAGVLAQLYASGFLPEVWMADEATQALRRQVTRRNQVVRQRSRLKNIIQSILHAHLIPACPTADLCGPKGRAWLSEQILPDDERSAIERHLREFDRLAEDLRVIERDLARSALADESVARLMTIPGIDMVLALALAAAIGDIQRFEAPEKLVSYLGLNPSVRQSGPGPAHHGRITKQGRGHARGMLVEAAWAAARAPGPLRAFFLRVSSRRGQHVAAVATARKLAVLIWHLLRKGESYLWARPALHAKKMRELELKAGYPAARGQKGAAHAYNLKSHRDQERRWVEQAEAAYTRFVAGWNPRGPRSGKVRTGALKEERR

SEQ ID NO: 49418 - protein, 316 aa, unidentified
MTFVGIDVAKAELVITSRAADESLTRWTEPNTPAGIEALVARLRGERPKLIVLEATGGYEREPAAGLAAAGLPAVIVNPRQVRAFAKATGQLAKTDRIDADMLALFADRVRPEWRPLDDEATTDLAAVLLRRRQLSDMLTAEKNRLGLARRPVRASLKKHIAYLERELRITETELRQRIEDSPVWRVADDLLQSAPAIGPVTSQTLLAELPELGRLGHKQISALVGVAPMADDSGGKSGKRVIAGGRARVRQVLYMATLAAIRHNPVIRQFYQRLVAAGKPKKVALVACMRKFLSILNAMVRNQTPWSATFATARS

SEQ ID NO: 49419 - protein, 347 aa, unidentified
MRFYTTQHQFSCGIDLHARSMYVCILDGAGTIVFHKDLPATPEHFLRAVAPYRTDVVVGVECIFTWYWLADLCTREGIPFVLGHALYMKAIHGGKAKNDRIDAHKIAGLLRGGLLPMAYVYPAAMRATRDLLRRRCHLMHKRAELLTHIQNTVSQYNLPALAKKIAYKANRVGVAEQFPDPSVRASIAMDLALIDHYDTLLTAIELTIVRTAKQHDATAFYRLRSVPGIGKILALVILYEIHDIARFPRVQDFASYCRLVKCAKESAGKRLGTSGKKIGNAHLKWAFSEAAVLFLRQNAAGQQYFAKLTRKHGKGKALTVLAHKLARAVYHMLTRQQAFELSRFLPA

SEQ ID NO: 49420 - protein, 422 aa, unidentified
MGKSVAELGATRFVGIDWAAEEHAVSVLDESGRGVMAFTIAHSREGLETLVNRLAKLGTAGAVPVGVERGDGRLVDRLLEAGHPVVKVSPKAIKAWREAEVASGAKSDAADAEVIAEYLRLRQHRLSVVEPFSQATRALRAVVRARDDLVHQRVATANRLEACLDAYWPGAKRLFCDIESNIALAFLEDYPTPASAARLGERRMAAFLHRHGYSGKRSPGELVERLRGAPAGIAAGPEAEARRVAMLGYVAVLRALNRSIKELEGAIAAQLGEHPDAVIFTSLPRSGRLNAAQMLAEWGDCRQAYDGPDAVAALAGATPVTKLSGKHREVAFRWSCNKRFRSAITTFAGNSRHSSPWAADIYERARARGCDHPHAVRVLTRAWIRVIYRCWLDGRAYDPAAHGAAIRLEANVTEIPVEKSAA

SEQ ID NO: 49421 - protein, 414 aa, unidentified
MQHASNHTLPAAGPGHRTAGVDWARDDHAAAIVDASGQVVERFSVAHTATGIRDLVRRLSKMTAHEVAIERPDGPVVEALLEAGLTVVVISPNQLKNLRSRYGSAGNKDDRFDAFVLADTLRTDRARLRPLVPDSPATVALRAACRARKDLVAHRVALANQLRAHLQRAFPGAVGLFADIDSPISLRFLARFDCQERADWLSSRRLAAWLASVGYCGRVAPATLHARLTSAPRGATSTEGAAQAHVTRAFLAALSTVVQQIKLLSEQIDEQLALHTDAHIFTSLPRAGRVRAARLLAEIGDCRARFPTPDSLACLAGVAPSTRQSGRFRAVGFRWAADKQLRDAICDFAGDSIRANPWAADLYRRAIARGHDHPHAVRILARAWLFVIWHCWQAGTPYDPAQHRALQALLKPAA

SEQ ID NO: 49422 - protein, 353 aa, unidentified
MKAKTETTTASLAVVGVDIGKEVFHLVGLNTDGTIAFRRKIRRSSLKDVFEQLPPCVVGMEACLSAHFVSRTLRTLGHAPRIIPAIYTKPFVKGQKNDYNDAEAVAEAALRPNLRVVQEKSQNQLDLQACHRVRSRLVSRRTATINQIRAFLIEQGIAVRAGARALRNSLFAILENRKDEISPRMVKLIHGLYEDWCCLDHRIETVTGEIEELSRIEPKCQRLMSVPGVGPLISTALVAAIGTGEAFDRGRDFAAWLGLVPRQYSTGGRSILGRISKRGSRYLRTLLIQAARVLLMRPHNWNRFSFGPWLRAASERLHRHKLAVALANKLARIAWSVLRHDKAFDTHLEIAAI

SEQ ID NO: 49423 - protein, 337 aa, unidentified
MNPTKSNHKFCLGIDISKADYHVALLHRESGESIARSKFANNPQGHAKLLDWLAKHTGADLPVHACMEATGSYGESLADHLDGKVAILSVVNPRAIKAHGDSDLRRCKSDPADARLIADYCRSKQPRAWQAPSPAQPKNKAISRCLANLKKDRTRESNRLDLCSDKTVVKALKAHIKWIEKQIAKLEDELIAAVKENAASARALELIVSIKGIGEKSAAYLIAELPDLALLKNARQLAAYAGVTPRIFQSGTSGKTRTPMSKAGNRHIRKALFFPAMSAMRFNPICKAFAERLKEKGKPSIVIIGAVMTKLLHLIYGVLKSEKPFNPDILKKAQIIP

SEQ ID NO: 49424 - protein, 346 aa, unidentified
MICLGVDQSKHFSQYTIGDEKGKIFKRVKIANTSEEIQHLMESLPEGPKTAALEASRHWGWLHDELEKYTDEVLLGNPLEMKAIAHAKIKTDAIDSETIYHLLRTDLLPTCFVPPKEIREIKDQIRFRRFLVMLRTMIKCQIHTLVDRNHVLQPGQRTHQDLFSKKGVEALKQVQLPDKERKILDELLKLFSQIEQQIKTGDEWVQELHAQSPEARLIDSIPGFGEFFSVLICYEIGDIQRFAHAKKLCSYAGLVPSVYASGRKAFYGRITKRGNSHLRWAAVEAVLPAIQTNAFLRAEYEKIKQRKGVNVARVAIARKLLEWVYRVWKTGKSFQELVSQITLVAA

SEQ ID NO: 49425 - protein, 342 aa, unidentified
MKDMMIGVDLAKNVFQVHGAFRTGEVQFRKKLTRKQFSAFMARQPSSMVIFEACGGAHYWARVMEELSHEVKLIAPQYVRPFVKRQKNDAADAEAIVIAVRQPEMRFVDPKTVEQQSRAAVFRARERLVHQRTADTNALRALLYEHGHVFPIGMRHLSRMTALVEDETVDLHALIREECLDLLAQIAEKTARIAERTTKLKTLAAESDRARRLQTMPGVGPLTAVALEAFGPDMAQFKTGRDFAAWLGLVPRQHSSGGKERLGRMIKAGQADIRRLLIIGAMSRLNWVGQRTIVEGSWLSRMMARKPKMLVAIALANKMARQIWAMLTKNEDYRDPALADVA

SEQ ID NO: 49426 - protein, 350 aa, unidentified
MKIVGCDFHPSYQQVAIFNTETGEVEDKKLIHATGEVEKFYRELETPALVGMEATGNSRWFELMVEKLGHQLWIGDAAKIRASYVRKQKTDKRDAGHILKLLVEKRFPRLWVPDVRQRDMRQLLTHRHKLVRVRTRLKTELQHLALNQGIQKKRQLWNEKGRALLASLPLQGWAQQRRKDLLQLLGMVEPQIEQLDKAVEQAAKADPQAVLLMSQPGVGPITALAFSVTIGDVSRFERSKQVSSYLGLIPTEHSSGSKRRLGSISKQGNVFLRALLVEAAQSVVRHDPGFRKEYQHRCHHKEKGIAKVAAARKLAVRLYWMLKSNKSYTELVLNGGSPRHPVAAKAKPLS

SEQ ID NO: 49427 - protein, 312 aa, unidentified
MVDHCYGGIDVSKDRLDVQVLPQGRCFSVDNTAAGWKQLVDRLRGLSIAALGIEPSGGYERGVIRALLAAGLSVRRINPNKLRQFARARGVLAKNDRLDARLIAEYVAIMPTRVVHRDPAAEQLAAVVTMRRQLSDEHVTVENQTAHIEDAMLRRLNKRRLARLKADILLLDKRMAEIVASNANLARRYDLLTSMRGVGPTVAFTLIALLPELGQMSRKQIAALVGLAPYDFDSGRLKGHRCIYGGRMPVRNVLYMAALSAARYNPVLKTLHNRLAATNKKPKVVIVAVMRKMITTLNAMLRDNLAWQPKSA

SEQ ID NO: 49428 - protein, 335 aa, unidentified
MTDTNDSPVSVPQAPVYVGIDVAQDKLDFARTDADAVPTFANDPTGIAAVVGLLSSARPAAVVVEATGGLERPPPDALPDAGLPAAPAHPGRVRHFAKGLGVPAKADRIDARVLARFARFARLAAPRLTQKRSANQAELAALAVCRRQLTLARAEQSNRRRATAGKAALRSIDAVPATPDKQVGSLDKQIRDLLDADDDFRHLDGLLRSVPGVGPVLGATLAAELREPGRTDRRQVGALVGVAPFNCDSGKRKGRRAIRGGRTAVRRVLYTAALAAVRSNPIIQAFAKRLKQAGKLNKVVIVACMRKRLALLNAMPRDNLTWNQLDVVKKLALNH

SEQ ID NO: 49429 - protein, 269 aa, unidentified
MRNTVGLDISKLTFDATAMVGKTEHSAKFDNDSKGLDQFSDRLKSLGYQNLHICMEATGSYYEEVADYFAQYYSVYVVNPLKISKYAESRFKRTKTDKQDAKLIAQYCRSAKESELVKRQKPTDEQYRLSRMTAAYAQIKSECAAMKNRHHAAKDEEAAKAYAQIIKAMNEQLEVLKEKIKEQTEKPNCKEGVKRLETIPAIGRMTAAVLFHHLTSSKFETSNKFAAFAGLSPQQKESGTSVRGKGKLTKFGTGNYAPSCLCRPWSHTG

SEQ ID NO: 49430 - protein, 367 aa, unidentified
MEKSSTAFIGMDVHKESIDIAIADAKEARHFGRVGGDAASVDRAVRKLRSVHKRPMFVYEAGPCGFWIYRRLKAQGLPCMVVSPSMTPRNAADRVKTDRRDAMKLARLARAGELQPIYVPDALDEAIRDLVRAREDAVSMQRQARQRLQALLLRNEIRYAGRCSWTQAHRRWIAHLKLPNPAQQIAFEEYVQAVHEAGGRLERLGESILAQLAPWRWRPVVDALQALRGIQAIHAVRIVAELGDFQRFESPRKLMAYLGLIPSEDSSGGRRRQGSITKAGNSSARRAMVEAAHAYAHPARVSWVIARRQTKLSKSVCDTAWKAQLRLCARFRRLSSRGVPRNKVVVAVARELSGFVWAIARQVKPAK

SEQ ID NO: 49431 - protein, 347 aa, unidentified
MNFYTKEHLFYCGVDLHTRSMYICVLDQSGQILLHRNLAADPQRFLDAIGPFRQDMVVCAECMFSWYWLADLCAKENISFVLGHALYMRAIHGGKAKNDKIDSHKIAALLRGGMIPQAYVYPAAMRPTRDLLRRRNYLVRKRADLLSHIQNTNSQYNLPVFGKKIAYRSHRTGVAEQFPDANVQLSIKTNLELIDHYDKLINALELFVLQNARDHDPGSLHLLQTVPGIGKILSLVILYEIGDINRFPSVGQFVSYARLVACAKESAGKKQGTSGRKIGNMHLKWAFSEAAVLFLRKNPQGMKYKKRLQQKYGKSKALSILAHRLGRASYYVLKRQKAFDMKRFLSN

SEQ ID NO: 49432 - protein, 343 aa, unidentified
MTIKVLGIDIAKNTFQLHGADDAGKAVLKKRLPRNRLSPYVANLHPCTIVMESCGGANYWARVFQRSGHTVKLISPQFVKPFVKTNKNDANDAEAIVEAASRPSMHFVPIKRPEQQDVQSIHRVRSRIVKNRTALINEIRGLCLEYGVIIAPGAARVKKSLCAVVADSGNGLTPSSRDCMQDLYEELVDVEARLKKLDARNRQLCRQNDSCRRILSIPGVGELTATAIVAAVGDAQEFKNGRHMSAWLGLVPRQSSSGDKRVLLGISKRGDRYLRTLLIHGARAALSHYKTTDNDYGLWLARKKATLSFNKAAVALANKNARIIWSLLNSGEEFNCGVQTAAA

SEQ ID NO: 49433 - protein, 391 aa, unidentified
MINIGIDVGKFKHCATVLDDSTGEVLIKPFFLTNDRKGFDILYSKTKQFIHRKHSVGMEDTGHYMINLTNYLLDKKFTVKYINPRATFLRRKELGISAKNDRKDALLIAEMLSEKRFWRSISPRTIENSKFRDITRLYHQLQEQQNQDMNRLQRALDIVFPEVNSLSWTRYSKAYMKFLSTYPSASSIALEDIRNLRKALKTEGKGRQSKVTAEEIRELAKCSVGEDNISIDLEVTSIIAIINTREEQIRILGKKIEEFSHKLNSPIISIPGISHISGMTILAEIGDINQFQNTGNLISFAGMDPLVYQSGKYDAAHMPISKHGSRYMRKALYQAVFTVCKYSPTFHDYYTKKRNQGKSHRCAQGHCARKLLRVIYKLLSTNSLYDQNHIQ

SEQ ID NO: 49434 - protein, 482 aa, unidentified
MEKRNIYLNQSQELLSLFEDVGNNSKVMCVPMDYAKKDHIVMFCDGNGHILKKPFSVRNNPEGIEYLTDQVTRSCRRRQIDHKHVFFGGEDVGSYAENFVNTLRSGGWIVAGVNAHDAKKQRANLQASTDRVDLMGIASMLLNRRANCSPAQSGIYRNLRTLVRHRRKLVAISTEEKNRMHSVVDRLLPGFLDEKKSGVCPFSEASLYLMEDRFSPHQIRRRKQPKLIEILHRCGTNKPEDTAKKLQNYANSVLNTPKEYISTFQLSLTQHVKHFRCLRDSIEQLEHEIAVWLAQTEGAFLTSIRGIGIVLAAGIAGEIGNPQNQNPVNNLVSYSGIIPRVKQTGGTQGKTHTGKVAKRCNRILKDYVVQSANHMGLHGPEDLMSDYKRREANGQHADFGIARRYLRTAMCLMRKPQIYLPPEFRNAETTPEERAGYYLIAWPALRDKWKKAGAIETAFDDNHFLGRWRNMVQELYEIKLKL

SEQ ID NO: 49435 - protein, 434 aa, unidentified
MFIIPNYLNNTVIGIDVASAFSFASILCPDGSQFRKPFKINHTVEGFNYFLEQIKKAEEEYAMKPVFFMESTGVYHLTLFHFLKDNKFDAFIINPLVTNCNKNKDIRKVKNDKNDSLSIAKLGKYEDIKVSSDIDFNIFSLKLMIRDYYKLIDDRSSYKKKLSSSLMLSFSGYQDIFANTCSSASIGILKEYPTPQLVISAPKKDIIDILLRSRKGINWAEKKYTELIECANAAKYISLSAPRLSVSITTCISLYGAIDNEITKLLNEIKSFIDSDDLPATLNKNIDLLMTLGGVGYITAVTVLAEIGAVDNFLKPKQLVAFFGVDPAVNESGKFKGDRVKMSKRGTRFGRRALYAVALASIRRKRNGEPTNPILLKYYQENLKGKKAKVALVAIMHKIIKYIFAILKNQEAYQLRDPKLHQRMYIENHSREVA

SEQ ID NO: 49436 - protein, 426 aa, unidentified
MNNDKPAEFAALVGLDWGEQSHAIALQSAGGEVQTSTLAHSAESLHHWLDQIEQQFQGRPVAVALEASKGAVVYALMERPWITVYPIHPATSTRQRSAFRPSGAKDDTPDALVLLFILQYHRERLRPLQPDDQATRTLARLVEARRKAVDRRSLLANQLKSTLKNYFPQALEFVGPDLTIPMALDFLNKWPRLTDAQAAKDMTLKNFYHRHNVRRAELIQSRLDLRRSARLLTRDPAVIEVSVRVVRMLTAELRVLNEHISEFETAIEETFAEHPERSFFRELPGAGPAMAPRLLAAFGTARDLFPDPGSMQRCFGVAPVTEKSGGRCWIHWRWNAPTFLRQTMVEWAGLTVVFCPWAKAYYEQKRAKRTGHQAILRALAFKWLRILWRCWQNRQDYDEEKYLRQLEKRKSPIAIRARQLALKMAS

SEQ ID NO: 49437 - protein, 313 aa, unidentified
MDKRFDIYWGIDVSKEWLDIDVGSEVIRIAQNEKAIKEVMKQHKIENSQSLLATLESTGGYERLAIRCLSEAGVVVHVAHPNKVKSFARARGRLAKTDQIDAVILKEYGRFIKPDEIKPLPTALESELELLGSRLDQLKEMHHQERCRLGIACGEGVKKSITNMIKLLKEEMEILEESILELINKDECLKEKYNILCSMKGVGPVLAMKLITDLPELGEANEKEIAALVGVAPITHDSGQKKGKAMTKYGRHGVRKTLYMGALTASRHNPRFQSFYTKLIEAGKPPKVALVAVMRKMIVTLNAMVQSKKHFYA

SEQ ID NO: 49438 - protein, 411 aa, unidentified
MTKEDFIYVGIDLHKETHTAVMIDCYNNKLGEITFPNRPADFPKLVTKVKKCNTDAKEVVYGLENAYGYGRALAVWLIDKGYFVKDVNTAISHRQAKHRGAMYRKSDSDDAEAIALATLNMLDKLPDACLNDAYWSLGQLVHRRDNIMKQRTRLVNQLHEQLCIAYPSYKSFFNDISRPTALYFWEHYPSRKYLRGKSVEDLRAELVPVSHNKCSTKTCEKILDAVASDKVKNNAYQDARDMVTLSIVSDLQHYDKQLAEVDKMLEQMYKMLGCTLTTIPGVNVITAVKILAEIGDIKRFSNANKLAQFAGIAPLHLSSSGKGKDLATKQGNRRLQATIYFLAIQMVQISSKGTPRNPVVRAYYEKRKAEGKTSQQALICISRRLISIIYGMLKSGTEYRMPVMENTGETV

SEQ ID NO: 49439 - protein, 387 aa, unidentified
MPQPNDLSRSLVALDQDSTIIVVVEMSQSSWLVAGMLPGIERQPRKKLEPSPERLLALLHRWRDEAIGAGKEITRIALAFEAGRDGFWLARWLRARGVEAHVIHPSSVAVSREHRRAKTDRLDTELLKRGFLGWLRGERGHCTMARIPTIAEEDAKRPNRERECLVRERTRIVNRMKGTLARLGIRNFKPTLRKAAERLATLHTPEGSVLPPNVSAELQRNMARLGLVVSQIKEIEGARQKRLEQEPETEPHAMVRHLARVVGIGVETADMLVNEVLSRPMRDRKAVARYAGLTGSPDESGAKRREQGLAKAGNARVRRGMIQLAWRFLRFQQNSALARWYQARTADHRAATRKTMIVALARKLLIALWRLVTTGETLEGVVLRPAG

SEQ ID NO: 49440 - protein, 356 aa, unidentified
MSWLYAGLDVSNATTRICILDGHGEVVYEATVASSPAAIARELKPYRALLESVGQESGSLSQWLHRELSRKRLPMVCMDARAAHGVLSLQRAKTDVSDARGLANALRAGWYRRAYIRSDEAQRLRLLLVHRSAIKRKALDLEHSLRMSIKPFGARIEVRGGKVVLKHAGRRQDRDLARLVQSLIRARAALMAEAAKLTEAVKAAAKKDVVCRRLMSVPGVGPITALAYRTSLDDPSRFRSSRAVAAHFGLTPKRFQSGESDYSGGVSRLGDKMVRTALYQAAFSMVVASKSKCALRAWAVRLREQKGLRPACVALARKLAVILHRLWVTGRDFDATLAAPSGRTELGRRRCAPEQA

SEQ ID NO: 49441 - protein, 459 aa, unidentified
MKRKGNAKATRSGMAMVHPNAAAIDIGATMHMAAVGADRTSDPVRNFGTFTGDLRRLADWFAECGVKTVVMESTSVYWIPIFELLDERGFEVFLVNARDAKHVPGRKTDVSDAQWLQRLHSYGLLRASFRPKGEIAELRAYLRQRERLLDTAASQIQHMQKAMTEMNLQLHHVVADITGATGMRIIRAIISGERNPSVLASMRDKRCHSSVETIEKALTGHYRAEHLFVLEQAVALYDVYQQKVAACDVQIESVMNALSSVRRRQEGATADRSVSPKPHRNRTANEPAFDVGGSLHTLLGKDLTRIDGVGPYLALKLVSECGDDLSAWPSAKHFTSWLSLAPNNKISGGKVLSSRTKRSGSRVASLLRLAAVSVGRTETALGAFYRRLSSRVGKAKAITATARKIAVLFYNAMRHGMNYVDPGASYYRERVVKNLHRRAKALGYIMLAARVIRTEGTAF

SEQ ID NO: 49442 - protein, 350 aa, unidentified
MDQVSRIGMDTSKHIFQLHGVSADEVPVLRKKLRRKDMVTFFAKLAPTVIAIEACGASHHWARLLQSLGHSVKLIAPQLVKPYVKRGKNDAADAEALCEAMSRPTMRFVPVKTAEQQAGLMMVGVRDRLIRNRTQLANAIRGHAAEFGLTAARGMAHLVPLLDRIEADESLPALARELFAIQAKEYTQLQTQVDEIDTKLMAWHRADECSQRLVKIPGVGPIGAALLRMKTPAPELFRSGRQFAAWIGLTPKDHSTAGKVRLGVITRAGDEALRSVMVVGATAVIQHVRRGGRAPHWLAELLKRKSPKLAAVALANKTARIAWKMMVTGETYTAKSVAATSAGAVSQGAV

SEQ ID NO: 49443 - protein, 353 aa, unidentified
MTNTQYIGMDVHKESISIAVRNDVGKIVMECVIETKANVILDFIHGLRGELQVTFEEGTWATWLYDLLKPQVTKLVVCDPRKNSRQGNKNDRIDARELSDRLYMNKLSSVYHGGAGIRTLKELARSYLTISKDLARVMTRVKAIYRSWGIPCAGKQVYAPRHRAEWLAKITEVGVFRRAEFYYQQLDALRSLRHQVRRELLAESKTHKASKLLCQIPSIGPIRAALLIALIQTPHRFRTKRPLWKYSGFAIETHSSADYRKVQGQLERTKKQVSVRGLNRDCNHDLKNLFKSAATIASVKPGPFQEFYAALVAKGMRPEMARLTLARKIATIVWIVWKKGVSFDAQHLKPQTA

SEQ ID NO: 49444 - protein, 385 aa, unidentified
MSELNDLSRSLTSLEQDKTIIAVIEMSQSSWLVAGIIPGIERHPLKKLEPSEEELVRLLMRWRTEATKNGHTITRFAVAFEAGRDGFWLARWLRARDIETYVIHPTSVAVSREHRRAKTDRLDTGLLKRVFIGWLRGEPDHCHMAAIPTLAEEDAKRPNREREGLVRERTRIVNRRKSCLARFGIRKFNPTLRKAPERLATLGMPEGVPLPPNTLLELRRDMARLRFVMDQIKEVEETRAQRLEQAPQEKTHAMVRLIARVIGVGIETADMLVHEILSRQLRDRRAVARYAGLTGAPDESGNKRREKGLAKAGNARVRRGMIQLAWRFLVFQKDSALARWYRTRTESAGKKRKTMIVALARKLLIALWRLVTIGEVPAGVVLRAA

SEQ ID NO: 49445 - protein, 438 aa, unidentified
MTVTVAIPFYKVVILMMKLKYPICCGLDVHKNVIVATIVITNRDGVSEYRQKSFSTINPDIQKFHNWLIENNCYHVCMESTGKYWIPIFNYLEKDIEVCLTHPKYVKAIKGKKTDKKDSKWIADLYKFDLVRCSFIPPKDFRQLRELARYRFKLVCMKSSEKNRIQNCMTVSNVGIASVLSDPFGKTATEIMSYLLEHTADSIDEKAVRKLIKKGAKAKSDEIIEAIRGCNIETDQAKKLELALGHLEYLDGMITQTEVELYVRIKPYYEFVEFVSTMPGMTELSSTIVLAETGVDMNIFDDARHLCSWCGLSPSNNESAGKKKSVRIAKAGAYLKPMMVQCALAAIKNKKQPYFAIKYGRIKKRRGHKKAIIAIARMMMVCIYHMVSEKKPFTPADYEELMKPQNHVERVVLNENNVFAYLESLGYDSSKLVKRNDN

SEQ ID NO: 49446 - protein, 492 aa, unidentified
MRTIYPKANPAIENLFEHAGTPRKVMCVAFDYAKATHTAMVCNGEGMQLRGAFNVHNNPAGLDYVQKIVSGLCRKHSIAREHVFCGGEDCGPYASNFIHALAAKGFLVVGVNAKDAKNERGNMLASTDKIDLLGVAGMLVKKRGRTIPAEISHVEQLRKLTHHRLSLVQSRTASANRMHALVDQLLPGFLDVDQSGIYPFTRASLWLMSERFSPKGIHGRPMPTLVSRLHEFAVHDAEGAARKLKALCESVLPPPSAMLDCLQQCLSHEVTVYRMLSDSVRALEVEAARQLAATPGAMLTTMPGIGVGLAAGIYAEMADPTRRQALFRMASYAGLVNRLKQSGGPDKEASACGRPRHANVFLKNLLLDLVVHIGNYGDGELKADYLRRTEDGQYSRLTMARKLLRICSHLIGGDFYVPATLRQNPSTEALPQYYQSAWTRILWRWRDAAAIRQAFAKDAPLEQWRCMINELYGLKLSNVSPQAGQTRKEERI

SEQ ID NO: 49447 - protein, 343 aa, unidentified
MKIIRVGVDLAKNVFQVHGVDSNEKVAWRRKLKRDEWLKVLLKNIEPGGEVGMEACGGAHHWARQLQAHGLVVKLIAPQFVKPYVKSNKNDANDAAAICEAMSRPHMRFVAVKSVEQQDIQAVHRIRAGLIDQRKAKANQIRGLTSEYGVTAPKELLHLRRAIPDWLEDAENGLSSRFRRLLAGLWHDLQVLDARVAELDQEIAQIAAADLMVQRLLKLRGVGPITATALVACVGNAHQFTNGRQMAASLGLTPKQNSSGGKERLLGISKRGDSYVRCLLIHGARAMIRFAKGKDDPLSRWVLRISATRHPNVAAVALANKTARIAWAMIKNGTEYQPALAAG

SEQ ID NO: 49448 - protein, 343 aa, unidentified
MQTIATIGLDIAKSVFQVHGVDAAGQVVVRRQLKRRQVLAFFAKLPPCLIGIEACASSHYWARELQALGHTVRLIPPAYVKPYVKRQKNDAADAEAICEAVTRPNMRFVPIKTIEQQGCLVLHRTRHLLIRQQTATINSIRAYLAEFGIVAPVGRRGVEQLLEVIADSNDARLPEVARVCVAALGVQLRQLKAQILELDRRITAWHRSSEASRRLNEIPGVGPLLATALVASITDPKVFRSARDFSAWIGLVPKQNSSGGKDKLGNISKRGDRYLRSLFTAGALAVIRYAKIHGTKHRPWLVALLARRPTKVAAIALANKLARIAWALMTKGSRYRQPAALRV

SEQ ID NO: 49449 - protein, 341 aa, unidentified
MKITRIGLDLAKDVFQVHGVDRDGRTVARRRLRRSEVLKYFAGIEPCVVGMEACGGAHHWGRELGKLGHQVRLVSAQFVKPYVKSNKSDANDAEAICETISRPGMRFVELKTVQQQELQALHRVRSGLVGERTGLANRIRGLLTEFGVVLPRQLAQVRRGLPWVLEDGENGLSGALRVLLEGLRADLERLDERIGELDRLIGQAVREDPACERLAAIEGIGPLTASALVAAVGTGKAFANGRGMAAFLGLVPRQHGSGGKARLGAISKRGDPYLRTLLIHGARSVLLHAARKTDARSRWLQGLMARRHRNVAAVALANKNARIAWALLAHEQSYRPAAGGQ

SEQ ID NO: 49450 - protein, 309 aa, unidentified
MNKEQVYVGIDVAKARLDVAWGEEGRQVSNDKAGHKELVKWLGKMEEKVQVVCEASGGYERKLVRALHEAAIRVSVVSASRVRQYARAAGILAKTDSIDAKVLCAFGEAIKPELTPARESTQERLRELEAHRRHLSALQIAEKNRAEQVSNDLVSQFSAKLVRQIQKQIDALDLLIKELINQSPELVHKAQKLTAITGVGERTAVLLLAQMPELGELNRREAAALAGLAPFNRDSGMMRGKRTIFGGRRAVRSGLYMAALVAARYNPILREFYQRLRSAGKPPKLALTAVMRKLLIVLNSRLKPDLIHA

SEQ ID NO: 49451 - protein, 412 aa, unidentified
MSQMLVGVDVSLRSHYVHFMDGDGAALADFSVSNDRAGADTLIKRILETAEKNQYAHIKIGMEATDQYSWHIAHYLQEQLKGYEPHYCSQIYVLNARKVARFKKGYDTLPKNDKIDAWVIADHLRFGRLPGEMKEAHHYAALQRLTRTRFHMMKEIGRNKTYFLNQLFLKFSGLRQDNPFSNAFGTTSLAVIEELDPETIAEMSLEDLTDFLREKGRNRFANPEEIASYLQKLARSSYRLNKAMEDPVNLSLSVTLSVIQHMESQVKRLDKEIAKLMKGIPQTLTSVKGIGDVFAAGLIAEIGDAHRFKDHHALAKYAGLVWNQHQSGEYESENTSRMRTGNKYLRYYLIQAAESIRKHDSEYKAFYLKKYNEVPKHKHKRALVMTARKLVRLVHSLLRTNQLYTPPERRRG

SEQ ID NO: 49452 - protein, 343 aa, unidentified
MCSVTSKAVFVGLDYHAASVQVCVMSSDGQVLLNQSCANDWRAVVGAVRRRCGEGVSVQAAIESCCGAAGLADELIARGWSVNLAHPGYVSRMKQSPDKTDYTDARMLADLQRVGYLPRVWLAPEEVRELRRLVHYRQSLTKERKNLKLQIGATLREARQKAPANANSWTKAWLAWLENSAVLSPNARHITTHRLRRLAAVCQELSQLDKRLEQQTREDPLVQKLLTVKGIGLVTAVTFRAEIGRFDRFRTGKQLGRFCGVSPRNVSSGQKQADAGLIKAGNSELRVLVIEAAHRLIRCDERWTALAAKLSRRGKPTCVVIAAVANRWMRWLFHQMQPACLAA

SEQ ID NO: 49453 - protein, 326 aa, unidentified
MVALNGENEIVIRRQFTRSQLITFFTKRTGQDLNVAFEACSGAHWLAHQLIALGHKVRLLTPESVKPFAKAQKNDWNDALAIAEAANRPGRHVVGVKSQEQLDMQALHRVRQRLVTSRTALINQIRGLLRERGLVFRSGRAQFEAFVRDKLVTGDVDLNPLCRTLFAALIAEYEAMNSRLDEINQELEEFAKSNEVCRALLPVPGVGVIVATALFSAIANISDFKTGRDLAAFLGLVPRQRSTGGKTVLLGISKRGNTYVRTLLIHGMRSAFYHRQKRDDRMAAFMERLSARGMHTNKIVVASANKAARIIWAILSKNTYYQSQPV

SEQ ID NO: 49454 - protein, 373 aa, unidentified
MPRYSTAFGMDVHLRSTTVCALDAETGEAVTRRFRGNPWGEVAEWMSGFPGPSLAAYESGYLGFAPQRELSGLGVDCVVAAVSKVPRSAADFSSKNDRNDAARMAKAILSHDISPVWVPSPEIEGLRDLAGAHDAATARLAAAKQRLLAFLARRGYAYGGTTPAGNPRRYWTYDFLRWLDKVRPADDGGIRALAALRNEVEAAAETRDDLLAEYRAAVAAGPLSAEVEALQSIKGCGFALAAAFASEVGDFSRFRSGRQVTAYFGLAPKQRSSADSVRLGGISGAGNALVRKLAVEGSWCYAQAGHQPKLMPKGSGVPLEIRMHGRKGSERLLRRREEMLARGMPQAKANAATAAELVRWLWALGTMCREAGE

SEQ ID NO: 49455 - protein, 391 aa, unidentified
MHKDTHCAVIIDCWMNKLGEVNFENRPSKFPAFVDDVRKICGTKEIVFGLEDTRGFGRNLAAYLVGRKFEVKHINPAYTSAVRLANPIIYKDDSYDAYCVARVLRDMVDTLQDAKHEDIYWTIQQIVKRRDLIVKSNVMNKNQLHSQLSYSYPSYRKFFALIDAKSAMCFWENYPSPEHIWSTTSEEIYQTIKPVHQALKIERIHKIISMIEKDGDTRKDYQPERDFIVRNIVKDIKNNKELIEEIEDELRKLLPLTGYKLHTMPGIDLVTEAQLISEIGDINRFPDSDKLARFMGLAPVQFSSAGKGKDQRCRNGNRALNAIFHFLAIQMVAISPSGKPRHPVFREYFEQKVKEGKNKPQALVCVARRLVRIIYGMMKTKTEYRPYDKMK

SEQ ID NO: 49456 - protein, 364 aa, unidentified
MHKDSVFMCILTANGEKIEDVFGTLTPELDRLRDTLVSHGVGKVAMESTSIYWVPIWRILECDFDVKLVNPYFIRQLPGRKTDIKDAQWIATVLQKELIKGSYIPDSKIQELRQYSRRIFHLTRRKQQAESAIDLTLQRCNIRLSNYVSDIGCKSMRKVVNALICGETDSEVLALLVHKRIRNKHCHEVIKSSLTGIVSSSDRDMLKMSLEEVELYDRQLLECKEKMRIICEGHYAEELEILQTAPGIKEESAMRIIAEIGVDMKAFLTASALVGWAGLRPRNDQSAGKIKGRKTLHGNKYLRVMLTQCAWGACRTQTSKFYSRYHTLKKRMNHNKALMANARKLLVVIWNLLAKKQPYMPLVN

SEQ ID NO: 49457 - protein, 413 aa, unidentified
MNEDIAAYVGVDWASATHYAYALDAQGAKLGHRSFQHSGDGLAELADWIQRTTGAEPGRIAIGIEVPHGPVVESLMDSGFLVHALNPKQLDRFRDRFTMAGKDDRLDAFVLADALRTDSRFYRFLEPVHPTIIQLREWSRMTEDLSAERNRLANRFRHQLWRYFPQMLELAEDWSQQWILDLWDLIPTPARARAVRTSTIARRLKESRVKRWTADTLLNHLRSTPISVASGVTEACVAHCELILGRLRLVMQQMKLAMKELERLCSAVAELPSATGIAPHADPKILRSMPGIGTIVLAALLSEGHDAIVRRDAQALRGLSGVVPDTRRSGKQIVVVMRQSCPHRLRTAVYHWARVAVLHDFQTRNRYAALRKRGHSHARALRSIGSRLIGVACAMLRTGELFDNGRPPQSAAA

SEQ ID NO: 49458 - protein, 345 aa, unidentified
MERISRIGMDTSKHFFQLHGVNAAEQVVLRKKMRRKEMVAFFKALAPTVIGIEACGTSHHWARLLRSFGHEVKLIAPQLVKPYVKRGKNDTADAEALCEAMSRPTMRFVPVKTTEQQAALMMVGLRDRLIRNRTQLSNAIRGYAAEFGFTAAKGKAHLVPLLARIQADESVPVLARELFAAQAEEYAQLETQIDEVDAKLIAWHKADECSQRLAKIPGIGLIGAALVMMKTPAPEMFRSGRQFAAWIGLTPKDHSTAGKVRLGVITRAGDETLRSVLVVGATAVIQHVRRGGRGSPWILNLLKRKSPKLAAVALANKTARVAWKLMVTGERYAAKSAPAALASAT

SEQ ID NO: 49459 - protein, 400 aa, unidentified
MRTVFGIDVSKASSEVAILVNGERVYGYTMPNDIIGFSRLLEDLKTVSNPEIVFEATGVYSRRLQAFLEEYSYDYTRLNPLEAKKQLDGLRVRKTDKIDAERLASSQFVLNRKPTHVQEEVYQNLHDLSRFYQNLTEDIVRTKNRLHKVLQIAFPEIENLLSTPTGEQYWNLVSIFPTKHWVLELSEVELKEAIRNSTSKRISKNRVGNLTEKLVGLAKQSYSAISKTSPMVEEVKYDAQELIRLSNRREQVLQQLIALAEPLPEYEILLSIPGIAETTATSIIGELGDIRRFKSANQINAFIGIDLKHYESGDFLGQEHITKRGNPYARKILYKCIHNIASASHTNPCHIADFYEKRKRQSQTTSTKPHTIASIHRLIRTMYYLIMHNKLYDYTLAQSH

SEQ ID NO: 49460 - protein, 417 aa, unidentified
MIRKVMEVIHQSVGGLDVHKKTVMACRRRLMGDGQVESEVREFGTSTLQMCALSKWLSEWGCTHVAMESTGVLWIPVWNVLEADFKLLLTNARQLKKVPGRKRDVGDAEWIAQLMQCGLLKPSFVPSREVRHWRALTRQRMKLVDQRTGVVNRLHKVLQQGNIKLSSVATDVMGVSGRAMILAMIEGESDPERLACLAKGRLKSKHEELVESLEGRLSQDDRWVMKELWEQMEYLEEEIARYDEQIKEKMSAYEESLKRLMTIDLIERRSAENILAEIGPEMSFFPSDDNLVSWAGLCPGSEESAKKNRSGKTPKGDQWLRRALVEPAWGAARRKDGYLGAMYRGIAVRRGEKRAVIAVARTILQAAWHVLSKGVEYKERGGDYFDRQNSEQTKNKLIRRLERLGYEVEIKPKQAAV

SEQ ID NO: 49461 - protein, 352 aa, unidentified
MTVTNLARSITGGVDTHLDVHVAAALDERGTLLGVESFATTESGYKKLLGWLSDFGTIELVGVEGTGSYGAGLTRHLQGENVRVVEVDRPNRQRRRLKGKSDPQDAITAARAALSGEAAGEAKTRDGNVESMRVLRVARASARKARTQALNQMRTLVSTAPDPIRAELRGLSVFNLLERASSYRPGAKRDIVSLTKFTLRMLARRALTLEEEISEIDAILKPLVKETAPELVATLGIGTDAASALLVAAGDNPERMRNEAAFAHLCGASPLDASSGKNQRHRLNRSGDRQANSALWHIVLTRMVYDPRTTEYINRRRTEGLTKKEAVRCLKRYVAREVFSLLPHDTLGLDSP

SEQ ID NO: 49462 - protein, 413 aa, unidentified
MLLFIGDDWAEDHHDIEIEDETGRRLAKARVPEGLEGITRLHALLAEHAPADWSDLPSEEVAGRVFVGIETDRGPWVTALRAAGFQVFAINPLSSARYRERYSTSGAKSDAGDAHVLAEIVRLDRDHHRKIAGDTDLVDAVKLLARAHQTAIWERTRQVLRLRSTLREYFPAAVEAFSDLAAKDSLLLLGRAPSPVRAAKLTRSQVVSALRAARRHHAEAKADALLAVLRTPGLRQPATTDAAYAAVVIGQVGIITALNEQIAQLQEVVAEHFGRHPDADIYLSQPGFGVVLAARALGEFGDDKKRFSDSRARKNYSGQSPITRASGKKTVVLARYATNRRLGDALHLQAFSALVASPGARAYYDALRARKIGHHAALRQLANRLVGILHGCLKTGTKYDETTAWQHQIVTAA

SEQ ID NO: 49463 - protein, 445 aa, unidentified
MVACLREVVVTVDIVHPRVAGIDVHKRVVWVAVRLPGPGLGERTVTVRGFKTFWRQLRQMAGWLAELGVSDVAMESTGVYWWPVYHALVAAGGIEVCVCNAAHMRNVPGRKTDIRDCQWIAELHEHGLLRPSFIPAAEVAALRQRTRYRKKLIEHRAAEGQRLSKVLEDAGVKIDSVASELLGVSGRQMIEALIAGERDPARLAGLAKGRLRAKLDALELACDGRFAASHAQMCRLHLDAYDRLTTQIVTLDVLVAEAAAPFEAVIAKLMTIPGIGRRIAEVIVAETGAQMTRFPSSAKLAAWAGLAPGSNESAGKRKKAAARNGNQHLRAAMVEAAWACSRTATRPGARFRRLAYRFGKLNIKKAAVAVAHTLLSIAWAVMKDDADYAEAGADYYDLRDRRNHEHLARHHQQALTRLGYQVTLTPPGDGPPPGTPPDQPQQPAA

SEQ ID NO: 49464 - protein, 362 aa, unidentified
MKKTTPMKKRPKRVVGIDLSDESFLYEELDRDGEVIASGSVKLTRETLRAFLRERPKGTRVAFEAGGQSIWVRDEVEAAGHEAIVADPRRVPQITEKRHRSDAVDAAGLAHYALVSPKTLNPVKLRPSAQQTSMSVIRCRSVLVEARTRLINAVRGLVKLGGHRIAKCDAASFADRALDGLPSPERETVTPMVRAIRQLSEEIDHYDQVIEEMADSKYPETRYLRQVPGVGTLTALTYLLTLSSPDRVKRSRDVGPMLGLVPARRQSGEQDPHLGITKTGNVYLRKLLVQCAQHVLGKRGVDSALRQWGLAHVGRSRATKKRAVVAVARKLAVLLHRLWARQEAYCPFPVNESPQPAPRCAA

SEQ ID NO: 49465 - protein, 487 aa, unidentified
MWHIPMTQNFHPQPLAPARKADYAHCARFRSPYAAQDKPFASGFKNLHRNGGDIMLKINYMSTLFVGIDVSSKTNSVYAMDFEENKYLSTSFGNNQPGADELVNRIVACMQKHKHLDTLLIVLESTSVYSVHISNFLASSEVLMPYKPYVFCVNPKATANYRKSYIGMEKTDPTDAYLIAYFGRVGRTKKLEPWRGGLFIALKRLTRHRMHLSECITREKTYMVSNLYLKFSELQLLEGDDKPFGNLYGATSSAILTEFLSPQEIINMPEEDLLAFLAQKSRNRISDLSKTSELLRKAARDSYRLDKCMYEPLSISLASSFNCIQAYQKEIRLIEQAIDKCIKGMNTNALLILQSIPGIGPVWASGILSEIGDITAFHSSDALAKYAGLYWPKGDSGDFISEDNQMSKAGNPYLRYYLGEAANSVRKHIPEYADFYARKYAEVCKHQHKRALALTSRKLVRLVFGLLAKNQLYTGEKLDTEYNTWSN

SEQ ID NO: 49466 - protein, 416 aa, unidentified
MDTMYERCCGLDIHKKTIEACFRSGKKKTHMSFGTTSAELRKLTMWLVENDCQSVAMESTGSYWKPIFNILELSGTDMKIIVVNARHMKNVPGRKTDVHDAEWIAELLQYGLLRPSFIPDREQRELRELSRYRKSLVGERAREINRLQKMLEGGNIKLTSVVSEVTGYSSRRLLDRLLRNDEPMTEDVISGLVHTSLAGKSKELETALDGLLSELQKELLIKVLDHIDDMSRRIADLDDFCRKQMKKYEDALDKLDEIPGIARRTAETILIETGLDMSRFPTAKHFARWAGLAPGNNESAGKRSSGRTTKGNPTLKSTLIQSAKVAARKKDSFFKARYQKIAARRGANRASVAVAHSMLIAIYHILKSGERFKDLGEDYYNQFNREKKKNYYLKKLTKLGVNLKEATLSISIQAVT

SEQ ID NO: 49467 - protein, 333 aa, unidentified
MTYIGIDVSKATFVVAYSSAKDSKTKTYANTASGIHKFIQTLPPEAHCVMEATGNYSMLLLYLLDKANIMVSMENPLKIKNFARVMLSVVKTDEIDAKLIALYGERMQPKPFKMRSDSLMLLKQKRTVLRQLKKQLVANTNLQESMEALPFVDSISKKVLEKTIKFLQKQIKQMEEELASLANIEYKKQMSLLTSIKGIGVTLATALIVATGGFTYFDNAKQLTRYLGLSPTYQQSGTSVNVKGRINHNGDSYLRSQLYVAAFSSLRCNKECKACFDRLRSNGKPGKVAVVAVANKLVRQAFAVVTKNKPYIDGYKSVKPENTPAEGAPAARG

SEQ ID NO: 49468 - protein, 483 aa, unidentified
MRPTLFSKGDALNNKGKKITKKTHPISGLPSEFEQINLNAAGIDIGAQKHYVAVAKGRDPEGRDIRYFDTFTVDLHALADWLKHCGIDTVAMESTGIYWIPLFEILEQNGFEVKLVNPRSIKHAPGRKSDVVDCQWIQQLHAYGLLTSAFHPDDQISVLRAYHRQRTMLVNHAGTHIQHMQKALEQMNLKLTNVISDITGTTGMKIIRSLLAGERDPEKLSKHRDPHCKKSEKEIAKSLHGNWRDEHLFALQQAVALYDFYQTQIMDCDKQIQAQLCRFEDRSDTGELPPAASKSSGSGKKLTFDAREHLYRMAGVDLTQIVGLNTPTVLTVLSEVGLDMRRWPTAKHFASWLGLCPGSKISGGKNFSSKSKPSANRAAHAFRMAAYSLHRSQSAIGAFLRRKKAQLGAPKAITATAHKIARIFYEMLKTRTEYKDLGVDYHQNRYKERMLRNLKRKAKEFGLELVNPNQDQLVMASSKGLVP

SEQ ID NO: 49469 - protein, 355 aa, unidentified
MNDAKYIGLDVHQATISAAVLDSAGKLVMEAILETKAETILQFLRGLRGSLHVTLEEGTWAAWLHDLLQPHVTRVLVCDPRKNALLKAGNKSDRIDAHKLAELLYMNKLNPVYHGEQGIRTLKELARSYLTITRDLTRVMSRLKAIYRSWAIPCAGQQVYAPRFRAEWLAKISEAGVRRRAELYYQQFDSLAALLQGARRELLTEGRKHLNTRLLQQIPSIGPIRTVLLLALMQTPNRFRTKRQLWAYCGLALRTYTIGEYRIVGGQLKRSKKVLAIRGLNRNHNHDLKNIFKGAATRAASTAGPFQDFYEACVARGMKPHLARLTLARKIAAITLLVWKKGVRFDAEHLKQQAA

SEQ ID NO: 49470 - protein, 347 aa, unidentified
MPATAHSKIAVVGIDIGKNSFHIVGLDRRGAIVLRQKWSRGQVEARLANVPPCLIGMEACVGAHHLSRKLQMLGHDARLMPAKYVRPYSKGQKNDFRDAEAIAEAVQATKTAEQLDLQALHRVRERLVSQRTGIINQIRAFLLERGIAVRQGQRFLRAGLPVILATPPDILSPRMVRMIEDLAADWHRLDERIECLSGEIEVLARQDSGCQRLMTVPGIGPIISSAMVAAIGAGDAFAKGRDFAAWLGLVPKQFSTGDRTILGRISKRGNRYLRVLFVQAAWVVLIKATSWERHGLKPWIVAAKKRLHPNVLAIALANKLARIAWSVLARGQAFAARTIQLAAVQPA

SEQ ID NO: 49471 - protein, 352 aa, unidentified
MPFTDVCPRGATNSNMKTTTHTPTTPSFFLGIDVGKKDLFCHIISPDQTCSERFDNSEAGIKLLLKWLRKVSSPAQLSACLEQTGHYGDQIAAALYKLRINSLHLVNPHRIKAYGMQKLRRNKSDTADAKLIARFLQAEHAELRPWHPRSVEQQRITSLSRYADTLTQDTASLKTRLHAVSEKSIVTSIKQRIAFQEKHLKEVRKTIAGIIKADPEMLAKSKLLRTIPGIGAVAAQAVLAELPDLSEFEDARQVSAWAGLTPCHRQSGTSGRTQTPITKIGSAHLRRGLFMPAMTARMNNPLLKTFGDRLKKNGKKPKPIIIAIMRKLLHQIYGILKSGQPYNPEKRGFAGA

SEQ ID NO: 49472 - protein, 322 aa, unidentified
MAMLSFGGIDVSKDRLDITVLPDEQCSSVSNDAAGWAELVEQLRGSSITAIGVEASGGYERGVVRALLAANLSVRQINPFKLRQFAKASGTLAKNDRLDARMIASFVAIMPTRSVQRQAPMIEQLAAMLTVRRQLSDHKVATENASKLLEDAMLQRLSRRRVARLSADIELLDQRLVEIVTADAALAYRFRLLTSMPGVGAVLACTLIALLPELGQMSRKQVAALVGLAPYDFDSGKLKGRRCIWGGRARVRHVLYMAALSASNWNPALKAFHDRLEATGKKPKVGVVAVMRKMITTLNAMLRDGTTWVDRYNGRRSVPTAR

SEQ ID NO: 49473 - protein, 345 aa, unidentified
MPIVGGLDIHRKQITFDYLNTVTGEVKRGQIAPADRGHVRAWLARFAGHGDVAFAVEGCAGWRYVAEELAAAGIAAHLGEPADTAALRGRKRHAKTDKTDARHLRALLAEGRLPECWIPPAQILEYRALLETYHDLRRAHTAWVQRIHAVFFHQGAPPLSEGALRTEPGLAALRAAAATHLSAAGQQQVATALDMLAATEAQLGPLRHQLRQAAAHLTGAKVLTARLYGVGPVTALALTCWLAGKDRFSSSRKAVRFTGLDITVHSSDRKGPPGRLSRQGPPVLRWAVYEAGKTHARTSAPDHGYYAAVADRKNTKRAALSEARKIVRQACHILTELGDDALTAA

SEQ ID NO: 49474 - protein, 356 aa, unidentified
MFIIGIDPHKGSHTAAVLDCHEQLVGELRVCADRLQRDRLLAFAQRFEPHVWAIEGATGTGALLAQQLVGAGERVLDVPPKLSTRARLLDSGRSDKTDAHDARSAAMVAMRHRGLRAVGVEDHIAVLRLLAKRHHDLVARRTQSICRLHAVLCVLVAGGLSRNLSAARAASELRRVRGADAVGLERRRVAHELLGEVRRVDAELSALKARITVAVAASGTTVTDVFGVGPIVAAYLLGYTGDVARFASAGHYARYNGTAPIEASSGARARHRLNPRGNRQLNHAIYMAALTQVGHDTAGRAYYLRKQAEGKSKKEAMRALKRRVSDAVYRQLLADARQRVGPGGQSGATLQSSAAG

SEQ ID NO: 49475 - protein, 364 aa, unidentified
MRKKNTSTSSISAGHTMGIDLGDRFSHVHVVDAVGGGVFDGRVPMSPASVESFLKSLPRLRVAMEVGTHSSWVACIAAATGHEVIVANPRKVRLIGQNTRKSDRADAERLARLARMDPALLGPITHRDVQAQRDLAVVRSRDALVQSRTMLVNRVRGTLKSFGLHPAKCSTANFAKKLAADVPDELKPAILPLLEILFELNLRIACFDREVERLSEEQYPVVQGLREIAGVGPITALAYVLTVDNPRRFAKSRDVAAYLGLVPRQRQSGERDPQMHITKTGSTLMRRLLVSAAHYIIGPFGKDCDLRRFGLALAARGGAAGKKRAIVAVARKLAVVMHRLWSSGEVYDPNRNRRGETRNQPAAA

SEQ ID NO: 49476 - protein, 333 aa, unidentified
MNDVKILAVDLAKHVFQLHGVNARGEVVLQRRLSRVHLPAFLAQLPPCEVAMEACATAHHWARRACSYGHAPRLIAPQYVKAFNRGQKNDRNDAQAIACAAMQPDMPQVPIKNEEQQVVMALHRIRSRVMKERVGVVNQLHGLVAEFGIVLPLGTRPLRRELTRVLDEGALPPLLQQVLTDQLDQLKQIEERLQILTERIQSLAEGSIPCRQLMRHRGVGPLTATAFVAEVANPRVFKNGRHVAAWLGLVPRQHSSGEHTRLLGITKRGNPYLRTLLIHGARAALRQAHRHTDPLSRWSLEVKQRRGPHRAAVALANKTSRRLWATLRYAEAA

SEQ ID NO: 49477 - protein, 374 aa, unidentified
MSANGITFVGMDAHKKAINVAMLLPGQHQPVEWQLANEPAAIRRLAKKLQREAPGEVRCCYEAGPCGYVLQRQLESAGVICEVVAPSLIPVKPGERIKTDRRDALKLARSLRSDDLTAVHPPTSADEAVRDLCRCREDARKDLLRARHRLDTFLLRRACLYALTRRRWGQPYRAWLGRLKFEHAADQVTFEDYVRTIEQAEERLRRLDAQLAAVAEQDPYREPVGWLRCFRGIDTVTAITVVAELHDFRRFLTARALMAYLGMVPSEHSSGQHQHRGAITKAGNIHVRRLLIEAAWHYRHRPHIGVGIRQRRTGQPEGIIAIADRAQDRLCHRFRTLTARGKIPNKAVVAVARELVGFIWAALYPATQGKQTHS

SEQ ID NO: 49478 - protein, 346 aa, unidentified
MLYAGLNLSRKRVDVCLLDERGERVAVTAAPPDGDGLRGLADRLAGCGEPIYAALESMNGARFVHDELERCGWRVELADAQKVKGLAPLAAKTDRIDAYVLAELARRDLVPAIWLPGPGVRGARERARFRLHLVRHRAALKARIHASLIAHGHPCPVSDLFGTRGRALLDAFELPEAWRTSTDASLRLIGHLDEEIDACERELRRLGADHAYVPLLMSAPGIAWVLAYTIAAEIGEIERFASPKRLTGYTGLCPRVYQSGASDRRGPLAKNGPKYLRWALIEAATHAASHPCYAAHYQATKQRLGRQRGAKVARVEVARKLAEAIWFMLTRLQTFAPQGPTLPLVA

SEQ ID NO: 49479 - protein, 299 aa, unidentified
MEQVQQYVGIDLHRRRSVIVRRTESGVTLDTVRIDNDPVTLAAELAKAGERPEVIVEATYGWYWAADVIQECGGSVHLAHPLGNNWGNRRVKNDERDATDLVDLFRMGRLAEGWVAPPPLRELRELIRYRAKLVHLRSNLKAQVHAVLAKDGVVVPMTDLYGVGGQRLLDEVELGRAYRIRVESLRDLIELCDREIAMLEKETAPFFAGDLGYHAVQAIPGVGPVLAAVFVAEIGDVSRFASARHLASWAGLTPTHHESDEKVRRGHITKQGSRRLHAAGTCGAPVPERHRHARTVCAL

SEQ ID NO: 49480 - protein, 347 aa, unidentified
MDQIIRIGMDISKHVFQLHGVNAAEKPVLRKKLRRQDMVAYFTKLPPTVIGIEACGGSHHWARLLQSLGHQARMLPPQFVKPYVKRGKNDAADAEALCEAMSRPTMRFVPVKSPEQQAALMLVGLRERLIRQRTQLANAIRGYAAEFGLTAATGICRIEPLLERIRADDTLPPLARELFITHAKEYDQLQARLEEVDDKLMAWHRANECSRRLAQIPGVGPIGATMLVMKAPAPEAFRSARHFAAWLGLTPKDHSTAGKVRLGVITRAGDEALRSVLVVGATAVIRQSRRSQSVAASPWLVELLKRKPPKLAAVALANKIARIAWKLMVSGERYAAQGLVVGTSRAA

SEQ ID NO: 49481 - protein, 388 aa, unidentified
MQNIVHRPEGRAAIRTDLGAIFVSLELSRATWLITSLSPGAGEKMSKHVVQGGDIVSLLRRLAHLQEKVRGRRRKEFPLVVIQEAGLDGFWIHRVLEHEGIESHIVDSASIMTSRRRRRPKTDRIDGEALVRALLAYHRGEPRVCAMVRVPTPEAEDRRRVSRELKTLTAERVGHVNRIKGLLFAQGVSGYAPLRRDRRTRLEELRTGDGRLLPYHLKRQIGRELDRLELLLEQMNAVAAERDALLVPAEEQAAPTPAKMLLGLRGIGPDFASVLWQEGLFRHFDNRRQVAAYAGLAPTPWQSGAVDHEQGVSKSGNPRLRTTMLQLAWLWLRHQPSSALSQWFHQRVGDNGRIRKVMITALARKLLVALWKYVTAGVVIEGATMKTA

SEQ ID NO: 49482 - protein, 412 aa, unidentified
MMEVVHVRCAGLDISKKDAKVCVRVAGSGRRKAVETVTTWGSTTNQVLALREYLVGEQVTCAVLEATGDYWKPFYYLLEDAGFEVLLVNARHVKNLPGRKTDVADATWLAQLGAHGLVRGSFVPPEPIRQLRDLTRARTAITRERGREVQRLEKLLEDAGIKLSSVASDILGVSGRAMLEALIAGQRDPAALADLAKRRLRSKIPALTEALTGRFTDHHAFLVRVHLDLIDRHSGAIEEITDRIEVVIEPFQGFRDLICTIPGIGSLTADVVVAETGADMTRFPTAGHLASWAGTSPGHNESAGRVKSSKTRPGNPYLQGALGAAAMACAQNPSTYLGARYRRIALRRGPQKANVAIQRSMLTAIWHMGRTGTLYDDPGAEFFTRLHPDRAKNRALHQLETMGYHVTLDRVG

SEQ ID NO: 49483 - protein, 366 aa, unidentified
MVDLVFPEDQINQKKEEARMRFYTNQRKYYCGIDLHARRMYVCIIDDKGEIREHRNMRTDREAFLKTIGPFREDVVVAVECIFTWYWIADLCQNEGIPFVLGHALYMKAIHGGKAKNDRIDSRKIAGLLRGGMMPMAYVYPVRMRATRDLMRRRNHLMRKRSELYVHIQYTNIQYNLPDPFGPISRPRNREGIAGQFEHPSVQKSIAADLEMIRTYDGILSQLERSIVRMANHHDPESYGLLQTIPGVGRILALIMLYEIENINRFDSVQDFASYGRLVKCARESNGKKCGYGGAKIGNVHLKWAFSEAAVFFPKGNGPAKKYLDRLTRKHGKSKALSILAHKLGRAVYFMLKNREAFDQKKFLTV

SEQ ID NO: 49484 - protein, 361 aa, unidentified
MDSTKYIDSTKYIGMDVHKETVSIAVMNSAGKLVVESILETKAATILQFIQGLRGNLHVTFEEGTWAAWLYDLLKPHVTKIVVCNPRRNALLKEGNKSDKVDARKLAELLRAGLLRPVYHGENGLRTLKELSRSYLTISKDLTRVMNRLKALYRGWGISCEGATVYAPRHRSEWLGKITEAGVRRRAEFFYQQLDALQALRQQVRRDLLAESRKHSERKLLRQIPAIGPIRAALLMALIQTPHRFRTKRQLWAYSGLAIETHDSAQYRYVAGQLQRSKKPQRLRGLNRNHNHDLKAIFKGAATKASSGAGPFHDFYEALLTKGMRPSMARLTLARKIAAITLMVWKKGAHFDAEQLKPQAA

SEQ ID NO: 49485 - protein, 337 aa, unidentified
MLPTRLREQNESDKVLIKGDSMSVRRILAKTIDTDLEYEAIGIDLAKNCVSVALLTTDGEVVCIDRLDYSELEKSAQVLCPTTFAMEPCTEMNYLVQKLEAWGHRCLVIGGKNVQNYVENHYSGQKTDLNDAQALAFLAQDTQLRTIKAKDMEQRKYASLTTLREQYIKQYRQTIVSLKGICQAWGLNISKGISGKARLKDLIENHAAFPEELKESLVDMVTHAQTAQKALNKITKTLEELAKNDKLCQLIRTIPGLGLICSCRLRATIGDIKRFKNPKDFPAYYGLVPRSIATGHNEKKGRITHRGDKTMRSLMVQGAGSVIGFFSLFPLAFRKFP

SEQ ID NO: 49486 - protein, 311 aa, unidentified
MATSSGTYVGIDVAKDKLDVAVLGEKQEEQLDNIREGINDLVQQMVELQPELIVVEATGGYQRSVVDALFHAGLSVAVVNPARVRQFARACGLLAKTDKLDAQVLAVFGQRVQPKRYEGKSEAEKQLSALLVRRKQLEEMLKAEQNRLRAISPSLRDSVERIIAILKEEKKRLEEQIEQFLNEQKAWQEQREILSSAPGVGMVTTATLLADLPELGKLDRKKIAALVGVAPMNYDSGKKRGYRKTKGGRSDVRSVLYMSTLVATRYNPLIRAQYQHLQKRGKEKKVALTACMRKFLTILNAMLRDQQPFRV

SEQ ID NO: 49487 - protein, 374 aa, unidentified
MEQTNIGYVALDTSKLRNAVAIAVDGRDGEVRYLGEIDNTPAAISRLVRKLARQYTKVTFCYEAGPTGYGLYRQITGLGHECIVAAPSLIPRKPGDRVKTNRLDALSLARQLRAGDLTAVWVPDPHHEAVRDLTRARGAAVRDLRVKRQQVSALLLRLGQPYPGKTTWGKTHLTWLAGRKLEHLEQRIAFEEMLLAVRQASERIARLEQAIRAMVPEWSLASTATALMALRGIDLIAATTLLAEIGDLTRFRAPRELMAWLGMVPSENSTGERVRRGAITKAGNRRARSMLVECAWSYRHPPRVGAAKLAKVEAAPLAVRDIAWKAQTRLTARYRALRRAGKLDTVAITAVARELAAFIWAVGLAVGAGATPPA

SEQ ID NO: 49488 - protein, 340 aa, unidentified
MNEITTVGLDLAKNVFQVHGVDAEGTTVLRKQLRRAQVLAFFSRLPRCLVGMEACATAHYWARELRALGHEVRLMPAQYVKAYVKRNKNDAADAEAICEAVVRPTMRFVPAKTAEQQAAVLLHRGRERLVRQRTMLVNALRGHLAEFGVIAPQGLRNVGRLIAIIRDEEDARLPGLARQVLQVLAVQIEQLEAAIAALEKQLMGWHKSNPVSQRLATIPGIGPIIATAIAAMVAEPSGFRSGREFAAWLGLVPRQNSTGGKNRSGGISKRGNQYLRRLLINGASANLLRSKATNADPWVIGLRRRRPSLVVAVALANKTARIAWAVMHRQENYQRTALAA

SEQ ID NO: 49489 - protein, 343 aa, unidentified
MQTVTTVGLDIAKSVFQVHGVDAAGQVVIRRQIKRRYVLAFFQKLSPCLVGIEACASSHHWSRELQVLGHTVRLMPPAYVKPYVKRNKNDAADAEAICEAVTRANMRFVPTKTPEQQSGMVLHRTRHLFVRQQTAVINAIRTHLAEFGVVAPVGRNGVEELLKAVADPADARVPEIARACLLAFGAQLRRLKEQVLEFDRMIRAWHRSSEVSMRLDECPGVGPVLATAVVATVADPKVFRSGRNFSAWIGIVPKQHSSGGKNRLGGISKRGDRYLRFLFVAGALAVIRYAKIHGTRHRPWLTALLARRPTKVAAIALANKIARMVWAIMVKGERYKEPVALAA

SEQ ID NO: 49490 - protein, 341 aa, unidentified
MSIVGAFDVHRRQLTFDYLDIETGEVRRGRIVPADREHLRAWLARFAGRDDVRFAVEGCTGWRYVVEELLAAGIEPHLAEPADTAALRGKKRHAKTDKADAAHLRAHLLAADLPECWIPPAHVLEARAVVRLYKDLLDERGGWHQRIAATMFHQGVPAGSSMDTAAGRAAAAEAQLSPAGRQAVEAGLRQIDRLTGELDPLRRQLDLISRRQPGCAALRAAHFGIGAVTAVAIWAELGDVRRFGNSDDVVRHTGLDITVYSSDGKRSAGHLARQGPPLLRWALYEAAKCAARPAAPDYHYYSAVRDRRTGGLATLSVARKLARRCYHTLRGLGDQALTPAA

SEQ ID NO: 49491 - protein, 344 aa, unidentified
MTYYAGLDVSLRTVNLCVIDDQGELVAETKLASDVQDIVAYLDELSVDIESISLEAGTLAQYLTYGLQSAGFEVVCMETRQVKGALSAMRNKTDKHDARGIAQILRSGWYSRVHVKSMQSHHIRMLLSSRKAVLSKCVDLENEVRGLFKIFGLKLPPKLGHGAFDAAVRSIIETDETLSHALLPLLDARLVLYQTFRVLDNRTRKMAHADPVCVRLMSVPGVGFITALTFKAGVDDPHRFKRSRTVGAHFGLTPRRFQSGELDIDGHISKCGDADVRATLYTAANALLTRSARWSPLKAWGMKLAKSRGHRRAVIAVARKLAVILHRVWIDDTQFRWGTEGARS

SEQ ID NO: 49492 - protein, 336 aa, unidentified
MRYIGVDLHTTQITICYLKADSEFEIRKYQLIEMDKFINTLEITDEIAVEATGNTRWFAEQVAEKVRRVVVVNPRQFEVVKNSVKKTDKNDAINLARFLRADLLPEVRAKREEATSVQSLVNTRTKLVRLKTGLINKIHALYVSNGRKLKKASLSSDKGLDKVLRCEWSAIERIELEIIIEQIRSLKVSIKKLDTAIEAESEKLKGYQSLVSMSGIGSLSAGILLSVIGNIKDFGTADKLASYFGIVPRVSNSNETVNHGSITKRGNRTGRTTLVQCSLSAIKKSEYLKRYYEQVKARRGHGKAKIALARKYLEIIYNTLTNDWVFADFNNFELAE

SEQ ID NO: 49493 - protein, 416 aa, unidentified
MQQILGVSCGLDVHKDLIEACILTANGTGEPEVVRESFTTLRGDLLRLREWLATNRCPNVAMESTGVYWKPIYEILEAAGDFDLCLVNAQHMRNVPGRKNDKNDAEWIASLFMCGLLDKSFVPEKGIRDLREFTRYYVKLTQEKVRLVNRIEKLLQTHGFKLSSVLSSIVGVSGLRILDILRERGEVSVTAVGNVLARGVKKTAGEIAYAINGKLSQSSQTLLGIMLDGLASYDLQLNTVFCEMQRVAEPYASQVQLLATIPGIDILSATYIIGEIGVDMSRFHKGAPSLCKWAGLSPRDDESAGKIKSNKILKGNPYVKSILCQCAWAATKTRNTRSSNWYWRNVKRLGQKKAIIAVARKLLVYAFHMLSTGEVYNSQLDIANTENLKAMKLASAKQQISALEKTPVCGAAVAAS

SEQ ID NO: 49494 - protein, 415 aa, unidentified
MEIVYQRCAGLDVHKRTVVACANTLDADGKVAKQRRSFGTMTTDLIALRDWLTTHGVTHVAMESTGVFWKPIYNLLEGHLEVMVVNAQHIKAVPGRKTDIKDAEWIADLLQIGLLRPSFIPPVWQRVLRELTRSRTSLIEERTRTIARLQKGLEDANIKLASVASDLMGKSAQQMLHALVQGTLTPEQMAQFARGRMRSKREQLTQALTGYVQPHHRFMIAEHLTHLKALDQAITRLSEEIAEQLRSYEPILARLETIPGIKRRLAEVILAEIGPDMSRFPTAEHLASWAGMCPGNHQSAGKRLSGKTRKGSQWLRTALVEAAHAASHCKDCYLSAHYHRIAARRGKKRAAVALGHSLLIIIYHVIAEEKEYQELGGNYFDKLDQQGKEQRLVRQLKKLGFEVTLTPTSSDPISA

SEQ ID NO: 49495 - protein, 344 aa, unidentified
MVTTIGIDPHKATHTAVAIDGSENVLDEITVRADKDQTNKLIEWAASVNGDGRLWTVEAATGLGHLLSQQLVAHGETVVDVPPVLASRIRVLSSGKSQKNDPNDARSVAIAALRRDGLGEVKREDEAAILRMLAKRHLELTALRTQAVCRLHAMLAVLRPGGMGHRMSAKRASRMLQGIRGLDAVGEQRRIMAKAHLADIRRLDRDLDTNKKQIRTAVVATDTTVTDIYGVGPVVAAFLIGYSPPIDRFASPDRYAAYNGTAPIEVSSGGKVRHRLSRRGNRTLNHAIHMAAVTQISHDTPGRVYYDRKMAEGKTNKEALRALKRRISHVVYRHLKADAEQHDA

SEQ ID NO: 49496 - protein, 352 aa, unidentified
MSNVKYVGMDVHKAITVIVVLNALGHMESHSKVKTKAENICDFFRGLSGKVEVVFEEGTHSAWLHKLIKPLVASVTVCDPRHNKLIEDGNKSDDDDAETLALLLRIGAVKAVYKGDDEQRQLKEFCRAYENLVSDATRVKNRLQAIYRGRGLDPGRAIYRADQRQESLAKLDDEAMRFRAESLLDQLAALQELRKQAKRRFVLQVRQHPDYRILSGLPGFGPVRVGQMIATVGTPHRFRTKRQFWPYCGLAVVTRSSADYQIVEGKIIKSQKNVSTRGLNRNHNPRLKQVFKSAALTSLRQEECKAYYQRLVAHGTRPELARVSVARKLASAALTLWQRKEEYDPKKFFATA

SEQ ID NO: 49497 - protein, 423 aa, unidentified
MKYALARVLPDVPPGGVSAGIDWGTAGHAACVVGATGRVADEFAVADDRAGLAALTARLRRAGAAEAAIERGDGPLVDALSAAGITVVVITPRQVSRLRERHVASGAKDDSFDAFVLADALRTDRARLRPLVPDSPQALALRAAVRARKDLVAQRVAACNRLRAHLLTAFPGAAGLFSALDSRLSLAFLDAFPSRASAAGLDEAALAAWLATVPRRGGCAPAAVLARRLAAAVPGTGHDAHLAAVTRALAGTVAALAARIRDLENAVAAQLAAHPDAEVFLSLPRAGTLRAARLLAETGDSRARYPDARALAGAAGVAPVTRRSGKWTSHEFRWAANAHLRDAWTDWAGDSRHASPWAAALYDAARQRGKDHPHAARILACNWISVIWPCWQQGIPYDPAKHRSLQEILARQQQPSPPANTPA

SEQ ID NO: 49498 - protein, 361 aa, unidentified
MSESMALVGLDVHQAQTVAAVLDPVTGELSVERLRGVPERVVLGFLEQLGRPVRAVYEAGPSGFGLARAASERGVDVRVIAPGSIPRAPGDRVKTDRRDAKRLVRLFAAGELSFAFVPSESDERFRDLVRCIDDARKDLMRCRHRLSKFLLRHDLRFSGRSWTVPHQRWLGNLVFDDALSRATFVDYLCAVDALAQRRQALIGVLEEEAPGSSHGETIARLRCFRGIDTLTAAGLCAEVGSFGRFAKPALLSGFLGIVPCEYTSDTKRVQGQITKAGPPHARRLLVEAAHHYRHRPAVGETIAARQAGQDPRVVQVAWRAQKRVNARWTHLGARRGKHTGTVAVACARELAAFCWEAATLD

SEQ ID NO: 49499 - protein, 365 aa, unidentified
MSGSMSIRQRFAIAVAEAGRGSEVRFFGEIANSPDALATLLKKLGARHGKLYFVHEAGPCGYGLYRQIIDAGHVCDVVSPAHTPRRAGDRIKTDRRDAIMLARLSRAGELTKVWTPDYAHEAMRDLIRSREVASKDVRQARQRVQGFLLRNGRRYAGAVWKRSHRVWLGNQTFDHPAQQIAFQTHLNAMDQAVERKLEIEKQIQALLPDWSLGPVVEALQALRGVALAVAAGVVAEVGDFQRFDNPRQLMAYLGLVPGERSSGETRRPTSITKAGSIVARKLIVEAAWAYRMPAKIGQAMQRRQEGATAEVRAIAWKAQVRLCARYRRMLARRKTPPVVITAIARELVGFIWAIGRSVKPRMIAA

SEQ ID NO: 49500 - protein, 355 aa, unidentified
MTNIEGPVTGGVDTHGQTHHAGVIDQVGRQLADSEFPTTPAGYRALLAWLRGQGQLERVGVEGTGAYGAALARYLRGQGVVIVEVDRPDRKTRRVKGKSDPIDAYAAARAALSGTASGSPKTRDGRVEAIRALRLVRRSAVKARTQAVNQLKSLLVTGSADLREQLRPLGPAALVDACARLRPGADLTDPAIAAKTALRRLAARIRALGAEIAEADRELDPLVTAAAPRLVAMMGVGPEVAGQLLVTAGDNPGRLRSEAAFAHLCGVAPIPASSGRIDRHRLNRGGDRAANSALYTIVLCRLRYHPATQAYAARRTEQGLSKPEIIRCLKRYVLREVYRTLLPTAPPAEDLAPAA

SEQ ID NO: 49501 - protein, 361 aa, unidentified
MTTIVKPVSCVSIDVAKAKFDVALLKPNGKYRSKVFSNNSEGFRQFLDWLEKQEALKAHLCMETTGAYGRSLARFLAQQQLVISVMNPALIHAFGKTELSRAKTDKADARLIARYCQMHRPAPWVPPAEAIVTLQALVQRLDDLLGMQNMENNRLEMAEPAARASIEALLLTIHQQIDAVRRQIQDHMDDHPDLKSQKALLLSIPGIGEATAAMLLAFLSPLTRFHSAKQVVAYAGLNPRIRESGQWAGKSHIAKAGNVLLRKALYLPAVVAKRYNPAIAAFCDRLLSRGKCPMQVIIAAMRKLLHITYGVLKSGQPFDPEKALAWASSRRYLFNRRTTAAKFAGACPLSAGIHPTAGGNP

SEQ ID NO: 49502 - protein, 346 aa, unidentified
MALTIVETHAITGGVDTHADMHVAAALDPIGGLLGVREFPATAAGYGRLLSWLGGFGTVCLVGIEGTGSYGAGLARHITAAGVRVVEVDRSDRQDRRRQGKSDPLDAVSAARAAQSGRARGASKGRDGAVEAIRALMVAKRSAAGERTQTINQARALVLTGPDDLRARFTGHTAAALVAELASLRPRPGSTVGYATRIALRELGRRAEFPDGQLERLDELIGPHVAARAPGLLALYGIGPNTAALLLIAAGDHPERLRSEAAWAHLCGAAPIPASSGKTVRRRLNPGGDRQANHALWRIVFTRLGSDPATRAYVERRTAEGKSKKEIIRCLKRYVAREVYPHLRAG

SEQ ID NO: 49503 - protein, 343 aa, unidentified
MTQYVGLDVSLKDTAIAIRQNGKRIWRGKCCSDPATIARTIRKHAPDPEKVVFETGPLATWFFHSLSGEGLPAICIEARHAQKILGETLNKTDANDAEGLARLAETGFYKAVRVKSFGAMLIRALVAARAQLLGVTTQLSNQIRGIMKTFGLIVPKSKGRAFLSRVQDLLQEQSQLAQIILPLVEVWQAVRARVSELSRQLLAAARHGRNTRLLMTIPGIGAITAVSFVAAVEDPGNFRNSRSVGAWLGLTPRRYQSGTVDFDGHISRRGDHRLRGLLYEAATALLARTRADTTSDLKVWGLQLRERLGFKRAAIAVARKLSVIMHTMLKTGQPFIPTREGFA

SEQ ID NO: 49504 - protein, 430 aa, unidentified
MTELNPTPAPATLVAIDIAKHRHEVLIEAPGQARRRRLTILSSKADHDRLVETLTACGGPVLIGFEATGDYHRGLAYRLLSAGFELRLVSSVALARTREALHNGWDKNDPKDAQVILHMLRIGATQRYVDPLAAGINDLQELSKTHEAISKAKTETWHRILTHYLPLYFPEVERFAGNSRSDWFLALLERFPTPSSIMALDRESFVQEAWPVIGRKVSKARLLNDIYETARSSTALPVEEGSAAIIMFRMVLAEARSLIRQRDQIEKLAHVMLTDQADYRLLCTVPGIGPIHALTILAEAGDLRRFGHHRQFLKFCGLDLATCKSGTFRGRTKLSKYGNARLRRALWMAAQVAMRQRDNSFRDKLGRYTERDRHDADLRRKAMTALTAKMARVVHAVIKGGAEYRPFFERPVPGGRTSLCVGRKGAQATL

SEQ ID NO: 49505 - protein, 415 aa, unidentified
MEQIFMIKENYIYVGIDLHKETHTAVMIDCYNQKLGEITFPNRPADFPKLVTKVKKCNTDAKEVVYGLENAYGYGRPLAVWLIDKGYFVKDVNTAISHRQAKHRGAMYRKSDSDDAEAIALATLNMLDKLPDACPNDAYWSLGQLVHRRDNIMKQRTRLVNQLHEQLCIAYPSYKSFFNDISRPTALYFWEHYPSKKYLKGKSVEDLRAELVPVSHNKCSTKTCEKILDAVASDKVKNNAYQDARDMVTLSIVSDLQHYDSQLAEVDKMLEQMYKMLGCTLTTIPGVNVITAVKILAEIGDIKRFSNANKLAQFAGIAPLHLSSSGKGKDLATKQGNRRLQATIYFLAIQMVQISSKGTPRNPVVRAYYEKRKAEGKTSQQALICISRRLISIIYGMLKHGTEYRMPVVESAGEK

SEQ ID NO: 49506 - protein, 345 aa, unidentified
MNYTQNQKIKQVTESTLVLGVDIGSSEHYVRAFDYRGRELTRKVFRFSTDINGFNSFYDWVTQICIKHGKNEAMIGCEPTGHYWYTFYQFVKDHGMKLAFVNPASVKKAKELDDNSPKKTDLKDPKTIAKLVIDGRYSFPYVPEGIYAEIREVTSSRDRIMKELNAASNRIQRWLKIYFPEYLTVYKKFDTTTGMMILEEAPLPAMVPALGVDNIVKIWREHKVRGKGASFNRAKTLVDAAHDSVGKSGGQGAVMEIQMLLEDYKVKKQQLEMVTSVMEELTMQIPNADKMLSVDGVGLVTVAGFISEVGDISRFKNPKQIQKYAGFELVENSSGKHKGRTTISK

SEQ ID NO: 49507 - protein, 391 aa, unidentified
MIYIGIDVAKDKHDCFITNSDSEVLFKAFTIFNNLDGFNDLYQKIESVMDDVTKVKVGLEATGHYSYNLLGYLIDKGLPTYVINPLHTNLYRKSLSLRQTKTDKVDARTIASMLMSDVNLKSYSDISYHNEELKSLTRYRFDKVKERAKLKTSVSRLVCILFPELEKLVPTLHMASVYALLSEFPSAKHVATAHLTRLTNLLSKSSKGRYGKDTAITFRDSARASIGSNMPAKSLELKHTIKLIQELDSEIDEIENEIKIIMDEINSPILSIPGINYRMGAMIIAEIGDFNRFDSPDKILAYAGFSPSTYQSGQLDGAYAHMEKRGSRYLRYALYNATKYVCHWDPTFAAYLAKKRAEGKHFNVAISHAVKKLVRVIYHLEKTKQQYIKVA

SEQ ID NO: 49508 - protein, 347 aa, unidentified
MIIIGCDLHSRFQQIAWVDTETGEVENRKLDHESGEAKRFYEGLKEPALVGIETTGHTRWFAEMLAELGHQLVVGDAAKIRACEPRKQKHDRRDAEHLLNLLIRGDFPKVWLPSAEERDVRVLVEHRHQMVELRTRAKNGLQAMALGYGLRRRGRLWSAAGRKELQKIPLREGMARRRQDLTRLLDQLSAWVKELDQRIEEEVARREDAQRLMTHPGVGAQTALATVLVLGPAERFPDAQHVTSYLGLIPQEESSGGRQRFGHLTKQGNRLMRFLLVEAAGIASRYDPGLRRTYRRLAFRKGAAVAKVAVARKLAIRLYIMLRDGIDYAEFCRRGSHAGMLGDVALA

SEQ ID NO: 49509 - protein, 323 aa, unidentified
MQGQEATEPVSRPKSNIGIDVSKDWLDVHVLPSGLRLRVANDTQGHRQLRRRIAGLDIACVAVEPTGKWHRALCRSLAAAGIALVVADPFRVRMFARASGLLAKTDRLDAAALAAFAAAMATPARPLPPPMIEAIAELVTARDSAVAEQTRLKNQLHAACDSFLKRHLATRIKTAAKVIASLDAEVQRRIAAEPALAERQAILCSIPGIGEVTAALAIAKLAELGSLTDKQIAMLAGLAPIADQSGKRDGQRSVQGGRPSLTRGFYIAAISAARYNPALRVFYQRLRAAQKPPKCALIAVARKLLVLANTLIAQNRMWQPNPP

SEQ ID NO: 49510 - protein, 485 aa, unidentified
MAAGKKKDTGVAGSAAGGPASLAAGDGGDGAEVSEDQVRVIERAAAIDVAKGSGMVCTRVPGSRPDRRRQKVWQVTATYREVIALMDHLRSEGIQRLVLESTSDYWRLWYYLAEAAGLEVWLVNARDVKHLPGRGKSDRQDCVWLCKLNERGMLRRSFVPPQAVRDLRALTRTRARLAQDQARHQARVEKILEDALLKISVVISDLFGASGRRFLDALVAGERSPAALVALGDPRLKATRRELEEALTGKFRDIHALEIKTHLRILDVINEETARLDQAIGEQLALVPRTAPACTACGEAGGSHTPGCAGEGTPLLGLTERIDEITGVGLCNAQVLIAELGTDPSQFPTPGHAAAWARLTARTLQSGQSARPGRTGKGNPYLRGALGQCAMAAAHTDARLGVMYRRIARKRGKQKAIVAVARVICEIAWILICDPGARFEELGPDYYTPRSPARRTRDKIREIERLNPGKKVILAPIDAQADTAA

SEQ ID NO: 49511 - protein, 347 aa, unidentified
MRFYNQQHKYYCGIDLHARKMYVCILNQAGKTKVHKNIDTDPGAFFELIFPFLDDVAVAVECVFSWYWLADVCAQHKIPFVLGHALYMKAIHGGKTKNDKIDSYKIAALLRGGNLPVAYAYPAKMRATRDLLRRRMYLMRRRAELLTHIQNTNTQYNLPEIGKNLSKKCHRKHIAERFDDPAVKMTVEADLALIGFYDQLLPKIEQYIDQCAKQHDPNALYRLRTMPGIGYILALAILYEVGDIERFKSVQDFSSYARLIRPQKQSDGKWAGKSNKKIGNAHLKYAIGEAAKLLLRRSKRAVRYREKLEGKHGKAKSYGIFTHKVGRAVYFMLKNKKAFDKNRFFEA

SEQ ID NO: 49512 - protein, 344 aa, unidentified
MDHFGGLDVSVKETSICIVDDTGRIVKEVKVASEPAALLKVLGNSTYRFKRIGLEAGPLSQWLFSALAEAELPVICVETRHMQAVLKAQINKTDRNDARGIAQMMRAGLYRPVHVKTLRSQKLRMLLTHRKLLQSKAIAIENDLRGTLRNFGLKVGMVGKVRFEARIQELVKNQPDLAVLVEPLLIVRRALREQIVILHRRLLAIVRDDEVCRRLMTTPGVGPVVALTYRATVDVPARFRKSKSVGAVFGLTSSRYQSGEIDWNGKISRCGDEMMRVMLYEAAQSMMHSRKWSWLKAWAMQIARRRGMKKAIVALVRRLAVIMHRIWVDGTEFRWTREQAAAAA

SEQ ID NO: 49513 - protein, 381 aa, unidentified
MKKDSIAKLQVTKSQIRRMAAKQRLSVGLDLGDRWSRYCILNEAGGKAREDQLPTTKAGLDSLFAKMAACRIALEVGTHSPWVSRHLAVMGHEVIVANPRKVRLITQSVKKNDRMDAEQLARLARVDPQLLAPIRHRGREAQGDLAVIRARAELVDCRTALINTARGLAKPMGERLKSCDADYVKESLADGLSEATQNAIRPLLKSVEEITKQIGAYDKKIQEMEKGYPETKVLKQVNGVGTLIALTFILTLEDAERFAHSRDVGPYLGLTRKLRDSGESQPELGISKAGDILLRRLLVQAAHCILRDGAADSDLRVWGLTKVEAGAGKKGSKRRKKKAAVAVARKLAVLLHRLWVTGEVYDPQYNRKAAEAAKGKEKAVA

SEQ ID NO: 49514 - protein, 342 aa, unidentified
MSIAVLGIDLGKTSCSVMGLDEAGRVVLRRRMRRETVSSYAAKLPACIVAMEACCGAHHMGRALAAWGHEVRLMSPEYVRPYVKAQKNDDRDAEAIAEAATRPTMRFVALKSEEQLDMQTLHRVRDRLVAERTLLMNQIRSLLLERGITIPQGRAKLNQQLSELRQAPDQVSPRMQLLLRDLHERLLEITARIRTYDAELTAQAQADERARRLMTIPGIGALNATALVAAVGEARTFRRGRDLAAWLGLVPRQATTGGRPKLLGITKRGSKYLRKMLIQGARASMPTLRQSDTRLGAWLRSLLARSHPNTAVVALAAKMARIVWALLHHGRSYEAMAAPVTR

SEQ ID NO: 49515 - protein, 423 aa, unidentified
MKYALVRVLPEVPPGGVCAGIDWASADHAVCVAVLAGRVRDRFTAVHDRAGIAGLIARLRGSGAAEVAIERGDGVLADALLAAGLTVVVIGSRQVKNLRSRYGSSGAKDDRFDAFVLADTLRTDRARLRPLVPDSPATLALRAAVRARRDLVAHRVSACNQLRAHLAVAFPGATGLFSELDSPLSLAFLAAFPGQQAAARLDEQALAAWLATVPRRGNTAPAGVLAARLAAAPRGAAGADAAQAAVTAQLAAATAGPAGRVRALEAEIAAQLAAHPDQHIFTSLPRAGTLRAARLLAETGDCRARYPDPWSLAGLAGVAPVTRRSGTYISHEFRWNVNRQLRDAICDFADGSRHASPWAATVYAAARDRGKDHPHAVRITARAWVLIIWRCWQDGTSYDPAKHRALQDVLTRQAAAGTPQPHR

SEQ ID NO: 49516 - protein, 341 aa, unidentified
MYATTIGLDIAKNVFQVHGEAGGQVVLTKRLRRSQMVDFFAKLAPCLIGIEACGSAHYWARTLRGLGHEVRLIPAAYVKPFVRRNKTDARDAAAICRALMQPDMRFVPIKSIEQQAARGLERSRDLLVKQQTQLMNNVRSQLAEIGIVAAQGRLGFNKLVALLQAGDDGVPPLLLSVLRLLVRQIEQLTTAIFILEKQIVARARENETMRRLTTIPGVGPLTAHAIVTAIGDGKQFATARDFAAWCGLTRRVDQSADKRRERGISRQGEMRLRKLFTLGASTTMRYVRSSPERATEWQCGILARRPVKVAVVAQAARNARVAWAMVQSGESYRRPALTAAG

SEQ ID NO: 49517 - protein, 413 aa, unidentified
MTDESLSWFAAVDWGSEKHQACILDAKGDVAGEREFPHSGTGLTELCDWLLSVACDTSAVAVAIETPHGPVVDALLDRGFAVYAINPKQLDRLRDRFCVSGAKDDRRDARVSADGLRADRHLYRLVQVSDPAVIELREWSRLLEELQQERVRLCNRVRHQLWRYYPHLLDLTDDVGADWFLELWALAPTADKAGRLRETTIARLLKQHRIRRLNAETTCRILRQPAIKVAAGVTEAAVLHLRSLFARLRVVNRERHQAERKLDELCTELSERASEGQSGEPCDVAILKSLPGIGRVTLAALLAEASGPLSRRDYPALRTLSGVAPVTKRSGKSNIVVMRYAAHARLRNTVFHWARAAVQNDPKSSCRYAALRKRGHSHGRALRNVADRLLQVACILLQRQTMFDPDRCQPAAA

SEQ ID NO: 49518 - protein, 348 aa, unidentified
MTLTTIGFDVAKLVFQVHGVDENSRAALKRKLHRHEVVTFFEELPRCTVFLEACGASHYWARLLTALGHEVKLIAPEAVKPFAKKGKKNDAVDAAALCVAGSRPEIQFVPIKSVAQQAVLALHTARSLLVKQQTMLANAIRGLASEFGLVVPQGLHRLEELMVQVTAEASFPAVGRQALIVLHAQLQAAAERIVMLEEQIVVHARQNASARRLATIPGIGPITASLIAATMGDNITAFTSARHFAAWLGLVPRQHSTGGKPRLGRITKAGNTEIRRLLVLGATSMVRRAETWNSAAGIWLRGVLARRPVRLTTVALANKMARIAWALLTRNDVYRAQGRSKVAAGAAA

SEQ ID NO: 49519 - protein, 453 aa, unidentified
MSLVMLGVDPHKQSHTATALVAGSHQQLATLRVPASPSGYRQLLGWARQFPQRRWAVENARGLGCHLTQWLLARGESVQDVRTTATARVRELSRGRGRKTDALDAAAAAGIAALQGDAAQLQPEDETVVLAVLEERRSNLVGQRTRSVNQLHALLRELIPGGAPRKLRADRAAALLRTVHPLTAADRARKQVAWDLVAEVRGLDRRLAMIGIRIQDSVAALGSRLPETVGVGPVIAGRLLGRTGRASRFPTAAHFASYTGAAPVEVASGERARHRLSRAGDRQLNHALHLIALVQVGTPGCAGTTTSGAHWPRARPPGKPCAASSAESPITSGESCAATNRPATTANPRRLDRQRRPRSVGVKQRVVGVQARRCARRSRLGGAGSRAGCRPIGWPGCGGLADGWPRAYGDGHSRRERLVSRSTSRTPTRQAGRPGAGCAQSGPARSGVCRTPW

SEQ ID NO: 49520 - protein, 412 aa, unidentified
MQVIFGCCCGLDVHKRMVTACYRTQGSDGQVHKEVQTFGTMTADLLVLHDWLVSRGVTHVAMESTGVYWKPIYNILETSFTILLVNAAHIKAVPGRKTDVKDCEWIADLLAHGLLKGGFIPPEPIRDLRDLTRYRKSLIDERTREVNRLHKLLESSNVKLASVATDVMGVSGRLMLESILAGHADPMVLAELAKGRLRKKLPDLRKALESRFRPHHRFMLEQILGHLDFLDEWIARISEEVASRLDPYCRQIELLRTIPGVDRKTAEVTLSEIGPDMGHFPTARHLASWAGLCPGNNESAGKRMSGKTRKGNQWLRRAMMEAAWAASHTKDTYLNSQYRRLVTRRGKKKAIVAVAHSIMVIAYHILKNDIPYRELGADFLDKLNASMIQRHHVKRLESLGFKVTIEPLTKAA

SEQ ID NO: 49521 - protein, 344 aa, unidentified
MATYYIGADVHCNNTELAIEQRGEIMARYSVPTSIPAISTILDSLQGKKIFAMEEGPMAGRLYRNLNEKVEKFIVSEPRRNKLITCEGDKDDRIDSGKLAVLLRGNFLKAVHHTSDSHRAHLKHWVNLYNDRVRDGVRNICKIRACCRMHGIAIPRKVVRNNVHRHDWLSGLDNPVLKVQLQMLWIGYDATKEQVGLAKKQLSSYARKYKIIKYWRKLPGVGLIRAATIFAYLDTPWRFKNRSKLHKYCGVGLMRATSGKDKKGRPKPARLQLPWAVNRRLKNAVIGAATSAIRHRDNVFKDYYERMLSNGITPANAKHSVARKMVSTMSAMWKTDSKFDEKLF

SEQ ID NO: 49522 - protein, 331 aa, unidentified
MPITYYGVDVSKDLLHIAYPNGCDATGQPQWGYQKLSNEIADIEQWATQLPAHCQIIFEHTGTYSARLAWILALLNHPFSILTPGQSKGFAATLKSISKTDRSDALMLARYGQALQPALTKLADETLHQLRQRHKHFNDLKVSHQGLSNQLHALSYDPRASSEVKSSLLTLSESYQAQITLFENDLNQMSQEQLQLISERMQRVKGIGPASAQALCTATNGLHGFESAKAVVKFVGIAPIQAQSGSSVHRRGRMARTGVGYVRGMLYMAARSARKYNLSCKALYERLRAKGRCHKVAMIAVINKLLHQIFVVVKKDIEFINGLGLPKESLV

SEQ ID NO: 49523 - protein, 379 aa, unidentified
MTFLGIDCGQLRHRFCLIDGEGQVLAEGAFSENRRGLAELSARVEEHQLPQAVVMEASGACWQNLCAELQGWGWPAQAVDPQRAAQFARLHNPRHKTDKADARSLARLGLEAPQASFSGGAQTTLAHGLARGIQQRSALLNQLHCLVVVANPALLVCRWRLGARRSLAVLRAYPTTRELRRARALAQVRFGRRGRLGEKAAETLREAAQQVLWGALNEAHATQVRFLVGQIAAWDAEISRLQAELRTRLPQAQRLTSIMGVGERTALLVYACVPFAQLASAKQAAAYVGLHPHVFQSGASQWSRLSKRGDRIARTALYRAALPAVQSNSRLRAFYQRLLSAGKAKKQALCAVAHKLIRICFALVRYQTTYSLNYQPLKA

SEQ ID NO: 49524 - protein, 424 aa, unidentified
MTPHENVEPAAAEDFAAWVAIDWADKKHVWALQETGATSRQRGELEASPEAVDAWVGELLRRFPERRIAVALEQKRGALLCLLSKYAALVLYPVHPATVSRMRAALYPSNSKDDPKDADLLLDILLYHRKHLRRLDADTVETRKLQILVQDRRLLVDQGTAYSNQLRAKLKLYYPQALRWLPDLHAVVAGEFLKRWPTLPLLQKARRETIEKFFHRHNCRSEELIRMRLDEIPRAVVATTDAAIVDSSVAMVRALVDLMAVLHTHIAALDQEIAATAAVHPDLPIMASLPGAGRVMVPRLIAAVGTQRARFACADEMSSATGIAPVKQASGQSEWIHFRWACSKFARQSFHETAGHSIAQSAWAKAFYEAQIRQGKEHHAAVRALAFKWQRILFRCWQDHQPYDEQKYLAALRRRGSPYAQAAA

SEQ ID NO: 49525 - protein, 351 aa, unidentified
MPRASTVHAVIAIGIDMGKNTLHMVGLDSCGAIVLREKVSRGRIASRLVNLPPCLIGIEAGMATHYVARELAALGHDVKQVPATYAKPFRQGHKNDFRDAHAVAEAVQRPTTRFVPAKTDEQLDLQALHRVRSRLVSERTAVINQIRGFLLERGIIVRQGLRFLRQLLPDILAKRADVLSPRMVRIVGELAGDWRRLDERIETVTGEIEALAKSDDSCRRVMTVPGIGPIISSAMVAAIGNGVAFARGRDFSAWLGLVPKQMSTGDRTILGRISKRGNGYLRMLFMQAARVILLRPANWPKHGFGAWLARAAQRLHPNVLAAALANKLARIAWTVLAQERSYETRVTKAAA

SEQ ID NO: 49526 - protein, 425 aa, unidentified
MNSDGTDEPRFGAFVAIDWGDKKHAWSLQPADSDRRERGEIEHSPEAVAEWAAMLSARFVNQPVALAVEQSGGPLVFMLSKYEQLHIYPIRPRASAQFRTALVPSGAKDDPSDAELLLDLLVHHRARLRCLRPDSEQTRLIQHLVEGRRKLVNERTRQTNRLTAQLKLYFPQLLDWFDTVDSPLVGALPKRWPTLETLQRARPDTVRSFFTAHNCRSQELIQRRLEKIRQAVPAVSDKALIEASQAMTKVLVGLIATLQLGIDGFDRQIAQAVEAHPDFAIFDSLPGAGPVLAPRLLATFGSQRDRYQCAADLQTFCGIAPVTERSGKSKWVHVRWACPRFLRQTFHEWAGHSIGFCDWARAYYQLQRIRGKDHHAAVRALAFKCIRIAFRCWKDAVPYDDARYLDSLRRRGSPVIAALASQALT

SEQ ID NO: 49527 - protein, 397 aa, unidentified
MNSVGIDISKGRSTIAVMRPFGEVVISPFEVRHTDSELSELARQLKSLNGETRVVMEATGNYHAPVAKLLHDAGLYVSVINAKLVHGYGNNDLRRVKTDRKDAVKLANYGLDRWLTLPRYVPEEDTRLLLKNCYRQYRQYSKVQTVLKNNLISLLDMVFPNVNRLFSSPIRGDGSEKWVDFVAEFWHCRCVSEKSQKAFTNKYQRWCRKHGYNFSEAKAHTIHAEACGHIDVIPKSETTKLLVEQAVAQLRATSAALAALKHEMQALASMLPEYPVVMDMFGVGPTLGPQLMAEIGDVRRFYSKKALVAYAGLDAPPNDSGDVTGRHKSMSKIGASSLRRTLFLVMTVYLQNAPLDEPVYQFMDRKRAEGKPYRVYMMASANKFLRIYYARAMELYK

SEQ ID NO: 49528 - protein, 338 aa, unidentified
MGQTTTIGLDLAKNVFHVVCCDNRGKLIGKKILKRSHVLNYFANFSACLVGVEACASAHYWARELGALGHQVKLIPPQYVKPYVRGNKNDYNDALAIAEAVIRPEMRFVAVKAPEQQDIQALHRLRERRVQDRTALCNQLRGLLAEYGLILPQGIRTVRQCIPELLEDGDNGLSDLFRQLLAQSYQHLQELDRHIEYYTQEMKCQSQQHEACRRLQTIPGFGPIVASVFHSMVGNGEGYQRGRDVSASLGLVPRQHSSGGKDTLLGISKRGDRYLRSLLVHGARSVVIQAAKKDDKLSRWINKVKEQRGFNKATVALANKMARIGWAVLANNTTYHLA

SEQ ID NO: 49529 - protein, 341 aa, unidentified
MLLIGCDYHPSVQQIAWVDTETGECGERRLTHCAEAEQFYRELKQQGTSVCVGIEATGHSRWFERLLAELNFELWIGDPAQIRAKQVRKQRNDRRDAEHILKLMRKDDFPRLWVPTPENRDVRQLVWHRHRLVQMRTRVMNQLQAIAMNEGVRRKRGLWTQQGRAQLEALTLPPWTTRRRQELLQLLDRFDPNIDELSEAIEQEAQRRPEVERLQTHPGVGAITALAYVLVLGTPDRFRCGKQVGSYLGLIPCEESSAEHWRLGHISKQGNGLLRYLLVQSALSAARVEDEWRRQYAHLAMRRHHGIAKIAMARKLAVRLFWMWRRGWDYEQWKKFGSNVG

SEQ ID NO: 49530 - protein, 411 aa, unidentified
MIKENYIYVGIDLHKETHTAVMIDCYNQKLGEITFPNRPADFPKLVAKVKKCNTDGKTIVFGLENAYGYGRALAVWLIDKGYLVKDVNTAISHRQAKHRGAMYRKSDSDDAEAIALATLNMLDKLPDAYPNDAYWSLGQLVHRRDNIMKQRTRLVNQLHEQLCIAYPSYKQFFNDISRPTALYFWEHYPSRKYLKGKSVEDLRTELVPVSHNRCSTKNCEKILDAVASDKVKNNAYQDARDMVTLSIVSDLQHYDSQLAEVDKMLEQMYKMLGCTLTTIPGVNVITAVKILAEIGDIKRFSNANKLAQFAGIAPLHLSSSGKGKDLATKQGNRRLQATIYFLAIQMVQISSKGTPRNPVVRAYYEKRKAEGKTSQQALICISRRLISIIYGMLKSGTEYRMPVMENTGETV

SEQ ID NO: 49531 - protein, 439 aa, unidentified
MLRIRSLPTIGSYPVAQVKNKKGDIMKTCLFVGVDTHKYSHTAAVLDGYFEVVATISFDNSTEGFNHLFDKLNKLVSRRDLVFGLEDSQGLGSFLACYLISKGHLALEINPVYTDRSRRRTVSREKSDKRDAIVIAKTLIRERANLHPVRIERNSIALREMVGYRQTLVNESTRIKNRLHVALFNQYKGVLGQFGSPFGKCALAFFARYPDPFLLKKVDPDTLSVFLKTHSKGRFGDKKARAILSSIDNSIADSLTGTRAHIIESHTKRLVQIDKELKKIQEVLEELVEASSYGCLTSIPGIDTVTASKIISGVMDIARFSSSSKLARFCGIAPAEKSSGRKEKYEKSKYGNKSLYSTIYFMALAHISRTRDGRDKNPVSRAYYLKKISEDKTKKEALTCLARRLVDLIYAVMRDRSIYNFSKSRFTKQNDSVINTAVA

SEQ ID NO: 49532 - protein, 406 aa, unidentified
MLFVGDDWAEDHHDIEVQDESGKVLKRVRLSEGMAGMTRFHDLVGRFVAEDADPAEVLVCIEVDRGPWVRALVAAGYRVFGVDPKQAARHREILGSSGAKSDKGDAHALADMIRTRRHQLREVVGDSDIAQAVKVVTRAHQTLIWERTRHMLRLRVALRDYFPAALAAYKPLELTSEAVLKLLTKAPTPEAAAKLTTAQISACLKGRRDIPGKAAAIQRVLRAEHLSQGPLVTTAYASTVKSLAAIITVLNNEIKTLEGEVEAHFGRHPDAEVILSQPGIGVILGARVLAEFGDAEGRYASAKARKNYAGTSPITRQSGKTKTVQARFVHNDRLVDALHLQASCALLHDPAVRAYYDQLKARDISHNAALRQVGNRLVGILHGCLKNHEPYDQATAWSHHNYDLTA

SEQ ID NO: 49533 - protein, 353 aa, unidentified
MTDIATHNDRIATIGMDLGKRSFHLIGMDSRGKVIMRQQLSRGRFERHMANLQPCLVGVEACAGAHHIGRRLSAFGHNVRLIPAQYVKPFRKGQKNDYRDAEAIAEAVQRPTMRFVPIKSAEQLDLQALHRIRSRLVGHRTAVINQLRGFLLECGVIVPQGPAMLRKILPSVLAQRTDVLSPRMVRLIEELADDWRRLDDRVDAVTGEIQALARQDEGCRRLMSVPGIGALTASAVVATIGNGAAFTKGRDFGAWLGLVPKQLSTGDRTILGRLSKRGNKYMRTLFIIGARAVLAKPGSWAKFGLEGWLAAAAKRLHHNVLAAALANKLARIAWSVLYHGRSFARDFEPQSVS

SEQ ID NO: 49534 - protein, 370 aa, unidentified
MLDTTTFVGLDVHARSIKAVSLDVMTGEVRAATFGYDAGAVAEWVRSVDPEARCVYESGVTGFDLQKRLSGLGVDCVVGAVSKMIKPSADRRRKNDRNDAEFLARMLSVGNVVEVWVPDDECEAARDLTRALEDARDDPSRSKQRLSKFLLRHGLVFDERTPTGRRKGNWTRAHWSWIESIRFAERADNDVLAYYVDAVRRAAEEKARLEGLVEAEARKPRWRKRVDSLRCLKGVDTASAADLVFEAGEFSRFRNARSFAAWVGLTPSEHSSGESDRRGAITKAGNKHLRKALVEAAWHYLTCSGRPKGLARGQAPDRGARRHAAKGVRRLVERREALLARGVHGNKANVATARELACWVWAVGLMAEEA

SEQ ID NO: 49535 - protein, 366 aa, unidentified
MKKHTTITPSLSADVSTCTTVAVDLAKRVFQLAGEDNLGQVVYEDRIKSREGFYAFLRKLPASVTVLMETGPGAQAWARLLQTQGNPVRILPAQRVADHRSGPKNDRNDVLAILRAGRDDSISAVPVKSAAALAMQALHRARQGYVRRRTAMGNQMRGLLLEHGVAMAQGEAAINRVVPRVLEDATQPLPELLRELIDELLGEWNQLGERINVLTARLETAANDDETAKRLMTVRGVGPIIATALLAKQTEPERFANARQFAAYFGLVPNQNSSGEKVRLGKMSKRGDAYLRSLTIQGAHSVLRQIRPDSEHPDDRRLQRWISRLGRKEAAVRLANRNLRILWVLLQNDQIYSRQPGNNQEVAMSQ

SEQ ID NO: 49536 - protein, 311 aa, unidentified
MTMLADQVDVVIGVDTHKHTNTAAVVRASTGGVLDEATVSTTPAGHEELLAIARSHGSLRAWAIEGTSSYGTGLTRFLRANDEWVFELERPTRSDRLGGKKNDPLDAARSAREALARPDLGQPRSTGDRTALSVLLAARRSAFDGATVAERQMLAILVAAPETLRERFSKLTTTVAVAKAARMRIVNDGDAETVTTTTVVRSLARRSLELRSEAKEHEGALTVVIRRWRPDLLEQKGVGPIVAATVLCSWSHRGRFRSEAAFASLAGVAPVPASSGLTVRHRLNRRGDRQLNRALHTIVLSRIRFDEETQA

SEQ ID NO: 49537 - protein, 354 aa, unidentified
MSQKLNTAIAVIGIDIGKNSFHVVGLDKRGAIVLRQKWSRGQVETRLANMPPCLIGMEACVGAHHLSRKLKGLGHDARLMPAKYVRPYSKGQKNDFRDAEAIAEAVQRPTMRFVATKTAEQLDLQALHRVRERLVSQRTGVINQIRAFLLERGVAVRQGLRFLRAELPDLLATRTEALSPRMTRVIEDLAGDWRRLDERIESLSTEIAALAHQDAACNRLMTVPGVGPIISSAMVAAIGTGDVFSKGRDFGAWLGLVPKQISTGDRTILGKISRRGNRYLRVLFVQAAWVVLIRPKSWERYGLKPWIEAAKKRLHHNVLAIALANKLARIAWAVLNKERNFECNSMDKMASRPA

SEQ ID NO: 49538 - protein, 350 aa, unidentified
MIIIGVDFHPAYQEIASVNTDTGEYQEKRLAHPQEAEEFYRGLASVGQRVRVGMEASGQAQWFERLLEGLGVELWRGDAEVIRAKRGRKQKTDREDARHILKLLLKDDFPRIWVPSWENRDLRQLLWHRHRMVQARTRVMNQLQAVALNEGLRCKKRLWRASGRQQLESLQLAPWTKRRRGELLELLDRLNPTIAELSQAVEREAEKCPEAQRLMTHPGVGALTALAFVLIIGKAERFGCGKQVASYLGLVPLEKTSGNRRRLGHITKQGSSIVRFLLVEAAQVTVRSLPEWRSKYVHLLMRRGRKTAKVATARKLAVRLYWMWRKGWDYEQWKKFGSYVGQPGNRYGVQ

SEQ ID NO: 49539 - protein, 345 aa, unidentified
MKYYVGLDISVKETSVCIVDETGKICREVKVLSHPDDLVVVLKIPDLRIERIGLEAGPLSQWLFDGLTKAGLPAICIETRHTKAFLRAQPNKSDRNDARGIAQMMRVNLFRPVHVKTLISQKRRALLTARKVLQEKAIAIENDIRGLLRNFGLKVGVIGAARFEDRIQELVEGLHDLASIMDPLLAARRKLREEFSHLHRRVIEITRDDVTCTRLMTVPGVGPVTALAFVSTIDVPARFRNSRAVGPALGLTPKLNQSGESHRIGRVSLCGDAMMRALLYEAAQVMLTRVKKWSWLKAWAMNVARRSGHRRAIVALSRRLAVVMHRMWCDNSDFCWTRNNMTAVR

SEQ ID NO: 49540 - protein, 343 aa, unidentified
MEHYVALDVSLREISVCVIDGKGAVIFEGKTTADPASLAQLIRAKAPQVVRIGMETGATSPWLYHTLTAAGLPVVCMDARQAHAALSLRPKKSDRSDARGLAEMLRMGWYRAVHTKSVTSHERRTMLGVRHQLVTIRAELDAQIRGVLKTFGLILGTGNSNTLIRRAEELANGHPMLSSLVAKLADVRRLVVLQIAAIDREIRRLIQSETDLKRLMTVPGVGPITAVAFLSAIDDVGRFKHARDVGPYLGLTPTRYQSGETDRQGRISKCGDAFTRTCLYEAAHVLLTKVQRFSPLKAWGMRLVKRIGMKKTCIAVARKIAVILHRIWVDETEFRWTREAQPV

SEQ ID NO: 49541 - protein, 334 aa, unidentified
MNTPVVGIDVSKRKLDVALLVDGKVKAKAVPNSQEGFAELEVWLNKQKISLLETHICLESTGVYSEPIALYWFDKGIKVSLVNPNCIKSFGSSENIRNKNDQIDAGLIARYCAAMAPPSWDAPSREQRQLRAWANRLTALQDMRQQELNRLEVHETAKQQDVIPHVQAHIKWLDAQIAQIARDIDDHIDRHPGLKQDAELIESIPGLGRTTAVKVLGHVGDVRRFGNAKALAAFIGVTPRQRQSGTSIRGRTMMTRMGNKHLRAALFLPSLVAKRHNPILKQFGQRLEANGLSKMAIAGAIMRKLVHLIYGVVKSGKPFDPKYMEKGLAVQDGI

SEQ ID NO: 49542 - protein, 408 aa, unidentified
MEVLYPRCAGLDVHQQTVVACARVASNSTVHQEVRTFGTATKDLLALADWLTAQGCTHVAMESTGVYWKPIWHVLDGQFELVLANALQIRSVPGRKTDVNDAMWIGDLLAHGLIRGSFVPPAAIHELRDLTRTRKQLVREGAQHTLRIQKVLEDANLKLTSVVSDVMGMSGRAMIEAIIGGEQDPERLADLSRGRLKASRPAVIAALQGRVTPHHRFLLRLHLTQFDALEVAVRDVEARLGEALAPFQGAIDRLMTIPAVGRTVARVIVAEIGVDMSRFPTAGHLVSWAGLCPRQAESAGKRLSTRTRPGNPWLKTTLVQVAWVAARTRNTYLRAQFLRLKSRRGPKKAILAVAASMVTAAYHILKDETTYHELGSDHFERRDKSQITRRLIRRLEELGLSVEVKPAA

SEQ ID NO: 49543 - protein, 312 aa, unidentified
MDAIVVGIDVSKERLDVAMRPTGETFVVSRDAEGLDALIAKLTPLAPVAVAVEATGGYETVVAASLAAAGLAVVVVNPAQVRSFAQALGKRAKTDPLDAGVIAHFVEATRPQIRPLPDEETRLLADLVARRRQIVAMIVAERQRQKRLTSRRLQKSIARLLAALQKELSSLERDIDETVRGSPAWREKEDLLASVPGVGKTIARTLIAELPELGTLDRRKVAALVGLAPWTRQSGKWKGKSCIGGGRADVRSALFLGAMVAARRNPDLKAFRDRLVAAGKPKLVALVATARKLLTILNAILRDQKPWRQQTA

SEQ ID NO: 49544 - protein, 371 aa, unidentified
MKQQTKSSNITVGLDLGDRRHRFCVLDERGEVVEQDSICNDRVSLRKLAGRYHGALGVMEAGAHSPWISRFLEALGWRVVVSNPRKVRAIYQHERKSDQRDALMLARIGRMDLALLYPVRHGTAEAQQDLLRIKLRDSLVRARVAVINSVRFTLKSLGYTVRNPSSARFHKVVMEEVPESVRKMITPSVQALAELTERIKMLELEINTLAQMKYPQSAQLQQIPGVGPITALYFVLKIEDPNRFAHVRDVGAYAGLCPRRDQSGESDPQLRISKRGDAYLRRLLVSAAHYILGPFGPQSALRAYGLMLAADGTARAKKRATVAVARKLAVLLLSLWKSQQPYQPFPGACLNGEQEDRRSGTIALHRMEATD

SEQ ID NO: 49545 - protein, 355 aa, unidentified
MATEQIEVVAGVDTHSNTHHAAVLDPVGRLLGTREFRAEPAGYLELLSWVQSFGRISLIGVEGTGSYGAGLTRCLRQHQVRAIEVNRPDRRTRRVRGKSDPIDAESAARRALSGVETVIPKDTNTIVESIRVLRIARTGAVKARTAAYNQLKDLIITAPEPLRSTLRGKTLHRVSLEAARLRPDTAQLAVPAQATKLALRTIAIRVGGYNTEIAELDKHLKSLVAVAAPRTHALLGVGVEHAAQLLITAGGNPERLRSESAFAALCAACPIPASSGKTQRHRLNRGGDRDANRTLYMITISRLRYCPDTRAYIERRQAGGLSKPEAIRCIKRYIARQTFHTIRADLASLRPLDGP

SEQ ID NO: 49546 - protein, 357 aa, unidentified
MSHSVTSVALVTNVTIGLDLGDKMSRTYEVDATGRVVREATVPTTRSGISRYFGKRDRCRVVLEVGTHSPWIARELEQLGHEVIVGNPSEIYAHGRRRRRNDRLDAQFLARQGRADPDLLYPITHRGEAAQRDLEMLRARDQLVAVRTKLINHVRGAVKALGSRLQSCSAEAFPKRVAGELPESLQPALLPLLEVIADLTHRIRETNTKLAVLVRERYPVAQRLQQPVGVGPLTALAFVLLVEDPHRFRRSRAVGAYFGLVPRLDESSASQPQLRISKAGDELGRRLLVGAAQYILGPFAPECDLRRFGLAIAQRGGKNAKKRAVVAVARKLAVLLHALWVSGATYDPQYQQKRQAV

SEQ ID NO: 49547 - protein, 343 aa, unidentified
MEHFAGLDVSVKDTSVCIVDDTGKIIREVKAASEPAALLAVLTNPTYHFKRIGLEAGPLSQWLFSALAEAGLPAICVETRHMKAVLKAQINKTDRNDARGIAQMMRAGLYRPVHVKTLRSQKLRMLLTHRKLLQSKVIAVENDLRATLRNFGLKVGVVGTVKFEARIKELVESIPDLAELVEPLLVVRRTLREQIGILHRRLLAIVRDDDVCRRLMSVPGVGPVVALTYRATVDIPIRFRNSKAVGAVFGLTPSRHQSGESDRTGGISRCGDEMMRVMLYEAAQIMLVRSVKWSWLKAWAVKIARRRGLKKAIVALARRLAVIMHRIWVDGTEFQWTREEAAA

SEQ ID NO: 49548 - protein, 318 aa, unidentified
MKNEGDVVVFVGIDVGKYQVELALGADGPVRSFKNDDQGIDEILRLLEGRLVGRVVVEATGGYQRQLLAAMVAKGLPAVAVNPRQTRDFAKATGKLEKTDKIDARMLALFAERIRPDLRPIPDETLQEVSDWLARRRQLMEMLVAEKNRRQQAKGGVRRNIEAHIKWLQNQIRENEKDLSKTMAGCPTWDVIVELLDDQKGIGRLSAIALLAVLPELGTLDRKKIAKLTGLAPVCHDSGTHKGQRRILGGRAAARTSLYMATLVAIRHNPAIRSFFARLVAKGKPKKVALIASMRKFLTILNAIVRDHRKANPIPAAP

SEQ ID NO: 49549 - protein, 401 aa, unidentified
MTVAVGIDVAKDIHWIEIKVAETGTVLTSHAVDNAPAAIAAAIDEISAAEADHGPARVGIDLLGGIAGLLEAMLIEAGLTVVHVPGMAVNRARRGTVGGEHKSDPKDARVIADQVRMRDDLRQVTQMRDDDVELRLLVGRRSEIVTDQTRRAARLRDLLVSINPGLERIVDVTTKTGLWLLTRYATPGELRTAGRTRVLAHLRKLDHVKAVSITALAEHAITAAHAQTIRVPGETVAADLVRDLAREMLTARDQLRTIDRRIEETLDRHPDAALIRSLPGMGATLTAEFLAVTGGIARYPDGDHLAAAAGLAPVLKQSGKVRYLQRARAGDKALKRVFYQSAFVAIACDPTSKAYYRRKRTEGKTHHQAVLALARRRVNVLHAILRNRNPYRTQEPIPHAA

SEQ ID NO: 49550 - protein, 321 aa, unidentified
MTEGDMVDVYVGIDVSKDRLDVACCPEGPSFGTSNNLVGYRTVLERLAQVNPVLVVIEATGGYEMGIAAHLGTAEVPVVVVNPRQVREFARGIGEFAKTDKIDAKVLARFGEVVKPAPKAIPDEQMQDLKGLVIRRQQVVEMLVAEKNRRRLVAKALRKRIDAHIDFLKMELEEVDKETGELVRHSPLWREKESLLQSVPGVGKVVARVLLSSLAELGHLNRKEIASLVGVAPFARDSGKKNGYRIISGGRARVRAVLYMAALVGSKCNPVISATYKRLVAAGKPKKVAITACMRKLLTILNAMMRDGRSWSQPLIPEAAY

SEQ ID NO: 49551 - protein, 367 aa, unidentified
MKKVSTAVMMQSRNISQQKLTIGLDLGDRNSWYCAVDEAGQIQREQRVSTSAKALREVFGAMLRSRIALEIGTHSPWISRLLSELGHEVIVANARKVRLIGESRKKDDRLDAQTLARLARIDPELLSPVKHRSARAQADLMMIRARAGLVRTRTGLVNTARGLAKSYGERLRGCNVRNMNPEKAESLSPELQTALQPLLTAIESVSERIAEYNERIEKLAQERYPQVALLTPIKGVGTLIALTFLLTLEDPHRFPKSRDVGSDLGLQPGRRNSGESEPQMHISKEGDPYLRTLLVQGAQHILGPFGVDCDLRRWGLKLAERGGRNGKKRAIVATARKLAVLLHHLWVSGEVYEPLHNSQPPTMMAAA

SEQ ID NO: 49552 - protein, 407 aa, unidentified
MEIVHPTCAGLDVHQQTVVACARVVSGTTITHDVRTFGTTTVALLALGDWLGAHGCTHVAMESTGVYWKPVWHVLDGPFELVLANAMHIRNIPGRKSDVNDATWIADLLAHGLIRGSFVPPEPVQDLRDLTRTRKQLVREIAQHTLRIQKTLETANVKLTAVLADILGVSGRAILQALVAGESDPERLADLASDRVQASRAALVAAVHGRVTAHHRFMLTLHLTQIDALEAAVREVEARLGEALAPFRAALDRLITMPGVSETVARVLVAEIGFDMTRFPTAGHLVSWAGLCPRLHESAGKRLSNRTRSSNPWLKTTLVQAAWSAARKKDSYFRAQFLRLKSRRGPKKAVIAVAASMLTAAYHMLRDGADYRDLGADHFDRRDKAKLAKRLIARLHDLGVHVEVRAA

SEQ ID NO: 49553 - protein, 321 aa, unidentified
MENIALIGIDLGKNSFHIHCQDHRGKAVYRKKFTRPKLIEFLATCPATTIAMEACGGSHFMARKLAELGHFPKLISPQFVRPFVKSNKNDFVDAEAICEAASRPSMRFVQPRTESQQAMRALHRVRESLVQDKVKTTNQMHAFLLEFGISVPRGAAVISRLSTLLEDSSLPLYLSQLLLKLQQHYHYLVEQIKDLESQLKRKLDEDEVGQRLLSIPCVGTLTASTISTEIGDGKQYASSRDFAAATGLVPRQYSTGGRTTLLGISKRGNKKDPNFVGSVCQGIHTKNWNTSLASWPTGSGSCCVGKATLSSPVLWQTSWPE

SEQ ID NO: 49554 - protein, 345 aa, unidentified
MDHFAGLDVSVKETSVCIVDDTGRIIREVKVASEPEALLAVVRNAAYHFKRIGLEAGPLSQWLFGALADAGLPVICVETRHMKAVLKAQINKTDRNDARGIAQMMRAGLYRPVHVKTLRSQKLRMLLTHRQLLQSKAIAIENDLRATLRNFGLKVGVVGAVKFEARIHELVENHSDLAILVEPLLIVRRVLRQQISILHRRLVGIVRDDEVCRRLMTVPGVGPVVALTFRATVDVPARFRNSKAVGAVFGLTPSRHQSGELDRMGGISKCGDAMMRTVLFEAAQVMLTRTIKWSWLKGWGMKIARHRGMRRAIVAVARRMAVVMHRIWVDGTEFRWTRDGAAAAA

SEQ ID NO: 49555 - protein, 352 aa, unidentified
MEEYRRSREEGKAVFVGVDLHRFKWHVTARTEDQELFSGTLPGRWEALRRLLDRYRGCSIQVVYEAGYFGFWLHDRVVAYGAHCIVTAPSLLPQEYGNRVKTDRRDSRKLAHLLAKGMLRRVWVPALEERYHRQVVRRRRQLIGDRVRTQNRIKAELRFYGVELVEPRGPWPRRYVQRLWCIRFGNRWMQESFERLLEEYEFLSGQISKQTRLLRELSETSLYRERVEILRSVPGIGLIAAMELLVELQGVGRFRRAEQLAAYVGLTPSQYSSAEKIRMGRITRAGKNGLRAILVEASWKLITKDGVMRDKYERIKARAGAKRAIVAIARTLLLRSRRMLLDGRPYALGLIR

SEQ ID NO: 49556 - protein, 418 aa, unidentified
MMEEEERNWFVGVDWASETHQVCLLDVHGQKLGERSFAHGGAGLAAMADWILALTGAAPDEIHVAIEVPHGPVVESLMERGLKVHAINPKQLDRFRDRFSPAGAKDDSRDAQVLGDALRTDPHCLRRLVPLDPVVIELREWSRITEELTQDRTRLTNRLREQLWRYYPQILEVTDDLAQPWFLELWARVPTPDAARRVRLDTLARILKRHRIRRLDATGLRDRLRAPALVVAPGTTEAATAHIKPLGKRLALVNRQLRQAEARLDQLTERLASNRQKGPGQKGEQRDVTILASLPGIGRIVLATLLAEAFDPLQRRDYHALRCLSGVAPVTKRSGKSKIVIRRLAAHVRLANAAYHWARVAVQHDPKSRAKYTALRQRGHGHARALRSVADRLLAVACAMLESQTLFDPDHPTQSQAP

SEQ ID NO: 49557 - protein, 345 aa, unidentified
MKKVIAGMDLQSNNVVIGVMDMDGQRLASRKLPCELKEVVNFLSPFRRRLERVAVESTYNWYWLVDGLQALKYPVVLANPAGMEQYNGIKHADDTNDAFFVAELLRLAILPTGHIYDAELRPVRDLLRRRLMLVHQRTALMLSFKSLYTRTTGQELTLSQLKELEIKEAQQLYEHPANQLIAGMQIKHIEQLTESIEKIEKAVVSSARELPYYEKLATLPGVGRILGMTITMEVGDIKRFVDPGHFASYCRTVEAKRMSNRKKKGENNSKCGNKYLAWAFVEAANFARRYDEQCRKWFERKAARTSKVIAIKALACKLAKAAWYLMAEGTDYDPKRMFGQPAKMK

SEQ ID NO: 49558 - protein, 455 aa, unidentified
MTGAKSPGSDALSMVNPGAAAIDIGSTMHMAAINPQVDDNPVRAFGTFTGDLHEMARWFKACGVTNVAMESTGVYWIPAYEVLEQHGFNVILVNARYAKNVPGRKTDVSDAAWLQRLHSYGLLRGSFRPEAGAATMRAYLRQRERLIEYTASHIQHMQKALMEMNVQLHHVVSDITGVTGMRIIRAIVAGERTPNTLAQMRDIRCHASVDKICAALSGNWRDEHIFALCQALALYDFYQTKILECDRKLEAALKALQIGKGHDVRDLPKVRTKKRQVNTPDFEVRSTLYRVLGVDLTQIHGIGPSLALKLVGECGTDLAAWPSSKHFTSWLCLAPGNKISGGKLLSSKTRRSSSRAAALLRLAATTLGRSDTALGALYRRLSARAGKAKAVTATARKIAVLFYNSLRYGMAYHDPGATQYEERYRSRVIGNLQRRAKTFGFSLQELPPEPDMAVS

SEQ ID NO: 49559 - protein, 460 aa, unidentified
MAKKRMAKKGKQNTPTPDNMPILHPHAAGIDVGAEEHWVCVPADRDAQPVQKFSAFTCDLHRLADWLTTCRITTVVMESTGVYWIPLFQILEARGFEVALVNARHVKNVPGRPKTDRFDCRWLQKLHTYGLLASSFRPPEDICQLRSLLRHRDNLIQMTVKHIQHMQKALDQMNLHLHHVISDVTGVTGMRILRAIVAGERDPHTLAQYRDYRIKSSPDTIAKALEGDYRPEHVFTLTQSLALYDYTHQHIAACDQEIERVLSTLDSLVDLEAHPLPPPTTTHRQPQRNEPAFDLRSHLYRITGVDLTQVPGLQAMTIHIILAEVGLNMYKWPTDKHFASWLGLCPDNQISGGKVLSTSSRRVQNRASRALRMAAQSLRTSPTYLGAFFRRMRSKLGPAKATTATAHKLAKIIYHMLKEKTPYQARGAEDYTRKDQERQIRRIRQQAKHLGFELVPQTSH

SEQ ID NO: 49560 - protein, 391 aa, unidentified
MIYVGIDVAKDKHDCFITNSDSEVLFKAFTIFNNLDGFNDLYQKIESVMDDVTKVKVGLEATGHYSYNLLGYLIDKGLPTYVINPLHTNLYRKSLSLRQTKTDKVDARTIASMLMSDVNLKSYSDTSYHNEELKSLTRYRFDKVKERAKLKSSVSRLVCILFPELEKLVPTLHMASVYSMLSEFPGAKHVASAHLTRLTNLLSKSSKGRYGKDTAITFRDAARASIGSNMPAKSLELKHTIKLIQELDSEIDEIENEIKIIMDEINSPILSIPGINYRMGAMIIAEIGDFNRFDSPDKILAYAGFSPSTYQSGQLDGAYAHMEKRGSRYLRYALYNATKYVCHWDPTFAAYLAKKRAEGKHYNVAISHAVKKLVRVIYHLEKTKQQYIKAA

SEQ ID NO: 49561 - protein, 475 aa, unidentified
MNLKGKKTKNQVVTANIFEQQELLKKAEVIREKLTASTWHELETNGKFDKNAKLSFISDDMLILGCDVGSETHYLRAIDTRGRELSKSAYSFRNNCEGFQSAKEWAVELAAKNEKKQIVLGLEPTGHYWFCLATWMIANGISVVQVNPYAVKQTKEVEDNSQLKDDTKDPKLIANLVKDGNFGMPYLPEKVYAELRRLSMFSEQLNEDRIRAINRMHREMKIYFPEYKEALGRVEGAFSLELLKQTPFPEEIQTLGEEGIRQIWHDAKLRGRGYSRVREIVGYAKTSVGMKDGAEASAMAVKWFVKEIRELDEKLAEIEKLMREKYQEIPYAKNILEISGIGENTLSGILAEMGDISRFDDVKEIQKLSGLGLVACSSGKHKGETKISHRGRKRLRYWLFQAAKSAVAHAEEFKELHVYYTTRADNPLKKMQSLIVIACKLLRIIYGILKNGTVYDPKKMLRDIRRPEKKEVIAA

SEQ ID NO: 49562 - protein, 310 aa, unidentified
MNTLPEKTQPVHAGLDIAKASLQLHLQGCQHALPNTAAGHAQLCKLLRALPGVHLVCEATGGYERAVVAALHAAALPVSVVNPARVRHFAHAQGRRAKNDPIDAATLAAFGHAFQPAPTAVPDAALTELRDLIRWRAHLQEQLVATRNRAEHTATKFVVRQQAKLVRQLEAQRDAAEAELAAALQRMPAWQTQIQKLTELDGVGTLTAVATLSQMPELGRISRREAAALAGLAPWTRQSGPWEGQRHIGGGRAEVRRALYMAAVAVARMKHTVLGQFYARLREAGKPAKVALTAVMRKLLLQMNHVLKPA

SEQ ID NO: 49563 - protein, 416 aa, unidentified
MHDVAISSEKGHEVRKYPAYTEDLQKMVAWLQEEGITTVAMESTGIYWLNLYLLLEEAGIEPYLVNAKHVKNVTGRKRDDTDAIWLQKLHSCGLLQKSFQPEAATRVLRAYVRQRKKLITLSSDSVRRMQKALELMNIKLHTVISDILGKTGMQMVSAILAGERNVDELIKLKDGRIKASEEDIKKSLKGIWKEEYLFMLKQAYDGYGFYQSQIKECEEKIKAGLLVQAAKVLDGDITGLDIERKKKLRKNEFVFNAQCLLKVIVGVDLCEIESISEISTLELISEIGTDMTKWKSSKHFAAWLNLTPNTKITGGKIISSKMQKKKNQAGLSLRMAASNLSKSKSPLGDYARKMRSRIGKKGAVVAGAHRLARIIYTMIKDQQPYNPEMFLKDQQKWKDNRIKYLEKQLQKLKDVA

SEQ ID NO: 49564 - protein, 348 aa, unidentified
MKKATRHVLGFDVGDKRSTIALLDAETGELRNPPSVGTDRKSVEKLFRGLPRRTRVVLETGTHSGWIAALGRRLGLEVVVADARRLDAVTKNVRKSDVKDAELLARMGASSMDLLCPVWVRDRATQADLSVVRMRDAAVAARTLLVNAARGTAKSLGERLPSGSTEAFAKRAAADLPPHLAAAVEPALAAVAAVTEAIRAYDAEIERLCAKHAATARLRAVAGVGPVTSLCFALTVGDPARFDDPRDVAAYVGLVPRRSQSGATDRQLRISKCGDALLRRLLVQCAHRILGPFGKDGDLRTWGMGLAAKGGRNGKKRAVVAVARKLAVLLLVLWKKQSVYEPVRTSAA

SEQ ID NO: 49565 - protein, 403 aa, unidentified
MLAVGIDISKSKSVAAILNQDGSMHTSPFEFHHTQPELDAFIKYILNSKQSATILMENTGHYHYPVLKAFQEAGLPVCMVNAYQIKKFGDMDLRKAKTDKKDAVRIARYALEKSYSLVPYTSMEQKYEDLRFLARQYNQRMLTLKTNKVFLLNLLDETMPGITNILPLTTRTPETSLSVLFINRFKSYDRIKKMGKSRFLDAFEKIARKSRNRQTKTYGLAIYEAALRNITTRGENEYTLAAQDQCLELVCESQKAADSIILKMKTLAETLPEYAVLRSMAGVGNRLGPLILAEIGDIRRFHSGKALNAYAGNDAPPYQSGTFESHNRHISKRGNAALRKYCFEVMQALKLTRPQNDPVYLFLLKKEQEGKPYNVAKMAAVNKFLRIYYATVKAYLESLEHTV

SEQ ID NO: 49566 - protein, 415 aa, unidentified
MKTYILRPPKTVEPQKSIRSPRPKPAASATIAVFLRGPEATVKSPVLFIGLDVHNDSIAVSLAPSDSTEVRRYGIIGGEHDDVLKLAHKLQAAHPGTTLKFCYEAGPRGFALCRCLQAQGLDCILVCPSKVPRKPGERVKTDRRDADQLARLYRAGELTGLYVPEPEDEAMRDLIRARFQVGKQQHRSRQQLKMYLLRHNLRYGGQSSWTPAHLRYLAKIKMPFPVQQIVFQEMLEVISSATAQLERYDQEIERAVPNWRWEPAVRALMSLRGMALLHAATLVAELGDFNRFEHPGQLMGYLGLVPSEHTTGKDRQQGGITKMGNAPARRALVEAAWQYRIPARLSPQLKKRQEGLPKSITDIAWEAQRRLHHRYIHLTRVGKKKSQVAVTAVARELSGFVWAIARQVKPLSATP

SEQ ID NO: 49567 - protein, 313 aa, unidentified
MAETVVTAGIDVSKEWLDCAVWPGKAELRVERNAVGFDQLAAWLVEHRVSRVGLEASGGYETAVMDALQARGFAVIRFNAKRIRMFAKAKGRLAKNDRADARVIAQATLVLDENTPPERRRDLDPLVEHLAYRRQLRDWLGDCANQLEHLRDAGLRRQILVRQAGLNKALAALDAKLARLVAAHKDWHALEQRLRKVPGVGPVLAQTLIASLPELGQVSRRAIASLVGVAPFDDDSGKRAGERHITGGRDAVREVLYMAAVAARRWNPVIAAFAKRLAGKKPKVIIVACMRKLLTILNAMVRDGQDWNPRAAA

SEQ ID NO: 49568 - protein, 409 aa, unidentified
MEAIFARAAGLDIHKKTVEATVRILEGNHVQQQTRRWGTMTREVLAMADWLEAQGVTHVAMESTGVFWKPIYNIVESRFTVILVNARHLKQVPGRKSDVRDSQWIAQLLQYGLLRGSFIPPRPQRDLRDLTRHRTQLVAEQTRVVNRIHKILEDANIKLGSVASDIMGVSGRAMIHALMEGEQNAAKLANMAQGQLRGKIPELERALEGWVTEHHRFVLSMLWEELAGLEELVAKLERRIEEVTRPLAPRVKQMDPVPGVDRRVAEVVLAEVGADVSSFPTHAHISSWAGMSPGNEESAGKRRTGRTTKGNRWLRQALVQAAWAASHTKDTYLAAQYRRLVGRRGKKRALVAVGHSILVIIYHLLKDGTCYSDLGGDFFDQLRPERLTHYYVKRLERLGHRVTLEPCTV

SEQ ID NO: 49569 - protein, 389 aa, unidentified
MEARTVYNPPPAAPHDDAIRCVLAIELSKKSWIVAVNTPLSEKISRHTLGACDWKELLKLCERIRTRIARELRKDVELVSCYEAGYDGFWLHRLLEAHGIRNYVIDPASLQVDRRARRAKTDRVDVERLLRSLMAYLRGEPKVWSVVCVPSVAEEDDRRLHRERGRLINERIQHVNRIKGLLAIHGIYDYPPLRHDRMQQLEGLRTADGRTLSPRLKAEILRELQRLELVIGMIKTIEAERDAIASAKIETEHSSAKRIQDLAKIKCIGPEFATTLAGEVFYRSFDNRKQLASYVGLTPAHFQSGETCRDQGISKAGNAKARRVMIELAWLWLRHQPASPLSVWFHDRVGKLKGRIRRITIVAVARKLLIALWRYLETGLAPEGAILKV

SEQ ID NO: 49570 - protein, 354 aa, unidentified
MMIIGCDYHPGFQQIAFLDTESGELQERRLQHREEAERFYRDLAAQAVRVRVGMEASGQARWFEQLLTELQVELWIGDAAQIRSKRVRKQKTDRQDAQLMLRLLLEDRFPRIWVPSWENRDLRQLLWHRHRMVQARTRVMNQLQAVALNEGLRRKKGLWREAGRKQLESFRLAPWASRRRHDLLGLVDQLNPMIAELTQAIEQEVENSPEAQRLTTHPGVGPVTALAFVLIIGRAERFQSGKQIASYLGLVPAEESSGDRQRLGHISKQGNTLLRFLLVEAAQVTVRSDSEWRRKFFHLAMRRGRKIAKVAMARRLAVRLYWMWRKAWDYEQLKKFSPHAGQPGTGVGVQSNTE

SEQ ID NO: 49571 - protein, 339 aa, unidentified
MTIQSKKIVQETKSLFAGIDVGAEELILLVRKNGTSYKPQKFANAPADRARLAKKLAGLPGIIVCLEATGVYHFDLSIALHDAGVALMVVNPKSSHNFAKVLMKNSKTDAVDAETLAQYAERMDFVAWARPSDEKISLRSFARRIDALTRQKAAAKNNSHALNASGETPKAVLRDVELSISQLEKRIACLSKEALALIGKHPDLERVFLLLTGIKGIAQTSAIALMGELLLLPKGLSHREWVKSAGLDPRAFDSGKSVHKKTRISKAGNRHIRSALYMPALSAKQHDPYVKAYFQHLVDNGKLPLQALCAVMRKLLHAIHGMLKHDKPFDNTRFYAIPA

SEQ ID NO: 49572 - protein, 402 aa, unidentified
MNAVGIDVSKGKSMVAIMRPFGEIVSTPFEIKHTSSDINSLVKLIKSIEGESRIVMEHTGRYYEVLAHQLSEANLFVSAINPKLIKDFDNDSLRKVKTDKADSVKIARYALDKWQNLKQYSVMDELRNQLKTMNRQFGFYMKHKTAMKNNLIGILDQTYPGVNTYFDSPARSDGSQKWVDFASTYWHVDCVRKMSLNAFIDHYQNWCKRKKYNFSQSKAEEIYGKAKELVPVLPKDAITKLIIKQAVDQLNSASITVESLRTLMNETASKLPEYPVVMAMKGVGTSLGPQLMAEIGDVSRFTHKGAITAFAGVDPGVNESGSYEQKSVPTSKRGSSDLRKTLFQVMDVLIKTHPQDDPVYQFLDKKRAQKKPYYVYMTAGANKFLRIYYGRVKEYLASLPES

SEQ ID NO: 49573 - protein, 420 aa, unidentified
MSFKIFRFNCCGLDVHKTWIYACIGITDSNGRTDYKQARFSSFSKGLKELCDWLAKYNCSEVCMESTGKYWIPVFNVLEKANNSVILAHPKYTKPQKGNKTDRKDAKWICDLFMCEMIKPSFIPPADIRHLRDLVRYRFKLTCMITGEKNRAQNCLTVSNLKLDDVFSDVFGKSSRSITEYMLAHPGEIFDVAPFVDSRCKTPMEEIQAAVDGAISPEQAIKLRQCLNHIDELEKHLEEIEREILRLSDKYQAALDLIRTVPGFDKNPMTAIQILSEIGGDMSVFPSAKHLVSWAGCCPRNDQSNKRIKSTRISRAGNYIKPILVQVANGLLRSKKHLEITGRYKRIKSHRGHKKAIIAICRMLLTAIWHILSDLKPYTAEGFLESRPANKAKVLTTSQALNLLKQRGYTIKDDIVPAMN

SEQ ID NO: 49574 - protein, 343 aa, unidentified
MQVTTIGLDLAKHWFQVHGVDASGAVAVRRKLRRSEVLGFFQSLPSCLVGMEACATAHHWARELAKLGHTVKLMPPAYVKAYVKRNKNDAADAEAICEAVGRPSMRFVPVKDAEQQSALMLHRARNLLVRQRTMLVNALRAHMAEFGIIAPQGLRHVELLVKEVAHEQERLPELVRSILQLIVHQLHDTMARVREIETRLTKWHRQSKVSQSIATVPGVGIMGASAIAATVADPSLFRSGREIAAWLGMTPRQNSSGGKERLGRTSKRGDKYIRSLLIAGAVAVLRHARNRPTRDGAWVRALMEHKPTKVAAVALANKTARIVWAVMMRGDGYRAKQILGQPA

SEQ ID NO: 49575 - protein, 391 aa, unidentified
MSLYFCGIDISKYKHDCCIICAANQQVVAKLTFKNDRTGFEKFLSTLNSLQDSEDIRIGFESTSHYALNLELFLESSNLSFMEVNPVLISEYRKSSSLRRTKTDSVDCETIARWLMSVEYKPHTRGFYHAYSLKSLTRLRDRLIRQRSLYLVKITDVLDHTFPEFKPFFNEKFSATALYLLETYGSAQKMSHMNQASYEKLRSISRGKFSIQKFLSLKELAANSVGTNNTIFDLELSSLISLYKNLQIEINKIEAEIIRLVDELHLHFTSIPGIGPLSAAVIYSEYGDISSFSTPAKMLAYAGLEPGIDESGTESYKGRMVKHGSSMLRFTLLNCCLPAIRFDLTFAQYYAKKRREGKSHRVAMSHVAKKLVRVIHALERQGIDYDPIKLR

SEQ ID NO: 49576 - protein, 359 aa, unidentified
MKTIVSNKQSWFNKIKLTKDDEVYVGIDVHKKSYAVAVWLNDAPAIDFVMPADNQKVLTMLDKLRIALKQVVYEAGPTGYSLARLLQDAKLPIRVIAPSKTPRQSARESKTDKLDCRKLAQYAAKGLLRPIAIPTKQQEADRQLFRLREQLVEKQRRLKLQIKSFLLQHGISDPAGLKSWSVLAVEKLRTIVLPDKLRYCLDIFLDELAFLKTQIKKTEQRLKETFSTPQHAKKIEILLTHPGVGPVVAGQFCTEIFNPKRFKNSTEIGKYVGLSPMVTQSGQSRKNGPVLKTGRPQLRSNLIEASWIWIRKDPHAYKTYIRLLHNTGEKNKAIVAMARRLAIHLWKMLSDNKPFIQAA

SEQ ID NO: 49577 - protein, 350 aa, unidentified
MKIVGCDFHPSYQQVAVFDTLTGEVEELKLMHGDGQAERFYRQLEGPGLIGMESTGNSLWFERLVESLGHELWIGDAAQIRASYVRKQKTDKRDAGHIVKLLIEKRFPRIWTPNQQQRDVRQLLVHRHKLVRVRTRLKTELQHLALNQGVQKKRQLWNAKGRADLEKLPLQGWTKQRREDLLALLRVVEPQIEQSHKAAEQAAAANPKAQLLMSQPGVGPITALAFVMTIGEVSRFERSKQVASYLGLIPSEHSSGSKRRLGSISKQGNTFLRTLLVEAAQSAVRHDAQLRKEYQHRCHHMPKGVAKVATARKLAVRLYWMLKTGKPYPEVLLIEGSPRHPVAAKANPSC

SEQ ID NO: 49578 - protein, 337 aa, unidentified
MQTIAVVGLDLAKTVFQVHGVATDGTVVVRRQLRRGQVLAFFQSIGPCLIGIEACASAHHWARELMAIGHDVRLMPPAYVKAYVKRGKTDAADAEAIAEAVTRPTMRFVAVKSKAQQAVLMLHKTRDLLVRQRTMLINALRGHLGEFGIVAPQGPAGVRAALKSLREEGQALPDLAHAALGGLAEQLEHLGAEISRMERRILDWHRQDETSRRLATIPGIGPITASAMAASAPDPKLFRSGRQFAAWLGLTPRANSSGGKERQSGISKMGDSYLRRLLVVGATAVLRMARQQRREGWVGNLLERKKPKVAAVALANKTARIAWTLMARQEDYKPTAA

SEQ ID NO: 49579 - protein, 326 aa, unidentified
MDEATLGVDTGKTKLQLHLIRGDGRKRKKGVDNTADGHAHLKDWLAKHADAPVRVVLEATGRYWMDLAMTLHEAGYIVSVVNPARVKHFQRVQLGRGKSDRIDAHAVAQFGRLLRPTAWTPPPAAVLRLRDLVRIREQLVEDLTAHRNQLQAGRLCDAARRVTEQTIADLEQRLAGVERAIRDEIPADPELARRHALLVSIPGIATETAAGILVELPDVSLFQHAKQVAAYAGVSPAPNQSGDSLDKPARICRIGNANLRRMLYMPALAARRQNSCVRALDDRLAAKGRLAGKQRVAAAMRKLLVLCYGVLKTGQPFDPNWAATPA

SEQ ID NO: 49580 - protein, 360 aa, unidentified
MDKHKYVALDVDSANIVAGVYDSKGEALMQCCLRNNGQVISEFFKTMTGTVQVTFEEGTQAVWLYGLIQPLVAEVIVCNPRENKLLKAGNKSDRIDVAKLGKLLRLGELRPVYQGPSAAQGLKQLVHSYAALVDDTTRVKNRLKALYRGRGLSCKGELIYGREQRQQWLLQLETKELQSRAACLYEELDCVLRLRAESEKVMCRAARRHEAYKWISSTPGLGAIRTAQTLATAITPHRFRGKRQFWPYCGLAVVTRSSSDYEWVDGGARRKRKPIQTRGLNQNYNRTMKAVFKGAAISALQQHPEFREYYQRLCAQGMRPEMARLTVARKLAAIVLILWKKGELYDSEKLNQAAPGAGQQ

SEQ ID NO: 49581 - protein, 466 aa, unidentified
MKPFYMGIDVSKGYADFMILNSKKQPVAQNFQLDDTFEGHQSLYKILGRFLTDHPESTLFAAVESTGGYENNWYNSLIEFQGSLNIQTARLNPLGVMHNSKADLKKNTTDKISAQNIAEYLIAHTEKVVYQQDDQLAGLRKQWGFIKMLTKQSTQFLNQLNALLYTANPELLSYCQDGVPGWMLTLLVQYPSAARLKNAHAKTVANIPYVSRMRAQQLIANAKRSVASATDTTTEQLIVATTRQILHLKNTIAEQMKRMIKECPISEIELLKTFPGISDTSAIGLIIEIQTVKRFAGVKKLASFFGVHPVYKVSGDGVGGFKMSKQGRKAPRQILYMVALSAIRCNPLIKETYEKHQQQGKHNMAAIGICMHKILRILYGMLKHNKPFDPQIDIRNRQRKVRVKSDTPAKDTNRRFQDYDQNAPVTRRQRKKRLERERPHNVGDIKSGVTAPVPLADIIADILPQL

SEQ ID NO: 49582 - protein, 346 aa, unidentified
MRILALDLGKYKSVACDYEAETGRHCFTTIATKPQALHDLIVDREPDCVVIEICSIAGWVSDLVRALGIELQVANPNDERWQWRKVKTKNDRADALKLAQLSALNQLRLVHVPQSEIRQWRALITYRQHLVQRRTKIKNHIRDLLLREGQLLPRYRSAWTQEGIAKLEAMSKPFSEVSLDELWRGELGVELAQFKAVQRQLAEVVAKLDQLGAANHSVQLLRTIGGVGPRLAEAVVTMFDDPHRFRTAGQVSSYIGMVPKQFDSGETQRAGRITRHGNRLVRSLLVEVAWCALRHNPWARETYQRISGGKKSRKKIAVVAVGRKLLVRCWAMLRKQTEWRAELSVA

SEQ ID NO: 49583 - protein, 343 aa, unidentified
MDHFAGLDVSVKETSVCIVDDTGRIAREVKVASEPDSLLQVLTNPAYHFKRIGLEAGPLSQWLFSTLAEAGLPVICVETRHMRAALKAQVNKTDRNDARGIAQMMRAGLYRPVHVKTLRSQKLRMLLTHRKLLQSKAIAIENDLRATLRNFGLKVGMVGTVKFETRIKELVDNLPELAVLVEPLLIVRRVLREQIGILHRRLLAVVRDDDVCRRLMTVPGVGPVVALTYRATVDVPARFRNSKAVGAVFGLTPSRYQSGESDRTGGISRCGDEMMRAMLYEAAQILLVRSAKWSWLKAWAMKIARHRGLKKAIVALARRLAVIMHRIGVDGTEFRWTREVAAT

SEQ ID NO: 49584 - protein, 375 aa, unidentified
MKEKVRFLGLDVHAETIAVAVAEQDGEVRSLGTIANREESIRKLVKKLGPVEQLRACYEAGPTGYVLYWQLTQLGVECAVVAPTLVPVKVGDRVKTDRRDAAKLARSHRSDALTAVWVPDEGSEALRDLVRAREAAKQDQLRARHRLSKFLLRTGRRPAMGLKAWTERYLAWVQQIQFSQPAQEFTLLDYLHEVQHMDERVQRLEQAIAEAVKLASPQVQEVIRGLQALRGVAHLSAVTIAAELGNISRFESARKLMGYSGAVPSEDSSGKRQRRGNITKTGNAHLRRIAVESAWSYRFRPAIGPRLRQRQEGVPEEIKEIAWKAQIRLHKRYLKLMAAGKDKQKIITAVGRELLGFVWAIGIKAETAGKLQMAA

SEQ ID NO: 49585 - protein, 475 aa, unidentified
MTSKRRTSKGKQTRVQKRHQKRTPPRQASAKSMPVMEANAAGIDVGAREMYVAIPPDRDTERVRVFPTFTRDLEALADWLVEQGITTAAMESTGVYWIPLYQILEDHGIRVCLVNARHMKNVPGRRTDWHECQWLQYLHAVGLLRAAFRPESEVVAIRSVMRHRKRLVETAGVHIRHVHKALTQMNLQIHHIINDITGVTGTAIIESILAGQRDAAELAKLRQPEIRADKETIRKSLEGDWRREHLFALRQSWELYGTYLSSIKACDQEICEMLGGHKPKADPAKKPLPNETKRRTKRKHKRTGDFRFDVRTEAYKQFGVDVTRIPGLEGIALVLYSEVGNDMSRWSSASQFASWTALCPDNDKSGGRVLWTGVRQVKNRAGQLFRQAANSLHHSQTQMGEYLRRMKAKLGAEAGITAAAHKIARIFYAVVKNQVEYDDTTWHQQDLARQRRFEAKVRRQARGLGFELVPIQPVP

SEQ ID NO: 49586 - protein, 438 aa, unidentified
MSNKVIFNLDELFISVGIDVGADFSWMSIALPNQQFVGKPYKILHNSIDSLTTAVSKIKEAEELYSLESRIFLESTGIYHYPLFCYLRDKGFNCSVINPIITKNSTNINIRKVHNDRFDSKKAALVGLKPDLKVSLMPSDLALNCRNLCREYYDLMDNRSAYVNKLQGELCMAFPQYLDIFSKVTINTSLTLLETYTSPSAFLEADRQEIIDIIRSTARFGLTYAQNKYNAIVQAATDANQFGYIINSNIKRIRLYISFIRKYDEEINRILESLHELVDANEDADFVKQIHLIETFKGAGFLSAVSIMGEIGDFSAFSKPKQLFAYFGLDPAVKQSGKFEGTKVQMSKRGSAIARLVIHTLTLQSISISRNGEAKNPVLREYYLKKCDSKPKLVAMGAVSHKVCNMIFAILRDNKPFKIIAPQEHIKQYNSAKCDIAA

SEQ ID NO: 49587 - protein, 419 aa, unidentified
MSFKIIKNNCCGLDVHKTWIFACIGITDSNNRTEYKQARFSSFTKGLNELCDWLAKYNCNDVCMESTGKYWIPVFNILEQRSLWVTLSHPKYTKPMKGNKTDRKDAKWICDLYMCGMVKPSFIPPADIRELRDLVRYRFKLTCMITGEKNRAQNCLTVSNLKLDDVFSDVFGKSSRSITEQILQHPGETFDVAPFVHRLCKTPIEEIQAAVDGAISKEQAIKLRQCLDHIDELNKHISEVEQEILRLSDKYEVALNLIRTVPGFDKNPLTAIQVLSEIGGDMSVFPTDKHLVSWAGCCPRNDKSDRKIKSTRISRAGSYFKPVLVQVANALIKSKKHSEFTNRYKRIKARRGHKKAIIAICRMILTAIWHILSDLKPYTPEGFLESRPVKEEKVLSTSQALNLLKQRGYIIKDKPLAVF

SEQ ID NO: 49588 - protein, 322 aa, unidentified
MSSSLYVGIDVAKATLDLARSDELKDVQHFDNDAAGIAEIVEHLRQARPVMIVIESTGGLERPLLAALLDAELPASLVHPGRVRDLARALGILAKTDRIDARVLVLFGQKAEPRLTERASRARTELAELVNCRRQLSMTLVQQTNRRGSTVSVSARRSLDAIIAALEKQIERLDRQIRQLLDADDDFRDLDRILRSVPGVGPTLAATLVAELPELGKADRQPISAVVGVAPFADESGTTIGQRRIRGGRSHVRNVLYMATLAAIRFNPIIKAFAARLAAKGKRKKVVIVAAMRKLLSLLNVMARDRLTWQQLNVVKKLAVAD

SEQ ID NO: 49589 - protein, 407 aa, unidentified
MTQSIRYVGLDVHKHYVMVGAVDQTQQTVLPPRKVALADLEGWGQKYLHPTDHVVLEATTNAWYIHDLLEPLVEQVVVAHPPQVKLIAAAMVKTDKKDTMTLARLLAVNLIPTVWVPPVHVRDLRALLAHRRRLVSQQTRCKNRLQSVLHRNHIVPPEGKLYHADQRQWWLTLELAPGDKLRVRQELLMLDQLDTLIDETSDELHRLSLSEPWQEQLPYLIQLPGIGVMTAMVILSAVGDITRFPSAKKLVGYAGMGARIHASGLTFHTGGITKQGRRELRTALIESAWVTVRFDASWREQFERLEHRIGRRKAIVAIARKLLVVVWHVLYHRRVDRQADPERVVRYFLAWGRQAKAFARLGLKASEFARQQLDILGIGQELPTLINFGATYRLPPSSLPVTEDTPA

SEQ ID NO: 49590 - protein, 370 aa, unidentified
MQFIGVDLHTNKFTCSYRDEDSPPDARKGKRTETFELTGQGFAAFYETLTDETYVLVEATITTFAFVRLIQPLVKEVIVANTYELKQISLARVNTDKIDANILSRIIKMQVLGREHAVSPVVVPPVEIQELRGLFTTYRLYRKQTTQIKNRIHSLLKEKLYGFTQEEIFDRKSREKIRNRENGSALSFQLNELFDLLEFTEARIEPLKGQIMAQAEPYMREIEILTSMKGVSVFIATAVIADIIEVNRFKNSKTFTSYLRSAPRVSNSNTSVSIKGTNKKGRKMSATLLTQSLNHVLNASQKLNRWYMRLTKYKKAGLVRTGLRRRVFAEMYQMLKKGEYHYARDEQNHDAKLLQYRRFLKKRKNLLETA

SEQ ID NO: 49591 - protein, 410 aa, unidentified
MAYKVAGIDVHKKVLMAVVCDTEQSEWKFQRKRFGTTTYDLQQLSAWLREQGVQQAVMESTAQYWKPVWYELEPQMHLALAQAFSNRAPRGRKHDFRDAERLVRRLVAGELILSFVPEPEQRMWRTMTRMRVQLTRDVSRLRSQLECLLEEMGIKLAAWLSDLLGVSGVRILRALAQGETDPQKLAALGEESLHCSEKRLIQALTGHPQATHQRLLGLYLDRYQLLKEQIEQLDVMIAQAMKPHEEAVIRLAAAAGFGVESAQQVIAEVGADAGMFPSAAELAGWAGTCPGQEESAEENHNSRSPKGNKYLRRTLNQCAHAAVKTKGSHFQIVFRRLLPRLGYKGAIWAVAHRLCRLAWKILHDKVTYVERGDSDPATKKRRAQALVRKLRNLGYQVNISFITQPTAATA

SEQ ID NO: 49592 - protein, 343 aa, unidentified
MESVYYIGLDVHKKTIDYCIKTVDGQIVRQGTVGANRKALHQWLIELSTPWLGAMEATLFTGWIYDFLRPHAVELKVAHPEMLKAITAAKKKNDRADAEKLADLLRVNLLPECVMMSEELRELRRILRYRNMIVRTATRMKNKISGLLMEVGADYNKQRLHGKAYFDQLLERVEDVPDSVKDLLKLSRTNLELFTAVQKKLLKVLRNDSRIQQRVENLMSIAGVGEITGLTWVLEIGDPARFRSSRQAISYCGLCSAQQESAGKEQRGPISKKRNKHLQTMLIEAAKLAPLWNPLLASLHERELARGNRNRATLAVARKLVEYMLAVDRRGTPFVTETMEKAS

SEQ ID NO: 49593 - protein, 362 aa, unidentified
MLKSTTIIAFDQHAATTMAAVLLPAHRTPALHPLKSDPPTILRFVARLQRQGAVTCCYEAGPCGFELQRALTAKGISCDVIAPALIPRRPGDRIKTDRRDAGQLAVLYRAGALTAIHIPTEQEEAARDLLRCREDIRADLLRARHRLSKFLLRHGRRFTATKKAWSKRHDAWLRAHTWPLPALDQTHRAYLRAVDEVLARLRDVETDLQALLALEPLRPRVQRLRCFRGIDDLTALTIAAELGDPHRFATAPSTMAFVGLVPSEHSSGSKRAQGGITKTGNAHLRRVLVESAWHYRHHPFVSATLRARQRGAPAQVIARAWTAQQRLHRRYQRLAARGKPKQHVVTAVARELTGFVWAALTQ

SEQ ID NO: 49594 - protein, 361 aa, unidentified
MAKARSLVGLDVHATKIVAAVLDAETGELVFVRIGGDASEAAALCAGLPRPVRAAYEAGPTGYGLARELDRRGVQCVVAAPSKIPRASGERVKTDRRDAEHLVRLLLAGKLHAVRVPGAEEEALRDLVRARDAVRQDLMRCRHRLSKLLLRHGVRFEDGRAWTARHRSWLADVTLAWPAAQATLTDAIGAVDALVHRREQLEGEIVARLPRSPWATAAGRLRCLRGIDTLSAAGLCAEIGDFERFARAEQLMNYVGLVPSEHTTGEQRRLGAITKTGSGHARRLLVEAAWHYRKRPAIGTALARRQDGQPAHAIAIAWTAQQRLHHTWQRLEQRAKRRTIIAVATARELAGFCWAITTRTE

SEQ ID NO: 49595 - protein, 344 aa, unidentified
MKYYAGLDVSMEESSVCVIDESGAVVAEAKVASEPVAIAGFLAPWSGSLAKVGQEAGGLSPWLHAGLKGLDLPALCIETRRMKAYAKASPVKTDRRDAKLIALALRAGLYRAVHVKSVAAHKLRLALTARQAVLRQARQLQGKVRGDLKVFGIKLGRVGSGGFAGRVKVCLAEHGDLWALVVPLLELRAALLAQVRVYDGLLRRLARSDELCRRLMTAPGVGVQTALAFRCGIDRPERFRRSGSVPAALGLTPKIDQSGERERCGAITKAGDKLLRSLLFEAANALLTRTRSWCALKRWGVALAKRRGMNRARVAVARKLAIILHRMWCDGSEFRWSGHQTKAA

SEQ ID NO: 49596 - protein, 358 aa, unidentified
MKTKGTKIRFDGHNIYVGIDYHLKNWKVTIMLNDLEHRTFSQDASSKVLSDYLRKNFPGANYFSAYEAGFSGYSAHRELEELGIKNIVVNPADIPTTDKEKRQKEDRRDSRKIAKSLKNGELNGIYVLTKSMEELRGLVRYRKTIVKEITRNKNRMKSLLYFSGIKIPLALERSSKYWSSRFTEWLADIKLTTDHGNLVIEETIDMVNLLRAKLLKINKYLRQIPKQGEFAKILTFLQSIPGIGLITSLTLLTELEDILRFRKIDQICSFVGLIPSTHSSGEKERIGRITYRSNRYLREALIESAWIARRIDPSLAYSYSQLVQRMEPTEAIVRIAKKLLNRIRYVLKNESEYVQSVI

SEQ ID NO: 49597 - protein, 413 aa, unidentified
MHKLEQEQRLRGSRGVVSGRSKMRFAGIDIASELHVAAVVDEACQTLVRPTPFGEDAAGYVRVRELLGTPDDVLVAMEATGHYWQNLFAVLVAEGFRVALLNPLRTHRFAGEDLRRTKTDAIDALGIASFAAQKRPPATRLPDDFTRELRELVRLRARLQQDFEDRVRHLHRLVDLGFPELSRHIRALGSELATTILRRYPTAHAFQDVTIRRLASLRYHERRRVGNELATTLIAAARTSVGQHHETAYQVQVRYLCEDLDVLRQRLRDLTGDLERSLHQHQVGTLLTSIEGIGPLTAARIVGELGDPAQFRSAAALASYVGVAPGQRHSGKRHPRSAPLSPIGHAMLRRALWMPTLVAVRKNLWLRAYYERLRAAGKPPKVALVAAMRKLLIAVYSVAKTRRPFVPIVPVTT

SEQ ID NO: 49598 - protein, 408 aa, unidentified
MNAVGIDVSKGKSMVAALRPMGEVALLPQEFLHTEVGLEQMAYAILALGEDTRVVMEATGRYHEPVAAALHEYGIYVCVLNPLYIKQSGGGSIRKVKTDKADAMKIAKYGLDNWVELREYTPMDTVRQQLKLCSRQYNLYMKTVVSLQNNLISLTDKTFPGVNELFSSPERADGHQKWVDFVMTFWHCDCICRVSEKAFTDRYQKWCKRKGYHFSTEKALDLYAGSCGHFTTLPKNDNTKLLITTAAQQLLAGKTTLAALRTEMTRLAKQLPEYDTVRAMYGVGETTAVQLMAEIGDVRRFPRRSSIVGFAGVDPAVDQSGKHSAKSVPTTKRGSPHLRKTLYQIVCTYLKRSPADEPVYQFLDKKRAEGKPYFVYMTAAQNKFLRIYYARVKECIETFDAQQDTVQN

SEQ ID NO: 49599 - protein, 389 aa, unidentified
MEARTVNNPPPAAPHDDAVRCVLAIELSKKSWIVAVNTPSSEKISRYTLKACDWKELLKLCERIGTRIARELKKDVELVSCYEAGYDGFWLHRLLEAHGIRNYVIDPASLQVDRRARRAKTDRVDVERLLRSLMAYLRGEPKVWSVVCVPSVAEEDDRRLHRERGRLINERIQHVNRIKGLLAIHGIYDYPPLRHDRMQQLERLRTADGRTLSPRLKAEILRELQRLELVIGMIKTIEAERDAIASAKIETEHSSAKRIQDLAKIKCIGPEFATTLVGEVFYRSFDNRKQLASYVGLTPAHFQSGETCRDQGISKAGNAKARRVMIELAWLWLRHQPASPLSVWFHDRVGKLKGRIRRITIVAVARKLLIALWRYLESGLAPEGAILKV

SEQ ID NO: 49600 - protein, 384 aa, unidentified
MNKHSMIFIGLDTHKEFHEVAYCEEQRGATPVHYGRIPSSKVSVKKLLRQFESKYPGATLHVVYEAGPCGYWIYRLITSLGHCCYVVAPSLIPKKPGERIKTDRRDALKLVRTLKSEDLTPIYVPEPEDEAVRDLSRAREAAMKDLKEAKYQLKALLLRNNIRYEGTANWSKKHLRWLTELILPHLPRQIVLQEQLQTIEERIRRLERLDNELTHHVHQWRYYPVVKAIQAMRGVRLLVAVGVVAELGDLHRFDHPRKLMAYLGLVPSEQSSGGKRHLGAITKAGNGRARRLLIEGAHSYRYPANVSTELQLRQEGLPKDIVDIAWKAQLRLCKRYQRMSKKGKHYNLIITAIAREMAAYIWAIAKEVVLTPVNPKLRLSRVPA

SEQ ID NO: 49601 - protein, 425 aa, unidentified
MKKTDYLSTLFVGIDIGSRINVVSAIDFNQEYFIRMKPVPNAKEGAETLESLLVDVLSAHHEFNHVIIGLESTGFYGVHIANYLSASDKLSPFGTEVYCLNPKEVAKYKESFNALDKNDGIDSFVIADFARVGRISIKPWRGAQYLALQRLTRHRLHIAECIAQEKTYVLNNIFLKFSEFAMMKNEDHPFSNKYGATAEAILEQYVTNDDIIDASIEDLVELIESKSRGRITDPEETAKLLQAAARASYRLDKVIAEPITLSISSSFNCIRAFEKELKAIDKAIEQTVQGLNPTEYQVLRSIPGIGHVYAAGILAEIGTIKAFPNNNALAKYCGIVWKENQSGNFRAEDTKMSKAGNRYLRYYVIEATGSVINHCPEFKAFYDKKFAETTTHQHKRALALTSRKFLRMLFGLLDKSQLYSPDKSR

SEQ ID NO: 49602 - protein, 444 aa, unidentified
MAANKRKTLELAYPNAAGVDIGSASHYIAVPPDRDNESVREFKSFTADLEQAADWLTRCGVSVVAMESTGVYWIPFYELLETRGFTVHLVNARHVKNVSGRKSDVLDCQWLQQLMSYGLLSGAFRPTDDICALRVISRQRDMLLSSQARHVQHMQKALTQMNVQLTNVIADIVGDTGQKILRAIVNGERDGQKLARLKNARIRASEEDIAKSLQGNWREEHLFALKQALSLYDFYGTQLAECDAQLEGMLTVLIGENEAKPGVGRQLSRAKNAPRFDVRTYLFRLCGVDLTRINGLNPITALKVIAEVGPDLSRFKTAKHFASWLGLCPGTKISGGKMLSGTSKRSTNRAAQALRLAAAGLHKSQSALGAYFRRMAARLDRAKAITATAHKLARLIYTMLTKGEEYADQGQDYYEERYQQRVIHHLKKRAEKLGMQLVSLPEPI

SEQ ID NO: 49603 - protein, 321 aa, unidentified
MTTIAVLGIDLGKNVCSLVGLDETGGVALRRRIRREGLAAFVERLAPCVVAMEACCGAHWVGRVFARRGHAIRLMSPEYVRPYVKAHKNDDRDAEAIAEASTRPTMRFVELKSEEQLDLQTLHRSRERLVAERTALINQLRAILLERGIAVAQGRRKLEQRLAVLIDEAQGAGLSARMVRLIEDMRAQWSELDRRIGEFDAEFLAFVKQSEDARLLLSIPGIGPLIASALIAAIGTGEAFEHGRDLAAWLGLVPRQSTTGGKPKLLGISKRGNKYLRKLLIHGARSILPYLVQKDTCLAHWARSLLARAHKNVVVVVLVAN

SEQ ID NO: 49604 - protein, 343 aa, unidentified
MKLIRVGVDLAKNVFQVHGIDRSEKSVWRRKLSRANWLATLLETIEPGCLIGMEACGGAHHWARRLQGHGFKVSLIAPQFVKPYVKSNKNDANDAEAICEAMSRPNMRFVSVKTVEQQDIQAVHRVRFELSNQRKAKANQIRGLVAEYGLVAPKELLQLRCAIPGWLEDAENGLTDRFRRLLNGLWHDMLALDQRMTELDREIAQIAATDPVAKRLQQLRGVGPMIATAMVATFGDVKHFANGRQMAASLGLTPRQNSSGGKERLLGISKRGDSYLRTLLIHGARSTLRTAKDKDDRLSRWVTRIAQSRHHNVAAVALANKTARIAWAMMKNGTDYQPNLVVQ

SEQ ID NO: 49605 - protein, 414 aa, unidentified
MVEIIHKSCGLDIHKQFFIATILCRSGEKHQQRFERNDDGILAFKKLVISEKCDVVACESTSDFWVPIYDSLIKHIPVIVGNARDMKAFTHKKTDKIDSEFIAQLALNNMIQSSRVFTKNHRNFRSYVRLRLKLVQKRTDLKNEAHSILASEMFNLKDVLTDIFGKNGRIILSGVISGKTVDQIIESLSPKLRKKYDQIREILDREISQNIAIRLQTCLKLIENLDNEIKSLEIEIFNYVYENHKHEMGILMSVPGIGELSAATLIAEIENFKDFSTGDRLASWLGIVPNVYQSADKYHNGRITKRGSKVARWILTQIAQAAAKKKNSKLKEFFNRKKKSIGHAKAIIALARKIATIIWHLIINDEIYEDETGYKKEQIQKRRIIEKVTISVDERIKIISGIFAIVEKEDKGCT

SEQ ID NO: 49606 - protein, 438 aa, unidentified
MKVLHERVAGIDVHKKMIKVAIRSPGDKPWTRKTEILTFRTFYGVLRAMARELRRRGVTHVAMEASGVYADPVCYALCEEDFTEVIVVNPAHVKALKGHKTDAKDCARVAELPECGLLQGSCIPAMELREVRDLTRYRIKTVQARTSEIQRLDKALESAGIKPGSVASDITGKGPTAMIEALIDGERRGAVMADLAIGHMRTAGKLADLSMALEGRFTDHHALMCRLSLDRVKVLDAAVADLEMRIAATTTPWQREISLLKTIHGSGDAVARAWIAEIGPAPHLWSGSHEKLASRASLAPGSYISAGKRRHGRTGDAGTYIKPVLVQAAWAAIRTRGRLQARYNHLVRRMGGPKNPAAKKKAIVAIAHTLLKIACTVLKTGIPCQDPGEDFYTRREAPGHRQAWLERQIQKLHPGCTITITISPPPDPVPETALTPGA

SEQ ID NO: 49607 - protein, 444 aa, unidentified
MKTELPNIYEQAAGIDIGADKIFVCAKDGEYQVFRCFTEDFRKAAAYIKENGVSRVAMEATGVYWIALKDILEQEGLVVDVVKAGDAKQLPGRDKTDGADCQWIRTLYQKGLLRPCVIPDAAIRELRTYVRMRQDHIEMAAQHVQQMQKALIQMNIRLPQVLSDIMGASGKRIIEAIIKGERDPEKLVLLCDRQILKNKKEEVVLALEGNYREDYLFLLSQAYQGWQFYNELMKECDKKINEWLERHTKDKAPLEQVTPAKSIRHHKPDIEKLHEKVLLLNDGKDVTRIPGFTDYTVLRLIAEVGTDMSKWKSAKHFVSWLGLAPKKRYSGKGKRHYRGIANTKAAQILRESAQALLRSKHCALGSFGRRIRSTRGPAIAIKAMARKLGILFYNTLTKGIEYVEQGIKKYEEQVRQTELSKVTKWAGRLGYTLIPNQQINVVHQ

SEQ ID NO: 49608 - protein, 576 aa, unidentified
MSQATTVDRIGVGIDTARYGHRVAFLRPDRQPAAKPITVLESRAGYQALQQRLEQLHQQHPQAHFHIRIDAAGQYAANLEHFLRSLPLPMTLSIGEPKRNKDYQKAHFPKRTSDDTESQAMARFAVVELPKATTPVTPAMTMLREVAGRLQAKVKQSTQAINRLHNLLARVFPELANVTDDLSSSWVLHLLDKYPTAQRIAQARLTTLQKIPYLAPELAAHIHLLAQQSVACLSGDVAETLLRDLVAQVRHSQNAESQMRRLLGDAYAALPSSPHRQVQTIPGIGVATAAVLIAQALDINRFATPERFVGYFGVFAEENSSGVDKFGNPLPPGTMHMSRKGNDLVRHYLGNAARSAILHNPPIRTLYCRLKAKGKRGDVALGHCMRKLLHLVYAVWKTDRPFDEKQGAGQTPRHAAQDAAEPGGKETAVGHKRDDPAEEVVTTANATVAPLPSDVKASTANRPARPKVDFAFLRQQVSMEQVLRHLGLLDQLRGRGQQRRGPCPIHGQPHDRQPTFSVHLGKGIFPCFQAACGVQGNVLDLWAAVHKLPLYEAALHVAETFHLPRNREEEPVSGNR

SEQ ID NO: 49609 - protein, 402 aa, unidentified
MNAVGIDVSKGKSMVAIMRPFGEIVSAPFEIKHTASGINSLVELINSVEGESRIVMEHTGRYYEVLAHQLSEANLFVSAINPKLIKDFDNDSLRKVKSDKADAVKIARYALDKWQNLKQYSVMDELRNQLKTMNRQFGFYIKHKTAMKNNLIGILDQTYPGVNTYFDSPARSDGSQKWVDFASTYWHVDCVRKMSLNSFIDHYQNWCKRKKYNFSQSKAEEIYGKAKELVPVLSKDAITKLIIKQSVDQLNSASTTVESLRTLMNETASKLPEYPVVMAMKGVGTSLGPQLIAEIGDVSRFTHKSAITAFAGVDPGVNESGSYEQKSVPTFKRGSSDLRKTLFQVMDVLIKTHPQDDPVYQFLDKKRAQGKPYYVYMTAGANKFLRIYYGRVKEYLSSLPES

SEQ ID NO: 49610 - protein, 353 aa, unidentified
MNTVGADLHKRTTWFYILDCHGKKINSKNISNNPELLKRYFASIPKPFRIAVEATYNWYFFVDIAQEYAEETFLANSFMLKAFAKAHKKTDKIDARLIATVLYKGFLPVVYIADKETREVRELLRYRQSLIQDRCRNITRLKMILDKIGILSSGDFTTQKKLKEVSQYVLPSRSYRLIIDKFIERIAFHTEKLGEIEKTIATLPVADDDIRNLISICGIAEFSGALIKSEIITIDRFKSFAHLCAYAGLAPRVSQSADKIYHGPINRNRRKYLQWILLELSYHFKNGYPDKAEKFERIKKRKGHNTAKVALARDLLKAIHIVLKEKRPYHHIYEKKTETRKIQLVAADAFVGV

SEQ ID NO: 49611 - protein, 408 aa, unidentified
MKNRTKVETRRSKSLSPRTKVQSPKQNLSPRNAAPNTAHDAVQDTAPNAANTTEPTTQTPLTGIAGIDIGDKRCHLRLINFDGELIDETQITTRPAPLEKYFRRWPRLRIVIEAGTHSNWIRRTLAALGHEVLVANPRRLRLIAQSYSKNDRNDAWWLAELGRTNPELLSPTEPRSAQSEQHRAWLRSRETMVEARTKLINSLRGLSKSQGLRLGTCGPTQWASKVRAECPGELHPALLPLARLIAALTREIRQLDKQLGQLADKVYPATARMRQVNGVGALTALAYVLALDNDAGRVKRSRQAGALVGLRPKQRDSGQSTPQLGITKCGDKLLRRLLVQSAQYQLGPFGQDSALRQWGLKLAAGTNRRAKRRAVVAVARKLAVLLHVLWSKEADYDPFYGAAPAEAA

SEQ ID NO: 49612 - protein, 346 aa, unidentified
MQHYVGLDVSLRQTAVCVVDQTGKIKREGIVASDPDAIAEFIIKHAPHVARIGLETGATSNWLWTELKKKELPVICIDARHAKAALKLQINKNDRNDAVGIARIMQCGWYKEVRVKDLDSHTIKALLISRALLVRLKRDLENQIRGLLKNLGLVIGRAKMGAFTARATELTDDKPAIAASVRPLLKAREALKGQINDLDRKVMRLARDEPQVRRFMTVPGVGPITALCYLATIDDPARFDKSRNVGAYVGLTTRRYASGEIDRTGRISKCGDALLRGYLYEAANVLLTRVAKWSALKAWGMRVAKRSSLSKAKVAVARKLAVILHRMWIDGTEFNWSTKEANDQAA

SEQ ID NO: 49613 - protein, 377 aa, unidentified
MKRIKFVGLDIHAETIAVAVAEQEGEVRSLGLIPNREESIRKLVKKLGPVEQLRFCYEAGPTGYVVYWQVTALGAKCEVIAPTLVPVKSGERVKTDRRDALKLARNYRAGELTAVWVPDAAHEALRDLVRAREAAKKDQLRAKHRLSKFLLRHGRRPASGVKPWTLNYMAWVKKEVHFEQAAQEATLLDYLHEVEHAETRITRLDQAIDEAVKSTTPKMRAVIEGLQALRGLAQVAAVTIVAELGEISRFSEPRQLMGYGGIVASEHSSGESTRRGGITKTGNAHLRRVVVEAAWAYRYRPNVGAALRKRQEVVSQEVREIAWKAQHRLHSRYRKLTARGKEKGKVVTAIGRELLGFIWAIGVKVEAAQKETERRAA

SEQ ID NO: 49614 - protein, 343 aa, unidentified
MEQYVGLDVSQEQTAVCVVDGDGKTLWQGKCASTPEAIAATIRTRAPEAVRIGLESGPLSAWHWHELRKLGLPVVCLDARHAKAALALQLNKSDRNDARGLAQIVRTGWYREVAVKSVDSQLVRSMLTTRAQLVRMRVDLANQVRGVLKPFGLIAGKGGGQPFVERVRTLVADGPLQEVAEALLSAWRAIGEQIAALGRRLVAMARRDEAVRRLMTAPGVGVLVALTYVSVVDAPERFARSSSVGAYVGLTPRRYQSGEEDHTGHISRCGDKLLRTYLFEAAGIILHRVSRWSTLKAWGTRLARRIGTRKATVAVARKLAVILHRMLRDGGEFRWSAKEVQAA

SEQ ID NO: 49615 - protein, 329 aa, unidentified
MSAVVCGLDVHKDSTYATILNSEGKIINQMRMTNEKVLSYLSNYKVSKVAMEASTPVVSLYRQLMSEGFDVVVSHPKKTRYIAEARIKSDRVDSKVIAELARLDALPLAYVPDKETADLREKVRRRAFLVRERVKLRVKVKSFLTYEGIKWPSEHGLFTRKGIEWLGSLKFESVDSYLRIMDIFDEEIKVLSKQLEGLAREDEDVKLLMTVPGLGYYSALLVKSEIGDVNRFPFGERLCSYAGLVPSTHASGGVVRHGGITKEGSRWLRWVMVEAAQTHVHKYDTSITRAYQGIAQRRGKRAATVAAARKLLLCCYSVLKNKRPYYDQA

SEQ ID NO: 49616 - protein, 363 aa, unidentified
MTKRICKNDSIVGPPATGLPLVHWMGVDVSKATFDAALWVPGTEGKHAWKRLPEKHFARTEEGTNACYAWALANISEAPGTPPPTVRVVMEATGKYSLELSAWFMACAPSTAPAIINPRLSKAYSASLSIINRTDKTDARSLARYGAERTPAAYAPSVPEWAQLRDLTRYRQALVEMRQAEANRAEEPSCSAVVRETQNRRIKQLDRDIAKLDKKIKALAQHYPDMNRDIKNLETIAGVGTVTATTILGELGDLRRFVTARQLTAFAGLAPTCHDSGTSVRKKSHVSKSGSAHARRILYLAALAATRGQNDFADTYRRLIEQGKKKMVALVAVMRKILVVMRAILLSGEPYQTHRVKRSHTCG

SEQ ID NO: 49617 - protein, 370 aa, unidentified
MQTVRSFVGMDVHKESISISVAEDGRDGPVRFLGVIPNQPDDIAKLAKRLGKHGELDFCYEAGCCGYNIHRQLTALGHRCTVVATSLIPSKPSERIKTDRRDSQKLAILHRSGDLTAVWVPDTTHEALRDLVRARVDATMHLMRARQQLLAFLLRHGRSYPTGKHWTMRHRAWLAIQTFAEPVHRLVFQDYIEAVWTAQQRRDALVERITAAIASWSLGPLVEALRGLRGIDLISAATLVATTGDLSRFESPRMLMSYLGLVPSEHSSGGSIRRGGITKTGNREARRMLVEAAWSYRYPARVAKEKAEILVRLPKAVRDIAWKAQTRLCPRYHSMIARGKKPTVVIAAVARELAGFVWAIGQQMRTGMTT

SEQ ID NO: 49618 - protein, 310 aa, unidentified
MDAIVVGIDVSKNRLDVAVRPTGEVFAVVRDAEGLDALVARLKPLAPVAVAVEATGGYETVVAASLAAADLPVVVVNPAQVRSFAQALGKRAKSDPIDALVIAHFVEATRPEIRPLPDAETRLLGDLVSRRRQIVGMITAERQRQKILTGKRLQRSIARLLAALQKELSSLETDIDQAVRGSPAWREKEDLLASVPGIGKIIARTVMAELPEIGTLDRRQIAALVGLAPWTRQSGTWKGKSFIGGGRAAVRAALFLGAMVAARHNPELKLFRDRLVQAGKPKLVALVATARKLLTILNAVIRDRKPWQPA

SEQ ID NO: 49619 - protein, 354 aa, unidentified
MLIIGCDFHTRYQQIAMARGETAEMIAERRLDHASGEARAFYRSLQGSPEPVRVGIEATGPIHWFERLLTELGHELWIGDSAKIRASEVRKQKTDERDARLILDLLLSKRFPKIWVPTPAERDLRQLLWHRHKLVSMRTMLGNQLHALAMSQGLCRKQKLFTKKGRAELGSLTLGPWAGRRREELLKLLEQLEPPIAELDRAVLEEAKRREDALLLMTHPGIGSVTSLAFVLAIGPITRFQGSRKIASYLGLNPTEDSSGGRRRLGGISKQGNTMVRWLLIEAVYPAVRKDPALRQDYQRLKFRRGHAVAKVAIARKLAVRMYWMLRSGADYAQLVRRQGSPGGTLMNASSLLA

SEQ ID NO: 49620 - protein, 432 aa, unidentified
MSQFQDDFVVGIDVSSQFSVVAMLEPSGKMIRKPFRVDHSPAGFNKFLEILKKEEERLQRKPIYFVESTGIFHLPLFFFLRSNDLKGFVLNPLSVHSIKNFDLRKVKNDNKDAEAIAKLAKYQDVKFSLVPEPQILALRMMAREYFALADTLTEIKNRLCTDLYLLFPGFLSIFSNPFGKTALAVLREYPSPKAVQQADREHLTALIAKNARKGLAWASAKVDALLEISNLTNAMPAELSVLDSKITINLEMILQLQNSQLAIEKQLHEMVDAEDFPAAARRYIELLDDMPGVGFITAVTLVAEIGDFSLFKSPKALVAFFGIDPSVNQSGKFTGDRNKISKRGTRFGRRVLFTVAMASVRTNRNGQPINAVLREYYQKKCVNKKKKVALVAVMHKLLHYMFAVLRDGKPYQVRKPEQHQTWRRDKLHLVAA

SEQ ID NO: 49621 - protein, 364 aa, unidentified
MEYFAGLDVSIEETTICVIDDKGKVALSSAVATDPDAIANALTSYAERLRRVGHEAGSLSPWLQPELVARGLPAVCLETRHVRAAMSAQRNKTDATDALGIAHILRTGWFRQAHVKTQSCYRIRLLLSQRRNLKRKFLDLENSIRHSLKAFGIRLGKIGRGGFERAVKEEVTAAGDAMMQGVIACMLRARAALWTEYLTLNKLVVQLAMRNELCRRFMEIPGVGPVTALSFNTAIDDPSRFRRSRDVAAYFGLTGKRWQSGTSIDIKGRISKAGDPDVRRALYEAASAMLTRFKGRDSIKSWGLHLAKKKCHAKARVAVARKLAVVMHAMWRDGTIYAGDAQMSDSERAAATASKERRIGYARS

SEQ ID NO: 49622 - protein, 425 aa, unidentified
MGTFPKAQQKTVWVAIDVAKARHEALVELPNGSRRRTSISNTLPGFKRFADELRRSGKNCEIALEPTGDYHRPIANFLLRQGHKVHFVSSIATCRTREALYNSWDKNDPKDAQVILHLLKTGTTQIFSDPLERGYHDLRELLGAYRQIVSQKTKIYHSLMTHYLPLYFPEAECFIASSRSEWFLDVFRFAPCPTAVLKYTKATFIKKTVKDAGHPTVRRKLVGEYYETAKQSVGLPVKADSLTIQMFQAVLDEYIRLAQRRRLLEKQLHEHLEPHADYQRLRTIPGIGPIVALTVMAEAGDVRRFSHYRKFLNYCGLSLSTSQSGSYRGASQLSKRGNARLRSAFWMAGRAAIAQRRNGFRKKYDDYMRENPLDGDLKRKAYTAVAAKMARVAYGLIKTETDYRHFLQAAIPAGESLRSVPLRQA

SEQ ID NO: 49623 - protein, 334 aa, unidentified
MIYVGMDIHKSFIQACAMDSKGNVLKEQKIETEEISEFVKPFKNHAIKAAIEPTCNWYHVYDALESMGIDTVLVNARRTKVIAESKIKTDKLDALSIAHCLRTGFIAKSWIPSKNIRELRNIVRHRLALRKEMTRAKNRVHSILLRNGIKHEYSDLFGKRGMQFLRNLELKGSDKYRLQSYMRIVESLMEEKQRTDNKILQLCKMDENAMLLTSVKGIKYYSAMVIVSEIGDIKRFPNSKKLCSYAGLVPRTMQSGNHVYHGRIIRECNQNLKWMLNQCVHSHIRFCKESQVTKLYYRVMRKKGKNKATVAASRKMLTIIWHMLTKGEEFKCKG

SEQ ID NO: 49624 - protein, 408 aa, unidentified
MEQVIERCCGLDVHKQTVVACVRVPGPDGTRVQQVRTFGTTAAELLTLRDWLEAQAVTQVAMESTGIYWKPIFYVLEEAFTCVLANAAHIAQVPGRKTDVKDCAWIAQLLEHGLIRASFIPPPPVRELRDLTRYRKAVIQDRSRAANRLHKVLEDAGIKLASVATDVLGVSGRAMLTALVEGTTDPGVLADLARGTLRRKLPALRQALAGRFRPHHGFLVGQLLAHLDYLDEAIATLSTQIEAAITPFAAMVTRLDSIPGVSQRTAEVLIAEIGVDMRVFPTAGHLASWAGVCPGNNESAGKHRSGRPRPGNRWLRMTLIEAALAASRTSTALGARYRRVMRHRGHHKAVIAVAHAMLVIAYHLLSRETTYHELGADYFDRHQTDRLRRRAVQTLQRQGYRVTLEPAA

SEQ ID NO: 49625 - protein, 392 aa, unidentified
MYIVGIDIGKNHHEASIVSPEWKQIGHSLRFATTHKGADSLMSFIFNNIGNSSCIFGMEATGHYWYPIYSFLKARGYTIYVINPIQSDSLRKMYIRQTKNDSIDSFLIAEVIRFGQFTTTSMADENILAMRQLCRYRDSVISSRTEIKLRISTIMEQIFPEYEKQFSSLWLSTSMGILEKYLTPENIENAPIDELFEIIKDKSHNRLTRAKAISIKEAAADTFGIKIAQDAFSFQLKQLIDRMNFLDKQIEALDCQILEYYEKFDCYLHTIPGIGMIAAATILAEIGDINRFKSSSALVAFAGIDPTVRQSGEFSSTHNHMSKRGSPYLRHAIFLAATTCSFHNSPLNAYYKKKREQGKHHLTATGAVARKLTTVIYAVLRDGKPYEPKSFC

SEQ ID NO: 49626 - protein, 314 aa, unidentified
MKIYAFDVAKDSLVAVRSDKSATAKQEFIINNTDKDINNFFDQLDDTNILVVAESTGDYHRRLALNCLERNIRFRLLNPITTKQFTRATVRKKKTDLTDALIIAKLALQGEGTEVTQETFGTIKPAIRTAMKLSNIHRTLKIITKRFETFFPYEEDLLLALKSCDQVVTRSRTTFQQRGLEQVDAATKKLLISLPGVGNTLATLLVSEIGSIERFHSGKSLVAYAGLDPKVRQSGLALHHNTNLTKRGSSYLRCALFIAAAVARIHDPELKEYYLKKRNEGRVYREAVVAVARKLTYRIYAVLKRGTPYVKATS

SEQ ID NO: 49627 - protein, 374 aa, unidentified
MASIIYAGMDVHKDTYSLCSFDAKRNLLFSQTQMKPATGNVVRYLKKVSDMNNGALTVCGYEAGPTGFGLCRELQKLGFACVIMAPTSIAKTAKDKAVKTDKLDAQMLARALAFHSYKEVILPSENIEAIKEIVRMRCSVSKTCKRAKQNLLSFLLGHGFSYSDGKYWTVKFSSWLKTIHFESEYLTYCFEEYLSEVTRQIQRLDLLDKKLKELEDDKEIRDGVKRLKCICGIDTVTAVSLVAETGDFNRFSAAKHFANYTGLCPGRHSSGLSDKSTGITKQGNNYLRRLLIEAAKSVKRSASHGHKSKRILSRQEGSSPEVVNYADKAASRIRMKMYHLERRGLHCNKAAAAGARELACFTWGMMHMPQSGNV

SEQ ID NO: 49628 - protein, 413 aa, unidentified
METKGEVVFEQQIERGCGIDVHKKVLVATIKGLGIKEETRSFDSFTSSIEAMRDWLLEHKITHIAMESTGVYWKPVFNVLEEYFDIILVNARHIKNVPGHKTDKKDSKWISKLLISGLLKGSFIPPRPIRELRDLTRYRRKIVGQIASEKNRIHKILEDANIKLSSVVSSMSGATASKIIEAMIAGEEDIEKLTAYHHGKIQATKEELADALKGFLTDHHRFLLQMVRISIQSKESLIDKLEKEIDQHLERNKLKVSVELLQSIPGVGKDGAREIIAEIGNDMGQFPSEQHLASWAGMCPGNNESAGKKKSGRITHGNNYLKIVLVQCGWAATRTKGTYLRSKYDSLVGRRGKKRALIAVGHKILIATYFILKNQIPYKELGNEFLENKKKDKQILHHLKRLKELGIEVEEVA

SEQ ID NO: 49629 - protein, 412 aa, unidentified
MEVVYPRCSGLDVHKRFVVACLSIIENGQRQKELRQVSTMTSDILALKTWLLASGCRQIAMESTGVYWKPIFHLLEDSFEIVLVNAQHMKAVPGRKTDVKDAEWIADLLQHGLLKASFIPGKEQQAVRDLTRTRMRLIQERTRLINRLQKVLEDANIKLASVVSDLMGMTGQAILRALVAGQEDPECLAHLAQGSLIKKQSQLQAALEGKLTEHHRMLLEELLLLIATLDRSIARFDREIAERLQQFDALISRIDAVTGLSRRSIEVLLGELGWDMSRFPDAAHAASWVGICPGNHETGGKQLSGRTRQGNRWAKTVLIQAAHAAGHTQTYLGEQYRRISARRGAKKAAMAVGHSILVIFYHMVKTGESYHEKGVDYFTDVNKQKIQQRLVRQLERLGNTVILQPKAETTLA

SEQ ID NO: 49630 - protein, 348 aa, unidentified
MKILALDLGKNKSVYVDYLTGSQRQTFGKIGTNAHDVEQLLRRCSPDRLVIEAGPASGWVCDIAWRLNIPIQVANGNDERWRWKTVKAKTDRSDALKLAQLSEMNCLPTVHVPAAPVRQWRALIEYRHSLVRRQTAIKNSLRSIYERQGLHLGSVHGAWTKQGLARLKQDVSGASGEQIWLFQVGCELEQLERVQEQIHQVEGQLAKLGQTLEAVKRLQQAPCVGPRLSEAVVAVLDNPQRFKNGRQVGCYVGLTPRRWQSGQSDRQGHISKAGHRLLRGLLVEIAWLGVWKNTWMREVYEQVRRGSPKRKKIAIVAVARRLLVKLWAMLRDGTPWKNPTGLTVGIER

SEQ ID NO: 49631 - protein, 456 aa, unidentified
MIMKRKKKVLQVPKLESLKQINPNAAGVDVGASELYVCVPEDRDPRPVRVFQTFTSDLHEIAAWLKKCRVTSVAMESTGIYWIPLYEVLEEAGFEVKLVNAREAKNMPGRKSDILDCQWIQQLHSYGLLTASFRPPRDIVALRSLVRHRDRLIVARAVHIQHMQKALHLMNLQLDNVLSDITGVTGMRILRALVAGERNLDTLASYRDPSCKSSTQVIRESLKGNYQEEHLFPLRQSLELYDYHTTMIQQCDREIEQKYRALPSRVDLQRKPLPPSKKQQKKPRKNAPTFDLRSRLYEMAGVDLSAIDGCNAATIQVVLSETGVDMQPWRTCGHFTSWMCLAPHNDISGGKVLRSRAKKTKNRANTALRLAAQSLTNSDSWLGAYYRRQRARLGAPKAIIATAHKIARIIYYMLKYQREFVDLGANHYEAQYRKRQINSLTKKAASLGLLLVPAKA

SEQ ID NO: 49632 - protein, 338 aa, unidentified
MYYTGIDLHKKTSFITTIDKTGRIVSKGNFKNVESDILDYFVSLTEDPRIVIESMASWYWLYDLLTGHGFSVVISNPKKTKAIASAKIKNDKVDAHMLAQLLRADLISTVHVSSLETRNLKELLRHRARLVRDATRMKNRIHMLLMKNNHSVPVTDLFGIKGLKYLRCVVLPHYHQEQLMVYLCLYEELMARIKPLTKSIYTMAKQNPTAQLLMTIPGIGKIIAMFIIAEVEDIARFPSYRNLSSYAGLVPSLDASGDKAKRGRITKEGSPYLRTALIEAAHIIPSMRKSRLNVFFRKRIVRAGYQKAIVATAHKILQYVYYVWKNQEPYNETYPVCA

SEQ ID NO: 49633 - protein, 323 aa, unidentified
MDTQTNAAAASAAIFVGIDVSKAALDVALRPSGEPWHCTNDETGIATLVNRLQPLAPELVVLEATGGLERLVVAALALAGLPVAVVNPRQVRDFAKATGRLAKTDALDAAVLAHFAEAIHPTPRPMPDAQSQALAALVERRRQVVGMLTAEKNRVQQALPAVRPKVAAHITWLEQALKELDAELDQMLRASPLWRERDHLLRSVPGIGPTVSRTLLAHLPELGQGSAKHIATLVGLAPLNRDSGAWRGTRAIWGGRRHVRAALYMAALVGVRHNPVLRTFYQGLLARGKPKKVALTACMHKLLTILHAVLRDRTPWQPTPLAT

SEQ ID NO: 49634 - protein, 375 aa, unidentified
MNYNTVYVGMDVHKESFTLCCMTLEMEKAKYTMKTGADYKKILVYLDTMRGKFYGEDTHFICGYEAGCLGYTLYHQLTAANVECIILAPSTMSVEGGKGKKRIKTDKRDAENIAKCLAHRLYSPVHIPTDEELEIKEYVRMRDDHKHQLKSIKQQILSFCLRHNLKCDTSKSNWTIAHLKWLRSLQIEPLYKEILSEYLTTYDQLTDKIGRFDKRIEQLAQGDNYRENVEHLRCFIGIETHTALSIVAEVGDFKRFTDAGKFASYLGLTPGEDSSGDTRNRLGITKAGNRHLRRLLTEAAQCYARGSAGHKSKTLKARQSGNPTEVIAYADKANERLRRKYYKMVLNGKNRNTAKTAIARELACFVWGMMTNNIA

SEQ ID NO: 49635 - protein, 410 aa, unidentified
MSLFCGIDWATEHHDVAVIDDDGRVVARRRVSNDAAGFAALLTLLAEAGDSGADPIPVGIETDRGLWVAALRETGRTIYPINPLAASRYRARYAVSGAKSDATDAVLLANIVRTDPGAHRPLPADTEAAQAIRVLARAQQDAVWARQQIGNQIRDLLKDFYPAALVAFAELPDGGLARRDARTILAAAPTPARAAKLTPARLRRLLIKAGRKRYLDRDTARLREVFADAYLHQPRAVENAMGIHLTTLLGQFDATCTAADELAEAAIAHFEQHPDAEIITSFPGLGMLAGARVLAEIGDDRARFTDARGLKAFAGAAPITRASGKKTVVLHRHIKNRRLAAVGPIWALGSLRASPGARRHYDARRAAGDWNQQAQRHLFNKFLGQLHHCLHTGLLYDEHVAFPPPLKLAA

SEQ ID NO: 49636 - protein, 346 aa, unidentified
MEYIALDVHKKYTWARVENAQGDRLYESRLAHAHGTIKNFVGRWTTGSPVAVETVGNWYWVVDEIEAGGGKPRLVNARLAKLMMGNVNKNDKLDAKGMNRLQRTGTLPTVWIPSSSVRDARELPRTRMVLSRQRTQLKNRVHATLGKYGYVVEGASDAFGQRGRKIVGELLSKLPHHTQEALQRILDQLDHVGENLKCIEGKMIEAFAPCPQTNWLKTLPGVGDILAVVIWTEIGTIERFSRAEQFASYCGLVPREHSSGGKIRFGAIRRDVNVYLKWAFVEAANSALLNAERCDYGHISRLYQRIKPRRGHGKAKVAVARHLSEASFWMLKKGEPYREPMSSTQR

SEQ ID NO: 49637 - protein, 342 aa, unidentified
MSEYVGLDVSLEETSVCILDAAGSITFEGKVDSNPAAIEQLLKLRAPTAVKVGLETGPTSTWLWHELHAAGVPVICIDARHTQAALSMRINKTDRNDAQGLAQLMRMGWYREVKVKQLSAHVDSALLASRALIVSQRCDLENQIRGLMKNFGLRCKVTKGAGFERAVLLLVRHHQGLRDVLVPLLAARDALRKQEAALTAKVRERTLASPACRRLMTMPGVGSMTALAYSATIDDPTRFRHSESVGAYLGLTPRRYSSGETDRTGRISRCGDALARSYLYEAANVLLSRSTMTSSLKSWAQRIAKRSGAKKARVALARKMAVVLHRMWLDGTDFGAHTVNAA

SEQ ID NO: 49638 - protein, 323 aa, unidentified
MQGQEATEVSSGQKSNIGVDVSKDWLDVHVLPSGEWFRVANTPQGHRQFKRRAAGLEIDCVALEPTGKWHRALCRSLMASGIPVMVADPLRVRMFARITGRLAKTDRLDAAVLAAFAATMAEAARPLPSEAIDAIAELVTARDSAVAELVSLKNQRHAACDGFLQRQLSKRIEAVEKVIEDLDAEIQRRIKADQHLAARQAILCSIPGIGEVTAALAIAKLPELGALTDKEIAMLAGLAPIAHQSGQRDGQRSIHGGRPCLTRGFYIASLSAIRFNPQLKAFYKRLRLAGKPAKCALIAVARTLLVLANTLITQNRMWLPTPP

SEQ ID NO: 49639 - protein, 356 aa, unidentified
MQTQVTKKIDFKGKDLYIGLDVHKKSWSVTILVEGMEHRTFTQPPDPRILFNYLQKMFPGGTYYSAYEAGFCGYGIHRELNDLGIKNIVINAADIPSSQKDQLQKRDPVDSRKIARALEKGLLRAIHIFDRDMEELRSLNRTRFYLMRDLRRSKNRIKSFLQYYGISIPLEYDNSLWTLKYIDWLKQIKMKTLSGQDAFSNLINSYEYHRQQILTLSRQIRVRIREYDNELYSLLKTISGIGPLTSSALITELGDINRFPHIDHLSSFVGLVPRVKQSGESSYNGGMTFRCNEYLRTLLIESSWQAIRQDPALMQYYHQHVINNKGQKVIVKVARKLLNRVRYVMKNRQPYVKGVA

SEQ ID NO: 49640 - protein, 355 aa, unidentified
MTSTQYIGMDVHKESISIAVMNAAGKIVMECVIETRASIILQFIHGLRGDLHVTFEEGTWASWLYDLLKPHVTEVVVCNPRKIALLKDGSKSDRIDARKLTEQLYMNKLKPVYHGEHGLRTLKELARSYLTITKDLTRVMNRLKALYRSWGIPCAGSEVYAPRHRSEWLSKISEPGVRRRAEHYYQQLDALRALRQEVRRDLMVESKKHKAWKLLRQVPGIGPIRAALLVALIQTPHRFRTKRHLWTYSGLGLETHDSAQYRVVEGQLQRSKKPVTLRGLNKDHNHDLKDIFKGAAMRASTAAGPLHNFYEALLAKGRKPAMARLTLARKIAAITLIVWKKEVRFDANELKPQAA

SEQ ID NO: 49641 - protein, 384 aa, unidentified
MEKSSTLYVGLDVHKDSIEVATADAGRDGEIRHVSSIGGDLVALDKALRKLISKGHRLHVVYEAGPCGFVIWRHLTAQSLSCEVVAPSSIPKRSGDRVKTDRRDAMLLARLSRSGDLTAVRVPGAADEAVRDLVRAREDAVREQRNARHRLKALLLRNGIPYAGKTSWTAAHLRWLAKLKLEHAAQQIGFQEYLHSITEAGARIARLEQAMRDTLGEWTLKPLVQALQAMRGVQLIASMTLVAELQDFLRFENPRQLMAYVGLVPGEHSSGPKRRQGSITKAGNSVARRMLVEVAWHYQHSPRVSPIIATRQDRVPKEITDIAWKAQLRLNAKFKRLVARRVMKTKAVVAVARELAGFVWAIGQEVQTSGWQGIEIKPASSTKA

SEQ ID NO: 49642 - protein, 415 aa, unidentified
MGTVGTRQWDIDKLIRQLQSKSKQLVFVYEAGPWGYWLYRSLTKKGSTCWVVAPSLMPKKTGDRVKTDRRDAMPLARLMRSGDLTPVYVPAVDDEAMRDLSRAREETRRDLQAAKLQLQAFLLRHAIRYTGRANWSPAHLRWLSEVVWPTPAQQIVLQEDVQTVTEQTERLGRLALDLHEQVPTWRLAPVVAALQALRGVPCTVAVTTVAALGDLTRVENPRQRMHDLGLTPSEYSSGGRRQQGSMTTTGQTHARRALVEGAWASRYPAKGSRHLQRRLEKRPQAMQAISGKAQGRLGKRDRQLMAKGKNAPQVVVAMARELVGFLWAMAKQVPVPPKAYRGRCVDRSWRGFQRLSEEGQPRCGVTLGGVRRPTGPLVPRMRQAPDGGQEGGTQPTDSSVINRRVLLAPALPIEK

SEQ ID NO: 49643 - protein, 335 aa, unidentified
MIKENYIYVGIDLHKETHTAVMIDCYNQKLGEITFPNRPAAFPKLVTKVKKCNTDGKEVVYGLENAYGYGRALAVWLIDKGYLVKDVNTAISHRQAKHRGAMYRKSDSDDAKAIALATLNMLDKLPDACPNDAYWSLGQLVHRRDNIMKQRTRLVNQLHEQLCIAYPSYKQFFNDISRPTALYFWEHYPSRKYLKGKSVEDLRAELVPVSHNKCSTKTCEKILDAVASDKVKNNAYQDARDMVTLSIVSDLQHYDSQLTEVDKMLEQMYKMLGCTLTTIPGVNVITAVKILAEIGDIKRFSNANKLAQFAGIAPLHLSSSGKGKDVATKQGNRRL

SEQ ID NO: 49644 - protein, 387 aa, unidentified
MCITNHSLQNKTASRTDPDAIFVSLELSRSRWLVTSLPPGSEKMSKHSVTGGDGGALLDLLARLRAKTEERTGASARLVVIQEAGLDGFWIHRLLTANAIESHVVEPTSIAVPRRHRRAKTDIIDGETLLRTLRAFKRGEPRVCSMVVPPSPAEEDRRRISRERKTLIKERIEHVNRIKGLLASQGIFGCEPMHKDFRNRFEGLRTGDGRPLGLWLKAEILRELDRIDLVLRQIATVEAERDALVQPDGIHAKAPAAVLMKLKGIGPEFAAVLWLEGLFRRFANRRQLAAYAGLAPSPWQSGSVDREQGIAKSGNPRLRTTMVELAWLWLRYQPDSALSCWFRERVRLERGRIRRITIVALARKLLVALWRYTTLGEVPKGAALKTV

SEQ ID NO: 49645 - protein, 351 aa, unidentified
MPRATSSTNVIATIGIDIGKNTFHVIGLDDKGAIILRHKLSRGQVYARLANIPPCLIGMEACVGSHHLGRQLSALGHDTRLMPARYVRPYSKGQKNDFRDAEAIAEAVQRPTMKFVAIKTVEQLDLQGLHRIRERLVCQRTSVINQIRAFLLERGIAIRQGLRTLRTEMPIVLAKTDKLSQRMIHMIEDLCTDWRHLDRRIATVSKEIETLSEQDDGAKRLMTVPGIGPIISTATVAAIGTGEVFSKGRDFGAWLGLVPKQMSTGGRTILGPISKRGNRYLRMLFVQAARAVLLRPQSWEKHGLKLWIEAAARRLNRFKLAIALANKIARIAWGVLHGGRNFEVRPMNQAA

SEQ ID NO: 49646 - protein, 380 aa, unidentified
MTRISVGVDVSKNRSTVCIMDQDGKFIMRPFLVWHSTEELDFLADTLKRLNGEVRVIMESTSVYQYPIALHLKEKGIFISIVNAYKVKKFANTDFRGGKTDKKDSRTIASYGISYWDKLVEWQIPKDTYFNLDLLNRTYMNAKKHRQIILQELQHYIDCAMPGMDKELHSLNLSTKKDFMLDFVEKFWHRDEIVNMTEAEFTEVFTAWAKKKGYRPVEGKAAKIYAIAKSCIPYYPANPTVKTILQCIVDKLSGVNRTLVTIVTQMIEEAKKLPEYQIVREMPGVGDPLAARFFGSAGDIRRFKNSKALVAYAGIDSPPDESGDFSSTHRHITKKGSKVFRDTGYEIMMALRAQKRTWEKVRKNPEVYDYMLRKEAEEKP

SEQ ID NO: 49647 - protein, 351 aa, unidentified
MNILAMDLSKSNTVFCLYNKDSAKSRYGKVKTTPQQIHDLIVKYSPDRIVFEVCSAAGWVFDTADGLCSEVQVANPNTQAWRWKNVKNKNDKKDALKLAQLSAMNQLPTVHMPKPQVRQKRALIQYRQSLVSRVVGIKNSIRSILDKQGYSITAGKSGWSKRQVEILERLSLPFERCDIDNLWRGQLYVELEMLCSAQKALADVTGKLDELAKSDKNIVLLQTAAGVGPRLAEAIAAFIDEPARFTSGKQVGSYVGLTPRQYQSGSMNRQGKISGQGNKLLRALLVEVSWLGLRHNAWISRTYHRLLRGSPSRKKISITAVARKLLVRCWAMLRDGQPWRDIEAETEKQAA

SEQ ID NO: 49648 - protein, 354 aa, unidentified
MSSVKYIGLDVHLATIVVAVVDDSGKLIVESVLETRAATILDFIGGLRGKLMVALEEGISADWLYSLLKPHVAYIIVCDARKSSRMKAGSKSDKIDARQLAELLRAGQLSSVYHGDVGVRTLRELARSYMSLTQDLTRVMNRIKSIYHSQAIRCPGQHVYSPLYRTEWLEQLKQPGQRHRAELLHAQFDLIRPLRQQARQALLTESQRFPVRARLQEIPFLGPIRAALLIATIQSPHRFRTKRLLWAYSGLAVETHSSADYTFDEGRPKRSKKVSIRGLNDNHNRELKYLFKSMAMSASIRPGPLRDFYERLLAKGIKPSLARLTLARKIAAIVLVIWKKGGSFDPEKLTMQAA

SEQ ID NO: 49649 - protein, 450 aa, unidentified
MDTKAKLVYEEKRRFVAGIDIASRANHFVCGPRNDVGEREIVSFGTTTPELYKMLHWLQERKVESVVIESTGVYWRAPLELLEKNGIEVVLVDPRKVKMIPKKKSDVKDCDWLQYLHSCDMLEGAFRPQEAIVAVRSILREQNNLIKMRAQVILQMQKSLDQMNICIHKAVSDIDGVTGKAIIKAIINGERNPHILASLRDKRCKKSIKEIAEHLTGTWREEHLFILEEAFNTMCFLDDRIANYDKKVEKLFATLAENNDNDDTPLPPSLSEPKKTARERQNLDSKIDLFKIMGFDLTSVPGIGYDLAKIIVSELGPCFYRFKNEKAFVSYIGLAPNVGKSAGRNVRQKKYVNTSRVGHYLRIAATSVGRTATALGEYFRSIQRRKDYKTAVKTLARKLAHLIFRGVRFGKEFVDSGIEAYENMQREKSVKWTKKLIMKYNINSLELGLG

SEQ ID NO: 49650 - protein, 369 aa, unidentified
MGEYSEAFVAFDVAKIKHAVAVAEGGRTGEVRFLGEIENREGPIERTVKKLAGRYDRLHFCFEAGPTGYGLYRQLRALGHDCMVVAPALIPKRPGERVKTNRRDAVTLARLHRAGELTGVWVPDAVHEAVRDLVRARQAAADDLRRKRQQLLSFLLRHGRIYSGSGHWTLAHRRWLANQAFEHAAQQIVFQDGIDAIEDAIARLRRLEEQLVTIVPGWSMAPVVEAYQAMRGASFLVAVTFAAEIGDVRRFDNPRQLMSFLGLVPAESSTGDTVRRKGLTLAGNRRARRALVEAAWTYRYPARVSETLRARLEGLPKAVRDIAWKAQVRLCARYRRLSATGKKLPVVVAAIAREMAAFLWAIGREVAPG

SEQ ID NO: 49651 - protein, 364 aa, unidentified
MSTLHYVGMDVHKETIDVSMYKENDSRPYCEKRIPNRDTSIKKLFKGIMKTGSVVACYEAGCMGFTLQRTLEGMGVTAVITAPGKMPRRSSDRVKTDRRDARTLATYLRNGDIEAIRVPTEDEEVVRDYLRGREDVRLDQARTKQRLQKFLLRHGYVYESVRYWTGPHEKWLRSLEFKNPLMKETFDEYHVGIQELGGKLRMMDKRIDEIALSEPYAAKVKKLRCFKGIDFLTALTLVSEVGDFRRFKSAESFMAFLGLVPSEYSSGGKRRQGGITKAGNTHVRRFLIESSWHYRYSLSPSKRLMERRYGQPTDVIAYADRAMKRLQHKFFKLVLRGKTSQVAVTAVARELAGFVWGMMVGCTA

SEQ ID NO: 49652 - protein, 360 aa, unidentified
MDVSKDRPRTTAGLDLGDRYSYLCLIDSQSGDVIEEGRLRTSPEAFGRRFASERPMHIAIEAGTHSPWVSRLLEECGHEVLVANARKLRLIYANKRKTDEVDAENLARLARLDPKLLYPLRHRGEDSQAHMAILRSRQALVGCRTHLVNHVRGAVKSFGGRLPKCPARSFHNRAPEYIPEALRPALGPVLETICSLTELIRDYDRKLETLSKERYPETELLRQVEGVGPLTALSFVLTLEDPYRFERSRSVGAYLGLVPARDQSGGKDPREKRISKEGDEMLRRLLVGSAHYILGPFGSDSDLRRHGEKIASRGGKNAKKRAAVAVARKLSVLLHHLWVTGEVYDPLHNTHRRQEREEAA

SEQ ID NO: 49653 - protein, 397 aa, unidentified
MYIVGIDIAKRKHEAAVIDGEGTVIIKPFSFTNNCSGYNRLLAMLTKAKLPLDEVSFAMEATGHYWLALFTRLQKEGFRVQVINPVQTNSIRSFYIRQAKTDPRDALLIAEVIRFGHFSESTLHPENIYELRELCRGRHAIVSMQADVKRKVVALLDQVFPEYETAFTNLFGDTSMAILQTCPTPKELSEMPLEELCHLIEVSSHKRFRMVKAQELQELARNSFGFAMAGDVFSMMIRLYAKHLDFLKQQVREMDRKIAEIMDTLDTPITTITGIGPTLGAYILSEIGDINRFSSAAKLAAYAGIDPTMRQSGEYNGVRNRMSKRGSPYLRHAIWLAASSAVLHDPALKLYFQKKRDEGKPYMASVGHACRKMVSIIYAVMRDNKAYVPCIPSEISA

SEQ ID NO: 49654 - protein, 343 aa, unidentified
MKLTRIGVDIAKQVFQLHGTDRFERTVWCRRLPRDRWLQALREVAEPGCEIGMEACGGAHHWARQLQALGYRVKLIAPQFVKPYVKSNKNDAKDAEAICEAMSRPGMRFVAVKSVAQQDLQAIHRVRASLVEQRTAKGNQIRGLVAEYGLVAPKEMGSLRHAMPAWLEDGGNGLSFCFRQVLEGLWRDLRALDERIGEVDREITRMARDDPEAQRLQQLRGVGPMVATALIAAVGDARQFANGRQLAASLGLTPRQHSSGGKERLLGISKRGDAYVRTLLVHGARSALRTAPAKDDRLSQWVLRLAQRAHPNVACVALANKTARLAWALLRHQCDYQPALAAA

SEQ ID NO: 49655 - protein, 344 aa, unidentified
MTIVETRAITGGVDTHLDAHVAAALDPIGGVLGVESFLATAAGYAELFEWMRGFGPVRRVGVEGTGAYGAGLARFLLRAGVEVIEVDRPNRQARRAQGKSDPADAVEAARAALSGRARGLAKRADGNAEAMRALLVAKRSARETRIKALNQIRHLSFTAPDELREQFRRTPRRSLAPHAAALRPRPGDAVLHATKVALQTLGRRVLALEDDDARLDALLVELVAATAPSLVEIYGVGIDTAAILLVTAGDNPERIRSEAAWAHLCGVAPVPASSGKITRYRLNRGGNRQANHALWRIVLTRMAGDPRTRGYVARRLDEGRSKPEITRILKRYVAREVYRHLPRG

SEQ ID NO: 49656 - protein, 341 aa, unidentified
MATIALFGLDIGKHSFHLVGQDANGKPVFKRQFTRSSLIHYLAQHPACRIVMEACCGAHWLARQLAGFGHQVQLIAPQYVRPFVTGNKNDFLDAHAICEAASRPSMRYVGVKTPEQQASSALHRLREARIADRVQTANQIHALLLEFGIVLPLGARGIKQVPDIVMNASADLPHAARRVLSAQYEHYRYLAELIAGLDSQIGAQAKADALTSRLMTIPGIGPITASQLAADAGNAQSYGSARHFAASLGLVPRQHSTGGKSKLLGISKRGDKSLRRLLVQCARVVMQNAAKWQSAVAQWTQQLMTRRHSNVVACALANKLARIVWAVLVKGKEYRPNPNAA

SEQ ID NO: 49657 - protein, 424 aa, unidentified
MGKFTKTLCISERKEYSIMEGPIITVDVSKGSCHYRPFIENGHPMRKPKSLSATIDGFQKLGQTIKDLEAKTEREDIPVIFEATGVYHRPLQKYLEDHKIRYYIISPLLSATYRKTDLHSNKTDALDCAHIAKAYYCEKELRQYQAQPQEYKRLYQLSRIYESELVHLRKRKVSLRSMLDIIYPRIDRTFKGNQNLYDPIPMEILKRYPHPSLLLSHREDTIVKTVGHRTGHLKGYTERIVHKIYEKAKECYSGCDIDDIEVVKLPTLIENMQEQKKKCNSLLKEMIEIARTCPYFASVVSIVGIGENLAARIIAELGDVNRFDNRAAIVAYADLNPKIQQSGDIDGLHLKISKKGNKHLRCLLYLGAQCNYRLRKEDPLYEFTKKKRQQTQCPLSSKAAYTASAHKLLVIIYSLCKNGTLYHS

SEQ ID NO: 49658 - protein, 402 aa, unidentified
MLPKRACIALDVSKGNSHMQAFYSAGFKATDVMIIQHDKNGFNTLNELIKKIEAETNDTVAIVFESTGSYSKPLEHFLWSIHKKYYLVPPLLSAKVRKSDIRPTKTDAIDCETIANVYYLKNLKEADRLNKISLRLKNYSSYYLFYINREVETKIKYRQYLDIVYPKIDEYFDVMALSFIEFIKNNPDPNKLIKRSHEDIYKRFLKFSYCGEIKSKARATSIKRYLSEAMITIDSDNPEITILADVAKVLLEDLNHLENMLNEIIVLAMKTEEYKYIVTIPGLSKNTAARISAEIAGIDRFSSASKFVAYIGIDPTVCQSGKLTGEHLNITHKGNQRLRCLLYLVCVGSLKNRRDYNPIRDFIIKKKNDGLAPKAAIVAGCNKLARIIYAVCSKREVFSIQQ

SEQ ID NO: 49659 - protein, 385 aa, unidentified
MLKIVYPICCGMDVHKSFLVACIASTNECGVTTYKSRRFSTFTKDLRLCADWLSANNYKDVCMESTGKYWVPIYNILEASCKIVLAHPKYVKAIRGKKTDKKDAKWIADIFKHDLVSGSFIPPADIRQLRDLVRYRWKLNNFIVGEKNRAQNCLTVSNYKLDDVFSDVFGKAATQITSYLLEHLNEPLSDVSNFRTKGMKATDAEIRDAADGNICAEQAEKYTSQLSLVMSVPGIQTFSAISVIAEIGVDMSVFPSSKHLCSWAGLTPQNNESAGKKKTTRISRAGAYIKPLLVQCALCAIRAKRNPEIRNRYLSIKKRRGHKKAIIAIARMLLTAIYNILKKNEPYNAELSHKVDVPPAHRSVTIEEAVFILQRQGYLITPCTS

SEQ ID NO: 49660 - protein, 355 aa, unidentified
MTSTKYIGMDVHKESISIAVRNSAGKVVMECVIETKASMILQFIDGLRGDLQVTFEEGTSAAWLYDLLKPHVTKLVVCDPRKNKSMREGNQNDKIDARRLAELLRLDHLTPVYHGEHGLRTLKELVRSYLTITKDLARVKSRVKAIYRSWAIPCTGKQVYARCHRAEWLGKISEPGVRRRAECSYQQLDALRVLRQEARRDLLAESKKHKAWKRLCAIPSIGPIRAAVLLGILQTPHRFRTKRPLWNYGGLAIEMHSSADHRSVHGQLERSTKNVLVRGLNRNCNHDLKNLFKGAAAVASSKPGPFQEFYTALLAKGMRPEMARLTLARKIATIVLIVWKRGVNFDAQHLKPQTA

SEQ ID NO: 49661 - protein, 391 aa, unidentified
MDPEGKTLGSQTFSNTLSGAEAIESWLLKIMKENEFSDLKIATESTSFLDLHLVDFLAQSTKLAPFHPSIYQLNPKLVRNFKRVYPDKEKTDKVDAFVIADRLRFGRLPEPYENHKPYLPLRRLTRYRYHIVQSISKEKAYFLTHLYLKFSGFSVEKPFTSLFGATSLTLITEFSPDELVNLPIEELTQLIIKTGKNRFEDPEGVVEAVRRAARESYRLRPALAPSIDLILGSILQTIRALQDSLKKVEQAIEKEFQAFPNTLQSIKGIGPVYSAGIFSEIGDIRRFPKEDALAKFSGLYWKRYQSGNFEAEETKMSKGGNEYLRYYLIEAANALRVHNAEYRAYYETKFKEVTKHQHKRALVLTARKLVRLVYALLKKGQLYKANYQQEA

SEQ ID NO: 49662 - protein, 445 aa, unidentified
MASQQLQVFSLWELQLRNVGFETRAVPPKKSPMPSPNESISGPTCRAAQFFSSVLYLPDMTVRRENRGRGGTSILVRARSSSVSRRPPRSRLLPELEQLPEAGIQRSRPRIQDRARARALIGGRAMSGFIGIDVAQADFVVAREGVAGSRSYPNSDRGHRDLIRDLSRDGVKLERIVLESTGGYERRLVAALGGAGLPVVVVNPRQVRDFAKSTGQLAKTDQIDAHVLADFAARIRPEIRALPSEEQEELKDFLARHDQLVQMLVAEKSRLLQAEGQKRHVLRKKIKNHIKFLERELTMLDSDLDDTLKKSEVWREKDDLLQSAPGIGKGVSRTLLAFVPELGTVSAGEIAKLAGLAPLNRDSGKFRGSRHIGGGRPRVRATLYMATLAAVRWNPVVKVWYQRLLAAGKPKRVALVACMRKLLVVLNQMLKTKTRWQAHVMPVTA

SEQ ID NO: 49663 - protein, 400 aa, unidentified
MLSIGIDVSKGKSTVCGMKPGGEIVYTPFEVQHTREGMSELVSLLRGSGEEDRVVLESTGSYHCPVVAALLENGIFVSVVNSLRMKRFCSQSIRRVKTDQIDAMQIALYGLAYWQELQPTRLPENTYRELQLLARQYYQMTSLLIKAKVDFNALCDQVLPGMQELMSDHAGRHKLSDFVLRYHHTAHILKMGETRFRKDYCKWAEKKGYRNHERMAALIFATAQNGIPVLPDAPSTQIVITEAIRVLHTVEASRDAILTQMQALAKTLPEYSLVREMPCIGDTLAPRLIAEIGDVRRFHSKRALIAYAGIDAPPYQSGKFRANNRHISKRGNRYLRKTGYEVMQSYVMHKPANDPIFTFIEKKRSEGKSGKLAMVAGLNKFLRVYYGKVTELYRSLPTIE

SEQ ID NO: 49664 - protein, 363 aa, unidentified
MEHIAIDLGAKESQICVRSADGEILEERRIATRPEKLRRYLVGRPKSRVIVETGAEAFWVAEIARECGHDVRVVASMLAPSLGVGRRGLKSDLRDARVLSETSCRVDLPSVHIPRVETRRLQSRLAMREALVRNRTQLLNVVRGYLRTIGERAPKRTAEGLIVELREKLAYAAEQLQPVLESIEVLNRSVKTFDEELKRLASKDELAKRLQTAPGVGVVTSLRYMATLDVANRFANGAAVGSYLGLVPSDHSSGQSQRRGSITKAGSPAMRAVLVQASWAALLSRRHRNDPMMIWAREVARRRGKKIAVVALARKLSGILFAMWRDGTDYDATRAAKVIPAAPRRLVLNEDSRRSRHPESVPA

SEQ ID NO: 49665 - protein, 350 aa, unidentified
MNIYYGCDAHKRYSMFASMNERGQTGRPVRVEHTRAMYREFLRGLPPGSPIAIESVGNWYWMIEEMEKAGHEPRLANAGKAKLMMGQINKTDKLDATGLATLLRNGTLPSVWIPPSDLRDERELPRMRMSLVSVRTMLKNRIHATLAKYMIEIDEVSDVFGVKGRELLKKRLEELPPYTRQSVETQLELLDEVKAHLDQAEKEIREVVKTTPAMTLLMTIPGVGPILAVVIALEIGDISRFPSPEHLASYAGTVPRIRSSGGKTSFGKVRSDVNRYLKWALIEAANVIMMNQRPWSGSHLVQLYLRLRERKGHAKAVVAVARHLAGAVFWVLKKNEAYKEPQRSISSSQE

SEQ ID NO: 49666 - protein, 546 aa, unidentified
MLRQAQHDSSFENSLIPKLSSRGNNRQAGWLVGKNILQWWCARQRDSHMHGALCPIPRFVVVAELGLFGEASSALAGEVFPFRSISIHLPPQPRASKRKVVSMIDQIAKGYAAIDVGSREHYVAVAGAEVSCFGSCTSDVQELCEHLKCHGVRHVAMEATGVYWIALHDMIRSTGIKVTVFNGAHARNLPGRKSDVSDCQWHAMLHSHGLLRPCFIPSADIVRLRTLYRLREDHLSMAAAHIGHIQKALDMMNVRLHTVISQIHGVSGLRIIRAILAGERNAERLADLCDGRINHNKRAAVIKSLEGRWEPHHLFALRQALDCYEFYQVKMGECDAQIDQLLAEMNQHKDEAPKPEGVRKKVRHNAPQIDDLDGKLLRLADGRDVASLPGISPLSFLKLIGETGLDLTNWKTEKHFTSWAGLSPGKRQSGKRYRRVPPKKTVVGQIFREAAMSVTRSKHLALGVYYRRIKSRRGPAVAIKALARKIAELYYRMMTKGFAYVEAGVERYQQQFDEQRRRYVEKLARSMGLTVSDPTTEQDAKCQLVL

SEQ ID NO: 49667 - protein, 390 aa, unidentified
MIYVGIDVASQKHDYYIISDQGEIYTSRSITIPNNNEGYKKLHKSIQEFCGATKDYKVRIGLESTGFYHKNLVSYLLANKYEVMVINPLLTNMYKKSRKIHIQKNDNIDSIYICKYLMDTETVFKPYTTISYHTDALKALSRERFSLVDELRLAKISIYKLLTQLFPEYLKLFTNVYQGTALDILEKYNSPSKLSKAHYKTISSMIHGKCSVTANKLIEAAKSSIGIKDDYLAFQLSQGIKRLKSIQSTIDEYNEQISKYVDMINPNILTISGIGYITAGLILGEIGDINNFKNSEHLISYAGLDVKIYESGKYKATNLSISKKGSVYLRYAIYQVAKVCWIHDPMFYKYYLKKQAENKHYYVILGHIEKKLVKVIYSILKNNKPYSPQI

SEQ ID NO: 49668 - protein, 310 aa, unidentified
MERIFVGLDGSKDRLDVHVRPTDEQFAVTYDEPGVVTLVHRLAAVQPTLIVLEATGGYESAVAAALAHAGLPLAVVNPRQVRQFALATGQLAKTDRLDARANARFAELVQPAARPLATEQAQVLGELVARRRQLGDMLGAEQNRHRQARARGLQQRIRAHGTWLTRALAEVDEEIARLIRASAVWRETEDLLTSAPGIGDITAHALIADLPELGQLDRRRIAALVGLAPWNRDSGRGRGRRMIGGGRAVVRRALYMPTLVAIHHNPVIREVYRRLTAAGRPKKVALIAAMRKLLTILNAMLRDRRPWQPA

SEQ ID NO: 49669 - protein, 359 aa, unidentified
MDAQEGAVRRIIGGVDTHKDLHVAAVVDEQDRVLGTQSFASTRQGYRQMLVWMRSFGDVQRVGVESTGSYGAGLLRFLQQAGVEVLEVTTPDQQDRRRRGKNDEFDAQNAAHAAFAGIRTVTPKSRDGMIEALRVLSACRKTAVAARRVALQMIQNTIVCAPESLRDVLRRMTRMQLVRTLAAWRPDLTAYRDVEAAYRISLKSLARRYLELHDQIADLDAMIAAIVDELAPTLVARNSIGHVGAAQLLLTAGDNPQRLRSEAGFAALCGVSPVPASSGKTARHRLNRGGDRAANSALHIIAIGRLRTEARTQAYVAKRIGEGHSKLEAIRCLKRYIAREVFMLIKQRQEEINRTRIAA

SEQ ID NO: 49670 - protein, 390 aa, unidentified
MAALVAAFSGMGRDDQRATAAKLMSGSSLIWLMVPSVMYLARWTAHLMAWTAPVPSAKMADVFQPRRNVFMPVVTVGLDLAKTVFQAHGVDDVGQTVLRRRLGRSELLAYFAKLPPCLIAMEACSSAHHWARELVTMGHDVRLIPPQYVKPYVKRNKTDAADAEAICEAATRPNMRFVPIKTRDQQAVLALHRSRSLLVRQRTASINAVRGLVGEFGLIAAKGRYRMSELRQRMNAMTPDHLPAIACQAINTLFDHINTLEGQIAAVEQQIVEWHKNNEDSRRLATAPGVGPITASAIVAAVGDGRQFQSARHFAAWLGLTPRMHASGKKERIGRISKGGDRHLRALLIHGARAIVGTLFRKNVPPRPWLLPLKPLRLLLFASVDIGDDI

SEQ ID NO: 49671 - protein, 320 aa, unidentified
MSGMLVVVGIDVAKAHVDVAVLGRAWPAQRFANDIDGHSALAAAMQPLAVSLVVMEATGGYEAPVACALQATGLPVAVVNPKQARDFAKGIGRLAKTDRIDAEVLAELAAVLVRRDDLARFLRPLPDAQQQELAALVTRRRQLLTMLGSERLRLPLAVPKVRPSIEAMITAIRNQLDDVEGQMQTQVHEHYAELDALLRSTKGIGPIASATLIAALPELGRLNRREISALVGVAPMANDSGTVRGTRRIHGGRFDVRNVLYMATLSARTCNPAIRAHYERLRAAGKLPKVALVACMRKLLTILNAMVRTRTPWTNNLHSA

SEQ ID NO: 49672 - protein, 391 aa, unidentified
MEARVSNNLAPAAAHDGAVRCLFAIELSKKSWVVAVNTPLSDKISIYKLKPCDWKELLQLINRIRKRVSEELKKPVEVISCYEAGYDGFWLHRLLEAQGVRNHVIDPASLQVDRRARRAKTDGIDVGKLLRSLMAYLRGEPKVWSVVRVPTVIEEDDRRLHRERSRLINERIQHVNRIKGLLAIHGIYDYEPMHPERMRRLERLRTADHHSLPVRLKAEILRELQRLELVLKMIQTIETERDAIVSAKSKPQQTTSAKKIKDLVKLKSIGPEFATVLVGEVFYRIFNNRKQIGSYVGLTPSPFQSGSTSRDQGISKAGNTKARTTMIELAWMWLRYQPDSRLSVWFRERVGNRKGRIKRIAIVAMARKLIIALWRYLETGVVPEGAVLKSK

SEQ ID NO: 49673 - protein, 467 aa, unidentified
MARKVKNVKGKGHKDYPQSLKTIQPHSAGIDLGSREHWVAGPPSKDGKPNVERFGTTTPELLRLADWLKEQGVETVAMESTGVYWIPLFEILDNRQFEVVLANARQISHVPGRKTDMLDCQWLQLLHACGLLRGSFRPSDDICQLRSLIRERNTMVQQRSDWVRRMQKNLDQMNVCVHHAVSDITGVTGMSIIRAIANGERDPHVLARLRDSRCRKSEEQITNELTGNWRPEHLFNLCQALKMYDQFCTVIADYDSEILSYLEVIQPTDNNDKFAPPPASKSKAMNLTKRGQEPLRQALYRLCGFDLTTIDGIGVDTASVLVSELGLDFTVFPNERHFVSYLKLAPNLSISAGKKVPKKFKASTCTRVATALRMSALTLRNSKTALGAFYRRISRYKGASVAVFATARKLAQYVYRLVCYGQSYVDSGAQAYEARFNLRRVNLYTKILNDLGYKVQTLTKDEAIDTC

SEQ ID NO: 49674 - protein, 412 aa, unidentified
MQDILTCAMGLDVHRDIIVACLVKGAVDAEPEAETRTFSTLIPEMQKLRDWVIESECRNIAMESTGIYWQPIYEMLESCFDGEISILVVNARHMKNVPGRKTDMKDAQWIATLLRAGLLKGSFIPDKAFRELRHLTRYRKSVVHDITAQKNRIDKFLQSSGFRFTAFLSDTFGASGRNIIRHLIEHGSIDREALDKCLKTKTRNRIDEILVALNGSLSEHQCRFLNMVFRHLEDLEAHKHTVEDEITEEVLKHTDTLNLLCSIPGIDVTAAAAIIAEIGTDMSSFPDSQHICSWAGLSPGNNESAGKRKSVHINKGNPYLKSMLCEVAWIMASHRKLYLSGWYWKVKQRKGAKRATIALARKILSIIYTMLKTGTPYNEECFEQRRLRCERKRANRLVNELQKLGYVAVAPD

SEQ ID NO: 49675 - protein, 341 aa, unidentified
MSVIIGIDPHKRLHAVCAIDERETELARLEVRTNASQVSDLLAWAAPFECRSWAIESAGGLGYLLAQQLVARGEHVVDVPATLSSRVRLLGSGKSTKNDANDARAVAVAALRAPQLAQVRVEDHVTILRLLAKAQLDTSRAKSRACCRLHAVVAELVPGGIRKEIVVKQAEQVLAGITATSAVQRQRLDLAYDLLSEIIMLEDRAKRARTRMINEVLASGSSLPGIFGVGPITAATLIGYTGDINRFPTAGHYAAYNGTAPVEFSSSGRTVNRLSRRGNRTLNHALHMIAVTQIRHRHSEGRAYYDRKIAEGKKPREARRALKRQISDRVYRLLRSDVGSK

SEQ ID NO: 49676 - protein, 341 aa, unidentified
MYSFYLGLDLHKNNTYAVLIDQSGDVIDQRLFSNQETQSYLDDVVPRETYAVLEATRNWPFMYDLLRDHVDRVELAHPKDLKAISSAAVKTDQIDAKVLAQLARLNYLPTAYAAPPETRDLRLYVRHREILVQKRTQSKNRVHAVLARYNLKSPVGDIFGVTGREWLQEIFEEEVLSAAAKRVIEDHLDDHIEALEKDITLSSEQKQAVKLLKTIPGVGKIVATTIVAEIGDIQRFHSPKALCNWAGLTPRIRSSGGFTRYGHISKEGSPFLRGAMTRAATVASKISKRWYLVHETMVKRCGKKGAKVVVARRLLTVVYYMLKRNEANLENYKPAGENRGT

SEQ ID NO: 49677 - protein, 345 aa, unidentified
MKKIVKQVVGIDVAQKELVVSVSRMDEQITVEIFAHKSFPNNPKGFTALMAWVEKLTDAEVYLSYVMEATGVYHERLAYFLEEKGKAVSIVLPSKISNYVRTLDVKTVTDKTASEAIARFGAERKLDNWKRPKAIFKKLRQLTRERDQVLADRTVAKNQLHAELAEAEPGKSSVDRIKKKIAFFDKQEKEIMTELKVILSVDDEIKRLVALICTLPGVGLLTAIIVLAETNGFELIRNKRQLVSYAGLDVKEKQSGTSVRGKPRISKKGNRFLRKAMHFPALCAIRHDEKYKAIFARLISKHGIKMKAAVCVQRKMLEMIYTIFKKQEAYDRMYYQKLAEVQVGA

SEQ ID NO: 49678 - protein, 343 aa, unidentified
MNEVITIGVDLAKNVFQVHGVDAEGCVVLRRQLRRGQVLPFFKKQPTCLVGMEACATSHHWAREIEALGHRVRLMPPRYVKPYVKRNKNDMADAEAICEAVTRPTMRFVEIKTPEQQSVLMLHRTRHLFVRQRTTLVNALRAHLAEFGIVAGIGRNGLERLLKVIEDDGDDRVPTAARDCLLALRAQLEMVKHQILDADRRVLAWHRSSEVSLRLDDIPGVGPLIATALVASVPDPRAFKSGRDLAAWIGLVPRQNSTGGKERLGHISKAGNRYLRMLLVVGALSVIRRAKQVGYTRRPWLSKLLERRSTKIAAIALANKIARTAWAMMAHGTYYEEPARQAA

SEQ ID NO: 49679 - protein, 367 aa, unidentified
MNKTIVHHESADSLELADHQPKSNRFTIKLGLDIHTRLFVVVAQYGHAALKPPRRFCPPEFLPWVQSLVAAGHDVHVVYEACGFGFGLYRQLLTSGAYCYVIAPRKLDEQRTGVKTDPRDAATLCQRLSRYLDGNITELAVIRVPTEQEERDRQATRQREQLVRHRQKMEAQGRSLLVCQGFPAPAHWWKEQTWTRLRKLLPDWIIASLEIFRPALLSLQSQISKLTLQIESGASLKIPRGLGKLTTAITTREVCDWSRFANRRQVSSYTGLCPGEYSSGSKRVPGSVTKHGNPRLRATLVELAWRMVRFQPNYPPLKKRLIILAKGSRATGAQRKKAIVAVARQLAVDLWRLHTGRCTADQLALTF

SEQ ID NO: 49680 - protein, 341 aa, unidentified
MQVATIGLDLAKHVFQIHGIDAAEKVVVRKQLRRSQVMGFFEALPPCLIGMEACATAHYWARELTKLGHEVRLMPAKDVKAYVKRNKNDAADAEAICEAVRRPTMRFVRVKSAEQQGQLMQHRTRDLLMRQRTQVINALRAHMAELGIVAAQGREGTKALLAIIADDGDERLPVDARASLIVLAAQLQALQTLIGSIEKRIIALHRASEASKRLATTPGIGILGASAITTIVTDPKAFRSGRDFAAWVGLVPRQDSTGGKQKLGPISKQGDRYLRRILVVGAHAVLRRARQHPEKYPWLTQLLARRPFKVVAVALANKMARIAWALLAKGGSYRVPRLAAA

SEQ ID NO: 49681 - protein, 348 aa, unidentified
MRFYTNQHKFYCGIDLHARTMYLCILSQEGKIVLHRDIKTNPDIFLKTIAQYREDIVVAVECIFTWYWIADLCSEEGIPFVLGHALYMKAIHGGKAKNDKVDAYKIATLLKGGMMPMAYVYPSDMRSTRDLLRRRTHLARKRAELIAHIQNTNHQYNLTDMGRISRKCDRNKAGVADRFTDPSVQKSIELDVALIDHYDKLLNRLEHELSLIAKVHDADSYFRLRSIPGIGRILGLTILYEIHDISRFPRVQDFVSYCRLVKCAKESAGKIIGSSGKKIGNVHLKWAFSEAVVLFLRRNPEAMKFRAKLERKHGKAKSLTILAHKLARAVYNILKKKEVFQPEVFFAK

SEQ ID NO: 49682 - protein, 414 aa, unidentified
MDTIYARVAGLDVHQKFTTVGVRCRLETGKLFAEVRTFGTMTRDLLALADYLEALGVTHVAMESTGILWKPVWNILEGRFTLLLVNPRRVKQVPGRKLDVSDAEWIAHLLQCGLLQGSFVPKRELRELRDLTRCRAQLVSEQTRVANRVHKVLEDANIKLGAVASDILGKSGRAMLWALNRGERDPDKLADLALGRLRAKIPELKLALEGHFREHHQFLVEHLLGHLDDLERRIEEISQRIAEHLPSILDDERLRRLDAIAGVNRTTIENVVAKIGVDMSQFPDEHHLSSWAGICPGNEESAGKRLRNRTTRKNRWLRRAITEAAWAAGRTKNSYLGALYRRLAPQRGKNRALIAIGHSLLVIFYHMLKYDVEYQDLGVDYFDKREPERLRNYLVKRLQLLGYQVCLTPQTDAA

SEQ ID NO: 49683 - protein, 351 aa, unidentified
MDATTVGVDLAKNIFVACVADCAGRIVERREFNRTGFLTWLGTLPAGTVIGMEACGSAHHWGRTAQRLGLAPRLMAAEFVRPYRKRQSVKNDRADAEAILIALRSPGMRFVPVKTEAQQQRLAWHSLRVGWVEERTALLNRVRGLLAEFGLIVDPGPKHLRTLLAEREFDTALSPALRGVIQSVRDQLEALDTRIGECDRQITAQQADDPLAKRARDLPGVGLITADAVTASVGDASMFKNGRQFAAWLGLTPSQSGSGGKTKLGRITRRGDDYLRTLLVQGARSVLAATLRKQRRESPDQLTRLQQWIVALNGRIGYHKTLIAIANKHARQLWAVLAKGEAYNAQAWQRA

SEQ ID NO: 49684 - protein, 358 aa, unidentified
MQVQRKELNFKGQNIYVGIDVHKKDWKVSIQSESLTYRTFTQPPRVSALVEHLRRNFPEATYYSAYESGFSGFWAHRELISEGVHNIVVHAADVPTTDKERAFKTDKRDCRKIARSLCGGDLDGIHIPSIKTQEDRSLVRLRLTFRKDLTRQKNRVKSMLNFYGKDIPERFLSSSHWSKAFIEWLKEVRFETDSAEQALKLLINQVEHLRTCLLEITKKVRKLAANQDYASDMKLMVGIPGISLITGIAFLTQLETIDRFPNTDSLAGYLGLVPNCHSTGDKENTGEMTFRGNKWLRELLVEAAWMAARSDPALHLAYLNLCKRMKPNEAIIRIARKVLNRIYYVLKNQHEYQKGIVQ

SEQ ID NO: 49685 - protein, 461 aa, unidentified
MAKRKQKSQIQVKQLDVLQQLNLNAAGLDIGASEIYACVPADRDEQPMRVFETFTVDLYALADWLAACDIETVAMESTGIYWIPVYEILEARGFNVHLVNARHLKNVPGKKTDVLDCQWIQQLHTYGLLLASFRPPDDICALRALVRHRDNLIRFRSAHIQHMQKALQLMNVQLTQVISDITGVTGMHIIRSIVAGERDPHLLARLRNSRCAKSEAEIAKALQGNYKLEHVFVLKQALAQYDFYQQQIQECDAELEALYASLASREQDNQEAPPPKPKRGKPRKNQPHFDLATSLYHMVGVDLTAVDGIDALTAQTIISEIRLAMSKWPSAKHFASWLGLAPHNDKSGGKILRSRTKKTQNRANTAFRIAAQSLSRSQCAVGAFYRRMRAKHGAAKANVATAHKLARIIYHMLKYRKAYVDPGEAYYEHQYRERTIHTLERRAAKLGLQLVPTAEEAPVVS

SEQ ID NO: 49686 - protein, 320 aa, unidentified
MNETSTKTAGIDTGKKSLDVATYPTSDRLRVANARDGHQELVAWLSARKIKRVGIEASGGYERAVVEHLREHGFEVALLQPRQVHAFAIYKLRRAKNDRIDAALIAECAANLGGLHGPPDTRLAAFAEHLLFIEQLEYDIAHLKTRREHFTTKRILKQLERDVQRLQRRREAELLLLQVGVCKHDDLARRLELIASVDGIGIRTALTLVILLPELGKVSREQISALVGVAPYDDDSGERTGERHIAGGRSRVRRALFNAALPASQRWNTALVALYGRLKNNGKAHRKAIIACVRKLLIFANAVVERGTPWSKNPPAHRTA

SEQ ID NO: 49687 - protein, 371 aa, unidentified
MIIAIGVDAHKETSSAYAVYAGEGKENDKHKGFLNQFNKEFGQFPSTPLEMQRLSAFVRGHECHVLLENSTKTHDVYWILKNLGFNVTVAQANELYRITESDKKTDRNDSMELAGYMRRRLHGEKEFAECFIPSPEWMTKREMCRGLSAEKVYLANTKRRIRAHLLLHGIGLNKEYSDITCKSAMNELGRIKDPYLMMQLKFASDAKSRIYFGEKAVWQMFHGDPMYRGIYSIVGFGIVSSAYFTSLIVDIGRFPTCSNFEASFGVVPRKRSSGEHDPNCRTTHKGDELAREMLKHCARVHVRCDEDSVVTKMYKRLVARGKAKTEALIAAGRKLLTVMWAVLKSGKPYTSDPEKLMAARNMAEEDETLTE

SEQ ID NO: 49688 - protein, 422 aa, unidentified
MENTTARKRKQVPEGYLIIGIDPHKKRHAAVVITQDFTIRDKSKFDNTREGLETMLRRTRTEMVKADCRGVMFAIETGGHYWRNIAYFLDEQGIPFRFINQYTLKRRREGKDLNHKKNDYRDSEVSAQLLCTGEFTESTIPQGVYAELRTAHNAYRRLVKERTRITNLVKGLLDGLFPEFTQVFKDPCGLTALSVLSTCSIPGLIAGMTEDDFVAAIEARHHGRRLMRKKLRELHNSAMTSIGIAAGARSVSSEISFLVEKYELIRRHICIIERTLVSLVDEAEEGKYLLSIRGLNYIAVAGLLAGLGCFKSYRTAKQMIKMAGSNPTESESAGKRGAHTPMSKQGRPVLRYCAWTSVIPMLRFNSDFRAWAKQRRERPAHANPLSGREVVGAALNRLFRLAFALVKNQTYYLSPQLVQVTG

SEQ ID NO: 49689 - protein, 416 aa, unidentified
MNAVGIDVSSRKSTVAVLRPLGEVVCLPFDVTHDIAGLASLVEKLKALDGETRVVMEHTGRYYEAVEKALHEAGLFVCAVNPLLIKEYGANSLRRVKTDKADAVKIARYALDNWADLRDFTPMDAIRYDLKTLNRQFQLASKQRTASANNLIALLEQSFPGIRKCFDSPVRSDGTQKWVDFAHSFWHVDCVRKQPFAAFCERYRKWCKRHAYLFKQSNAEEVYALAKRAVVLTPKSKVVKVLVQEAANQLISISRSVEVYRAEMDRLAAMLPEYPVVMAMYGVGKSYGPQLMAEIGDVRRFERKQALVAFAGIDPMPNQSGDKNVRSNKSSKRGSPYLRKTLFNVIRTYLQCAPQDEPVFQFLNRKRAEGKPFYVYMLAAANKFLRRYYAKLRDYFASLDTLQPAAPIPTILKAAL

SEQ ID NO: 49690 - protein, 338 aa, unidentified
MALYCGIDLHSRDCWLAILDEKRKVVHETKVGNDLEALLQVLEPYREDLEGIAVESTYNWYWLVDGLEEAGYQMHLVNTWAVKQWEGLKYTDDRHDARWLAHLLSLKILPVGYICPKQERSVRDLLRRRAFLVRKRTSFLLAMRGAFECRTGKRTTSSDVKQWTAEEIESSLDDAIEALGITCLLEPMKAVDDQIRILEKEALTRARLRDEFAPLLTVWGIGKVLGLTVMYEVGEIERFKKVGNFASYCRLVKSTRLSAGKRKGSGNARNGNPYLSWAFSEAAHFAVRYHPEAKKYFQRKRSKTNGIIAIRTVAHKLARAAFYVMKDQVAFEPEKAFG

SEQ ID NO: 49691 - protein, 431 aa, unidentified
MPYSNPFISVGIDVGADFSFMSLALPNQTFIGKPFKIVHNDFKSLERAVLAIKEAEELHSMKVRIVMESTGIYHYPLFCYLRDKGFDLAVINPIITKNSTNMNIRKVANDKSSSKNLALIGLKPDLKVSVMPLDAVLDLRNLVREYYNLMDCRSAYVNKLLGILRVSFPQYIGIFSKITVKTSLALLEKYPSPNEFLSARKSSIVNLIRKTARFGKAYAEKQCQSIVEAAKSAKVFGHFVPSNSTQIRLCVSFIKKYDEEVANVLALMHKLVDERTDETFVKQIRLIETLPGAGFLSAATVICEIGDFSVFSSPKQLFAYFGLDPAVKQSGNFTGTKVKMSKRGSAVARRAIFTIALSGVGLKSNGVANNPVLRDYYLGKCRSKPKMAALGAVMHKVCNIIFAVLRDNKAFALITPEQHVQNYANALLSAA

SEQ ID NO: 49692 - protein, 415 aa, unidentified
MALKIVYKICCGIDVHKTFVVACFASTNEKGVTTYESHRFSTYTCGLKNLLQWLLSRNCKDICMESTGKYWIPVYNILENDCSIVLAHPQYVKAIRGKKTDKKDAKWIADLFKHDLVAGSFMPPADIRQLRDLMRYRFKLTCFKSSEKNRLQNCLTVSNIQLGTVVSDTFGKSAQAILDKLLENPADTSFDLDPLIHKSLKKKLPELRDAIDGYITPEQAGKLKVIKSHYEDLESRKAELEELILALAAPYQQELAILQTAPGISSIFTAIGIISEIGTNMEAFPSAKHLCSWAGLTPTNNESAGKKKSVRVSKAGCYIKPLLVQCANAVVTSKKHPEIRNRYLRLKKRRGHKKAIIAIARMLLTALYHMLKNGENYNSELYKKSDSLPVDREITVEQASIIARNQGYKIKSATA

SEQ ID NO: 49693 - protein, 355 aa, unidentified
MSQEKYIGMDVHQATISVAVMDAQGKLIMECLLETKAATIVEFIQGLQGTLSLTFEEGTSAAWLHDLLKPHVSRLVVCDPRKAALLKDGNKSDRIDARKLAELLRTNQLKPVYHGEHGVRTLKELGRSYLTLTKDVTRVMNRIKALYRSWAIPCSGTTVYAPRHRAEWLAKIGEPGVRVRAERLYQQLDVLQPVRQAVRQDLLSESHKHPAVKLLRQIPSIGPIRAALLVALLQTPHRFRTKRQLWAYSGFAVETHDSGEYRCVRGKLQRNRERITVRGLNDNHNKDLKSLFKSAAISASTRPGPLHDFYAARIAKGMRPTMARLTLARKMVTITLTVWKKGVSFDPQQLHRQAA

SEQ ID NO: 49694 - protein, 416 aa, unidentified
MPYAWCVGIDWGSQQHQVCVLDRNRRLVGERTVSHDGASLAQLASWLWTLSEGHPQRISVAIEVPRGAIVEGLIERGFHVFAIHPKQLDRFRDRHSVAGAKDDRRDAFVLADSIRTDLPSFRRLRLDEPQLIVLRELSRAEETLLEEFRRSANRLREQLHRFYPQLLQLGLAADEPWLWDLLELAPTPAHAALLSAEQVQRVLKAHRIRRVKATEVLACLQAPALPVAPGVLEAAQAHCGFLLPCLRVLTEQLRLCAQQVQALLNTLAEEPGEAGGPSDVAIVQSLPGVGRKITAWLFAEASQPLAERDYQVLRTHGGVAPVTRQSGKRRQVVMRRGCNPRLRQALYHMARVAMQRDAHFSDVYAALRAKGQRHGQALRHIGDRLLRILVAMLRHRTCYDPSRIRQGLVVQMGRKI

SEQ ID NO: 49695 - protein, 414 aa, unidentified
MSYKIAGIDVHKRVLMVVVMDASTPEEKPERRRFTTMPSDLHRLSIWLREQGVEEAVMESTAQYWRTVWLELEPYLRLQLAQAFSNRAPRGRKHDFKDAERLVRRLMANELILSFVPDGEQRTWRNMTRMKTQLRRDRVRLQNQMECLLEEMRIKLSIVVSDLLGASGLRILRALAQGETDPKKLALLGDDQLKCSEEQLVDALTGRPQPMHREMLGLQLERLRLIDGQIEKLNGLIAQAMKPHQEAVIRLAEVPGLGVDSAQQVISEVGVQASTFPSAAELTSWVGTCPGKDESAEENHSSRSAKGNKYLRRILNQSAHAAVKKKGSHFQAVFRRLLPRLGCKSAIWAIAHRLCRLIWKILHEGVRYIEQGSESDPKVRERRARTLARALRKLGYDVAITPINPATAEKAMQT

SEQ ID NO: 49696 - protein, 344 aa, unidentified
METKRRYIGVDLQRNCFTACVRLENGREYLKQWQVEDLSKFATKLRATDQIAVEMTGNTRLFHDAVSAHVERVVAVNPNQFKVITHSVKKTDPNDARNLALYLSKDLLPEVRMKDKTQAQIASLTQTRDTMVKLRTALKNKINNLCSAHGVNLNKESLASEKGLRAALDMKFDVLVNLELKIIVDQIRSLNKSIAELEETISKEGTKLKGHRNLTSIKGIGGLSGSILLSIIGDINDFAEEGNLAAYFGIVPRVSNSNETEHSGSITKRGSKLGRTTLIQCALIAQRYSPYLKKYYERIKNRRGTGKAIVALARKFLGIIYRTLKNNWVFADFPNFVLAEPAKA

SEQ ID NO: 49697 - protein, 329 aa, unidentified
MKKKHFFGIDVSKETLDVVHHATSGYLRISNNADGFEKLLTWFKSLKATKSNSWVVFEHTGMYAQALLDFCETNDFAYTQIPGLVIKLSSGIKRGKSDKIDAKAIAAFAYEKRNTLKVNDPQDKVIERFKTLMNLREKMVIERAGYKGRIKEMTSVLKLEDANVIISSQKAMVAALSIHIKAIEQEVKDLLEANPKMQKNYDLLISIKGVGFVLAMYTIIYTVNFTKFVNARKFASYCGTAPFDKSSGKQKPRYHVDNLANKRMKSLLDQSARCAIVWDKELKAYYGRRIDERANKMSTINIVRNKIIYRMFAVVKRQTPFTEEYKKAA

SEQ ID NO: 49698 - protein, 339 aa, unidentified
MDTPHTPQQSPPPADRAVYVGIDVAKDRLDLARSDSATAAAAAAFANDPAGIAAVVAHLAPLGPALAVVVVEATGGLERPLVDALLDAGLPAALVHPGRVRHFAKALGVLAKTDRLDARVLARFGQLAAPRLAEKRSANRAALQALVGCRRQLAVTRAQQANRLAATTHKPARKAIEKVVATLDKQVASLDRQIRDLVDADDDFKHLDGLLQGVPGVGPTLSATLAAELTELGETDRREVAALVGVAPLNRDSGKASGKRAIAGGRTAVRCVLYMATVAACRCNPVIKTFSDRLRAAGKANKVRLVACMRKLLTLLNAMVREDLTWDQLDVVKKLAKNP

SEQ ID NO: 49699 - protein, 475 aa, unidentified
MNIKGTKKKNQVITANIFEQQELLKKAEVIREKLTASTWHELETNGKFGKNEKLSFVSDDMLIVGCDVGSDTHYVRAIDTRGRELSKSAFPFSNTLEGFQGLMDWATKLAASNDKEQIILGLEPTGHYWFCLATWLIGNGISVVQVNPYAVKQTKEVEDNSQLKDDRKDPKLIANLVKDGNFGMPYLPEKLYADIRRLSMLRDQINEDRIRDLNRLHREMKIYFPEYKDAFGKIDGAFCLEVLKVAPFPEDLVTLGAEGIRQIWHEAKLRGRGYVNATSIFENAKKSIGIQDGTESGKLAVKWFVRRMIESNEQLADIESRLHQMCMEIPYAENILAISGIGENTLSGILAEMGDISRFDDVKEIQKLSGLGLVACSSGKHKGETKISHRGRKRLRYWLFQAAKSAVAHADEFKELHAYYTTRKDNPLKKMQSLIVIACKILRVIFAILTKGMTYDPKKMLRDIVRPNEQSVQVA

SEQ ID NO: 49700 - protein, 342 aa, unidentified
MQHAAIDLGSKESQICIRQPDGAIVEERKLPTRKLTELVKTWPASRVVMEASAEAFKIADAALAAGHQVRVVPGKLVRLLGVGDRGVKNDQRDARQLSQASWQTDVPSVHIPSLAARELKSICGARDVLVATQRTLSNNVRGWLRTQLWKLPSGKMVTLPERLRTHARSNNHELPEHIERQLTMLTQVAEQVKAADRQARKLAAEHPVCRRLMTVPGVGPITALRFVAAIDDPSRFSSAHRVQSYLGLTPGEHSSSERERKTGITKAGPSELRRCLVQGAWAAMLARRPHPMLEWARQIAERRSRPVAAVALARKLAGILFAIWRDGTTYEPKRAARRSAPL

SEQ ID NO: 49701 - protein, 411 aa, unidentified
MSHEITWLFVYGSPRVIIFTSEVIFMVFVGIDVAKDKHDLYAVDSDGVVLCDNFTFANSAAGFASLLERISVWGKIKVGIEATGHYSSNLLSFLKAHDFEVVVFNPLSVSRLRSAASLRKTKTDKNDSRYIARLLLTGVANPYQSQSYNISVLKSMTRARFRLFQEIQPLKNRFRRLLHVLFPELQGFFSNLYGNTSLNLLSVLPSAKDIAECNILKLTKILSEFSRGMLKRGRAEQLKSLAQNSIATYNYGDAFELKQTVRRIQFLSSQMSEIESEIDSVMAVLNSPITSIPGIGNLLGATILSEIGNIKNFDNPDKLLAFAGCEPSTYQSGKYTATNTPMVKHGSRYLRRALYCAADMAYVNSPSFRSYIDRKRAQGKHYYVAMSHGMKKLVRIIFAVLSRNIPFSEPA

SEQ ID NO: 49702 - protein, 415 aa, unidentified
MKGTEDTRKIDRYIALDIHKEYVLAGGQTAGQEWVLPPRRISIVKFREWATANLHAGDAVVIETTTNVWDLYDIVAPLVTRTAVAHAGAVRQIAEARVKTDKEDVKRLIRLLIADIVPEVWVPPVEVRELRGVISYRNRLVKMGTMVRNRLQSLLHRHNIILPKGKLLDASWWQEQKMSTLEKMQIQQELMMLAELDRHKREVDMELGRQCLREPWGKQAVRLLQLPGFGVIMTMIVLSAIGDIQRFESAKQLVGYAGLGAGVHDSGKEHIEKRITKSGRKELRWALVEAAWQAIRISPYWKEQYETYLRRMRRPNQAIVVIARKLLVAVWQVLTKEETDVHASEEDLAYKMLVLSWDLDESVRMGLTYKQFAKYALMKLGVETDITRFVRKNVPRRIAPREEVLARMQELELST

SEQ ID NO: 49703 - protein, 474 aa, unidentified
MDDRRLVGIDLGITSAHTVRVLDGGGSIVCRRKAVPTLESLGEVERAALAGAAPATRLEVVIEPTGPAWLPIAVFFCRRGHTVFRVSSAKAHDLRRFLSRHAKSNGIDADTLARLPLVDPAGLWPLQLADAPRAALDRRVRACDRLTQAAATHKRRLKDLVRQLLPASPLVGELGMADLAVLERYADPHTLLAAGRARLARVIATASGGHLGAARAEQWLAAARAALQLYADHPAVAFQDLAAEVATEVRLLRATQAELARHATQRESCYRWVDPAGLARSLPGLAEIGGPALTATMGKASRFPAASKFRAFTGLAPKASETGQTDRKGQPISKAGNRLLRTTLVRAADNARRVDPQLARIYYLQMVERGKDHLGAVCVVAAHLAERAWVTFNREMPYVICDTDGTPVTPQQAKAIIAEHWTVPEQVRRRRRSKKGKAPQQVLTGHAHGAQGATRRPSPRRPVLDGDPSASTKP

SEQ ID NO: 49704 - protein, 430 aa, unidentified
MKSNTQNAKIEAITENTLVLGIDIGSETHYARAFDYRGIEYSKKPFKFSNTEVGFMSFKAWIQDMKEMHEKDKVVPGMEPTGHYWFNLGKFLQDNEMRPVLVNPHHVKKSKELDDNHPTKNDRKDPKVIAGLVREGRYMIPYLPEGVYADLRTASNIRFQLQAELTRIQNRISRWFNIYFPEYKTVYGKPDAKSGMMILKVAPLPEDILTLGIDGVNQIWRDAKMRAVGKARAKTLIEAAKHSVGSKEGAVSARMEIRMLLEDYESRNVRLQEVMALIEELVKQIPMAEKLLEIKGVGIKTVSGFLAEVGDISRFNNPKELQKLAGLALVENSSGKHKGETRISRRGRKRLRYLLFEVAMSLVSKNAEFKELHIYYTTRRINPLKKMQSLMAVAAKALRIFYAILTKGVAYDPKKMINDIKRPKIYLQAA

SEQ ID NO: 49705 - protein, 350 aa, unidentified
MKVTYQTCCGVDVHKSFLVATIVKTTGGIEPSYQKKRFSTFNNSILEFKQWLLDNHCHDVCMESTGKYWVPVFNLLEDKINVVIANPKWVKAVKGNKDDTKDSKWIGDLFRLGLVKGSYIPCKKVRILREYTRYRYKLVSCRSSEKNRYQNALTVCNVALDSVVSDIFGKSSTSIIDYLLEQSGTSINHEEIASKLLRSLKSKEDAVIESVEGYQMTDAQKYRMRLVRAHMDYITAEINDVDKMIENMISSNPDFENAVQFLCTIPGVKRDSAITIISEIGMDMSQFSSSKRLCCWAGLTPGSNESAGKKKSVRITRAGVYLKPALVQCAHAAVKSDKSPYYKTIPMKKP

SEQ ID NO: 49706 - protein, 354 aa, unidentified
MRFYKQPPDQQPHRFYGGVDLHARCMYLCILDAGGQTVLHRNYPADRGAFLDAIAPYRDGLAVAVECMFAWYWLADLCAEHGIPFVLGHALYMKAIHQGKSKNDRLDAAKIAGLLRGGLLPQAYVYPKTMRATRDLLRRRSFLVRRRADLLAHLVNTNSQYNLPALNKKLVYPGNRGELNLPERFTEPSARKMVECDLALIDALDAQIHELERHLIRTAKVHDAQAYARLQSIPGVGKVLGLVLLYEIHDVGRFPEAGHFLSYARLVRPRQESAGKASGFGNKKIGNAHLRWALGEAACLYLRASERAKRWQARQAKQHGPAKTLGILAAKLGRTVYHLLRTRQVFDEARFFAS

SEQ ID NO: 49707 - protein, 348 aa, unidentified
MTLIGCDLHTRKQQVAVLHTDTGEVVEQELLHAGDAVEQFYRTLPRPVTVGIESTGYALWFHELMQRLGHTLLVGEAAKIRAMVVRKTKTDRRDAQHLLDLLKHERFPAVWIPDPATRDLRALVTHRVRLVRIRTMVKNGLQAIALNRRLALGSKLWSQRGRAQLTALDLPRHTAQRREDSLELLTWLEAHITGLDARIADAARAHPGARLLLTHPGVGALTALATVLVLGPAARFPGSKHVVSYVGLAPAVSASADTCHLGQITKQGSALLRWVLGQAAPLAARADDDLHRLYRTLIHRRGRPKARVAVARKLLVRLFIMIRDQIDYAEFRRRGRLPPRPDLPPRPA

SEQ ID NO: 49708 - protein, 361 aa, unidentified
MTGTMTWVGLDVHARSTHGAAINSLTGELERVRFGPGSGPVVAWLGELPGPVRAAYEAGPTGFGLQRAAEAAGVAMQVVAPGKTPRAAADRVKTDRKDAELLARLLLAGQLTAVHVPEAWLESVRHLARRREQVRGDVMRARHRVSKLLLIHGRVYPESTTWNQRHRQWLGRQVFEHEPTELVFIDLLAALDGHVVRRVALEERLSRLAQDPRLWPTVARLRCFRGIDTLTALTLHLELGGNWQRFSSPRKLAGWLGLTPSLHQSGETSASGSITKTGSSLARRLLVESAWHYMRQPAIGVTLRNRQTGQPDHVLQIAWRAQHRLHRVHHRMRDRGKPHNLTTVAVARELAGFLWAAATAP

SEQ ID NO: 49709 - protein, 337 aa, unidentified
MDKVYDKCCGIDVHKKLIVACFRKGSKQELRNFGATTRELLELANWLQNGGCEMVAMESTASYWKPLYNILESSELKAMVVNASHMKAVPGRKTDTKDAEWIAELLQHGLLKASYIPDKQQRELRELVRYRKSLVSERTRELNRLQKMLEGANIKLSGTVSDINCMSARNILEYLLTGEFFDEAKYDEMYKQKIIAHNLKASKEQLIDDLNGVMTPLQRRMMKELLSHLDELNVHINNLEDEIDNFMKPEEKKATQAIQDVTGIGKNSSQAIISVIGTDMSRFPTAGHLAAWAGLCPGNNESAQKRKTGKMRKGNALLRSTLVVCAHSATRNKNSYF

SEQ ID NO: 49710 - protein, 320 aa, unidentified
MSAYEFVGVDIAKDKFDSSLCINNRHKHAVFSNTNQGHNEFLKYLNQSAVSPWVCMEATGHYSEELADFLVRKGIRVSVINPFQIKSFARASLARNKNDRIDAKLIAQFSQRMEPRLYQPTPTEQKEMKELTKVLDMLKAQVTQLTNQLHSIRGATAQKSLKKMIQKLGQEIECIQKKIDELINNNQRLKEKLDLLMSIKGIGKLTAYYILARMPDIHSFQTAKQFAAYIGITPKQHQSGSFTGKTTLSRLGDSRLRKALYMAALVAKRYNKALHCFVNRLRIKGKTPKTIICAVMRKLAHIIFGVLKNNKPFNENWACF

SEQ ID NO: 49711 - protein, 418 aa, unidentified
MKRIKTKGRQVVNEKTLIVTVDIGKTMNMGYCRCPDKTEVKPFEFQNGYQGFEKFLDVIRTTKQAKSLEHVVVGFESTGAYAEPLMHFLKTREIQIVQVNPLHTRKLKELQGNSPNKTDKKDPKVIADIIELGHALTVVVPEGAAANLRRLTNARERVLQRRTALLNQLQDIVFICFPEFLEIMKGVHTQTAHYLLRRYPRPLDILEHGLDALVCEFRKISRGRLGTDRARSLHEAAKTSVGIQEGSLGLMMDLQECLASIEQCTHFVKELEKEMFRCLQEIPYSALLLSMRGIGKVTVAGIIGEVGDLRNFKNISDVLKYAGLNFYEISSGQRKGNRHITKRGRALMRKLLFLAAVRMVRKGGIMHDHYQRYLQNGMKKVKALVAVSRKLLGIMLALVRDGSLYEEDHLQAEYRKAA

SEQ ID NO: 49712 - protein, 369 aa, unidentified
MEKDTIYVALDDSKRKLVVAMLRSGAAESEEREIPKDPPHIQRLFRRLEREGPVQACYEAGVSGYDLYRQITACGVTCQVIAPALTPRRPGQRIKTDRRDARKLVRLFRAGELTAIHVPDEAEEAARDLVRCREAVRRDVVRWRHRLLKLLDRHGRLWVTEKNWTQRHWSWIRAQHFELSALQRAFEATVFALEQALARPAALDQEIAALAETAPYRDPVGWLRCFRGIGTLSAMVLLAEIVDFQRFQRPRELMAYLGLVPSEYSSGETQRRGGLTKAGNTHARRVLVEAAWHYRHRPTVGRALASRSQAQPAEVVGQAWRAQQRLHRRYRHLIGHGKRPPVAVAAIARELVGFLWAAMTRRETRPQVA

SEQ ID NO: 49713 - protein, 359 aa, unidentified
MSKEHNDQNHIIGGVDTHKDLHVAAVVDSKDRFIASECFATTRQGYRLMLEWMLSFGEVQRVGVEATGTYGAGVLRYFQKAGVQVLEVTGPDKHDRRARGKSDTLDAEAAAHAAFAGKRTVTPKTRDGMVEALRVLKACRKTAVQARRIALQLIGNTIVSAPDDLRDTVRHLTRMKQIRTLAAWRPDMTSYREMDTAYRIALKSLARRFLELHDEIADLDVMIKAIIDDLAPELVAQHSIGYNSAAQLLITVGANPERLKSEASFAALCGVSPVPASSGKTNRHRLNRGGDRAANSALHIIAICRLRCDERTQKYVARRITEGLSKLEAIRCVKRYIAREVFSIIQNRNRTINQSQIAA

SEQ ID NO: 49714 - protein, 334 aa, unidentified
MQNITLIGIDLGKHSFHIHCQDKSGKALLRKKFTRTKLMQFLATCPPSVVVMEACAGAHFMARCISDFGHETKLISPQFVRPFVKSNKNDFVDAEAICEAASRPSMRFVQPRTETQQAMRALHRVRESLIRDKVKTTNQIHGFLLEFGISLPIGDAVIKRLSLVLAEHEIPEYLSRLLVRLHTHYFYLVEQIAELESELSQSINADDTAQSIMTIPGVGPITASLLSSQLGDGKQFSCSRDFAASTGLVPRQYSTGGKSTLLGISKRGDKNLRRLLVQCARSFIMRLERKHGKLAEWVREQLNKKHSNVVTCALANKLARIAWAITTQKKEYQA

SEQ ID NO: 49715 - protein, 373 aa, unidentified
MSLVMWWTVPAPGSEPPRVIVANESHQGAIHMQIATIGLDIAKNVFQVHGIDAAEKVVVRKQLRRSQVLAFFEALPRCLVGMEACATAHYWARELTKLGHQVRLMPAKDVKAYVKRNKNDAADAEAICEAVRRPTMRFVQVKSAEQQSQLMLHRTRDLLMRQRTQVINALRAHLGELGITAAQGKAGLTELLVIIAGSANERLPAEAHASLIVLAAELQAMRTLIASIEKRIIAHHRLDEASKRLRSIPGIGLVGATAIAATITDPKAFRSGRDLAAWIGLVPRQDSTGGKQKLGPISKQGDRYLRRILVVGAHAVLKLARQKPEKYPWLTQLLARKPFKIVAVALANKMARIAWALLVKGGPYRTRALVAAA

SEQ ID NO: 49716 - protein, 385 aa, unidentified
MGNQRFIPRDYDVFAGLDVDKKSISATFIDHQGFLKSLNMPYKVEHLLNYVRKHYPDKKVAFAYEAGPTGYGLYDGLEAQAYPCLIASPSMIPKAPGQRVKTNRLDSRGISENLRGGQLKSIHVPTPLYRELRHLTQLRDTLVSEMVRMKQRIKSLLLMEGLEFPPAPAGSQWSFLVKKKLRELPCSSTVRFKLDRLLDSLEFDEKQVLKATREIRRFCQANPELFGCIEYLKTLPGIGWIVASQLVPRVGDWRQIKNIRQLPAFLGLVPTENSTGERTERGSITHTGDGRLRSKLIQASWSAIRQDGELREFFRTVAKKHPRHLGSRIAIVAVAHKLSVRAAVVLMKQRPYEVRQKVQSAPLTQEETVPQGTTRRLAVPGETNS

SEQ ID NO: 49717 - protein, 354 aa, unidentified
MIYTGIDVHSKKCTATLKQESGSIIQQSTFDNTPSGINSLITTLNAMGESKAVVECTGNYWIRIHDMLEDNGIDTILANPVKTKIIAQAKLKNDKADSNILCDLLRTDLVYESYVPDREHRMLRPLVRGRLELVQTRTTLKNRIHSILAKYNHTSPYQKLFSNQGLEWLKTIELTSVDRMLLDATLQTLATLTSQIVQVTKHIVKHSIEDPRVTLLMTIPGINYYTALTIVSEIVDINRFATKWKLVSYVGLCPIQRDSGMKRWRGGITREGSRWLRNALVEAANTARLHDHRLGAYYERIANRRGPQKAQVATPKEMLCIIWHMLRNNEPYRTMNPQLVEKKYRRLEWRASMA

SEQ ID NO: 49718 - protein, 482 aa, unidentified
MKKKNIYVNQSQELLSLFEEAGNNDKIMCVPIDYAKKDHIVMFCNGYGHILRKPFSVKNSPEGIEYLTEQVTRSCSHRHIDPKHVFFGGEDVGSYAENFTNTLRSGGWIVAGVNAHDAKEQRANIQASTDRLDLMGIASMLLNRRGNCSPAQSGIYRNLRTLVRHRRKLVSMSTEEKNRIHTVVDRLFPGFLDEKKSGILPFSTSSLYLMENRFSPLQIRRRKRHKLIEVLHRYGTTKPENTAAKLQEYAVRVLNTSDEYVFTLQLSLAQHVKHFRCLQDSINQLENEIAVWLAQTQGAFLTAVRGIGIVLAAGVSAEIGNPYEQKPLNNLVSYSGIIPRVKQTGGSEGKTRTGKVAKRCNRILKDYVVQSGLHMGLHGPEDLMADYKRREAAGQHADFGIGRRYLRMAMCLMRTSQIYMPQRLRNREVKPEERAGYYLMTWPSLRKKWNEAGALEIAFEKERPLGQWRNMVQELYEIKLKL

SEQ ID NO: 49719 - protein, 385 aa, unidentified
MQKLNDLSRCLTHLEADGTLIAVIEMSLSSWLVAGIVPGVERQPLKKLESDESALLNLLNRWREEAKKAGHRIERIAVAFEAGRDGFWLARWLRARDIEAHVIHASSVAVSREHRRAKTDRLDTELLKRAFLGWLRGERDHCKMVAIPTIKDEDAKRPNRERESLVGEQSRIVNRMKAALVRLGIRGFNPKLKKAAERLDGLRTPEGEPIPPNTLAELRRDMVRRRLVSDQIRQIEDARLERLKQAPSDGPHAMVRLLARVIGVGVETADMLVQEVLSRNMRDRRAIARYAGLTGSPDESGRKRREKGLTRSGNARVRRGMIELAWRFLRFQKDSVLAHWFRTRTENARGTRKTMIVAVARKLLIAVWRLVREGVVPDGVVLRPV

SEQ ID NO: 49720 - protein, 401 aa, unidentified
MKRLSGGIDVGSESHHVTILDEEDNVLYNKKISHKINEFAESINLFRKIEKKEKGEISFALEGKNGYGAPFDQLLINQGFTLYNVDNLKLKRFRQAFAGEWRDDQRDALMLSKMLKLKDHIDSQREKVFIKIEKPSPVTESLKLLSRHQQTLIDERVRLTNRLRKKLLEVCPQILELGKVKNKKIIAILVKYPDFSKYKRITLKSLLKTKGIGKKQAPFLLQRLNNIEYMPGFTDIYKTIISSYAKRILELQKEVKDIDKKLDEIGGKNEGVNHLKTIPGVATKLASRFIGEIGGINRFPAEKQLAVYCGIACVDNNSGKITKAKAVYKANKICKQTLITMAGGSIRLSLQCRAYYQKKRAEGKSHNHTLRCLARQLIKVIYKMLTEDRDYIIKKELEKVA

SEQ ID NO: 49721 - protein, 369 aa, unidentified
MTASAKPSSGRSKSNELRLADGEIAHVGVDVHKATYHVAVVSDQRDLVATWVQSASPEALIERLAPIAAQVALVVYEAGPTGYTLFRRLQDAGFRAEVVAPSKIPTMPGPEAKCDRLDCRKLAVFAQKCMLRAVRVPSPQEEADRQMQRLREMAVRKHRSIQQQIRSFLLQHDIAEPKGLDNWSIEAMNRLRSLELAPELRFCLDVMLDEKQHAAALVLRISRELEKLAKTERHQAVVDNLRTVPGVGQVTAMTFRVEMHEPSRFTDGRQVARMIGLAPQVQQSGTKRREGGILKSGNARLRAVLIEAAWRWIRSDAAAKRTYGRLVARTGSGKKAIVAMSRRLAILLWRLCLSGEPYRSGGLAPDPQT

SEQ ID NO: 49722 - protein, 346 aa, unidentified
MEKSISNFSSVTTVGLDLAKLVFQVHCVDASGRVVVAKTMKRKKVLVFFAALPPCVVGLEACGSAHHWARELIKLGHDARIMPPAYVKPYVRRQKNDAADAAAICEAVTRPSMRFVGVRTLANQATLMHYKAREMLVAQRTQLLNSLRGHLAEIGVIAPQGQRHAHQLADRIEARDETIPLPVCEALAPLVVQLRYLDVAIARLDRTIAKMAHKDETARRLMTIPGVGPVTASAMVASVQDASGFSGAREFAAFLGLAPRQNSSGGKQRLGRISKMGNRYLRKLLVVGAHAVLYHRKPHTDALRMWAKKLMEKKPFKLVAVALANKIARIAFAILRARTIYNPIAA

SEQ ID NO: 49723 - protein, 338 aa, unidentified
MPTYAAIDLHSNNGVLTIIDETDRVLKQRRISNNIEEFVKELEPFRATLQGVAVESTFNWYWLVDGLRSKKFPVALVNTAAIQQYEGLKRSDDQYDAWWLAHMMRLGILPKGYIYPREERAVRDLLRKRATLVQQRTANILSVQNLEARNRGTKISSNEVKHLTGASIAALYDNEDLALALTTTLTVIDALTEQTSLLEKAVLKKARLRGEWELLLTVWGVGKILGLTIMYEAGEMSRFAGPGHFASYCRCVDATRLSNGKKKADNNAKNGNKYLAWAFVEAAHFAVRFYPEAKRFYDRKTAKTNSIVAIKALAHKLARAAFHVLHDQKPFDPKRVFV

SEQ ID NO: 49724 - protein, 334 aa, unidentified
MRQVSQVGVDVDSEKLVCMMQRVGQRMPLTTFANTAAGHKKFIRWATKRARSARVCLEATGIYSLQFALALHDAKSVEVMVVNPRAIKDFARACMQRAKTDAVDAGGILEYLERMPFTAWQPPAPEILQLQAINRRIVRLQTELTREKNRGHASEFAGASGDAVVNDIEVNIRHLERRIERMHDSGLQLVHGVPALATKLAHLVSAKGIGEASAMRLLAEVLVLPVDLAAPQWVAHAGLDPRPYESGTSIHRPRRITKVGNRHLRAALYMPALVAIQHEPNVKAFYNKLVAAGKKPMQAVVAVMRKLLHAIWGMLKHDQDFDGNKFFRLAEKTA

SEQ ID NO: 49725 - protein, 342 aa, unidentified
MEHFAGLDVSVKDTSVCIVDDTGKIIREVKVASEPEALSAVLKSPAYHFKRIGLEAGPLSQWLLSALAEAGLPAICVETRHMQAVLKAQINKTDRNDARGIAQMMRAGLYRPVHVKTLRSQKLRMLLTHRQLLQSKAIAVENDLRGTLRNFGLKVGMVGKVKFEARIRELVENQPDLAVLVEPMLIVRRVLREQIVILHRRLLAIVRDDEVCRRLMTIPGVGPVVSLTYRATVDVPARFHKSKSVGAVFGLTCSKYQSGEIDRSGRISRCGDEMMRVMLYEAAQSMLRSKKWSWLKAWAMQIARRRGMKKAIVALARRLAVIMHRIWVDGTEFRWTRQAAAA

SEQ ID NO: 49726 - protein, 462 aa, unidentified
MKRKAKSEATHSGMAVVNPNAAAIDIGATMHVAAVGADRASDPVRSFGTFTADLHRLADWFAECGVKTVVMESTSVYWIPIFELLDERGFEVLLVNARDSKHVPGRKTDVSDAQWLQRLHSYGLLRASFRPKGEIVELRAYLRQRERLLDTAASHIQHMQKAMTEMNLQLHHVVSDITGATGMRIIRAIIAGERDPAVLASMRDTRCHSSAEVIEKALTGHYRGEHLFVLEQALALYDVYQQKVAACDIRIESVLKELSSIRGRKEDARADGSGSSRRRSRQSNGPDFDVGEALHSLLGKDLTRIHGIGPYLALKLVSECGDDLSAWPSAKHFTSWLCLAPSNKISGGKVLSSRTRRSGSRAASLLRLAAVTIGRTETALGAFYRRLSARAGKAKAVTATARKIAVLFYNALRHGMDYVDPGASYYETRYRERVVKNLHRRAKAFGFVLQAADVPVPEQAVS

SEQ ID NO: 49727 - protein, 361 aa, unidentified
MPILHPETIHVGLDIHKDSISAGILNPGHEVPDVERVFHDEESVRRLFGRFPDPRLVRACYEAGPTGYDLARLLVSMGVRCEVIAPSMIPKAPGDKVKTDTRDCRRLARLHRAGELVAIRIPTPTEEAVRDLCRTRGDMVEDLTRARNRLTKFLLRHSRVWRGGSNWTVKHEAWLAQQSFSEPALAATFGHYRAVVVARDAALAAVEADLVAWFDKAPFAEGVRRLSAYRGVTRMGALALQAEVCDWRRFARAASMMGFVGLVPSEHSSGGSTHRGHITKAGNAHLRTQLVESAWAYQHRPTSGPRSPSATRAWSPKWWPGRGRPSCACAGGSATWRPARTPSRWWPPPSPGSWPASCGRR

SEQ ID NO: 49728 - protein, 536 aa, unidentified
MAAKNNRNQRKHIKSEGTYSSEELRLLTMEDGTRVVFSADGDIKRPICAGIDVHKKILMAAICKTDTETLKATFYVRQFTTMNSDIRSMAIWLKEQGVQDVCMESTGKYWVPVFNILEQNGMKPILTHPKYVKQAKGQKTDFRDAVHMASMFRLDLVVASFIPPADIRDLRELCRYRLKLTYMRTAEKNRFQNSMTISQVRIDSVFSDPFGKSASAIMEYLILTEPDEVSDDKILGLVCRRGNLKASDEDILDSIHGYEFIGVQRDKLKVINLHLGQINECISLIDEKLDYYRRKYIRIISHLSTMVGITEESALYMLGEIGTDMSVWRDDASLACWAGLSPANNASAGKKKSTKVGNGGHYLKPLLVQCALAAVKSTRKDPYFHNKYETLKKRRGHKKAIIAIARKMLVAIYHMIKDDADFHPVDHDEIIQCTQKTKGLNLNNVIAFLKEQGADESTIHLVETQCSTKEKDAADACNESTAIRDAKEKQSDSESAAMSQPKQESVKGNSVLISGSQQGRALNHHPKDPAVATATA

SEQ ID NO: 49729 - protein, 490 aa, unidentified
MKKRSIYGQQSQDLLRIYEEAGRSDKVLIGAIDYAKIDHVVMLCNGNGDILRKPFPVKNTPEGVDFLVAQMDSTCRYHKINPKHAFFGGEDCGTYTENFAQCVRDRGWLVAGINAEDAKHMRENLQASTDRLDLLGIARMLINRRGNCAPAQCGDYRNLRTLVRHRRKLVLLSTEQRNRIHCLVDRLFPGFLDEKKSGLTPFHKPSLRIMEDHFSAGQIAKRKRATLAGLIARAGGTRPEQAATKLHSYAKSVLLPAPEYVSTLQLSLTQHVALYRCLHDSIDCLEREMAVWLAQTQGAFLTSVKGVGMVLASGVAAEIGDPFAQRPVNNLASYAGIIPRVSQTGGPDCEAHTGSVSHRCNHILKDYLVQSASHIGRHGAEDLMHDHHRRDAAGQHANYGIARRYLRSGMHLMRNSAIYLPASLRRKEASQAERVEYYQIFWPYLLDKWKKYGAHRVAFAPENPLGQWRNMIQDLYDIRLKIPGENTEKR

SEQ ID NO: 49730 - protein, 346 aa, unidentified
MLHVGLDLSRKRIDVCLISDQGELIDRFTATPDRDGLHGLARRVAVYGEPVRAVVESMNGARFVHDELTAHGWVVLVADAQKVKGLAPLACKTDKIDSRVLAELSFRDLVPAIWLPTFGLRSEREISRWRLHLVKHRSTLKNRVHSTLITFGHQRHMSDLFGVAGRRLLKELEIPEPWRSHVDASLVLIDDLETRIIQIAKELRRSGADHPYVPLLMTAPGFGWITSFTVACEIGDINRFASPVKLSGYTGLCPRVKQSGDMDQRGPLSKHGPKYLRWGLMEAAIAASSHPLYRERYQRTKRRLGKQRGPKVAQIDLARQLTEAIWYMLTRNQPFAPAGATIRLAA

SEQ ID NO: 49731 - protein, 408 aa, unidentified
MNAVGIDVSKGKSMVAALRPMGEVALLPQEFLHTEVGLEQMAYAIVALGEDTRVIMEATGRYHEPVAAALHEYGIYVCVLNPLFIKQSGGGSIRKVKTDKADAMKIAKYGLDNWVDLREYTPMDTVRQQLKLCSRQYNLYMKTVVSLQNNLISLTDKTFPGVNELFSSPERADGHQKWVDFVMTFWHCDCICRVSEKAFTERYQKWCKRKGYHYSAEKALDIYAGSCGHFTTLPKNDNTKLLITTAAQQLLAGKMTLAALRAEMARLARQLPEYDTVHAMYGVGEITAAQLMAEIGDVRRFPRRSSIVGFAGVDPAVNQSGKHAAQSTPTTKRGSPHLRKTLYQIVCTYLRKAPEDEPVYQFLDKKRAEGKPYFVYMTAAQNKFLRIYYARVKECLEDFDAQQNSAQS

SEQ ID NO: 49732 - protein, 303 aa, unidentified
MKLSRVGIDLAKNVYQLHGVDRSGKTILKRRLKRHQWLKVLLDETEPGCVIGMEACASAHHWGRELQSRGYTVKLIPPQFVKPYVKSNKNDARDAEAICKAMSRPNMRFVTVKTVEQQDIQATHRIREELKVRRTAKANQIRGLVAEYGLVAPQRLSSLRAAIPCWLEDAENGLTHYFRSLLQGLWDDLLILDDRMCEMDKTIKRLAKDNEDCVRLQQLRGFGPMISTALVATVGDARQYHKSRQMAAAIGITPRQHSSGDRHRLLGISKRGDVYLRMLMIHGARSVVTRAKHKDDPLSRWVT

SEQ ID NO: 49733 - protein, 422 aa, unidentified
MNTTDYAVCVALDWSDQQHAFALQFAAANSKETGMITASPEGFHGWLEALHARCPNQRGAVILEAGRNSVVHMLVEHPWLEIFPIHPATCARFRTAFTPSRAKDDVPDAEVLLTLLLRHRDQLHRLHRDSAQTRELAALVVARRHAVDRRTQIGHQLRTTLKSYFPQALQLIGEAFEHPMALDFLNRWPDLGSLKKARATTLRTFYYLHRARRTELIEQRIKLIAEARPLTQDPAVVAPAVMQVQMFVELLRVQEKHVARFDERIAELFAAHPAAVFFRQLPGAGASLAPRLLVAFGDDLSRYPTPSSLQKYAGVAPVLERSGQKSWTHWRWHAPIFLRQSLVEWAGQTVAFCPWAKAFYWQHRNAGKGHQGILRALAFKWIRILWRCWQAHEPYDDARYVAALRRRNSPLIALIEAENAAA

SEQ ID NO: 49734 - protein, 308 aa, unidentified
MIVQNYVGCDISKARLDLFDEASGRYQRIPNQAEAIEAYVAGLCAGRDFVVMEATGVYDRLLRHALGKAGIAFSRHNPAHTHHYAKSATQRAKTDRLDARMLSSYGRRYQPAAEPAPCEKGERLQSLARHRDHLVEIRAGLKRHLSEAFDEDVITETERLIADFDTRIDALESRIARAIREAEDTARDYELMVSVPGVATITALSLLAHMPELGRRSPKSIAALAGLAPLDNESGKTKRRSKISGGRPRVRRALYMAALGAIRANDRFRTFYTALAARSGSKKLAIVAVARKLLVTLNAIIRDKTAFA

SEQ ID NO: 49735 - protein, 429 aa, unidentified
MEEVEDAELVVERIAALDLGKAGLEACVRVPSPHRRGRRMQELRGYGTTTAQLLDMVDWLRQWGVQRVVMESTSTYWKGVYYLLEAEEFDCWLVNAREVKNVPGRAKTDRADAIWLAKVAERGMCRPSLVHPPQIRRLRDLTRYRRALVQDRTREQQRIEKLLEDAQIKISSVLSELHGVTARAMMDALIAGQRDPRALAQLAKGRARNKTAQLEEALRGFFTDHHAAILQMMLDNTDRISAQIATLDARIQEAIGPFSGQAARLAEIPGVDAVAAAELIAEIGVDMTRFPSDAHLVSWAKFCPQTHESAGKSKSKGRGRGNPWLAGTLGRIAFANSRADTFLGARYRRLARRRGKQKAIVATGNSVLTVVHHLLSNPEATFCDLGPGYYESRINKHRRARDLATQLQALTGQHIVIRDGRAVITDTAA

SEQ ID NO: 49736 - protein, 359 aa, unidentified
MPRLMNTKIPGGEKLTIGLDLGDRRHHACVLDASGEILAVELIVNTREVLTAFGARYPGATFVMETGTHSPWVSRLLTALGHPVIVANARKLRAISQSQTKSDREDAQMLARLGRADPKLLSPVRHRSEETQRALVRLKVREALVRSRVNLVNSVRFVLKSLGVFVSSSIKAMAFARKVREQLAPADAALVEPLLAAIEAVNTQVKALDAELETLAGERYPVTVLLRQIPGVGPITALCFVLTLEDPKHFDCARDVGPYLGLVPRRDQSGQTDKQLGISKAGHVQLRCLLVNCAHYILGPFGPPCTLRAAGERIAARGGKSAKKRAVIAVARKLAVTLLALWKTGADYRPQPLPLPQAA

SEQ ID NO: 49737 - protein, 328 aa, unidentified
MKMAGIDVHKKVLMVVVVDTSVPEEKPVRRRFVTLPSELQRFRIWLQEQGVEEAVMESTAQYWRSVWLELEPHMSLHLAQAFSNRAPRGRKHDFKDAERLVRRLMADELILSFVPKGEQRIWRSLTRMKVQLTRDRVRLQNQMECLLEEMRIKLSIVVSNLLGASGLRILHALAQGETDPKRLAELGDERLHCTEEQLVDALTGRVQPMHRGMLSLQLQRLQLIDQQMAELNRMIAQAMQSHRDAVIRLAEVPGLGVDSAQQIIAEVGAQASTFSSAAELTAWVGTCPGKEESAEQNHSSRSAKGNKYLRRVLNQAAHAAVAKKGSYF

SEQ ID NO: 49738 - protein, 343 aa, unidentified
MGEVSTIGLDIAKSVFQIHGVNAAGAVVIRKRITRAKLLEFFAALSPCLVGIEACPTAHHWSRRLQAFGHTVRLLPPSYVKAYLKRSKNDANDAAAICEAVTRPSMRFVATKSEEQQSGLMLHRSRQLLVCQRTMLSNAIRGHMAELGIISAKGRNGTAELLKIIANEQDDRIPEAARFSLDVLARQYAAVREEIVSIEKRIHAWHRSSEESRRLEEIPGVGPIVATALVAEVGDWKTFSSGRSLAAWIGLVPRQHSTGGKERLGRISKQGNRHLRWLLVAGAMAVIRYARQHGTKRPWLARLMDRRPIKVAAVALANKIARMAWAMMVRGERFKEPKLLPAA

SEQ ID NO: 49739 - protein, 336 aa, unidentified
MIKYIGLDAHSSTCTFNVTDERGREVDNTTIESNGRLLVKYVRGVEGVKKLTFEECELSNWLYEILRPEVDELIVCNPVANGDYKKKKTDKMDARKLSNLLRGGFLVPVYHDGSKRERLRSLMSGYQDFIEEGVRLKNRYKSLFRKSGKKIKGEALYNDESFLEGLERRDFQFIGTQIYQLLEKMEEGRQEYVKEIVRCSKGFKEIKYLKSIPGIGSIQAAKIVSQVIDPERFSSKYKYYSYCGLVRHKRISDGRGYGSEKIWGNRILKCVYKMAGHSVLKGKSGLRNYYDTLRLKGIGHDNAYNAVCRKIAAISLSVWRKSEKYNDRLITGNLIK

SEQ ID NO: 49740 - protein, 456 aa, unidentified
MPRAKRSRRSSRLSPVHPGAASIDVGATVHVAAVGPDRDKEPVRTFRTFTAELHSLADWFASCGVQTVVMESTGVYWIPVFEILEQRGFEVMVVNARDAKHVPGRKTDVSDAEWLQRLHEYGLLRPSFRPQADIAGLRAYLRQRERLLDYAASHIQHMQKALMQMNLQLHHVVTDITGVTGMAIIRAIVAGERDPRILASHRDRRCHASIETICQALVGNYRDEHVFALTQAVELYDVYQTKVEACDKQIEVILKRLRQTAPPPATKLTPAPRRTQQPNSLGFDARAALHAILAVDLTDIGGLGPYLALKLVGECGTTLAAWPTAKHFTSWLALAPQNKISGGKVLSSKTRRTGNRAASLLRLAAGTVGRTDTALGAFYRRLSARVGKAKAVTATARKIAVLFYNTLRHGMSYADPGASYYEERYRQRVLHNLHRRAKALGFVLQEQNPAQPVVVS

SEQ ID NO: 49741 - protein, 417 aa, unidentified
MKPLSDTSLSRYVALDLHKHYVVVAAVNRDQEVVLKPRRLAMGELAAWAKANLLPSDQVVIEATGNAWTVHDLLVPLVQRCVVADARQVKWIANAAVKTDKLDVLRLAKLLAAGLIPEVWVPPLPVRELRALIAHRSSLVKAQTRVKNQLQSVIHRFSLQPPDGQVFADKNREWWQDLPLSPTEELRLRQNLRTLDHVQQQLAEVEGELRRLSTSDPWKDLVPYLVQLPGFGLITAMTVLAAIGDVTRFPDDKHLVGYAGLGAGVHDSGETHRGKGITKTGRRDLRRVQVEAAWTAVEAHPYWKAQFQRLLRHKHKNQAIVAIARRLLVAVWHVLSERVADKNAVPEMIAFKMMMWSWKLSDQERGGLTTRQFVRYHLMRLKTGEDLPYLITGKNTKRAIAPREEVLALKPELASAD

SEQ ID NO: 49742 - protein, 406 aa, unidentified
MKQIVSVGIDVSKGKSTVCAMIHPNTIIKESFEVLHTVEEMSMLADYIGSLDGEIRIVMESTGHYHLPVAQFLYQKGFFVCVENAYIIRQFSRIMLHGAKTDPLDAKKLAKYGLAYWSELKPYKFHPSCYTELSLLSKQYQTYIKLLIAAKQNVIHLMDEMLPGFKEALDTASSVQFSKVKYVDFAKEFYHVDMIKSMGKEIFRENYKQWCKEKGYRFQSEKADELFHLAEDGIPTLPTEFPSTRLCMEVATEQVSQLGYALEQILSQMQNLAKTLPEYQTIRQMGGMGEKLCVRFIADIGDVRRFHNGKALVAYAGIDAPPYQSGQYTGTKRRISKRGNSALRKTGYEVMKSLKSHPPKTDTRVYDFIIKKENQGKSKKQAKIAGLNKFLQIYYARVMEIYKNIV

SEQ ID NO: 49743 - protein, 364 aa, unidentified
MKNKTGTVSDNKQVQARVRSQSKARVKLGLDMHYRQVTVAMQEEDGAIKALGKMSHDGFSNWVEQKLQAGFELYSCYEAGASGYWLHRDLEGLGVKNLVVAPKAMGQDRRQKTDRRDSAELVDALDRYLRGNGKALNPVAIPSVEVEEKRALIRYHRQIMADRNRCEARGKGLLCAQGIEVRGKWWQSQSWQELKTHPRLKSWMQAQLEGWRKKRLALETEQQSLRRQIEALAPALLPKGVGAYSAVALEYELKGLARFQRARALSSYTGLCPGIHSSDGRGREGSINRCGNAAVRWNLVEMVWRLLKWQPQYEPVRQLARGLLKSKRARKRLAVKAARQLAIDLWRLHTGRATAQELGLIMQP

SEQ ID NO: 49744 - protein, 349 aa, unidentified
MGEVITIGVDIAKSVFQIHGVDADGTVVIRRRIGRARVLEFFADLPPCRVGMEACATAHQWARELTKLGHDTRLMPPIYVKAYVKRGKNDAADAAAICEAVTRPSMRFVPIKSVEQQSVLMLHRARDLLIRQRTQLTNALRAHLAELGLVAEKGREGLHQLAAVVTECGNERLPSDARFACQAIVTQLNAVQIEISGLDKRIAQTHRANADSKRLETIPGFGVILSTAVVATMTDPKAFKTGREFAAWIGLVPRQNSTGGKERLGSITKQGDRYLRRLLVVGATSVINSARARPYKYPWVIELLGRRPTKVVAVALANKMARIAWAVLAKGERYRAPTRSSNSVVPAAA

SEQ ID NO: 49745 - protein, 351 aa, unidentified
MKNMSKQIQGEELFIGIDLHKHRWHVTIRTADVEIFSNSIAGRWQDLKKVLNPYKGCRIYAVYEAGFLGFWLFDHLTQYGVDCIVTPPSLIPQEHGNRVKTDRLDSRKLARLLAKGLLKSIWVPSVQERFHRQVIRRRRQLVGDRVRTQNRIKSELCFYGIDLPAAHGQWSQVYFSNLQRIKFNNRWMQQSFNQLLEQYEFLCAQIDKQTQLLKQLSQLPLYRDRVKILRSIPGIGLLTAMEILLELQDVSRFRRAEQLAAYVGLTPSQYSSAEKIRMGRITRMGKNTVRSALVESCWHLIRKDKAMRKKYEQIKARAGAKRAIVAVSRKLILCIRRLLLDNRPYEYEPVG

SEQ ID NO: 49746 - protein, 342 aa, unidentified
MSAITIIGVDLAKRVFQLHGAKADGSVAFRKKLSRGRFLSFLAEQPRCVVGMEACATAHGWGREIEKLGHTVRLIPPIYVKPFVKRQKNDAADAEAIAEAASRPTMRFVAVKTEEQQARAMLFRTRDLLVRQRTQLINAVRGHLAEHGVVAAQGPAHLKRLADAIGDEASLLPVMVQELGKLFLQQIDALGTKIGELDKKLRAVAGQAETTRRLQTMPGVGPITAVAVETFAPAMETFHRGRDFAAWLGLVPRQHSTGGKQRLGKVSKMGQRDIRRLLIVGAMAVVQAALRTGAPEDSWLGRMLAKKPRMLVAIALANKMARGVWAMMTKQENYRDPTAAKA

SEQ ID NO: 49747 - protein, 346 aa, unidentified
MIIVGCDFHPRWQQVATFDVASGEIVERKLVNGNGEAEQFYRSLPVASLVGLESCGNSQWFVELVEGLGHEVWVGDAAQIRASYVRQQKTDRRDAAHILKLLMEGRFPRLWRPDAEVRDLRQLLIHRHRLVQIRTRVKNGLQHLAMNRGMQKKNKLWSEAGQRAFLQLPLPGWAGCRRQDLLALLRQLDERILPLEAAVEKAAFAHPQAKLLMTQPGVGAITALAFVVTIGDANRFQRGKQVASYLGLIPREHSSGGRQRLGAISKQGNGFLRMLLVEAAQTAVRLDEGLRKKYQHRCHRKAKGVAKVAAARKLAVRLYWMQRTNTPYPEIVHNESSSRCPMAGTS

SEQ ID NO: 49748 - protein, 383 aa, unidentified
MKKSQETLRKHVSTKEAVLHVAFELSNSKWKLGFSDGNKMRFKSIDARNLEQLGEEIEKAKSRFRLDDDVRIVSCYEAGRDGFWLHRYLLNQEVENVEVDSSSIEENRRKRRAKTDRIDARKLLNMLMRYHGGERKLWSVVRVPSVEAEDGRQLSRELESLNKERTRHRSRIRGLLILEGLEVKNPSGKRFLEELDSLCTWDGKGLPGDFKARIVREYERLRIVEEQMGILRKVREIRVGSAETLSMRKVAQLRTLYGIGVTSSWDFVMEMFGWREFRNRREVGAFAGLTPTPYDSGGSQREQGISKAGRGRIRALNIQIAWGWLRFQPQSKLSQWYQERFAGGGSRMRRIGIVAVARKLLIDLWRYLEYGVVPEGVRLRLVK

SEQ ID NO: 49749 - protein, 357 aa, unidentified
MEKQLKQSLGIDVSKLNLSLSLGFLSKRLVKEFKSHSDVPNDIKGYKELLKWLKASVDQEVELLVVMEATGVYHQRIAHYLHERGYSVCVMQSGRVKRYAQSLDQRSKTDALDSRMLSMLGLERSIRLWHPPSEELQELKGLSRERSSLLNDRTMETNRQGAIASGVHSNARALKRHKIRLKLLNTQIAAVEEEMRILISKNEVLKRKLDYLISIPGVSFISAATVIGETLGFESIVNAKQLVSYAGYDVVLRESGNFKGKTRISKKGNSHIRAVLHMPSMTCVRCNPTLKQFYNRLKPNKAKPLVALVAVQRKLLILMYTLWKNEENYDAKFETKKQQKHEALAARDNNLINQPVS

SEQ ID NO: 49750 - protein, 410 aa, unidentified
MEVVYPRCCGLDVHQKNVTACLLTVTSTGERQKELRTFGTMTDDLLVLADWLVVTGCTHVAMESTGVYWKPIYNLLEGTFELLVVNAQHIKAVPGRKSDVRDAEWIADLLQHGLLRSSYIPDRPQRELRELTRYRTALVREQARELNRLQKVLEGANIKLGAVASTMAGRSVRAMLEALVAGTTDPVALAELAQGRLRAKRAALQRALAGRLGAHQRFMLAEQLAHLEYLEEAIAHLNAEVRTRLHPFEVELGRLDTIPGVARTIAEVSLAELGTDMARFPTDRHCASWSGLCPGQDESAGKRRSGRTRKGSPALRSALIQAAHAAARTKDTYLSAQYHRLAARRGKKRAAVAVGHTILTIIYHILRTGRSYEELGGNFFDERDREHIARRQVARLERLGYHVTLERVPA

SEQ ID NO: 49751 - protein, 454 aa, unidentified
MKKAKSVSQPKAQAALQIVFPHAAGLDIGANEIMVAIPPDREGVTVRGFGTYTPDLAALADWLKEAGVTHVAMESTGVYWIPIFELLEERGFEVIVVNARHIKHPPGRKSDVMDCQWIQQLHAHGMLRGSFRPEAEMCILRAYLRHRDNLLEDRAKHIQYMEKALLQMNLQLGQVLSDLTGETGLAILHAIVGGEHDPLVLASMRHGNCKHSQEDLIKALTGHYRKEHLFVLKQALEMFESFSQRLRECDQEIERLLEEMQPELPDDFPPLPPDPKPNSHSKNAPSYDARALLYPLAGVDLMAIPGMNEILLQKIISEVGLDMSRFPTAKHFCSWLGLAPHNAISGGRILYSHTLKNHNRAGQCFRLAARAVSRGKTVYSEFYRHIRARSGAKEANVATAHKIARTFYYMLRRRQPFLAPDLQTYLQVQREKDIRRLQARAAKFGFRLQLAEVS

SEQ ID NO: 49752 - protein, 344 aa, unidentified
MTYYAGLDVSLRSTNICVVDDQGELFAEGKTDADVADIVYFLDALDIEITEVGLEAGTLTQYLTYGLQFAGYEVVCMEARQVKAALSAMRNKTDKHDARGIAQLLRSGWYSRVHVKSMESHRVRALLTSRRAVLAKCIDLEQEIRGIFKIYGIKLPPRLGHGGFDPKVRPLIETDEVLSLSLLPVLDARLVLYRTFRELDNRTRKLALSDPICQRFMTAPGVGYVTALTFKAGVDDPARFKRSRTVAAHFGLTPRRFQSGELDLEGHISRCGDAGVRSTLYTAANALLTRSSKWSSLKAWGIQLAKTRGHRKAVIAVARKLAVILHRMWIDDTQFRWGTEAARS

SEQ ID NO: 49753 - protein, 335 aa, unidentified
MEFEFFIGIDVSKNELDFSVQQGKYFLFHKEVINEPEAVKTLLKELSNLEGFSLSKAVFCMEHTGIYSNHLLSCLYQKQANICLESASQIKKSLGNLRGKNDKVDSQRIAAYAYKNRDDLRLWAPRREQVQQLAHLSSTRSRLIKAKKMLKTPLKEYGSFVKKKAVNQNTHVCNQALNGIEASLQQVEIAIRAIVHADPELKRLFQLITSVVGIGKVIAIQLIVTTNEFKNIDNAKSYACYAGLVPYLEESGIFKGKGRVSHIANKKVKTLLHMAALVAIQHNGELKLYYERKINLEKKNKMSVINAVRNKLVQRIFSCVNQNRVYEKNYLKLVV

SEQ ID NO: 49754 - protein, 357 aa, unidentified
MEGNQESSDRRIVGGVDTHKDLHVAAVVDEVDRVLASQCFATTRHGYKQMLAWMRTFGSLQRVGIEATGSYGAGLLRYMQKAGVEVLEVTTPDKHDRRKRGKNDDLDAQNAAHAGKRTVTPKSRDGMIESLRVLKACRKTAVAARRVALQMIQNTIVCAPDELRETLRKMTRMQLIRTRAAWRPDLTDYRNVASAYRITLKSLGRRYLELHDEIADLDTMIVAIVDELAPALVARNSIGHETAAQLLLTAGDNVQRLRSEASFAALCGVSPVPASSGKTTRHRLSRGGDRAANSALHIIAIGRLRTDPRTQAYVAKRITEGHSKLEAIRCLKRYIAREVFSLIKQRSQERHPAPTAA

SEQ ID NO: 49755 - protein, 309 aa, unidentified
MEHFVGIDVAKDRLDVHIRPGGEVFMVARNGSGLAVLVERLQTLAPALVVLEATGGYETVVASALAAAQLPLAVVNPRQIRDFARATGKLAKTDRLDAAAIAHFAEAVRPPARPVATAEAQALGELVARRRQVIEMIIAERNRRRMASQRRVIRAIKRHLALLQAELSELEGDIDGAIRNSPAWQADADLLASVPGVGKATLRTLIAELPELGHLNRRKIAALVGVAPVNRDSGTMRGRRTIAGGRPAVRTALYMAALVASRANPVIAAHYTKLRTAGKTGKQALVACIRKLVVILNAILRDRKPWIPA

SEQ ID NO: 49756 - protein, 310 aa, unidentified
MDAIYVGIDVSKDRLDVHVRPGGEAFFVARDGKGLEELIDRLRAIAPALSVVEATGGFETIVAAALAGAGIPLAVVNPAQIRHFAQALGKRAKTDKIDAEVIARFAEATKLMPRPLPDEATRLLAELVGRRRQIIEMLVAERQRERHATNVRVRKSLARHIRALEKELPEIDGDIGGLVRGSPVWREHEDLLVTVPGVKSITARSMLAEIPELGRLQRREIASLVGLAPFVRQSGAWKGKARISGGRTAARTALYMAALSASRHNPVLKAFYQRLLHAGKPKMVALVAVARKLLTILNAMIRDKAAWQHA

SEQ ID NO: 49757 - protein, 326 aa, unidentified
MNDVGIDMAKESFDATLLRADEPAEHGQFKNNRSGHKQFLKWLKRRVTEFETVRAVMEATNIYWEALADTLHEQGLKVSVVNPAAIKGFAQSQLQRNKTDKIDSRVIAHFSRQTDPTVWRPPLPHQRKLRALVRHKQALIKTRTQQLNRLASCNDDDVKSSLQDLVSTLDQQLDHLQAKIEALIDDHDDLRHNHQLIASIKGIGSDTAALLLAEFYDLEHYTSAKAVAADAGVTPAKFQSGTSVRRKAKMSRIGKASVRGSLYWPAQSAIQWNPLVSRLAERLRQRGKPFKVILVAAMRKLLHIAFGVVKNNTPFDPNFGHLSPAF

SEQ ID NO: 49758 - protein, 387 aa, unidentified
MCFIGIDVSKYKHDCFIATEAKSIKAFQFDNNRLGFDLFLTTLKSLDQSQEIRIGLEATGHYGTNLKQFICASGYTYLEFNPYLTHQFSKAMSLRKTKTDKVDAKTISSMLGPVDYKTLHTSFYHINELKQCVRYRDLKMKLRSKIIVELTNILDRTFPEYKTFFNHRLPGSAMFILKRFKSRSRIARFKQTDYDSINSYSKGKVTNVKFQKLKLLAMNSIGYETDTDILLISESIQSYECLSSTIETIENKIIELMKNIPQTLTSIPGLSLISAANIIGEIGDFRNFSNPAQVISFAGLDSSVNQSGTMETRGHLVKRGSGLLRMTLWQVTFSALQFIPTLYEYYLKKKAEGKHHKVALTHCTRKLTRTIFNLGLNQQVFDQTQFR

SEQ ID NO: 49759 - protein, 343 aa, unidentified
MHVNTIGVDLAKNVFQVHGVDSAGKVVITRQLRRKQVLEFFSKLPGCLVGLEACGTGHHWAREISRLGHTVRLMPPSYVKGYVKRSKNDAADAAAICEAVTRPSMRFVPIKSTDQQALLMLHRTRDLLIRQRTQLINALRAHLAEFGLVAETGREGLAQLGAIITDESKHEALPSAMKQALQAIVDQLAALELQVGGLDRAIHAHHRANDMSCRLETVPGIGVIGATAIASSVADPGGFKSGRDFAAWIGLVPRQHSTGGKERLGGISKQGDRYLRRLLVIGATAVVRQARLHPQKHPWIIRLLAKKPAKLVAVAVANKMARIAWAIMTKGGYYRAPELAAAT

SEQ ID NO: 49760 - protein, 337 aa, unidentified
MNIVFLGIELAKNVFQLCGLSQASKPVYTKRTGRKELLQTLANIPACLIGIEAPTGAFYWQREFEKLGHKVKVISPQYVNPFVRGQKNDGNDAQAIAVALMQPTMQFVPPKSPEQQNIQALHRARQRIVNHRTATVCQIRGLLLDRGIPIGSAVSRARRAIPLILEDAENGLSSRMRRTIAELYDLFNDLGRRIHFFDKEIETVFRQSEACQRIAKIKGIGPKTATAVVAIGKGTEFKNGRHFAAWLGLVPRQHSSGDRQVLMNMTKKGDKHLRTLFLHGARAVVRVATNNSDGHMNQWVNQLKERRGFNKTTVAVANKNARIIWSMLTNETGYQVV

SEQ ID NO: 49761 - protein, 346 aa, unidentified
MSTVSFEQVILRGCGLDVHKDVVVATISGEGLSTETRSYKTFSSSLTELKEWLLSNGITHAAMESTGVYWKPVYKVLECPRMKVWVVNARHIKYVPGHKTDKKDSAWICKLLLAGLLKPSYIPEREQRELRDLTRYRNKLIQHVSSDKNRIVRILEDCNIKLSSVMSHLDGVVATKLIDILIDKGHVTMDDIACVYHKRLEASPELLYQACEGFIEPHHTYMLQTIRKDIEQTESIISDLTSRIKEVLSPYENVIELLRKIPGLDRKTVEDLIAEIGVDMEVFPTEKHLASWAGICPGNNESAGKKKWKNHSWQQTVESRYYGGSLGSHPYQEHILQRTLPPFSRP

SEQ ID NO: 49762 - protein, 394 aa, unidentified
MNKENTQARSRVIGLDLHPSCFSASAFYGTSVQNAEKDWTHDKVELPQLSRWAKRHLKPSDIVVMESGSNSFECCTRFIELGIQAVVLESCSVGKIGESYLKTDIVDSEKIAKVYLSGLAKEVWQPDDVCKERREILAMYQRATRDCTRTQNRLTGWTTQHGLQRPKGMTWKSDKAYGWMLRQRAWTSSQRMLVDSMFEDLRHAHKKKKRLESHMAEDLMKSPAWMKVLQICGIRHITAFALAAIIGDISRFRNPKKLVSYFGLNPKVNESGINRKSGRLAHNGRKDARHFLVQGAQAILKLDPATNRWARWGQRLAYRKGKPAACIAVARKMLTAVWYLLRGFKPEVKEATSHITTKLGKIAGAIGAQRLPEIGYEKRSVFIEEKMKYVLGAT

SEQ ID NO: 49763 - protein, 310 aa, unidentified
MMDATYVGIDVSKDRLDVHVQPTGEAFAVARDGEGLAALVARLTPLSPRLVAVEATGGFEMTVAAAVAGAALPLAVVNPAQVRHYAQALGRRAKTDALDAEVIARFAEATRPEPRALPDAATQALAELVTRRRQIIAMMVAERQRAARLPKRLARSCERVVRVLEKELAALDRDIDATVRGSPAWRATEDLLASVPSIGEVTARTLIADLPELGTLDRRQIAALVGVAPFTRQSGQWRGKSFIGGGRASVRAALFVATMSAVRHNPIIRAFRQRLLAAGKPKMVAMVACMRKLLTILNAIVRDQKPWQSA

SEQ ID NO: 49764 - protein, 501 aa, unidentified
MSSGTALRSPTKDETGLGLGYESAAAAVCRSEVDWCIKPGIEFGRGSCAFHEVPLAPSGATRAVLRFPLIEGPPPPSARKETTVELKYERCAGLDVHKETVVACVRVATGGGKANHEVRSFATTTRALLELSAWLGSCQVKAVAMEATGVYWRPVWHVLEDEFELTLANARAVKGLPGRKTDVNDATWLSDLLAHGLIRGNFVPERPMADLRDLLRTRKQFTREKVRHTQRIQKVLEDANIKLDSVISNVVGVSGRRILRAIIEGQSSEAFLASLGSDRLKATKKDLEDACRGFLRDHHRLLLRVELDEVEHIEGVITQLEGEVAKLLEPFRGAVEMLMEIPGVGELAARTIVSEIGTDMKRFPSDAHLISWAGLCPRSDQSAGKQRSTRIRDGAPWLREVLVQCAWSATRTKGTYLRAFFYRLRARRGPLKALVAVARTILQSAYHMLRTGEAYRELGETYLDALHQKRSVQHLVQRIQKMGYSVNITELPAAAAVGSFS

SEQ ID NO: 49765 - protein, 366 aa, unidentified
MSSVTPAAGPIHLGMDTSKNTIVVGILMPGDEVPVIDRIWNEEGSVRHLVSRLGDPAALRACYEAGPCGFELHRLLASMGVACDVVAPSLIPRRAGDRVKTDRRDASRLARLHRAGELTPVRVPSAAEEAVRDLVRVRAALLADRKRAQQRLTAMLLRHGRVWRSGSSWTQAHEQWIAGQRSGEPALAAALAHYRAGLDTRRAELDAIEAELAPWAGREPLAGTVAQLGCYRGIAELHSLALAAEVAGWRRFPSARAFMGFTGLVPGEYSSGDKTRRGSITKAGSEPVRTALVEAAWAYRFKPAIGVTLRRRQRDAKPDTLARSWKAQRHLHAKYKAMTARGKPPAVAVTAVARELAGFVWAEMTS

SEQ ID NO: 49766 - protein, 344 aa, unidentified
MQITTIGLDLAKSVFQVHGIDAAGQVVVRKSVRRAQMLAFFSKLPPCLVGIEACGTSHYWARELIRLGHEVRLMPPAYVKPYVKRGKTDAADAEAVCEAVTRPTMRFVPVKSPEQQAALSMHRARDLLVKQRTQLINMLRGLLAEFGVDIPKGLERALLMARQVIEGNAPEVPIEAARIATTLSQQALDIHVRLRQIDRDLAIWLRGNDVARRLMTIPGIGTVGATALVASVTDPLQFRSGRQFAAWLGLTPLQKSSGGKERLGRISKMGDKYLRKLLIVGMTSLVRRAKYAPDKIDPRLADLLARKPTRVATVAMANKTARVIWAIMARGETYRTGHQPALAA

SEQ ID NO: 49767 - protein, 398 aa, unidentified
MLSIGIDVSKGKSTVCGMKPGGEIVYTPFEVQHTREGMSELVSLLRGSGEEVRVVLESTGSYHCPVVAALLENGIFVSVVNSLRMKRFCSQSIRRVKTDQIDAMQIALYGLAYWQELQPTRLPENTYRELQLLARQYYQMTSLLIKAKVDFNALCDQVLPGMQELMSDHAGRHKLSDFVLRYHHTAHILKMGETRFRKDYCKWAEKKGYRNHERMAVLIFATAQNGIPVLPDAPSTQIVITEAIRVLHTVEASRDAILTQMQALAKTLPEYSLVREMPCIGDTLAPRLIAEIGDVRRFHSKRALIAYAGIDAPPYQSGKFSANNRHISKRGNRYLRKTGYEVMQSYVMHKPANDPIFTFIEKKRSEGKSGKLAMVAGLNKFLRVYYGKVTELYRSLPQ

SEQ ID NO: 49768 - protein, 385 aa, unidentified
MGNQTFIPRDYDVFAGLDVDKRSISVTFTDHHGFLKSLHMPYSVEHLVNHVRKHFPNQKVAFAYEAGPTGYGLYDGLVAKDYRCLIASPSMIPKAPGQRVKTNRLDSQGLSQNLRGGQLKSIHVPSPVYRELRHLTQLRDTFVSEMVGMKQRIKSLLLMEGIEFPPAPAGSQWSFIVKNKLRKLPCSSTMRFKLDQWLDSLEFNEKQVLKTTREIRRFCQNDPELSQCIKYVMSVSGIGWIVASQLLARIGDWRQLTNIRQLGGFLGLVPTEHSTGERTDRGSITHTGDERLRSKLIQASWSAIRKDAELREFFGSICRRHPRRQGPRVAIVAVARKLSVRISVVLMKQRPYGVREKVHSAPLTQEETSPQGTTRRRREPGEKNS

SEQ ID NO: 49769 - protein, 348 aa, unidentified
MNRTANIVGLDIAKSVFAAAGIDAHGNVAFKRIVSRGEVLNFFINIPKTAVAIEACAGSHYWARELQKQGHEVRLIAAQHTRRYVAGNKNDMNDAVAIAEARSRAKTKYVPINTTAQQDLQMLHRTRQSLMVDRTATINRMRAFAAEYGQVFAVGVAKFRVQFHDWLADDGNGLSGSAIDTFRELHTQLLDREARIEVYDQRLNQAVKDDARAAQLMAIPGVGKITATAILAAVSDPRHYTDGRDFAANLGVVPRESSSGGKQRLYGINKRGDAYLRTLLIHGARSALRCAGDKPDKMLRWASKVSERRGYNVASVALANKMARVVWALLAHGREYVPVWSKSATTPA

SEQ ID NO: 49770 - protein, 341 aa, unidentified
MQITTIGLDIAKNVFQIHGIDAAERVVVRKQLRRGQVMKFFAALPPCLVGMEACATSHYWARELTKLGHEVRLMPAKDVKAYVKRNKNDAADAEAICEAVRRPTMRFVQAKSAEQQGRLMQHRARDLLLRQRTQVINALRAHLAELGIVAAQGHEGLKQLLTIIADERDERLPIDARASLIVLAAQLQALHTMIGSIEKRLTVQHRANEASKRLQSIHGIGIIGASAIAATVTDPKAFRSGRDFAAWIGLVPREDSTGGKRKLGPISKQGDRYLRRILVVGAHSVLRRAKQNPEKYPWLTQLLARRPFKVVAVALANKMARIAWALLASGGHYRPRLGTAA

SEQ ID NO: 49771 - protein, 364 aa, unidentified
MAISGLSPTELTMEAPIIMLHIGLDLSRKRLDFDLLCEDGSRLERGAVPPDADGLRGLARRVGVFGEPVCAAIESMNGARFVHDRLEELGWQVEIADAQKVKGLAPLACKTDAIDAWVLAELSRRDLVPAIWLADPAVRAERERARWRLHLVRHRTSLKNRVHATLLVFGVPCPVSDLFGARGRGLLERLELPNPWAQTVNASLALIEDLDEQVRSCERELRGLGADHEYVPLLMSAPGIAWVLGYTIAAEIGDIKRFRSPSKLCGYTGLCPRVYQSGERDRRGSLAKNGPKYLRWAMIEAATHAVCSPVYRERYQRTAKRLGAQRGRKVARVDIARKLTEAIWYMLTRNQPFAPAGATTPLAA

SEQ ID NO: 49772 - protein, 385 aa, unidentified
MQERKVITMITHYIGIDAHTTNYTLSTASDFEEKPYNTSKCAAKLHYILKYANTLCKKDKIQKENILLGYEAGCLGFKLQRDLNKEGFNCIVIAPSSIPGTEMNRKRNKKTDYRDAEAIAKALRNNDYSAVATPDEQDEAIRDYIHEREAQKKTLKAIKQRIGALCNRQGFYYEAGGYWTKKHLDWLKSLTFPNEFFREVLDSLLLEYEHVTEKIETMDKRIEAFAEMDKYRESVHKLVCFKGIKTLTALAVIVEVGDFARFMKAKNFVAFLGLSVGEQSSSTDHNQGGITKQGNCFIRRLLTEAAQCFSRVTSSKSKALKERQEGNSEEVIAYADKGNERLRKRYYHLIIHNMKNPNKAKTAVARELACFIWGMMTDNIHTVLS

SEQ ID NO: 49773 - protein, 472 aa, unidentified
MGKGSGISRSDRRRNARREHLRGLLPRDGAVLGIDLGDAKQALALVDHDMRVLWRRSPRCAAHHLGGPIAEAVEAAARAGMSRLTVACEPTGSRWMQVQRLCREAGVVLVCVQPLVSHIAREQEDYTGHKRDEPDAVLIARLASELHCYVPEELDESWAFLRQLGRRRAQLVTAATASVLRVRDFLSVAWPSAVTAAGNPFKSLTWLAALEVATSRCGGDPARLAAAGEEEFLALVRDAVPGWGTSRPDRRIARKLLALADDPAAVGWSRRGLFRRIRDELGDLQRARRQLKETEADMAALLAGLGLGRLGDIPGLTLVGAAVILAETGDPRRYETSSSMVKHAGLSPSDNASGASEGASRISRRGRPSLRVAAWRATFAMLNWNPVMKAKYEALVAGAEESARAAAGSARPGSARAAQADRSARAARAKARVACAASLLRWIYFMTVHDADWDPVAASGGHLAAREAVQAA

SEQ ID NO: 49774 - protein, 342 aa, unidentified
MHHAAIDLGSRESQICIRQPDGAIVEERKLPTRKLTELVKTWPTSRVVMEASAEAFKIADAALAAGHQVRVVPGKLVRLLGVGDRGVKNDQRDARQLSQASWQTDVPSVHIPSATARELKSICGARDVLVEMQRNVSNNVRGWLRTQLWKLPGGKMVSLPERLRTHAQASHRELPEHIERQLTMLTQVTEQVKAANQQARRLAADHPVCRRLMTVPGVGPITALRFVAAIDDPSRFSTAHRVQSYLGLTPGENSSSMCGHRTGITKAGPSELRRCLVQAAWSAMMVRRTHPMLEWARQVAERRSRPVAAIALARKLAGILFAIWRDGTTYEAKRAAHASSPM

SEQ ID NO: 49775 - protein, 428 aa, unidentified
MAADTTLTSQTWLVAIDIGKAFHAVLVEGGDGKRQQFRMANHGEDYDRLVVFLRGLPGPARIALEPTGDFHRTLAHRLLREGFSVVSVSSVAGARYREALFNSWDKNDPKDAHVILQLLKHGLVQHYHDPLLAGDHDLQELAKTYHQIVLARKRLADSLLNHYLPLYFPEMGRYWESTRVEWFVAFLEQFPTPAAVQALPKEAFVRAAWAVVGRKVNKQAKLEELYALAQRSIALPVAVDSVAIETFRLQLAQLRRLAELRQTLEARAHALLKDRADFQRLCSLPGVAAILALVILAEGGDLRRFPHHRQFLKYCGLDLAKCQSGQFRGRERLSKRGNARLRMAFWMAAQRAVRMNENSFRDKYERYTRQDPGNPDVRRKALTAVAAKMARVAYAIVKHDQPYHGYHEHALPSGSIPLKRAVGARATP

SEQ ID NO: 49776 - protein, 323 aa, unidentified
MNKDKKIFGVDISKDFFDVVDQSGKHDQFDNDAQGFSNFKKTLPASALVVMEATGYYHFLLAQYLSANGIDCAVVNPLSVKRFIQMKLAKVKTDKADAKAICEYAMANEVSIYNPLDSVQSECLQLFRLIHNFKKQLTAVKNKLHGEEVLGRPSKTVYHSLNRTKKHLEKELNQLEKKVLELVKKEHQHQITLLKSIPGLGIKTILFLIVVTDGFTKFENASQLCSYAGITPTERSSGSSVRGKSRISKVGNKRLRNLLFMCSFTACKHNKACKEQYERIVNKGKSKKLALLAVSNKLLRQAFAIASSGISYDAKHRSVLAVK

SEQ ID NO: 49777 - protein, 405 aa, unidentified
METLATGCSLGQLICIQCPDGSRKFIVIDSSPESIDEWVIDLRNKYKCHIHAAVELCRGPIVYALQKYNFITIFPVNPAMLAKYRETFYPSGAKDDPTDAEFALDLMIKYPNKVKPLKLASDPMRKLSFLVEQRRRLVDDRRRFSNRLINTLKQYYPQLLTWFSHRDTKLFMDFIMRWPSLQKLQRSHENTIRKFFHSHGGNAVTLAEKRINLIKKSTVLTNDNAVLESHELLSTTLARQLQTVISSIRDFDIGIEKIYREMPDAELFNSLPGTGACLAPRLLVAMGENRDKFNTASEVQMYAGIAPVTERSGKKCWVHWRWQCSKFLRQSFIEWSEKSVSRSFWAGLYYNQQRAKGSSHQAAVRSLAFKWIRILFSCWKSQKVYSEAKYLQALHDRKSSLITNI

SEQ ID NO: 49778 - protein, 352 aa, unidentified
MDAKTIAVDLAKDVFEVAIANRADRIVDRQRLTRRQFEGLVSTLPAGVTIVMEACGTAHYWGQRCRAQGADVRLLPCQYVRPYVRRNKTDRTDAEALLEANRCGGIQPVPVKTIEQQTLQTLHRVRRQWQRARVARINGLRAALREFGLPVTRGVRAGRRCIATMLADPEGPLPGLVQTALRLVLDEIRGLEQQIRVIDRELARVARTHPIAQRLQQVPGVGLVTATALVGTVGNIHAFRRSRQFASWLGLTPRESSSGDRRYLSGISKRGDVYLRCLLTHGARSVLLAAHRTLRTKPDRASPLHVWAHALAGRRGYNKATTALANKLARVIWAVWAHDTDFESSRSIAVAH

SEQ ID NO: 49779 - protein, 361 aa, unidentified
MFHLSSFTKKMFVMATSIVKQSVGIDVSKKELSVCFSNLEQGQRVRILSTKTFPNTGAGFKKMDAWIGSLRKDASVPLCVLMEATGVYYEDAAYFLKARQHRVVVLLPNKGKAFAKSLGYKSKTDAIDAKILAQMALEREMPEWEPLSPKMLAIKRLCRERVAMQEHKTAAMNQLEAMKSAHESGKDSLKRCGGLIKFLEKQIREVEKAVEQEIAADPVLKEKFDMVCSIKGVGAVTAATVIAETNGFALIRNKAQLVSYAGYDVVENSSGTSVRGKTRISKKGNSHLRRALHFPALCAVKYVPEMKDLYQRVFDATRIKLKGMVAVQRKLLVLIYTLFKKGVAYDPECYLKTQAVPSPTK

SEQ ID NO: 49780 - protein, 468 aa, unidentified
MATIKKSTSSSSRRGRKQQDRAKLKPHDRTLGLSVVHPKAAGIDVGNEEHYVAVPPHLDAEPVRVFGCFTADLNKLADWLQQCGIETAAMQSTGVYWIALYDILSERGIQVFLVNARDTKNLPGRKTDIQECQWLLKLHVYGLLKNSFRPEEEICVMRTLWRQRQQHIGDASRRIQHMQKALTQMNLQLANVISDISGWTGQAIIQAILQGERDPRELAKLRDPRIQASTQQIVHSLEGNWRAELLFVLKQEYDSYQGLQRQIQECDQELSKHFQTMRQKADPEELEEVPRNKRPHGNVPENLDLRQELYRITGVDLIRIDSLNVLTAQTVIAECGYDMSRWETEGHFASWLNLAPRNKISGGKIIGRDRRKVVNRAGQALRNAASTLLRSNSYLGAQYRRLRSHLGAPKAIKAMANKLARILYRLLRFGQQYVDKGTQFYEQKYRDQQIRMLTKRAAGLGLQLVQSA

SEQ ID NO: 49781 - protein, 338 aa, unidentified
MAIVTVGIDLAKNVFAVHGVDESGKPTLVRPEVTRAKLLELIANLPPCLIGMEACSGAHHWSREFAKFGHTVRMMAPKFVVPYRMSGKRGKNDAADAAAICEAVTRPNMRFVPIKSIEQQSHLFVHRARQGYVEQRTALINRIRGLLSELGIVLPLKAATVRREAHKYLEDLPGWCNTVVGDALGELTRLDERIKQYDKYIEQAAMEDARSKQLMRLGGIGPTTASAIVATVGKGHDFTCGRQFCAWLGLVPGQYSSGGKPRLGRITKAGDPYLRTLLIMGGKAVLAAAKNKTDPVSRWAISVQERRGYWKAVVAIAAKNARMCWAMLQQGDAFKMPA

SEQ ID NO: 49782 - protein, 338 aa, unidentified
MNIVFLGIDLAKNVFQLCGLNQAGKPVYTKRTGRKELLQTLANIPACLIGIEASTGGFYWQREFEKLGHKVKVISPQYVKPFVRGQKNDGNDAQAIAVALMQPTMQFVPPKSPEQQDIQALHRARQRIVNHRTATVCQIRGLLLDRGIPIGSAVSRARRAIPLILEDAENGLSSRMRRTIAELYDLFNDPERRIHFFDKEIETVFRQSEACQRIAKVKGIGPETATAVVAAIGKGTEFKNGRHFVAWLGLVPRQHSSGDRQVLMNMTKKGDKHLRTLFIHGARAVVRVATNNNDGHMNQWVNQLKERRGFNKTTVAVANKNARIIWSMLRNETGYQVV

SEQ ID NO: 49783 - protein, 368 aa, unidentified
MKKNNTCPKSPKRSKNRQRSITIGMDLGDKTSHYCVLDSEDEMKREGTVATTKKGMKQRFGSLPKCRIAIEVGTHSPWVSRLLSSFGHEVIVANARQVKLISASSRKDDRLDAQTLARLARMDPELLRPIRHRGEKAQADLMQVRVRAALVDTRTSLVNTARGLAKAMGERLPKCDADQMGVEKMQGLPAVLVEALRPLLETVESLTKQIKASDQKLEQLAGRDYPETELLRQVSGVGSLISLTFVLTVEDPTRFRKSRDVGCYVGLRPKRSESGQSRPQLGISKEGDVYLRKLLVQGAHCILSQKSPDTDLKRWGLKLAGKGNKNAKKRALVAVARKLAILLHHLWVNGEVYEPLRNSRQLEQTAVA

SEQ ID NO: 49784 - protein, 387 aa, unidentified
MAKQNDLSRCLVTLEQDATVIAVIEMGQSSWLVAGIVPGLERNPLKKLSPDPDALLQLLYRWQKEAVQAGRAIKRIVVAYEAGRDGFWLARWLRAREIEAYVIHPSSVPVSREHRRAKTDRLDTELLKRAFLGWLRGEPKHCSMAAIPTVADEDTKRPGRERQSLVGERTRIINRVKANLARLGIRGFRANLAQASSRLEALRTPEGIAVPANTRAELQRDMDRLRFVKQQIKEIETTRAKRLAGAPNEQRHAMVRLLAQVVAVGIETADMLVQEVFSRNIRDRRALARYAGLTGAPDESGKKRRERGLAKAGNARVRRGMIELAWGHLLHQKASALTEWYRKRTSDTRGGTRKTMIVALARKLLIALWRLVTTGETPAGLLLRPAV

SEQ ID NO: 49785 - protein, 410 aa, unidentified
MEVLVSRGCGLDVHQATVVACLLTGEPGRLPRKQVKTFSTMTSGLIELRDWLKAAGCTAVAMEATGVYWKPVYTILEGHFELVVANARHIKAVPGRKTDVKDAEWIADLLRHGLLQPSYVPPPELRELRSLLRYRVKLVNARSGERNRIIKLLESANIKISSIVSDVFGVSGRLMLEALKRGHATPEEMAELAQKRMRSKIPLLKLALDGRMEAHHRQLLSLQLDRLDRFEADLRQLNAKLEVKLNPYERQMELLDGIPGIDWVVAATVIAEIGVRMSQWPSVGHLTSWAGLCPGQNESAGKRGKSSVRPGNPYLRSALVEAALAVTREKNCYFREKYYRLKARRGHKRAVVAIAHKILVAIYHVLTSDTPYQELGADYLEKLEPERLKLNLVRRLERLGYRVNLEPNRG

SEQ ID NO: 49786 - protein, 341 aa, unidentified
MRKFIRIGIDLGKNYFQVHALESEDRKATTRKLSRLAMRKFFSETDPCLVGMEACASSHYWARELLAMGHDVRLIPPIYVKPYVKRGKNDAADAAAVCEAMSRPGMRFVPVKSEENQATLMLHRARQLLIKQQTMSVNALRGHLAEFGIVASKGIGRVDELVEKAENDATLPSAATAALKLFVQHLAAIGASIADLDRRISSAHAQNGTSQLLAGIPGIGKMTASAIVASVPDPNVFKSGRDFSAWLGSTPRQNSSGGKEKLGSITKQGNAYIRRLLVLGATSLLNQVGKRKGALHDWVVALLARRPARLVTVALANKLARITWAIMTTGESFRIEAFAKA

SEQ ID NO: 49787 - protein, 326 aa, unidentified
MSKKKLDLCLRSNGKDILYDVIPNDLSSIKSWLTRTFEKFFLSEDSLVVCAEHTGQYTYPLVCATKSIGVYLCLEDAAKIKYCHGIPRGKNDKIDACRIAMYAERYNDCLQPYTASELIIQKLKNLSTERSMLVADRAKYQSQLKDQVDYMEHSIYIAKCNRVEGIINTFTDYIAQIDLEIKELINQAPVIAHQMDLLMSVDGVGERVALKMIMETDAFTSFTDPRKFCCHAGVVPFVYVSGSSQRSKNRVSNRADKSIKHLLHMAALSVSQVKNSPLKKYYDRKVEEGKNKMSVLNAVRAKLVTIMFAVIRADAFFSRNYHNSLA

SEQ ID NO: 49788 - protein, 347 aa, unidentified
MKDYTHFVGIDVSKGTLDVMLWHRKQGTFDKTALHIANDTPGHQKLSQWLCEQEAPLETTVLCLEATGRYDDVLLENLTLWGWICALEKTTVLQKVKPDHHRKDDPYDADLLAEYAYRYQDKLTLYQAPNPLIEQIRLLYGERRRLVSHRAAVKQLQAEQGYNRSGRSNQAELFAQRLWKKQCAFYDGQIKALEAELQTLIESDQDIGHRYEQVKSIAGIGATTAMKWLCLFYGQQQLHARRIASRFGFAPHGDCSGTSRNRKSRSTGHGQSEMRKLMTMCARSAGQHHEKYRRYKARKLDEGKASQLVTNNMINKLIRVVCAVWNADTVFDPDHVSRFAQNAIASP

SEQ ID NO: 49789 - protein, 447 aa, unidentified
MAQRKRPTTQSAISLTHPNAAGIDIGSAAHFVAVPPDRDNEPVREFASFTADLHRLADWLDACGVDTVAMESTGVYWIPLYELLESRGFTVMLVNARHVKNVSGRKSDVLDCQWLQQLMSFGLLRGAFRPAEQVCVLRSLSRQRTMLLRSQGRFVQHMQKALTQMNIQLANVISDVAGETGQKILRAIVAGERDGQVLAKLRNARIRASEDEIAKSLQGSWRSEHLFALKQALDAFDFCGTQLAECDAQVQAQLQALHVREDEPAQGKKRGRARNAPKFDLRTQLFQMCGVDLTRIDGIDVTTALVVVSEVGADMGKFPSDKHFASWLGLCPGTKITGGKVMSGKTKRCANRAAQALRLAAAALRSSQSALGAYYRRMCARMDKPKAVTAAAHKLARLIYAMLRHGQEYTDRGQDYFEERYRQRVLHNLAHKAKTMGMQLVPSDNLA

SEQ ID NO: 49790 - protein, 348 aa, unidentified
MKKLDVAYIGLDLHATSSTFGVIDGNGAKCIDQELPTNPKRLSQWLDELPVRHRFLAIEEGPLTQWIAWQLADTVDEVIVCDPKENYLISRSSKKSDVLDAVKLARLLRMGELHSVWHPGQKNDRALFAAAAAHYIAMRREQVRLKHKIKSMFRRWGVLDVTGEAIYRSNGRKDYLKQIDDQIICDQLSSYYALMDQAEQAQQRALKRLRDAGTSYDEITEFQKMPGIGPIGANIFSALVQTPHRFEGASQLWRWSGLGITDRSSSGKPLGYQRLDPSGRTDIKDISYRAWKAGARQTIEPNEVSRFYEKSLIKSNTPTNARLNTQRKVLKVLWTIWRKQVRYNPDLF

SEQ ID NO: 49791 - protein, 406 aa, unidentified
MEAVHERVAGIDVHRMKHVVTILIEQDGVVSSQTREFGGFKRDMRALVGWLQEQRIQQVVMESTGVYWKSVFSHLEAAGIAALVVNAYHVKNVPGRKTDVSDSEWLAQLARFGLLRGSFIPPKDLRELRVVSRHRRKLTATLAGEKNRLHKLLDDAGIKLGGVVADIDGVCARKMVEGLIEGRAPEQLSALGRGRLKSGREVLQAAMDGDLSARHRLVLKMVLDHLRYLEQELAHLDRYLVAAMNPYAWAWRLLQTIPGIDQISAAMIIIEISDDLRRFGSASRLASWAALCPGNNESAGKRKTGKVRHGNPIVRYLLCEAANAARKTKTLFRAKYESLVVRRGYKKAIIAIAHKLIRTIYIVLDRRKPYRDSAFDYEAASVAKNAPRWIRALKKYGYWPQPTPAT

SEQ ID NO: 49792 - protein, 344 aa, unidentified
MDYFAGLDVSVKETSVCIVDDTGKIVREVKVASEPAALLAVLKNPAYCFKRIGLEAGPLSQWLFSALAEAGLPVICVETRHMRAVLKAQINKTDRNDARGMAQMMRVGLYRPVHVKTLRSQKLRMLLTHRKLLLSKAIAIENDLRGTLRNFGLKVGMVGKVKFEARVRELVENLPDLAVLVEPMLIVRRVLREQIVILHRRLLAIVRDDEVCRRLMTTPGVGPVVSLTYRATVDIPARFRKSKSVGAVFGLTCAKYQSGEVDWDGRISRCGDEMMRTMLYEAAQAMMRSKKWSWLKAWAMQIARRRGMKKAIVALARRLAVIMHRIWVDGTEFRWTREQPAAAA

SEQ ID NO: 49793 - protein, 370 aa, unidentified
MGNDTPLFVGLDVHKDSIAVAYAQGQSTDPPVYVGAIGTREADLTKLIRRLQSKTPTLRFAYEAGPCGYGLYRDLTGQGFTCQVVAPSLIPKKPGDKVKTDRRDAIELARLLRSGDLTPVYVPTVDDEAIRDLCRARDAARLTMKNAKLRLKSFLLRLGLHYVGRADWNAAHLRYLAKVVCPTPPQQIVFQEAVKAVDEQVDRLARLEAELRECASAWRLAPVVHALQALRGVQWLVAITIVAELGDLTRFTSPRQLAAFVGLIPSEYSSGPSRRQGGITKAGNGRARRALIEGAWAYRHPAKVSQHIQTRIDGLPKPIQDLGWKAQVRLCKRFRRLVGRGKHPNVVVTAIARELIAFMWAMAKEVPVTA

SEQ ID NO: 49794 - protein, 422 aa, unidentified
MRERVRQLAAFVGWDWADREHEVRLREAGSDQIETRQVAGTPVALHEWAADMRSRYEGRPVGVCIETCRGAVIWALMAYDHIVLYPVNPKSAASFRETFYPSGKKDDPVDADVLLELLYKHEERLKPLDPADPATRSLGILSEHRRKLVHDVVRTTNRLRANLKSYFPQAFELVGELDSPMSCAFLKQWPSLTEVKRVRPATLRKFYHSHGSRSKVRIDARLALLSSAVALTNDIAVVESGMAVTKSLVRVITALVESIGEIEAQQQSIYSTHPEHDLIDSFPGLGPVFGARITALLGSDRDRFASHVELQLLTGVAPVTKSSGGRKGVTTVHRRLKRSKFLHQTIVEWAGQSIKHSAWARAFYDMKRAAGHGHWAALRSLGFKWLRILFRCWKEEIHYDETTHVDALKERGSPVVAYIKAA

SEQ ID NO: 49795 - protein, 470 aa, unidentified
MAAVMIGVDPHKATHTAVAISAAEEPLGELQVRACAAQAERLLAWAAAWPQRTWAVEGAGGLGHLLAQQLLAAGERVLDVPPKLGARVRLLAAGDTNKNDPNDARSVAVAALRSPGVREARPDDHAAVLKVWSKRYRDLGRTRTQVVCRLHAVLCDLVPGGISRPIYAAHAARILQQITPPDAVAAARCELAAAFLEDLRGVDARIRETRKKLATAVAATGTSLTGLFGVGPVIAAAVIGDVRDVSRFPSRNHFAAYDGTAPIEVSSGPRKIYRLSRRGNRRLNHAIHMAAVTQGRHRHSKGRAYYDKKIAEGKTPKEALRSLKRQVSNAIFACLQAGARRAAARAGGPGGQQGNDSVASVAGSHPRRRLFGQATPGPAHHTTTAAGRPVPGPADAGGTAGPSSIAATLPPAQPQVQVERPQRSEDERPGGAARRRPHSAARKATGRGSPVKTQPPKGISHAAKRTDGTS

SEQ ID NO: 49796 - protein, 538 aa, unidentified
MAPYIPGRKNSSRKAKTPRPYLLHKPRGLISQRVQAVGPEHFGVVCVDCAKGSSKYFLADFYGHMRIEPTVVHHTRGDLQAALDRLREARTQHEFRDLVVAIERTGEYHRPVQRAYRQAGYDVRLVHPFATKQFRQPADPGNKTDDNDLNAIFRVVINGFGLIDPVWPDDYQRLQLLRRHRRDLVCKTVELQCQIREKLHAAMPGYAEAFSKDHFWDNGTGMFVARRTGSAQAIRALGADGLERLLAEAKIRFLKNSVHKVLAWAHDAPPAHPDNACLLNIVAALDDDRLEKTRQIRAVERDLASLVVRTPYVLLLAIPGINIVSTADLAGELGPIVHYADANHLTGRAGLVPCRYQSDTVDVQGPLRRCGNRKLRAVLMQAADNLVRHNDYYRARAGRWQALGKDPRWIRVKIAKCFSRLLFAMLTSGQLFRHPCCQDRHYILGKLLEFHTEHATPTAQLQEDMLAACQRLPKNVLADEAKPLTEQLNQLARKRGPQPLTDLITIVLARLRLRQLQSETVRSEDPSAHAQTEEPTSP

SEQ ID NO: 49797 - protein, 343 aa, unidentified
MGVFAALDVSQEETAICLVGAEGEILAEAKVPTCPDAIADWLAKRAADVERVGMETGPLAVWLWNALTKRRVPIICLDARHANAVLKMMPNKTDRHDARGLAQIVRTGWFKAARIKSHEAYVNRAMLTARDTLVGMRVKLENEIRGLLKTFGVMFGKRVGGFKRRATEIITGELAVAPELIPIFEALMHARSEILARIAALDGKIRAVAKQHGTVRLLMTAPGVGPITAMAVTAAFDDAERFNRSSSAGAYLGLTPRRYESGEISRNGRISKSGDRFARKCLYEAANAILSRKLGGPRLREWAQAIAGRTGPRKAKVALARKLAVTLHAMWRTNTTFREAAMA

SEQ ID NO: 49798 - protein, 396 aa, unidentified
MNYLVGIDIGKNKHFFCVMDKDTGELLVDPVSFSNNKEGFDFLINKLKPFSKNSILTGMEDTGHYHFALLKFLLSNAFTVALINPKTTDFTRKMQGGITKNDKLDTLTICDVLDTPERKKQYRITKINSFDLYEQKQLTRHHHNLKEELNVYGNRLQKCIDIVFPEFNSLFKSKYGTVYMNLLRTFGGCAETIANTDIRTIRKCFEIKARGKRISLTPEQLKECAKSSIGISSMAEVIQIKHLINQIELINKQITEIDKKIEEFSVKNNSPILSIPGISHFSGTSILAELGDISNYEKPSQIIKFAGVAPIHYESSQFTAQHSAITKKGSKYLRKTLYQIILSVIHHNPIFKQYYELKISQGKGHRCAQGHCVRKLLRIIYHLLSTGQKFDPALLR

SEQ ID NO: 49799 - protein, 336 aa, unidentified
MIAVGVDTHKHEHLARALDGLGQLLGGLTVDASLAGYTQLVQWLRTLGEDVVVGIEGAGSYGAGLCEYLLAEGITVVEVERPRRKDRRRGKSDEIDAILAAKKVLANDGLSTPRAGGTRQALAALLIARRTCVSERTRLLNQIQALHTTAPVALRERVGEGDGRKLATRLVKMRTRSDRPASEQLIFTIMRDLARRSEELAAQASAYEHELTLLISSLDATLLQEQGVGPISAAKLLVCDAGRLKSEAAFARCNGTAPKPASSGQTIRYRLSRGGDRQANNAIHTIALHRARCDTQTRTYLDRRISEGKTHREAMRALKRHLSRRLYKQLITIPLT

SEQ ID NO: 49800 - protein, 342 aa, unidentified
MGTITTIGLDIAKSVFQVHGIDATGEVVVRRRLSRGRILAFFEKLPRCLVGMEACNTSHYWARELIALGHDVRLMPAQYVKPYVKRGKNDAADAEAICEAVARPTMRFVPVKTPEQQSIMMLHRVRLMLNRQRTQLSNAMRAHMSEFGVVGPVGRMGLERLMAVIADREDLRIPADARVCLEMLAAQLAVVKEQILENDRRIRASARETEVGRRLMEIPGVGPLLASAFVASIADPTVFKSGRDVAAWIGLVPKQHSSGGKERLGGISRAGNRYLRQMLVVGAMAVIRHVERHGTKRRWLIQLLARRAKKVAAVALANKTARTIWALMTNGERYREPTVALP

SEQ ID NO: 49801 - protein, 408 aa, unidentified
MEVLMIFVGVDWAESHHDVCVLDEGGIVLARLKIPDTLIGVRALHELLSRHADEPGEVLVGIEKDRGLIVTAMLAANYRVYALNPLSVARYRERHVTSGSKSDKGDAKVLADVVRTDRHNHREAAGDSENVDAIKVVARAHQSAIWSRQREMNALRNALKDFYPGALLAFGTDLDADDALEVLAIAPTPALGSTLSLSKIASALRRGGRQRNIERTAQRIQAALREEQLRERPAVELAYGKITSAHVAMIRAYSDTVTELEAGLAQDFEQHPDAKIILSLPGLGMVLGARVLGEFGDDPNRYADAKSRRNYAGTSPVTRASGKSRVVLARHARNRHLAAAADQWAFCSLQRSPGARAYYDELRSRGKSHRQSLRQLANRWVGILHACIDQKVEYDENLAWKHRIDLAA

SEQ ID NO: 49802 - protein, 433 aa, unidentified
MVAVMIGVDPHKASHTAVVIGAAEESLAELRVRACQFQAEQLLAWARAWPQRTWAVEGAGGVGHLLAQQLLAAGERVLDVPPKLAARVRLLQAGDTNKNDPNDAFSVAVAALRSPGVREASRDDHATVLKIWSKRYKDLSRTRTQVACRLHQVLCELIPGGVPGQITAGQSAHILGSITPSGAVAAARCQLAAAFTEDLRGIDAAIRDTRKQLATAVQAAGTSLTGLFGVGPVIAAAVIGDVRAVSRFPNRDHFAAYNGTAPIEVSSGGRKIWRLSRRGNRRLNHAIHMAAVTQIRYRHSPGHAYYDKKLAEGKTPKEALRCLKRQISDAIYACLQADARRAAGAKSPGGQRGNDSLTSAAGSHPQHQLFGKATPGPATHPTAPADTAADPLPAAFPAQLPARASGRPGPGTGKARPRSGARRASLTRPSASR

SEQ ID NO: 49803 - protein, 356 aa, unidentified
MIPWSSRPSLSEGRHTPLLKQPEQLPGPEEPVSARPGVGGLSLSPKQIFVGIDVSKDSLDVAVLPDGQAWSTANNETDIPLLVERLGQLAPTLIVLEATGGLEVLVASALGAARLPVVIVNPRQARDFAKAMGILAKTDGIDCKVLALFAEKLRPEPRPLKDQQLQELNALLSRRNQLVVMHTAEKNRLTSSPKSIRADIQEHIDWIEKRIKDMNNTLGRRIKESPLWREKDLLLRSAPGVGPVLSTSLITGLPELGNLNPKKISVLVGVAPLNCDSGKHKGRRMIWGGRASVRAALYMGTLSAIRHNPVIKAFYARLIAAGKENKVAITACMHKLLTILNAMIKNSTPWNPKMSN

SEQ ID NO: 49804 - protein, 397 aa, unidentified
MIAVGIDVSKSKSTVAILNGDGSIRAKPFDVHHVADDLQALVNYIKGTSEPPTILMEPTSHYHYPLLKAFQEADLSVCLINPYQMKKYGDTELRKAKTDKRDALRIAQYALEKSYTLVPYTPTDQKYEDLRFLSRQYTQRISTLTVAKVQLLNLLDETMPGITTILPLKSRDPDNCVLLRFIKRFKSFDVIRKMGKSRFLDSYQVLVKKTKDYYAGAKGLAIYELALNSITTRGENPLSSMAQDQCVDLVSTSQKAADEINLQMRIIAETIPEYKVLRSMAGVGDRLGPIILGEIGDVRRFHSGKALNAYAGNDAPPYQSGQFESRNRHISKRGNPALRKACFEVMQALKLTKPQDDPVYLFLLKKEQEGKPYNVAKMAAVNKFLRIYYARAMELYK

SEQ ID NO: 49805 - protein, 336 aa, unidentified
MTNVALFVGLDYSESGVQVCLLDRQGRQVANRLCPNDWRAIAGFAAQHGTVVQAAIESCSGAANLAEELATRAGWSIHLAHPGYVERMKQSPDKTDYQDARLLADLVRVGYLPRVWLAPAVVRDLRQLVRYRQQLAEQRRATKLRVRALLREHRCQAPAQLNPWTKGWLRWVQQAAQVGEQSRWVLNKHLAELVRLTGELGEVEQRLTEATANDALVKRLRELPGVGPVTAWVIRAEVGRFDRFTSGKQLARFSGVSPRNASSGNRQADAGLIKASSPLLRAVIIETAHRLPRQEIRWAKFRARLQAAGKKGSVIAGAIGNRWVRWLYHQMKEVAA

SEQ ID NO: 49806 - protein, 433 aa, unidentified
MKVKYEDRLKQKLLAITPDTLVVGVDIAKNYQWARFVDFRGIEHSRSFKFKNRKGGFEIILARIQEICKKENFAKVVVGMEPTGHYWKAFANWLEKQDGITVVLVNPYATKQAKELDDNSQTKSDKKDALTIAKLVKDGRYFELYLPHDIYAELRGLSTTRTGLNKRKNALKNTITAILDEFFPEYEEVFKHPLTGKASRHILKTCPFPKSILELGEEGVTAEIKKAVKKTVGRKKAGQLVEAAKGSVGVDYGEEAARLKLRLMLEELELLEKQTEELESQMESALEKTGYAEFLLSIKGIGVVTLAACLGELGDPTRFESPRQMSRMAGYNLVEDSSGKNKSGTKISKRGRKNLRSVLYQMSLTMVATNDEMKQLYHYLKTREKSPLRKMQALIVVSKKILTLIHTLAKKKESYDPEKVFGTVRREQFKAAA

SEQ ID NO: 49807 - protein, 343 aa, unidentified
MQSVTVIGLDIAKSVFQVHGVDAEGRVVIRRKLKRRYVLSFFQKLPSCLIGIEACASSHHWSRELQALGHKVRLMPPAYVKPYVKRQKNDEADAEAICEAVGRPNMRFVATKTPEQQSCLILHRTRHLLVRQQTAMINAIRAHLAEFGIVAPVGRQGVDELLRVVADASDKRLPDVARACVAALGGQLQILKTQILQFDRMIMAWHRSNETSKRLDHLPGVGPILATALVASVADAKAFRSGRDFSAWIGLVPRQNSSGGKDKLGSISKQGDRYLRSLFTTGALAVIRYAKVHGTERRPWLAALLARRPTKVAAIALANKLARMAWAMMARGEHYKEPVALAA

SEQ ID NO: 49808 - protein, 338 aa, unidentified
MNYKRIAIDTSKSVFTLHGVDQEERVVLRCERRRGAFLAFFEKLAPTEVVLEACGGSHHWARSLGAMGHRVKLIPPQYVKPFVKRGKNDRNDAEAICDAASRPTMTYVPVKSAEQQASSTLLRVRELMVGQRTQLVNALRGHATEFGLVTGKGLAKVDGLLQSIASAPEIPPLARDAMALLGREIAHLDQKLAEIGAELKKQHKSNALSQLLEQAPGIGPITALTLATHVVPEQFKSGRHFASWLGLTPKEHSTGGKQRLGGISRKGNERLRQLLVVGAMSVIRFAKPGSKSASAWLLNLLNRRPRKVAAVALANKMARIAWAMMTSGEDYRKAPIPA

SEQ ID NO: 49809 - protein, 375 aa, unidentified
MNYNTVYVGMDVHKESFTLCCMTLEMEKAKYTMKTGADYKKILVYLDTMRGKFYGEDTHFICGYEAGCLGYTLYHQLTAANVECIILAPSTMSVEGGKGKKRIKTDKRDAENIAKCLAHRLYSPVHIPTDEELQIKEYVRMRDDHKHQLKSIKQQILSFCLRHNLKCDTSKSNWTIAHLKWLRSLQIEPLYKEILSEYLTTYDQLTDKIGRFDKRIEQLAQGDNYRENVEHLRCFIGIETHTALSIVAEVGDFKRFTDAGKFASYLGLTPGEDSSGDTQNRLGITKAGNQHLRRLLTETAQCYARGSAGHKSKTLKARQSGNPTEVIAYADKANERLRRKYYKMVLNGKNRNTAKTAIARELACFVWGMMTNNIA

SEQ ID NO: 49810 - protein, 389 aa, unidentified
MKPDSQMTLDRHFRQCVGIDVSKDKFTACLQMYDRASDVGCHTMSIDFDNTKSGFNQFVKWSRKEAVKGFPLTYLMEPTGVYYEPLAYHLHKIGQTVYVVLPNKARSFCEAEGIKTKTDAMDARCLALMGCTSRKLKPWSPPAPIYRELCQMTRFHTDLSQIMTSVMNRMESLNHMEEADKTVRKNCQKLIDEIDTLMENNDKAIMQKITEDKELEARVKRIAKTKGLGVTTVVCIVAETEGFHLIENRKQLTSYAGLDVRAKQSGREDPKHAISKKGNAHIRAALYMPALVAVRYNPQIKTVYGRICQKHPKQKKIGVTAAMRRLLLLIYTLWKNGEEYDPMRDKTHTHQKKMKEEDTELEYEPEDCIGPKRDPADWNATDEHGNPPF

SEQ ID NO: 49811 - protein, 476 aa, unidentified
MARKASSPATEEQNPLLPHETLYVGIDIGKRVHVAGFLSTTLLARHQRFEHCPALSFENSREGFRSLIDRMKTYVPLVQIQVLLEVTGHYHRALMQYLQDLDIPVYIIHVQKRREGLLKSDKRDALGLGNQLYNQLEKGIQVDDPLQAVRRLAPPTEAAAQLRGMVQHHAELVVESTQRKNKLTSICDEFFPEFTRLLLNPNLPTALALRSRFPTPALLAQATFAEMREARGKTCSVSDVKLRALQRLAAQSIGIKDPARVNALVFEQEQLIAELRLLGEHLEQLEQHIAQIVEHSREGQILTSIPGIGVQAAASLIATIGTIANFERPAQLKSYFGWVPKIAQSGLTLDWSRLTPRGVRSMRQTMYLIIWRAIQWDTDWKEVYDRLIARKCHVDERTRRLVGREKVIGRLAGQMTSVIFVLLKKDLERLSHLAPGATPPAPQLYDAALHRKHRMGQYQSSKSGEKLWGEIQLSSD

SEQ ID NO: 49812 - protein, 344 aa, unidentified
MAIVAVGVDLAKNVFAVHGVDETGKVVLLKPKVKRADLLPLLRSLPACLIGMEACSGAHHWARELIKAGHDARLMAAKLVAPYRDGGKNKKNDAADAAAICEAVQRKTMRFVPIKTEEQQSVLVLHRSRDLLMRQRTMMLNAIRAHLAEFGTITAQGPSKVVELVAKLGSEETFAVPEIARVGLLALAAQLDSLATAIRDIERQLLAWHRQNAASQRLETIPGVGIITATALAASVPDPSVFKSGRQFAAFLGLVPRQNSSGGKDRLGHISKMGNGYLRRLLVVGATSVTRRAETNDTRTGAWVRSLLGRKPTRLVTVAIANKTARTAWAMLARNEDYRASAMA

SEQ ID NO: 49813 - protein, 346 aa, unidentified
MKHAPEKHGPPVAVGIDVAKSTLSVCVRSRDGTEQALAIRNIEADISERLLPHIRECTGTVVMESTGHYHYLVALMLSDAGLDVRVVNPLLAKQYTSGTIRKVKTDPADAAGLARMALVADNLPPRFSLTPDALFLRKKLALLGSMRRHLQAQTASLASVEDAQHILKQEDTAALGRLREAVAEVRKAINALERECVRDAKQCAHTRETLPLLVSIPGVSEFCATLALQWFRLEHDATAKSWIAYAGLDVSSRESGTWKGQCRLTKRGNSFLRRRLYSAAWGAVMHDPDFKDYYEHLRHDEGRSHVESLVIIARKIVRTMYNVVQSNTTYDRSKFSHKYLSTPVPA

SEQ ID NO: 49814 - protein, 343 aa, unidentified
MPLYVGLDVSQKMTAICVVDERGGRCWRGVCATEPAEIASRILRHAGSDATAGVETGAMTPWLVHGLRKAGIQVECLDARRVKAALQMRLNKTDQNDAEGLAQVVRTGWYKSVHVKSLDAHRARSLLGARAQLVGMRTRLGNMIRGVLKTFGLLPGAGRGQRFDRHVEALIDSEPEVGLIVRPLLETWRKVGDQIATFDKAVQRHVRADPICRRLMTVPGIGALSSLVYVSTVEDPQRFARSRSVGAHLGLTPRRYQSGEIDRSGRISRCGDGLARTLMYEAAIVILHRVKRASHLKDWAMAIAQRAGPGKARVALARKLAIILHSVWRSGEPFRWSTAVAAG

SEQ ID NO: 49815 - protein, 384 aa, unidentified
MNNNTLIFIGMDTHKEFTEVAYSLDGRDEHSKHHGKIPTTKQALSKLARQLQSKCPKATLHFVYEAGPCGYWVYRLLTSLGHCCHVVAPSLIPRKPGQRIKTDKRDALMLTDRLKQNDLTPIYVPEPEDEAVRDLSRARDRAMHDLNDGRYQLKAFLLRNNIRYDGPPNWSLKHLRWLTELILPHPCQQIVLLEYLQTVMERQNRLERLDNELAHQVKSWRYYPVIKAIQALRGVRLRVAVGVVSELGDLSRFDHPRKLMAYLGLVPSEHSSGEHQRRGSITKCGNGRARRLLIEGAHSYRYPANISTEMQKRQEGLPKEIIDQVWQSQLRLCRRYQRLMHRGKHRSIIVTAIAREMIAYIWSISNEVVLTPVSPKERLSRVPA

SEQ ID NO: 49816 - protein, 463 aa, unidentified
MRTIGIDLAITGTHKAVIVDERGNAIGGVIHFRTDPVELEAVLRRAWEGADEDEPLRVVMEPTGLAWLPVASYCIQRGITVYLVNTQQVSDLRKFYSKHARSDRISARVLARMPWVSPETLHPLDLADADHLSGQRWCKQQEELAQLITATKNRVQAWERAFWPGLEEVVGDLFAAWVCRWREVWYNPWPLQGVETKQLVAFLVEAGADPEAAESLAAGLQAVACRVVALFGRPQQGRPSPYVDYAALQDQVLRELRLLAYYEAEHQAVSRQVQRLYRQVHPGRELESIRGVGSDGAAVYVFFVGNVERFTSQKKFRSWSGLVPGSDQSGDAEKKGLRLTHAGPDLIKKYAYINAEVGRQWDPQLAAIYYDQMMHKGKHHIQAVCCCATHILDRVRAVLRDGRPYELRDVDGTPVTWQEARAIIAERYQVPEEVRQRNSKRARQARRDQQAEHKRKKRSRPGR

SEQ ID NO: 49817 - protein, 318 aa, unidentified
MNSNNKVESTEPVSYVSLDICKARLDYAITGQKCRQVPNTAAGIATLITTIRPLPGVRVVCEATGGYERRLLDMMHQARVPVCRLQPGRVRHFAQAEGTLAKTDRIDVGVIYRYACSMHPRVEKPPLPEVTALRELLDYRRQLVDQVSQTTNRLETAGPTLQALLEVQRAQLTEAVTKADKLVAEHLKANPLLQAKAERMQQLQGVGPVLATTLLAYLPELGEENDKRIAALVGVAPHADDSGESSRPRHARGGRVEVRNVLYMAAVSASQHNPVLSVFYQRLKAAGKPGNVCLLAIMRKMIVVLNRMLKDPHFSLVS

SEQ ID NO: 49818 - protein, 371 aa, unidentified
MKKGTTRYLGLDVHKATVTVALAEDGSQPVVYGTIANDPSSVRKLVRQLGREAKLVVADEAGPTGYALHRQLLELGAECTVVAPALIPRRPGDRIKTDTRDALTLARLLRSGDLTPVWVPGEEDEALRDLVRARFDAKADVLRAKHRLSKFLLRRGIQVPPGTKAWTARYQAWLNQLSFPQAAAQVVFDDYRATVRATEDRIRRLETELRSCAQDSRQAALIAALQTLRGIGFLSAVTIAAESGDIRRFANAPRYMSFTGLTSSEYSSGQSHHRGAITHAGNAYLRHVLVQAAHNARHAPNSSRELQQRQAGLPSDLVALAWRAQLRLHQRYRHLVGRLGRPKAVTAVARELAGFVWAVGQRMAEQEVSPA

SEQ ID NO: 49819 - protein, 378 aa, unidentified
MNRIIKIGMDVHTTNYTLCIFEPSFEHDGTVHCITQVKPEVKNIIHVIETFKKKHENEELNIVCGYEAGCLGYSLYHELKEKGIECVILAPTTMKTEKGGRKLKNDYRDAKMIAECLAYGGYSAVHVPTELDNSVKEFIRMRDDIKENLKSIKQQIIAFLTRNGKQFEGKSFWTRKHIDWINTVSFSEPLLQDTLKEYMIEYNHLCDRVETLDKQIEEISLKEEYVEKVQQLQCLIGIKTHTALSLIVETSDFNRFKKGNMYSAYLGLIPGDDSSGGQENKLGITKAGNSHLRKLLVEAAQGYTRGKVGFKSKVLKSRQEKCSSEVVAYADRANERLRRKYYRMTLRGKRYNVAKTAIARELACFVWGIMTDHIDLCS

SEQ ID NO: 49820 - protein, 343 aa, unidentified
MQTITTIGLDIAKSVFQVHGVDGAGQAVIRRQLKRRSVLAFFQKLQPCLVGIEACASAHHWSRELQALGHKVRLIPPAYVKPYVKRQKNDAADAEAICEAVTRANMRFVPTKTPEQQSGLVLHRARHLFIRQQTAVINAIRAHLAEFGIVAPVGRHGVEELLNVVADPNDRRVPEIARACLLALGSQLRRIKEQILEFDRLIMAWHRSNEISMRLDEAPGVGPVLATALVAAVADPKSFRSGRNFSAWIGLVPKQHSSGGKNRLGNISKQGDRYLRGLFVAGALALIRYAKIHGTKHRPWLTALLARRPTKVAAIALANKIARMVWAMMAKGERYKEPVALAR

SEQ ID NO: 49821 - protein, 424 aa, unidentified
MNLTQNDRLKQVTSDILIVGVDVGSQTHFCRAFDWRGFELSRRVFKFSNTGMGFLTFLRWTEELMNKTEMKKVIVGCEPTGCYWLTFQKFLQDHDIQLVTVNPFTVNRSMELDDNSPEKSDLKDPKTIALLVKDGRFSTSYLPSGVYAEIREASVCRDQIMKQHVRLSNQIQGWIQKFFPEYLECYVDWDSTSGLMLLREAPLPQDILKIGAGGINQIWRNAKVRAAGIKRAQTLVEAAQNSVGLEAGEAARLEIWVLVNDYILKAEQLKRLDEYLEEKVKEVPNVEKLLAIKGVGMSTVIGFIAEVGDIGRFTDPKQIQKLAGLEIVKKSSGKKKGQPRISKRGRRKLRRTMYESARVLMIWNPVFQDVFLYYRNRTRNPLGGMQAKIAVACKAIRIFYVVLQTGCDFDEEKFRKDIIRPEAA

SEQ ID NO: 49822 - protein, 352 aa, unidentified
MEFMGLDVHKQYSIACVFDDSTGEMEHHRLNNSRAEFQKLFSLHPEAKVVMEAGRSSYMVYDTIEDLVSDICMANPLQVKAISWAVVKTDKVDAETLSRLLRADVVPPSYLRDKENRETLYLLRQRMFFVKLRTMIKNRIHCIVDRQPETIRFSKPEVSDLFGNKGKQWLRDLGLFPNESIMLQDALDLLDFLDEKILSSNRLLYKMIKEDPIARRLATIPGIGIVYALLIRAEIGDIERFPDESKLIAYAGLAPSVSASGGKSFSGRLPRQCNHWLKWALIEAVHPATRKSPWLKSKYDKIAKRKNHNTAKVATARVLMTLVYKIWKSGRVFSQEKPLQDKSRSRMALSHA

SEQ ID NO: 49823 - protein, 341 aa, unidentified
MTVTIGIDPHKSTHTAVAVDRDEQPLARLTLPANGAQTERLLAWAEPLDADRVWAIESAAGLGRLLAQQLVAAGERVVDVPPTLAARVRLLGSSKSSKNDPNDALSTAIAGLRHCGLRRVDRDDHTAVLRLLADRHHDLSGLRTQAVCRLHVLFRELTAGGARRRISAAQARQLLDSIEPVDPVGIERCRITAEHLADVERLDREIDAVKQRIADAVTASGTTLTELHGVGPVIAAIILGQVRDVRRFRTRAQFANYNGTAPIEASSATTHRHRVNMRGNRALNHAIHVIAVTQVRHDTPGRAYYLRKQADGKTRKEALRALKRRISDAVWRQLHLDHAVR

SEQ ID NO: 49824 - protein, 330 aa, unidentified
MKFFLGLDLAKDSFVAVLLDAQGHVVEQRTFVNAAAGFAELLAWLPDPRATLAVCEPTGVYGKRLHQALATAVGSLHEINAQSLRRFSFTQVQTKTDEADALAIAHAARTLFLTRPDLLEKSRVTCHAGRDNLALWLSEYDRLRAAIVALRNQLAGLVYHTASDVATVRERRQAELDRLLRERKEVLAQIVALYQKLDDRQAQLIDSIPGLGPLATAATLVVVRSVDRFASCDALKGYLGTYPARRQSGPWEGPAHLAHHGNRLLRHILWNCAKAAVWHKHPQNPFRRLFDRLRAKGKSYGAAIGAVVRKLVQTIYGVLKNQTPFRYPTD

SEQ ID NO: 49825 - protein, 336 aa, unidentified
MNKGKAEQTWYVGIDVGARQLVVAISCGGEGMPVEEYANNAAGQERLRQRLRPLATVIKVVLEASGTYSLDVALMLARMGQRVQLQMANPRRVRRFAESLGQRSKTDPVDARVLCQYAQRMPLLPWQPPSAAALRLRALGRTIAALVRMCTQHKNRQHALSASAAMPASLVRELEAQVRYTEKRIAKLRREAVRLIASQPELARRFQHLLSVPGIGESSALAVLGELAVLPLSLDERQWVAHAGLDPKHHQSGSSVVHKPCISKAGNRYLRAALYMPALVAVQHDPGLQGFYQRLLNHGKAKLQALVAVMRKLLHAAWGMFRSDQPYDGAKLCPQK

SEQ ID NO: 49826 - protein, 427 aa, unidentified
MSERDYSKQVARRQRIGERTLVVGVDIGCATNAVGFMSKEGKVLGSYPIMQNSREGFEQFVKMTEGLRAKHGLSDVLIGMEPTGHYWRKFAYFAKAKGWEVRFVRTTALKHHRELDESSSAKSDKRDALTITNIMREGRYIDTVIEDGRMRQLRTLVKVREKIQKRNVSAKNSLHAVLDDYFPELKGIFWSMHARGLWALLERCPFPADVVILKVSVLKELIGRASRRRAEASRKAMAVFQAAEESIGLKQIGSADRYRLRMCLEEVKRTELMLKDLEREIKRMLKEIPDAQYLLSIPGIGPISAAVFLGELGNPSSFPGARQVVKYAGYDPQESDSGYRVSRKFISKKGRWLLRKHLFLMSMRVVVLSRYFQGYYQRKLQTKNRFGQLPRKKEILCAVAIKLIKVIFALLRDQRNFEDTVAVQCNE

SEQ ID NO: 49827 - protein, 342 aa, unidentified
MKFYCGIDLSARDCQVCVIDEQLKIVVQQKLRNELPKICQLLAPYKGKLKIVVESTFNWYWLIDGLQAEGFDVVLAHTLGLYLITGAKVKTDRRDAYALAKLLLVGAVPAAYIYPAETRPVRDLLRRRLHLVQVRAGEYGSLRRLLLRQGILSSKQQEIKTATETELEQWFAHPLVRLHASQELRRIELYSQQIAELEKTILGLAQTDQSYQLLLKLPGVGQTIALTILYEAGELSRFANVKVFSSYCRVIPGIAQSGNVTGRGRGSKQGNHYLKAAFSQAAVHAVRCYPKVRRYYERQLKRHQGRGRQMICYNIIAHKLAQAAFHVLKEQTEYREELLFGR

SEQ ID NO: 49828 - protein, 337 aa, unidentified
MSEISILAVDLAKNSFQVCAVRSDGTVVSNRAVSRPRLYQLLAEQEGCIVAMEACATSHHWGRVAQSYGHDVRLIPAQYVKPFVKRQKNDRADAEAIAEAASRPTMSFVAVKSAEKQGRAVAFRTHQCFVRQRTQLINSLRGHLAEFGLVAAKGPASLKVLENALADSSTDIPAQVREMGAIYLAQIVQLTKSIEQLANELKTASKSDEDLRRLCAVPGIGPVSAGAIAAFAPDMSTFDSGRNFAAWLGLVPRQRSTGGKARLGAVSKMGQCDIRKLLIVGAMSVIRWVVRKGGSENRWLANLVARKPRMVAAVALANKMARQIWAISTKGEDYRMA

SEQ ID NO: 49829 - protein, 387 aa, unidentified
MIYVGIDIAKLNHFASALSSEGEVLIEPFKFTNDNDGFFLLLSKLIPYEKNSITIGLESTAHYGNNLMLFLVAKGYKVCLINPIQTSTLRKNNIRKTKTDRVDTFIIAKALMINDHRYVSLRDIGYMQLKNLGRFRLKTVKQRTRLKIQLTSYIDQIFPEIQYFFKSGIHHKGCYALLKEAPSPEAIASMHLTHLTHLLSANSHGRFKKETALELRVLAQKSVGTSDSSLSIQITHSIEQIELLDRQIEHIESEMTDIVSSLDSVIMTIPGIGPVNGGMILGEIGDITRFSDPGKLLAYAGLDPTVYQSGNFQARHTRMSKRGSRALRFALVNAAHNVVKNNDTFKAYYDLKRSEGRSHYNALGHCAGKLVRVIYKMLTDDIAFDLD

SEQ ID NO: 49830 - protein, 370 aa, unidentified
MGKCSEVFVGIDTAKRKHAVALADTGRDGETRYLGEIDSAPATVERVIKKLAGKYEKVRVCYEAGPTGYGLYRQIGALGHECTVVAPSLIPKKPGDRIKTNRRDAVTLARLFRAGELTSVWVPDAVHEAVRDLVRARETAAADVRKKRQQLLSFLLRHGRIYGGRKHWTQAHGRWLAAQAFEHPAQQIVFQDAVDVIEDCAGRLQRLDEQLHTIVPNWSMAPVVAAYQAMRGVSFVVAVTFVAEIGDVRRFDTPRQLTAFLGLVPSERSTGDNVRRAGLTLTGNRRARRALIEGAWTYRYQARISATLQKRLEGLPKAVRDIAWKAQVRLCGRYRRLAATGKKTPVIIAAIAREMAAFLWAIGQHVAPAS

SEQ ID NO: 49831 - protein, 337 aa, unidentified
MKSYEKVVGIDVSKETLSISLYDGKSHTGYETRNTIKSFFNDFVKKEKGVDFSKVLFMLENTGVYHLRLATHLSKECGYIVSVANPLVIKRYSQMNLKRAKTDKADARLIAEYGYINGGDWLFSPRDIDYYKIDMKLKAVEDFHKQINMLSNQIEAIEYLPFKDNSTLNAYKKLIENFKKEIKKIEKELDILLREKYVEEYKLLSSIPGVGLKLTGVILGKLNGFANFDRGKDVTSFVGICPSIYQSGTSVNGRGKISKKGNGYMRTILYLCSLSACKYNKSCAELYERLVAKGKPKKVALIAVANKLIRQAFGVLKSGKPYDPDHANNLTLVAKNA

SEQ ID NO: 49832 - protein, 322 aa, unidentified
MTIETLGIDIAKNVFQLHGVNRNGRVVLKRRVMRDQLLAVLAQIGPCAVVIEACTGAFYWAHKFEALGHRVKVISPQYIKPFVRRQKNDGNDAEAICIAARQPHIPFVPKKTVEQQDIQALHRARQRMVNHRTAVVSQIRGLLLDRGFAIAKSITRARRAIPEILADLKNELTAMAREAISELYDLFRDLDRRIASFDKKIERIFCESEPCQRIAKIKGVGPKTATAVVAAIGDGSEFKNGRHFAAWVGLVPRQHSSGDRNLLMGISKRGNQHLRSLLVHGARAVVRTAPNKNDLNNLWVNRLRERRAKSTCNGRAVHSPRR

SEQ ID NO: 49833 - protein, 311 aa, unidentified
MTLPQDVIGVDIAKGWIDTFTLSTLRHERIPTTKQALARFARAAKGALVVCEASGGYERPLIEALAKAKVDCARVNPRQAREFARATGRLAKTDRVDAEILARMGRALAPDPTPPVDPERARLADLVARRDDLVASIGREKNRARTTSEPWIAREIARLLRVLQAHLTAVEGQITARIDACAALAEDQRRLTTVPGIGPALSAVLIARLPELGQLDHRRIASLAGLAPHACDSGLHRGKRHVWGGRADVRRTLYLAAFIASRYDPALKAFRKRLKDAGKPTKVAITACARKLLTILNAMFRDAKDHQKLAA

SEQ ID NO: 49834 - protein, 402 aa, unidentified
MNSVGIDASKGKSTVAVIRPGGEVFIPPFDVNHTISELSALTERLRSLDGELHVVIESTGNYHAPIAWWLHNAGFRVSVLNPMLTRGYGNNSLHWAKTDKWDAKKLGKYGITYWGELPEYAPEEDKRLFLKASYQQYQQYVKMQTMLKNNLISLLDMTFPNVNRLFSSPPRADGREKWVDFAASFWHCKCVSELSVKVFTAKYQKWCKKHGYHFREGKALEIHAAACQNLGVMPNTETAKHLVELAVSQLRANASALAALRTEMHSLASSLPEYPVVMNMFGVGSVLGPQLMAEIGDVRRFHSKKALVAFAGIDAPPYQSGQVDVRSRRISKRGSPALRRTLFLVMSVILQHAPADDPVYQFMNRKRAEGKPYRVYMMASANKFLRIYYASVMASLCENNTK

SEQ ID NO: 49835 - protein, 356 aa, unidentified
MVTGLKHQKEKRSMDHFAGLDVSVKETSVCIVDETGKIVREVKLASEPDALVAVLKNPSYHFKRIGLEAGPLSQWLYGALAEAELPVICVETRHMRAVLKAQINKTDRNDARGMAQMMRVGLYRPVHVKTLRSQKLRMLLTHRQLLLSKAIALENDLRGTLRNFGLKVGMVGKVKFEARIRELVENLPDLAVLVEPMLIVRRVLREQIVILHRRLLAIVRDDEVCQRLMTTPGVGPVVSLTYRATVDIPARFRKSKSVGAVFGLTCAKYQSGEVDWDGRISRCGDEMMRTMLYEAAQAMMRSKKWSWLKAWAMQIARRRGMKKAIVALARRLAVIMHRIWVDGTEFRWTREQAVAT

SEQ ID NO: 49836 - protein, 343 aa, unidentified
MQTITTIGLDIAKSVFQVHGVDAGGRVIVRRQLKRRSVLAFFQKLPPCLVGIEACASSHHWSRELQALGHTVRLMPPAYVKPYVKRQKNDATDAEAICEAVTRANMRFVPTKTPEQQSGLVLHRTRHLFIRQQTAVINAIRAHLAEFGIVAPVGRHGVEELLNVVADPGDRRVPEMARACLLAFGAQLRRIKEQILEFDRLIRAWQRSSEMSMRLDECPGVGPVLATALVATVADPNAFRSGRNFSAWIGLVPKQHSSGGKNRLGNISKQGDRYLRGLFVAGALAVIRYAKIHGTKHRPWLTALLARRPTKVAAIALANKIARMVWAMMARGERYKEPVALAR

SEQ ID NO: 49837 - protein, 450 aa, unidentified
MSNIFCGIDWAENHHDIALVDQGGTQLAKLRISDDSAGFNELLELLARHGDSPEEPIPVAIETPRGLLVAGLRATGRNVYAINPLAAARYRDRSSISRAKSDAADARVLANILRTDMAAHRALPIDSELVQAVAVLARAHQDAVWDKTQMVNRLRSHLREYYPAALQAFHGSGTLGLDSKHARAVLATAPTPAAARLTRSQLRALLNRAGRLRRRTDVEVERLREIFRRECLHHLPTVEQAMGKQAQALIQQLDATCRSVDDLAAATEEAFLSHPDAEIITSFPGLSVTSGARVLAEIGNDRHRFVDARALKAYAGAAPVTRASGRSRVVVARAVKNQRLAPPATCGPSPPCARTNPESTTTPDAAAASGTPQLCGTCPTSSSAASTTACRAARSTTPNRLSPRLSHSLPKAACRQRCRLQPRSSRARQRRPGSAACRLPRRDSRSASHP

SEQ ID NO: 49838 - protein, 366 aa, unidentified
MLYLAIDQHRKQLTVNLRDENAQVLVKRQVSTRWQAVREFLADIQERGRQAGGWMVIVEVCGFNDWLLKLLAEYGAGEIVLLHPEERLRQKTDRRDANRLGELLWPNRHRLAAGRRVQGMRRVVIPSADDHLDRKLTSLRWRIGRERTRLLNRIKNILRRYNLEQECPTKSVTCQTGLRWLRQVAVSELDRLDLNQLLGRLEVVNTERAALEEKIRERQKRNVAAARIATIPGMGAYISLGLACRVGDVRRFPRPRSLANYWGLTPRTRNSGEAKQRLGSITKQGSALARFLLGQAVLHVLRKDSVLREWYKGIKRRRGSKIARVAVMRRLATIIWQLLSKEQTYVPGGPRRQAQRQAKAAQAAAN

SEQ ID NO: 49839 - protein, 436 aa, unidentified
MTDSHSTAKPRILVAIDVAKAKHDVLVELPGAGRKKMIVRNQRDEFQRLVAYLKSLGGTCEIALEPTADYHRCLAYFLGSNGFAVRIVSSIAVARTREALHNSWDKNDPKDAQVILHLLRNHTTQRFYDPVIEQTNDLQELSKTHHQVSLRKTRLQHSLMNHYLPLYFPEAERFLCTTRAGWFARLLIAFPTPASVTELSEVEFVVTAAGLLRTKHSKESVLRSFYAKAKESVGIPVTLDSQAVATFRLLLNEHLELCRKREELERTAHELLKERMDYQILRSVPGIGPIIALTVLAEAGDLRRFGHERQFLKFCGLDLSTAQSGAYRGRSLLSKRGNSRLRAALWMAATIASRMRENTLRKKFDRYVQSDPVNADLKRKAYTACAAKMARTVYGLIKHQQHYRAYHEDAVPLPDGRTRSHEPLRHAAEQSVAVTS

SEQ ID NO: 49840 - protein, 444 aa, unidentified
MRIMHRIVAGLDVHKKTVVATRMQVNEEERLVWETKTFGTMTQDLLALLDWLAEWECTHVAMESTGDYWKPVYNVLEGTFEVYLVNAQHVKHVPGRKTDVTDSEWLAELMLHGLLRPSFIPPKPQRALRDLTRYRTKLVEERSRTVNRVQKLLEGANIKLGSVVSDVQGVSAQAMLAELCTGKMSPQEMAQLARGRLRNKIPELEKALTGVVEAHHRFLLGKQLAHIDFLDEQVADLSAEIARQLEEMSSPPRTPGEGDRSRPPSTASEPDSSVAPLTWTEAVELLDTIPGVNVKTAESILAEMGLDMSRFPSADHLSAWAGLAPGNHESAGKRYSGRRRKGNQPLATTMVQAAWSAVRTKGTYLKSRYHRLAARRGKKRAIVGVARSMLVSIWHMLSYRQPYQELGDDFLDQRRKEAKLHYLTRQLEKLTGGSVQIEFQPVAG

SEQ ID NO: 49841 - protein, 353 aa, unidentified
MTSTKYIGMDVHKESISIAVRNDAGKIVMECVIETKASVIVDFIHGLRGELQVTFEEGTWATWLYDLLKPQVTKLVVCDPRKNSRQGNKNDRIDARELADRLYMNKLNAVYHGGAGVRTLKELARSYLTISKDLARVMTRVKAIYRSWGIPCAGKQVYAPRHRAAWLAKITEVGVLRRAEFYYQQLDALRSLRHEVRRALLAESKKHKATKLLCQIPSIGPIRAALLIALIQTPHRFRTKRPLWKYSGFAIETHSSADYRSVQGQLHKSKKQVSVRGLNRDCNHDLKNLFKSAATIASVKPGPFQEFYAALVAKGMRPEMARLTLARKMATIVWIVWKRGVSFDAQYLKPQTA

SEQ ID NO: 49842 - protein, 350 aa, unidentified
MIIGIDPHKLSHTATAMDPATNTAASSLRVGASLAGYRELLGWARQFPDRRWAVENAKGLGCHLAQWLVARGEAVVDVATTATSRVRELTRGGRRKNDVIDASAAASVAALQGDAQVVDAADETTVFAVLEERRANLAAQRVRCVNQLHAVMRDLVAGGVRAALTAKAAGEALRKVRPTTRTERIRKIIAWDLVRDVRNLDRQLNTIAAQMTETLDGYDNQLLEIDGVGPVLAVRLIGRTGRPSRFRSSDAFASYTGVAPIEVSSGQRSTHRLSRSGDRRLNSTLHLIAVTQVRMRDSAGHRYFERKIEQGKTRNEAMRCLKRKIASHVWRRMLAAELRRQHHVALPEAA

SEQ ID NO: 49843 - protein, 428 aa, unidentified
MSERDYNRQAARRQRVSKATLIVGVDVGKAFNAVGFMNKDGNVLGSCSKLYNSREGFEQFVKMIEGLKARHRLRDVLIGMEPTGHYWRKLAYFAIEHGYEVRFVRTTALKHHRELDESSSAKSDRRDALTIANITREGKYIDTVIEDGVLRQLRTLSKARERLLRYSVSAKNSLHAALDDYFPELHEIFRSMGARSLWVILEKCPFPEDVVLMKTSILQEMIARSSRKKAGSARKAKALYEAAQKSIGVKQIGTADRYRVRMCLEEVKRTVLTLKDMDRQLKSMAKDIPSASYLMSIPGIGPLSAAVFLGELGNPAHFHNARQIVKYAGYDPQESDSGSWIGRKFISKKGRWLLRKYLFFMSMRVVVLTKYFQEYYHRKLETKNRVGQLPRRKEILCAVAIKLIKVIFALLRDKRSFEDTASAAVVIA

SEQ ID NO: 49844 - protein, 357 aa, unidentified
MPSITSEDAPIIEVAGGVDTHQDTHTAAVIDAVGRILGIEQFPATSPGYADLLAWMRRFGRLSRVGVEGTGAYGAGLARLLRDERVDVVEVDRPNRKTRRFQGKSDPIDAVQAAKTALAGDRTGTPKQRDGRIEALRNLRIARRSAVDQRADTQRQIKALIVTAPEELREQLRGLPVKALIAACANLQADRTHAAGPATAAKIALRSLARRHQQLTVEIADLDELLDPLVAAINPRLVATNGVGTDVAGQLLVTAGENHDRLRSEAAFAMLCGAAPIPASSGKTNRHRLNRGGDRQANAALYRVVLCRLRWDPRTRAYMERRTKDGLSKKEIIRCLKRYIARELYRILTTDDHERAA

SEQ ID NO: 49845 - protein, 351 aa, unidentified
MIIIGVDYHPSFQTIAFLMEETGEYGEQELNHSDGEAERFYRELKERGVSVRVGMEATGHARWFERLLAELGFELWIGDPAEIKTKRVRKQKTDREDARLMLKLLRENRFPKIWVPSPENRDLRQLLWHRHRLVQMRTRIMNQLQAVAMNEGYRWKKKLFSEKGRALLEKLSLAPWASRRRKELLELLDQLDPKIVELTAAVEQEAKKRPEVLLLRSHPGVGPITGLAYVLIIGTPERFPCGKQIGSYTGLIPCEDSSAGRQRLGHISKQGNTLLRFLLVEASQAAARRNPDWRRRYAHLMMRREKRIAKVAMARKLAVRLYWMWRNNWQYSQLVEFGSNAGKLGIVHGVK

SEQ ID NO: 49846 - protein, 316 aa, unidentified
MNTKTNQSINVGVDTGKFQLDIYIRPLDIYFTVENNEKGIKEAVKNIKKYKPERIVIEATGRLEMPFILACANANLPFTIANPVHIKRFAGALGQRAKTDKLDAQLIAHYSEAIKPRLSSLKPDTMQAMSDLVTRRNQLLNMQTMEKNRLQIMPKELAMAIKPVLTLFKNQIIKIEEKIVKLIESCPEYQAKNMILQSMKGIGKIAAASLISNLPELGYINSKQASALIGVAPMNRDSGRYKGQRKIQGGRPQVRTVLYMAMMSAMQSNPVFTETYQRLLAAGKPKKVAIIACIRKMIVILNSMLRDGVMWEAPKV

SEQ ID NO: 49847 - protein, 461 aa, unidentified
MSRKKPTGKQKGSVQQRVDWKALEIVHPDAAGIDVGGSEHWVAVSPDCDPEPVRRFGCFTADLREMGQWLVQRGVRSVAMQSTGVYWMPVFEVLEQHGLEVYLVNARHIKNAPGRKSDVQECQWLLKLHAFGLLNNSFQPSDEIRIARTLWRQRGNLVAEASSVIQRIQKALTEMNVQLSNVLSDLSGMSGMKIIGAILEGERDPWKLAALVEPEVKATPEDIAKSLEGNWREELLFVLRQQVELYRIYQQKINDCDLQLRKHLESFGSKRDLQAQPIGPKPKGKKGSRNAPAFDLRTELYRITGIDWAQINGIDVLTAQTVIAEAGADLSAFPSEKQFASWLGLCPTNEQSGGKILNRRTRKVVNRATVAFRNAASTLLRSQSYLGAQYRRLRTRLGAPKAITAMARKLACLFYRLIKHGQPYVDKGTEYYEARYREQQIRSLAKRAQKLGLQLIIPKTA

SEQ ID NO: 49848 - protein, 313 aa, unidentified
MVDKKVIGIDVGKDELVVAVPEVKGVRKFKNTSKGIEKLRDYISKFNVKQVIVEACHYEKRVHYQLAGYGFNVHVANPRRARDFAQAAGAHGKTDPVDALMLAKYGEAMKLSFTAVPTKAEQRLRSLLKRRSELIDNRSREKNRAHKSPEMADSYERILDFLKNEIKSIDLKIDEILQENSLRKLLKNVEILESIRGVGRVTALYLAVYLPELGKLGRREIASLAGVAPRNNDSGKQRGKRFVGPGRMIVKHSLFMCVLAAVQFNPQLKTFYERLKNKGKHNLVCRVAVMKKMVILMNALIRDQRMWEPRMGL

SEQ ID NO: 49849 - protein, 434 aa, unidentified
MTLINFVAANQKYYAFNLLSVFIMVFWSVQYLLQHLLVQTQLSAQLLQPLILILQLPQPPQFRYARPGKFFLPVNGMDYLLPLRLTVRNVLTRRITMNIVFLGIDLAKNVFQLCGLNQVGKPVYTKRTGRKELLQTLANIPACLIGIEASTGAFYWQREFEKLGHKVKVISPQYVKPFVRGQKNDGNDAQAIAVALMQPTMQFVPPKSPEQQDIQALHRARRRIVNHRTATVCQIRGLLLDRGIPIGSAVSRARRAIPLILEDAENGLSSRMRRTIAELYDLFNDLGRRIHFFDKEIETVFRQSEACQRIAKVKGIGPETATAVVAAIGKGTEFKNGRHFAAWQGLVPRQHSSGDRQVLMNMTKKGDKHLRTLFIHGARAVVRVATNNNDGHMNQWVNQLKERRGFNKTTVAVANKNARIIWSMLRNETEYQVV

SEQ ID NO: 49850 - protein, 354 aa, unidentified
MKYYTSTTKFNCGIDLHARQMYVCVMDRDGKKLVHTNIRNNDFEFFLKLVAPYRHDLTVCAECMFGWYWLADACQAAGLHFVLAHALYLKAIHGGKNKNDRIDSEKLAHLLRTNFIPPAYVYPADKRPLRALLRQRILYVWRRSELLSRIQSHQLAYNRPTCRQNHYNRDAWTEQLLASEPDPVRQLALQNDLALIGHYDAQLASLEKALLKLTKQTASRDFNLLQTTPGIGDYLGLTLLHEIGDIARFPTVKDFLSYCRLVKGTVASAGKLKGLRGAKLGNPYLRWAFGEAAVIAKRDPAIIGPLAQRLEARLGNKFKANTVLAIKLARAVYFMLKHKTAFDPDRLVAVLSKN

SEQ ID NO: 49851 - protein, 400 aa, unidentified
MNAVGIDVSKGKSTVAVIRAYGEVVRKPFDVMHTSSGLKELADFLLSLDGETKVVMEHTGRYSDPISKILCATGIFVCIVNAKLIHDYGGDTIRRDKTDKVDALKIAGYCLDKWTKLVQHTPEDEVRKTLKIYNRQLSEYTKLKTMLKNNLIALADQVFPLVNKLFTSQARDKDGHEKWIDFFANFWHCDCVASVSLQVFSDRYQKWCKKNGYNFSAIKAEQVHAVAVECFATLPKNDFTKTLILQAVSQLNNLCETIAAIKAEMTKIAKTLPEYETVISMHGVGKTLAPQLIAEIGDIRRYPGRSSLARFAGIEPPANQSGAYNQHSRRISKQGSPHLRKALFQVMCCVLQLSHSDEATFQFLNRKRAEGKPYKVYMIAGANKFLRVYYARVKECFDVA

SEQ ID NO: 49852 - protein, 405 aa, unidentified
MTATRKQHSTKRHTRRKGPAAPKAAEVLYVAFELSWNEWKLAFAAGAADNPRLKNIGARDSQALLREIAKAKKRFGLADGALTYSCYEAGRDGFWLHRFLESQGINNVVVDSSSIEVKRHGRRRKTDRLDAGKLLSMLIRWQQGERKVWSVLQIPSVADEDRRQLHRDLLELKAERTQHTNRIKGLLAGCGLAVPKIDAKFPAALVELRTWDGQPVPPELQQRLVREHERWQLVDRQIKDLTSERARRIRTSKDKTVDKVRQLLRLRGIGANSAWLYVMEFFGWRRIRNRKQLAALAGLTPTPHQSGDSDHEQGISKAGNRRLRTMAVEIAWCWLHYQPGSALSQWYQKRFAKGSSRQRRIGIVALARKLLVALWRFLESGEVPTGAETVSWKQGLLTPDETSAA

SEQ ID NO: 49853 - protein, 458 aa, unidentified
MNTRIIGIDLAVTAAHKAIVLDQASNSYVSPVFTFHTDPADLDDLLHTARAGASEPARLQAVLEATAMSWYSVGQYLERHNVEVYRVNGQQVADLRRVYQRHAKSDRIDARVLARLPLVMPDSLHRCYFPTGPLVTLQRACREVARLKHLVTASKNRILATDQLAWLSLPGVVAPFSQLAFWLRENWYDPWHVQAAGEKQLAHDWQSVAPEELVDISWAPALIQQARRVIALYDKPALLDYTQLQAGLKREQARLRQADEQAHQLRLNTVRPLYRQLHPTRNLETIRGVGQDSAALYIAFIGNIQRFPSLRDFLGWSGLIPFSRQSGDAQARGLRVTKAGPNLVKATAFLNGNIARQWDPQIAAIYYRQMMHHGKHHLQAACACATHLLTRIYAVLRDDRPYQLQDADGTPVDRHTARRICLERYHVPDEVRQRNNRRVRKARQEAQLEKRRKRKRRK

SEQ ID NO: 49854 - protein, 310 aa, unidentified
MNTVGIDIAKLHFDLHLLPEGAAARYDNNAQGIQDCRLFLAQAKPERILLEATGGYETALVLELQAVGMPIVVINPRRVRDYARAAGQLAKTDRIDARILAEFAATSLVVVRELPDAQTRQRRALVARRDQLVDLHVAESNRLEHARDAFIQKSLRAILTAIEKQIAGVDRQLAKLIAADETLQRKVEILDSAPGIATASAAMLVTQLPELGKVNRHQITALVGLAPLNRDSGQFRGKRMTGGGRGKVRTALYMPTLAAIRCNPKIRTFYNRLVQNGKPKMAALIAAMRKLLTILNTLVKNNQTWDANLT

SEQ ID NO: 49855 - protein, 340 aa, unidentified
MTVPLYCGIDLHSNNSVISVQDKNSKQAYEKRLPNELPIILQALEPFWQDIQGCVVESTYNWYWLVDGLMEAGLFVHLANPAAIEQYNGIKYTNDFTDARFLAHLLSLNILPTGYIYPKETRGIRDILRRRLLLVEQRASQRISLQSLLARHTGKRLSERQLKKLSAEDLRQLLPIPCASLMAEALMSIIQSLTEVITQLECAVSMHCIKQKNYHLLTEIGGIGNILGATITLETGDIKRFPDAGHYLSYARCVSTQKISNGKRKGRGNRKNGNRYLALAYMQASHLASIWEPQIKRFYQKKQAKSHIMIAKKAVAGKLARAIYHMLKNQEVFDVNRAFG

SEQ ID NO: 49856 - protein, 310 aa, unidentified
MEITVGIDVSKARLDVHVHPSGDSFAVSNEEAGVAALAERLGRLEGLACIGLEASGRYERLAVAELASAGLPVVVLNPAQVRAYAQAIGQRTKTDPIDARVIALFVEAVRPQPRPLPDVQDQELGALMARRRQVVSMLGAERLRRQQAPKGRVRVSIARIVTALEDDLKALDGDIDKTVRGTPVWRDKEDLLASVPGIGKTIARTLLAELPELGQLNPKQIAALAGLAPYTRQSGRWRGKSFIGGGRPAVRTALFMGALVAARHNPTLKAFRDRLVANGKPKLVAIIATARKLLTILNAILRDQKPWRAA

SEQ ID NO: 49857 - protein, 363 aa, unidentified
MTSMTPTTGSVTGGVDTHGQTNHAAALDQLGRQLGDQEFPTTPDGYRALLRWLRGHGQLELVGVEGTGAYGAALARYLRAQGASVVEVDRPDRRARRARGKSDPLDAYAAARAALAGTATGTPKSRDGRVEAIRMLRVARSGAVKARSQAINQLKALLITAPAALREQLRHLSTTTLLATCAQLRPTVELADPEQAAKTALRRLARRHQHLSEEIADADAQLKTLVTAAAPQLLALSGVGVEVAGQLLVSAGDNPERLHSEAAFAHFCGVAPVPASSGRTHRHRLNRGGDRAANNALYIVVLGRLRYDSRTRVYTDRRTKQGLSKPEIIRCLKRYVAREMFTALTARAVDSPPATTSTLSTAA

SEQ ID NO: 49858 - protein, 343 aa, unidentified
MDHFAGLDVSVKETSICIVDDTGRIVREVKVASEPEALLQVLGNPIYRFKRIGLEAGPLSQWLFSALAEAGLPAICVETRHMRAVLQAQINKTDRNDARGMAQMMRAGLYRPVHVKTLRSQKLRMLLTHRKLLQSKAIAIDNDLRGTLRNFGLKVGMVGTVKFEARIKELVENLPDLAELVEPLLIVRRTLRQQIGILHRRLLTVVRNDDVCRRLMTVPGVGPVVALTYRATVDVPARFRNSKAVGAVFGLTPSRYQSGEINRPGAISKCGDEMMRMMLYEAAQIMLVRTVKWSWLKAWAMKIARHRGMKKAIVALARRLAVIMHRIWVDGTEFRWTREVTAA

SEQ ID NO: 49859 - protein, 360 aa, unidentified
MNKHKYVALDVDSTNIVAGVYDSQGKAVMQCCLRNEGKAIQEFLKLLPGTVQVTFEEGAQAAWLYELIRPLVAEVVVCNPRQNKLLKAGNKSDRIDVAKLGKLLRLGELRPVYQGPSATQGLKQLVHGYEALVDDTTRVKNRLKALYRGRGLGCKGKRIYGREQRQQWLSQLETKELQRRATYLYEELDCVMRLRAEAEKVMCRAARNHEAYKWISSTPGLGAIRTAQILATAITPHRFRGKRQFWPYCGLAVVTRSSSDYEWVDGGARRKRKPIQTRGLNQNYNRTMKAVFKGAAVSALQQHQEFQEYYQRLCGKGMRPEMAQLTLARKLAAIVLILWKKGELYDSERLNQAAPGAGQQ

SEQ ID NO: 49860 - protein, 400 aa, unidentified
MFSIADNVILGQAGGEGFCGAAQPRKKNRSQRPAADRQPCGVKNAVAQRDRGRSGIVSPNSRQSRTRRAASSSHSQGRDGSMMHDAVVMWIGIDVAKASLDVAWGNGEDARHLSADNSASGWASLIHQFPPASESRVVVEATGGYERALVTALVEGGYRVAVVNPRQVRDFAKALGILAKTDRIDALVLARFGQQVQPRILEADPTERVELAQLVARRRQLIDLRTMELNRSQQTSARAAQKSIQHVLKLLAKEIEKLEAEIARLLQSDDDWRAKIELLSTTPGVAKVTSSTLVAELPELGRLNRQAIAALVGIAPFNDDSGRYRGSRRVAGGRASVRRVLYMATLAARRCNPVIRAFSERLAAQGKKPKVIITACMRKLLVILNTMLKNNTPWKDLHAC

SEQ ID NO: 49861 - protein, 437 aa, unidentified
MEVLYSHCAGLDVHKKSVVGCRIQTESGVGIKREVKRFGTTTPDLLELVSWLREWNCSHIAMESTGDYWKPIYNVLEGVFEVILTNAHHVKYVPGRKTDMKDAEWLTELLRHGLLKGSFIPPKKQRELRELTRYRVKLVQERSRQVNRVEKLLEGANIKLSSVASDIFGVSGRLILKELIRGETDSSLLAELAKGRLRKKLKELEKALTGRVEEHHRFMLAELLGHIDYLDEKVELLEKRINQQLEQLSGEFVLGENTKEELIEEAVNYLTGKPLPAILAVALLTTIPGIDWRIAVVIVAELGTDMSQFPSSKHAAAWSGVAPGNNESAGKRYSGKTKPGNKALRTMLSQAAWAASRTKNTYLSAQYYRLARRRGKKRAIIAVAHSILVSAYHMLSRHERYHELGNSYFDKRKKAAIVNNLTRRLNKLGYEVRLEPL

SEQ ID NO: 49862 - protein, 363 aa, unidentified
MKTTTTAATVSTARTILALDLGKYKTVACRYEPDSGEVEFRTVSTGRDEFRRLIEHHRPAVVVIEACTPAGWVHDLCGELGVSCRVANTASEAWKFKHAKRKTDRDDALRLAELAALGQLPGVTVPAKAVRERRALIATRQALVGRRVAVQNRIRAGLLGQGLAAPRGHRAWTEVGRAGLAQLARPLAECAAADLWRGLLDLALTELTQIEGLVALTEAKLDALARADAATQLLQTVPGVGPRTAEAIAAHLDQPGRFTKGKQVSAYAGLVPRQFQSGESDRRGRITKRGPAVLRKLLVQSAWAMLRYNQWALQTWKRLTKGGTTRRKPAIVAIARRLLVRCWAMLRDGTPWRGPARTASPGP

SEQ ID NO: 49863 - protein, 388 aa, unidentified
MIYVGIDIAKLNHFASAISSDGEELIKPFKFTNDNDGFQLLISKLNPLDKDSLIIGLESTAHYGDNLVRYLVAKNYKVCVLNPIKTSTMRKNNIRKTKTDKVDTYIICKTLMMQESLRFVTFYDLDLMDLKALGRFRQKTIKQRTRLKIQLTSYVDEIFPELQYFFKSGLHQKSVYALLKEAPTPEAIASMHMTHLAHLLKVNSHGRFDKEMAQQLRVLAQKSVGASDSSLSIQVTHTIQQIELLDSQLERVEAEMTEIMKFNDSVIMTIPGIGYINGGMILGEIGDIHRFSSPNKLLAYAGLDPSVYQSGNFQAKKTRMSKRGSKVLRYALVNAAHNVVKNNTTFKAYYDAKMAEGRTHYNALGHCAGKLVRIIWKMMTDNLEFNLD

SEQ ID NO: 49864 - protein, 325 aa, unidentified
MVETLTPLGIDISKAHFHVALLKGEKRVKYQPFTNDSEGFTQLSQWLQQHRIEHVHGCLEATSIYGHALAIHLHQAGHQVSIVNPMRIKGYAKSQLSRTKTDRADAKLIACFCRDLRPAPWQPAEAEVMKLQAYTRRLDALDQMLTQEKNRLKITPEELSADIDDHICYLKEQVKTVKKHLLDHIQKSDHLREQHDLLTSIVGVGDSTAACVLAEIGSIQHFDSARQLAAFAGLTPQEHESGTSVKGKTRLCKIGNRRLRKAMYFPALNLISRCPQMQAFRERLLAAGKTKMQVVGAVMHKLIRVIYGVLKSGQPFDPEKLLPAT

SEQ ID NO: 49865 - protein, 428 aa, unidentified
MNDKDTIRRDQFCQIKSEIRGSRDYLVVGIDVAKDKHHAFMGTATGNSLVRNLVFENDLEGFRKLQERSEAIRAQNALSKVVFGMEPTGNYHKPLGAYLIGSGHHLVMVTGKAVKNNRELLDGRWDKNDIKDPANVADLICQGKCLYYDYPPASINQLRQLLSLRRRLKKEEHSLRMRIRNNLLAQYFPELDGFYSACETESLAIVRWFLDPSIIAAMEFDEFFSLVTRTKRGIAQKQRLEKIHRLAAESVGCSTGPAVELEADLLVDKLEQVRQQLKKTANLMEDFCMEFTEYNWLLTIPGFGPYIAARVLASISNPWRFDSSNQVIKMAGYDLGAKRSGKKSNDAVPVISKRGNGELRYALYQAAHVASTRNPDFIRYFTRTLRGREREHGIKTKMKVKLAAKMLKIAWTLMKKNQRFDPDYLITE

SEQ ID NO: 49866 - protein, 343 aa, unidentified
MQTTKATTLYAGADLHGNNVFLAVIDEEGTTVFRRRVKGNIDAVNAALDPYWDRIKVLGVESTFNWYWFVDGLRDHGHNIKLGNPAKMAQYSGIKVTNDLTDAEWLAEQLRLGIFPECYIYPEEMRTVRDALRGRQLFVRRRTQVLLSFQGLIARYGMKAPSALKAIKWNNSDVHDLGLEPFVELKLEALLSSVHHSDMLAKRIEKKVLETIKQTDQYKRIQLVPGIGIVLGMLIALESGDFKRFASAGRFASYCRTVKSSRTSNNKSKGTNNAKNGNKFLAWAFIEAATAAARCYPEINSWYERKKRRRNVSVAKKALACKLAKSVWHVMNGKEFDMKLMFG

SEQ ID NO: 49867 - protein, 370 aa, unidentified
MDAPFQKRHLSAKVEMSLNHVPKGASKMKITTIGIDLAKNVMQIHGTDVHGNTVLKKQLRRSQVVEFFVKQERCLVGMEACGSAHHWARKLEQMGHTVRLMAPQFVKPYVKTNKNDMADAEAICEAVGRKNMRFVPIKNIEQQAILSVHRVRQGFVKTRTALANQIRGLLTEYGIALAQGITHITKDVPKALDANGQDLPGSFQQLIGRLVEHFKEIDKQIDELELQIKQWHQQNEASRKLAEIPGIGPITASALVASVGDARNFKNARQMAAWLGLVPRQHSSGGKSTLLGISKRGDTYLRTLLIHGARSVIRFAQAKAACGWLQALLNRRNVNVAAVALANKNARIAWALLANDRTFRSDYAAAGAAT

SEQ ID NO: 49868 - protein, 400 aa, unidentified
MLSIGIDVSKGKSTVCGMKPGGEIVYTPFEVQHTREGMSELVSLLRGSGEEVRVVLESTGSYHCPVVAALLENGIFVSVVNSLRMKRFCSQSIRRVKTDQIDAMQIALYGLAYWQELQPTRLPENTYRELQLLARQYYQMTSLLIKAKVDFNALCDQVLPGMQELMSDHAGRHKLSDFVLQYCHTTHILEMGETRFRKDYCKWAEKKGYRNHERMAALIFATAQNGIPVLPDAPSTQIVITEAIRVLHTVEASRDAILTQMQALAKTLPEYSLVREMPCIGDTLAPRLIAEIGDVRRFHSKRALIAYAGIDAPPYQSGKFCANNRHISKRGNRYLRKTGYEVMQSYVMHKPANDPIFTFIEKKRSEGKSGKLAMVAGLNKFLRVYYGKVTELYRSLPAIE

SEQ ID NO: 49869 - protein, 457 aa, unidentified
MLICEGAVSDQDQEKPLSLFQSLAGKVVLLLKKTDLLSTLFVGIDISSRSNVVALLDFESQKPLQTFSVANNQPGAIELAQHLLEFLDSRPDLRKLVVALESTSFYGVHIANFLSSHETLASFRTAVYCLNPKTVANYKKSFIDLGKNDFVDAFVLADFARVGRITNKPWRGSQFLALQRLTRHRLHLAKSLTKEKAYMLSNIFLKFSEFSLLDGEQQPFSDRFGKAAASVLTDFLSTEEIVDMPLDALIRHICEKGRNRFQDPEATASLLQKAARDSYRLDKCLYEPLTISIASSFNLISTYTAEIKAVNKAIEKTLKGLDPATYQCLLSIPGIGSVMAAGILSEIGWIDAFKSQESLAKYAGLVWRENQSGNYRADDTPMSKAGNAYLRYYLLEATSHVKNHCQEFAAFYQKKYAEVKTHQHKRALALTARKFIRLIFGLLAKHQLYSSNRVVQA

SEQ ID NO: 49870 - protein, 369 aa, unidentified
MLRPVSFRTASKARMTGCDTKRSGAMENIARVGIDLAKRVFHITAVDAAGAVVERRKLRRAGLQSYLTLLPRGCTVAMEACSSANHWGRLAARHGHAVRLMSPQFVVPYRKSNKNDANDADGIAEASSRPTMRFVALKSVAQQHVLQVHRARRMAVRNRTAQANEIHGFLLEYGIESPKRGALLPRLAEVLEDAENELPDEGRALLRELGDELRRLDARVKTFDARIAAIAACEPACQRLIAIPGIGVLTATALVAAVGDAAVFRNGREMAAWLGLVPRQHSTGGRPTLLGVSKRGDRYLRTLLVHGARAALTAAGRRTDRRSRWALGVRERRGWNVAVVALANKNARTAWAVLARGAKFDAAHIARAA

SEQ ID NO: 49871 - protein, 353 aa, unidentified
MSQVTTIGLDIAKSIFQVHGVDAAGQSVLRQRLSRSRVLEFFGKLPRCLVGLEACASSHYWARELIRLGHEVKLMPAQYVKPYVKRGKNDAADAEAICEAVARPTMRFVGVKTTEQQSIMMLHRVRRILMGQRTQLSNALRSHLAEFGIVSPIGREGLDRLLKIVADTDDRRVPAEARAPLEMLAAQLEGVKAKILENDRRIIASARATEVGRRLLEVPGIGPVLASAFVASVADPAIFKSGRDLAAWIGLVPRQNSSGGKERLGGITKAGNGYLRQMLMVGAMAVIRYAQRNSTRRPWLVQLMGRRPAKVAAIALANKTARTVWALMTSGERYRDPQAIQAAVSANGMETPD

SEQ ID NO: 49872 - protein, 434 aa, unidentified
MQTKEINIGIDFSKQRADIGMFDEEGKALISHQPLGNTYTGYKEFKKLVVETARQTRAEKINISGEATSLYWMPFFLEIARDKELQAMNTKQYLLNPRMVKWFKKSLPPDHKTDAKDAQIIAERTRVMRPAYTWQADHEWLRLRSYMRLRFHLVQVLTREKNYFQAYLFVLNNAYAQFRPFSDLFGASSSRFLKQMGLLDEITGLDSLEALQELQKNSKAKLPDPLQNLRILHKVTAERFVIDDDLAEALQEVLNLVLAHIEFIAEQVKQINGIIKTEAKKHAEVAVMRTVPGIGLVFSSGICSEIGNLDRYLQGEKWDRKRECYRHKNLRDAENSIAKISGMWWPRVASGDFEAEDRNLSKSGNRYLRYYLIEAADRLRQYVPAYAKYYQKKYAEVNRHRHKRALVLTARKSIGLYVGLLHRKEAFRFEESLN

SEQ ID NO: 49873 - protein, 401 aa, unidentified
MESPIVSIDVSNGNSHYMCFIKNNKRFGKVKKIDHDIEGFKRLLEDIQKLEAETNEKVCSVFEATGVYTKPLERFLSKNSIKTYIINPLESARKRKEEIHNKKTDKLDPISISKVYYDKEEMMELKKKDETHNWLRKKNRLYEDQLNHLRKYKVTFQNQLSICFPGYLDLFKDGYSDIPMTILKKYPHPDLLKNKKAETVARYLEKNTCHTHKVSLEYALKIIEFAKKTYPGCEKDDVEVEIFKILLDKVIETQRECEKTLNEMITVASTLEEYRYISSIDGIGPNLAARIIAEIGDIEEFKSREALVAYAGLDPHIYQSGDQDGKHLKISKKGNKYLRCLLFLAVGCSIRGAKDNPVNRFYQKKKQQSNPLNSKAAKTACTAKLLKIIYGICKNKTTYER

SEQ ID NO: 49874 - protein, 331 aa, unidentified
MNYIGMDIHKQFTVAVAKDEQGNKLAEDKFDNGEDNFSRFLQAFQPQETKIVIESSSVWEYIYEILDGMHYEVKLANPVRTRAIAEARIKTDRVDASTLADLLRANLVAESYIPPKDIRRLREITRERKTFVKQTTQIKNRMHAMLTRRGVKIPTSTLCKKTLLWLREKFKEDRVFTHYLNLLEYHKKELKPIDSEISDIAEKNKDTKLLMTIPGIGATRSLDIFAEIGEISRFPSADKLCSYAGLVPSIYQSGNTLRFGRLIKQSSKNLKHNFIEASWNIVRTKESNPLQEFYKKLAKKKGKQKAICATARKMCCVTYAMLKNQKEFMVV

SEQ ID NO: 49875 - protein, 318 aa, unidentified
MIAGFDIHKQVMQAAVLEPASGEFCEERFSGADGLAAWVARWGGRVEVVAIEATTGWRWVARDLEAAGLEVRLVDAGQARALRGKKRKAKTDRLDARWLCLIVARGLLGECEAWLAPIEIQRLRDQTRLRKALADDRTRWAQRLHALLVQEGWPCPRSRLLTRTGRRWVGGLVLDPQARAQVDVLLAVIGSLEQQLDSLETQLRRFARTDRRCRAVTQIFGVGPIIACHLVAEIGDATRFRRARQVVRLAGLDPVVEESADTRRRGHRGRQRSPERHLYHAVTRRSGSPQAKLTVARKIARRAYHVLQDLDRDQPQAA

SEQ ID NO: 49876 - protein, 360 aa, unidentified
MKIVGCDFHPSWQQVAVFDPETGEIAELKLLNGDGEAERFYRELEAPALIGIEACGNSQWFIELAERLGHVVWVGDAAQIRASYVRKQKTDRRDAGHILKLLMESRFPRLWTPTAAQRDLRQLLIHRHKLVEIRTRVKNGLQHLALNRGFPKQSSRLCGVRGRAYMEKLPLAGWTARRRDDLLKLLAELDKHLGELDAAVQRAADEHPQARLLMTQPGVGPITSLAFVLTIGDVSRFKHSNQVASYLGLIPREHSSGGKQRLGSISKQGNRFMRQLLVESVQTVNRLDEGFRKQYAARCHHKAKGVAKVAAARKLAVRLYWMLRQNVGYPEIARIESSPRVPLRGESHLATVNGRSRIQQ

SEQ ID NO: 49877 - protein, 325 aa, unidentified
MFLGIDVSKATLDVALIKDQKKPRHKVFANTATGHQQLLRWLQDNEAHPVHACLEATGTYGEAAALALHEADHTASVVNPAQVYHFAQTRLCRTKTDKVDAQSIAKFCQMYQPPTWTPPAPKTRTLQALVRRLDSLLEMQTTEKNRFAAGSNSQEVNTSIQSVLAFLEREIAAIKAQIREHIDSHPDLKEQRDLLTSIPGIAHTSAAAILAELGEVSQFAGGRQVAAFAGLVPKIRQSGSSVRGRAMLSKRGSSRLRHSLYFPAMTALRCNPLLRALRERLLEKGKAKMLILGAAMRKLLVIAYGVLRSGKPFDPNFAAKAVQIT

SEQ ID NO: 49878 - protein, 421 aa, unidentified
MYQLTGGPYTAYIGIDWADAKHDICVQAAGSEERDFDRVVHKPERIEVWAQALYQRFGGPIAVALELTKGPIVSALQKYDFFVIVPIDPIRLASYRNTFTPSGAKDDPTDAEFALDYMMRHPEKLNVLKPQSVPMRKLSYLVEARDRLKGDQSRFVNRLIQALKQYYPQTLDWFSERNTVVFCDFLTQWPTLEKAKRARKTKLETFFKNHNVRFAHVIEARIDAINAATPLTHDEAVIQAHQLQVEALVEQLRLTIQAMKRFDKEIVATAEHFSDYKLLFTPLPGAGKVLAPRLLAAFGEDRQRYPCAEELQRRTGIAPVTKRSGQSQWVHWRWQCSKFLRQTFIDWSAQTINKSAWAGAYYRQQRAKGSSHQAAVRALAFKWIRILYRCWQDRSPYDESKYLEALRRSGSPLLKQLAEAA

SEQ ID NO: 49879 - protein, 457 aa, unidentified
MGDDVMISVDPHKASNTLAVMDPVTKTVIARQRFMNTAVGYRRLREFAGGWTHRRWAVEGCHGAGRSLAQRLAGDGEIVLDVPAKLAARVRVYSQGHGRKSDADDAISIGLAALNSTRVAVVRRDDTLVSLRLLCDRRDELGALRTQAVCRLHRLLCELTPGGTHRGLRASRAEQLLAKLRPVDPVDVVRCQLAHQHLDDIRALDAKMTAVRAQIAALVDGTGTRLTELYGIGPVIAGRILAEVETIDRFPSKDHFASYNGTAPIDASSGEQVRHRLSRAGNRRLNHALHMMAVTQIRQPETIGRRYYERKRLEGKTPKEALRCLKRRLSDVVYWQLVADRRATITQCGSATTPTRTRPTSTSATTPVPRTAPPRRPPHPTASTGSSHSTGKTAASSASKSSTPAVGSPKTSSTKQKTRAEATRKPRTSSAAVPDRRPTSAAAAGVKAGAATRRARP

SEQ ID NO: 49880 - protein, 386 aa, unidentified
MYFVGIDISKYKHDCFITTETDVVIQNLSFKNNKDGFEEFLKILKSLNSSQQIRIGFEATGHYHLNLMLFLEKNDFSFMEFNPALVKKFISTTTLRKTKTDKADAIAITKYLMSVDYKPYPKQFYHKYALKSLSRRRESFVQQRSRHKVDLTNILDIIFPEFKPFFNNSFSATSIFILNTYKTAENIANMTDYESIKKVSRGKFSYSKFLKLKELAQNTVGVENDIYTFQLTGVLTLISTLDEQISLIEAKINEIMDMLKPRCNTIKGLGIITSAAIVAEFGDFSRFKSSDACLAFAGLEPSTIQSGCAEHNGKMVKRGSPHLRCALMNAAGYVYMHEPTFTIFYYKKRNEGKAHRVALSHVAKKLVRVIYKLETSNVDFDSSKLK

SEQ ID NO: 49881 - protein, 338 aa, unidentified
MDHYVGIDLHSTNNYIAIIDHDNKRVFKKKTKNDLRLVVQALNPYKEQIKGIVVESTYNWYWLVDGLIEEEYKLHLANPSAIKQYAGLKHSDDVTDAFHLANLLRLGILPTGYIYPKEERPVRDLLRKRLQLVQQRTAQILSFQNLIARNLGKSMNANAVKKLSEDDVAQLFQQEHLVVAGKASIATILFLSGRIKQLEKIIHKVAKLKDEYKLLKTVPGIWKILALTIMYETGPIERFAKVGNYASYCRCVGSKRISNEKLKGRGNRRNGNKHLSWAYVEAAHNALWHYDYVKRYYQRKMAKTNVVVARKAIAHKLARACYYIIRDQKEFDPTRVFV

SEQ ID NO: 49882 - protein, 409 aa, unidentified
MRPILRSCCGIDVHKSMIKACVAKGPLNKSPKIEIRTYSTMTSDLLKLSEWLKENRVQAVAMESTGVYWKPIFNILEADFPVSIANPKYLKKVPGKKTDVSDSEWIATLLRCGLIPKSFIPPMAIRELRDLNRTRRKMVEHMASEKNRLQKVLEDANIKLTSVVSKVDGVSSMNMIQALLTQDEISREDIAAMVCGKLKNKIDHLVQALHGRLTDHHRYLLRLHLKQIAFLADQIKELDDVIQKKMKAFKKESDLIKTVPGIGDTTSSAIIAEIGTDMSQFPDEAHLSSWAGICPGNNESAGVKKSGKIRKGDKFLKATLCEAAWSASKKKGSAYSAYYNNIAKRRGKKRALVALAHRMLMDIYRTLKTGEPYVDEGAEAVFERNSSSRQKAAIRFLEKAGYAVTKASA

SEQ ID NO: 49883 - protein, 459 aa, unidentified
MRILGIDLAVTAKHRAILADERGRFVGKLVKFRTSQADLERVYALARRGMAPDEPLAVVLEATDIVWYPVATFFQQRGATVYLVNPRMAADLARFYRRYAKSDRLSAQTLARLPVVNPDSLYSWVRPGPKYLALQRGCKELERLTTQASAIRNRLRSSDHLGWPDLHRRVFADPFGPAARWFRDYFYDPRRVVEAGVSGLRRAWRAAEGYDGSEDWIEPLLTLAQEVLALYGAQGEYLDYQALAAEVQREQRRLAKLEADAHRVRLRVTRPRYRQLHPSRNLETIRGIGQDGAAVHVAFVGEASRFVTNRAFRGWSGMVPYSDQSGEREGKGLRITQAGPDPVKKYAFLEAETARQWDPQIAAIYYDQMVNKGKHHTQAVCACATHLLDRIRVVLTEDRPYELRDVDGTPVTPQQARAIIAERYTVPDEVRQRNNHRARRERARQRAERKEIGEAAPDR

SEQ ID NO: 49884 - protein, 385 aa, unidentified
MTCRELPGAGVGPTPDNMNSINNNTELSSHEGTRRQFNGGKAVIKLGIDVHQDFYVVVSQEGGSNPKPPQRFAKEAFLYWAEKLKEKSVGAQIHAVYEACGFGFGLQRRLTSLGIECQVVCPQKLDERNKRVKTDGLDAKALCLRLDRFVQGNTDALAVVRIPTEQEEQLRAIHRQREQLVRTRKQLEAHGRSLMVNYSIEPVNKWWKRRAFARLEVPAWMKELLSNSQPLLLEVEEKIRALTVQLEAAAGANQPRGFGALTSVVIDREVGDWHRFNNRRRVGSYTGLCPGEYSSGNTRLQSCVTKHGNPRLRAALVEAAWRLVRFQPNYRPVVKWRGTLSKNALATGAARKKAIVAVARQLAVDLWRIRTGRLKAEQLGLNINK

SEQ ID NO: 49885 - protein, 319 aa, unidentified
MAQNDRVVVGIDVAKDKVDGCIRRFTLRQVFPNTAQGHRKLVAWLRKHKVDKAAMEASGGYERDWAKVLRQADIEVRIVDPKRVRSFALSAGRLAKNDPIDAEMIAWFAETFGEAPSQTHDAAREELVALVKARKGLMDIKIRLQSQNEHALPGPVQKANARVLKSLAAEIAKLEAAISATVKATPEFAERAEIIESVPGLAKTASATLVAGLPELGKVSDEIAAALIGLAPYDDDSGKRRGERHIKGGRRWVRNAVYMPCLSAATQHNPVLKTFYQRLIAKGKAPKVALVACMRKLIVILNTLIARRQKWDPTRYAAA

SEQ ID NO: 49886 - protein, 427 aa, unidentified
MLKHNTEPDPAPEFAAFLALDWADEEHAFHLQVVGQSKIETGTLEQKPHVLGPWVAQLRERFGGRPIAVGLEQSRGALIHGLMAYDFLVLYPIHPTTVAKYREAFKSSGAKSDPLDAGQILEILTKHQDRLHRFNPDTVQTRLLGRLVEDRRKAVGLRTTHVQALGANLKEYFPQALELTSDNLSSRLACDLLLKWPTFSDFQQAEPSTLRSFYYGHNIRSPEVIERVLALAEKSQALTTDPAIVESGSRLTQMYVRLIQALHPVIEKYDQRIQQVFDAHPEVKIFTGLPGAGPALAPRLLAFFGTDRSRYAAALNVQSFTGVAPVTKSSGKSRVVYARAACPKFDRQTFHEFSRLSVTHCQWARNYVQYYTDKGKKYHTIIRALAYKWIRILHKCWQERTPYNDDLYMETLKKRGSIFATLHLQTK

SEQ ID NO: 49887 - protein, 353 aa, unidentified
MTPLVIGIDPHSRIHVAAAVDEHGRLVDTCEVGASPTQLGQLLTWIQALAVTKVAVEGSKGYGLPLARLLVAAGHTVVDVSSNLTADERKRSRRRGKDDEGDAVAIARIALRESDLPIMDPAHLDADLKLLVDARDQLVQEEARVRNRLHALLLNMAPGYHDTTGPLNSRPAFARARSLALRARKSDPILAKLALAAIRRLNALREEQADLEKDIHGELEQRSTTHLQSIPGVGPLVAAKILGEVRDVRHYPSAAAFAAHAGVAPVPASSGNTQRHRLARGGNRQLNRALFTIAMVQARWHPPAREYLARKRAEGKTPAEARRCLKRHLANVVYRALQADLATVQSAALSPAA

SEQ ID NO: 49888 - protein, 363 aa, unidentified
MSAKGKTLVGLDVHAAQTHAAVLDAGSGELCVKKLWGPPGEVVSFLEGLGPGVRAVYEAGPTGFGLARAARERGVVLEVVAPGSIPKGPGDRVKTDRRDAVRLARLLAAGELRFAFVPSVADEQFRDLTRSIEDVRGDLMRARHRLSKFLLRRGERYPGPGGAWTAAHLRWLRDLSFDDVCSRSTFADYLAAVELLLGRRASLLAALEEAVPASSHAAVINRLRCFRGIDTLSAAGLAAEVGDFDRFAKPSLLSGFLGIVPSERTSDLKRRQGSITKAGPRHARRLLVEAAHHYRHRPLVGETLARRQAGADPRVTAIAWRAQQRLSKRWQHLREQRRKPAGVVAVACARELATFLWEAATLD

SEQ ID NO: 49889 - protein, 433 aa, unidentified
MGLIVPTVMPPERADQPPSYDGFVGIDWGSQQQQVSVLDRDRRRMGERVVDHDGASLAQFVAWLWGLSAGQPQRVAVAIEVPRGALVEGLVERGFHVFAITPKQLDRFRDRHSVAGAKDDRRDAFVLADSLRTDQPSFRRLRLDDPQLLVLRELSRAEETLLEAFRRSANQLRDQLHRFYPQMLQLCSAADAPWLWDLIDLAPTPAHAALLREEQVQGGLKAHRRRRLKAHEVLACLQTPARPVAPGAVQAAQAHCRFLLPCLRGLAEHLQACGQQVGALLHTLAEMPGEGEGPSDVAIVQSLPGVGRKMTAWLFAEAAQPLAERDYQVLRTHGGVAPVTKQSGKRRVVVMRRGGNPRLRHALYHMARVAMQRDAHFNSVYAALRAKGQRHGQALRSIGNRLLRILMAMLRHRTCYDASRIHREPVVQMGETI

SEQ ID NO: 49890 - protein, 387 aa, unidentified
MPQPNDLSRSRSALVQDSTIIAVVEMSQASWLVAAMVPGLDRHPLKKLEPDQDGLLRLLHRWQDEAVQAGRTITRIAVAFEAGRDGFWLARWLRSQGIEAYVIHPTSIAVSREHRRAKTDRLDTALLKRAFLGWLRGEPDHCSMAAIPSLADEDAKRPSRERENLVNERTRLGNRMNATLARFGIRSFRPTLRTAPEQLEALRTPEGVPLPPNTLAEMRRDLARLQVVREQIKEIEQARLERLERAPGGRHNTMVRLLARVIGVGVETADLLVNEILSRELRDRRAVARYAGLTGAPDESGAKRREKGLAKVGNARVRRGMLQLAWRFLRFQADSDLARWYRARTADGRGATRKTLIIALARKLLIALWRLAMTGDLSQGIILRPVV

SEQ ID NO: 49891 - protein, 403 aa, unidentified
MSNRFAGLDWASRTHAACVIDEHGSVHLQFEINHDAAGLAELCRRLRGAGVTAVAIERPSGLIVDALLEAGFSVVPIHPNVVKATRPRYRSHGGKSDASDAYLLADLLRTDGHRFKPLAPQSDDIRALRALVRGRDDLVATRVQLANQLRSLLQSFWPGAAEVFADVDSPIGLAFILRYPTPESASRLGPKRMAAFCSQHAYSGRRSAQELLDRLHQAPAVAVGELEMEAKGELALSLARTLDRLVAQIRLLTSRIEHHVGSIDDGRILMSFPRAGRVCAAQILAELGSVRERFDSDEHLAAEAGVAPVTYASGKSKAVTFRWACNHRLRAALTCMADNSRHANAWAAGVYARARARGCDHPHAIRILSRAWLRVIWRAWMDRKPYDPAQHRGARLALKTAGG

SEQ ID NO: 49892 - protein, 343 aa, unidentified
MQVSTIGVDLAKNVFQVHGVDSAGKVVITRQLRRKQVIEFFSKIPPCLVGMEACGTAHHWAREVSKFGHTVRLMPPSYVKGYVKRSKNDAADAAAICEAVTRPSMRFVAVKSADQQALLMLHRTRDLLIRQRTQLINALRAHLAEFGLIAETGREGLAQLAAIITDESNREALPSAMKQALQAIVDQLAALELQIGTLDRAIHAQHRANDMSCRLETVPGIGVIGATAIASTVTDPSGFKSGRDFAAWIGLVPRQHSTGGKERLGGISKQGDRYLRRLLVIGATAVVRHARQRPQKHPWIMRLLAKKPAKLVAVAVANKMARIAWAIMAKGGHYRAPELAIAA

SEQ ID NO: 49893 - protein, 344 aa, unidentified
MPIVGGLDIHRKQITFDYLDTATGEVRRGQIAPADREHLAAWLAGRFTGQEAHFAVEGCTGWRYVAEELAAAGITPHVAEPADTAALRGRKRHAKTDKTDSRHLRQLLADGRLPECWIPPAHILESRALLETYHDLRVEHTAWTQRIHAALFHQGAPQLGGQRLRTGEGLAALQAAAAQLSPAGQLQIAVALDKLAALDRHLDVLRRRLLEAARQLAGAKELHSRLYGVGPVTALALVCWLGGAGRFSSARKAVRFAGLDITVWSSDRKGPPGRLSRQGPEVLRWCVYEAGKTHARGSAPDYRYYASVKDRIDGKRAALSEARKIIRQAVHILAELGDGALAAA

SEQ ID NO: 49894 - protein, 429 aa, unidentified
MRSDGRVLNPRRSAAKPQYAALDVSNEETAVHIINGAGATVWRGKRVSDPDVLTAALQRYAPDLVRVGLETGPLTPWLYHTCKALGLPIVYLDARHARAATALQRNKTDARDAETLAQLVRMGWYREARVKSYATHTVRHLVGARAQLMGVAVDLSNQIRSTLKTFGLMAGKGAGRAFENRVHDLIAERPTVAGIVEPLLAAWRAVRGQISVPDRRLIALAKGDATCRLLMTCPGVGVIVATSFAAAIEAPEHFRHSRSVGAYLGLTPARHQSGEIDRSGGISRRGDRLMRTYLFEAAASLLVRVRQDSALKAWGRALVERMEFKHAAVAVARKLAVVLHAMWRAGTPSSLGPRPYEALVAEARRRRSPRSAGVKRTEASPPGREQSHPGLGLVAGLEPDRAFDMVSSASRRMVRRSIGPTAETTTIRR

SEQ ID NO: 49895 - protein, 387 aa, unidentified
MALKIVYKICCGIDVHKNFVVACIAKTDKQGVTTYERHHFSTYTKGLKQLLKWLLDRNCKDVCMESTGKYWIPVYNVLEHDCSIVLAHPKYVKAIRGKKTDKKDAKWIADLFKHDLVAGSFMPPADIRQLRDLMRYRFKLTCFKSSEKNRYQNCLTVSNIQLGNVVSDTFGKSSQKIIAKILENPDDTSFDIGSLIHGSMKDKLPELELAIDGYITPEQAAKLKIIKEHFDNLEARKAELEELILALANPYQQEISIILTAPGFKNTFTAIGIISEIGTNMEAFPSAKHLCSWAGLTPTNNESAGKKKSVRVSKAGCYIKPLLVQCANAAIKSKKHPEIRDRYLRIKKRRGHKKAIIAIARMLLTALYQIASAMASITYNTIVAFFK

SEQ ID NO: 49896 - protein, 356 aa, unidentified
MDSTKYIGMDVHKEATTIAVMNPAGKLVMESIVETKAATMVQFLDGLRGELYVTFEEGTWAAWLYDLLKPHVTKVVVCNPRKNALLKAGNKSDRIDARKLAELLRAGLLSPVYHGETGLRTLKELGRSYLAISKDLTRTMNRVKALYRSWSIPCGGTSVYAPRPRVEWLSKITEPGVRRRAELFYQQLDGLQRLRQEARRDLLAESRKHGATNLLQRIPYIGPIRAALLIALLQTPHRFRTKRQLWAYSGLALETHSSGEYHYVQGQLQRSKKPIALRGLNQNHNHDLKSIFKGAATKAGSATGPFHDFYTALIAKGMKPTMARLTLARKIAAITLLVWKKGVCFDAQQLKQQVSV

SEQ ID NO: 49897 - protein, 335 aa, unidentified
MSVYVGIDGHRKRSQVAVVNEGGEVLANRNVPNGVRPILSVIGELPAGTPAAFEAAHGWGWLLEVLEGYGFEPHMVHPLQCKAIASARLKNDKVDAATLAQLLRADLLPEAWIAPPEVRQLRALLRHRAQLVRLRTLLRNRVHAVLADYGYGRPAGCWSGPGRQWLAALELPAVSREVIDDALALMDALQQPIDRLDLEVRQRAKADPRVKVLTQLPGVGTFTALVLLAETGDITRFGSARKLASWAGLTPTVRGSDRTVHHGHISKQGPAWARWVLCEAAQTAKRHPDFAPGYEALARRRGKKIATTAAARKLLTRAYHLLTDLARASADGAPS

SEQ ID NO: 49898 - protein, 323 aa, unidentified
MAFLEHAPSHVVGIDVSKLTLAVCSAPGNTARTVASTGASTVANTARAIRKLVAGLPSGTLIVCEPTGGHEALLLAELAAAGIACHRADTLKARAFARSFGRLAKTDAIDAALLAAYGQERWRHLPLHRPADRTQAQLAALVARRHDLMAIRGAELNRAKSPGCTLVSASCRSLVRTLDRQIETIDTAIAGLCAQCTLLARRIALYRSLPGVGPRTAISLAAAMPELGTMTGKQAASLAGLAPHPNDSGTLKGYRKTRGGRPQIRSILFMAALSAARCKGPLRPVFQRLIANGKKPIVALTALMRKIVVILNARMRDHLNDMS

SEQ ID NO: 49899 - protein, 320 aa, unidentified
MSATFVVVGIDVAKEHVDVAVLGADIGAERFANEAEGHTGLAAALQPLGAALVVMEATGGYEALLACALQAAGLPVAVVNPKQARDFARAMGKLAKTDRIDAQMLAQLAGVLVRRDDLVKLLRPVESDEQQWLAALVTRRRQLVGMLSTERQRIQMTPAKLRGSVEAIIAAIKAQLDDLEGQMLVHVHKHFCELDELLRSTKGIGPTVSATLIAELPELGRLSRRQIAALVGVAPIAKDSGTMRGRRRIYGGRFDVRRTLYMATLVAIRHNPTIQAFYKRLTGAGKLPKVAIVACMRKLLTALNAMARTNTPWDNSRLTA

SEQ ID NO: 49900 - protein, 372 aa, unidentified
MNYNTVYVGMDVHKESFTFCAYTIDAEKGSHFQRTEADYKNVLKYLEFLRTVYGNNANFICGYEAGCLGYTLYHQLTEHQVNCVILAPTTMLEQRSKRRIKTDRRDAEIIAKCLAQHNYSPVHIPTATDEETKEFLRMRDDHKLALKKVKQQILAFCLRHNYRYDGNSHWTAAHIKWLKSLNPEALYKEILDEYLLTYTTLSDKLERLDKRIEELASKDEYRESVKKLCCFIGIKTHTALSVLVEVGDFQRFASAQNFASYLGLVPGEDSSGDGQTRLGITKAGNRHVRMLLTEASQCYARGQIGFKSKELKSRQAGNSPQVIAYADKANERLRRRYYKMVLGKNKKHNVAKTAIARELACFMWGMMTDRIA

SEQ ID NO: 49901 - protein, 319 aa, unidentified
MAQNDLVVAGIDVAKDKVDVCIRSVSLTRAFASTAEGRRELASWLRRQKVGNAVMEASGGYEREWAKALRNAKIEVRIVDPKRVRSFAQSAGRLAKNDRIDAEMIAWFAETFDEARGQAYDVTREQLHQMVNARQALKDTHAKLENQGEHTMPAAVQRAHARILKTIAVELVKIDAAISAMIQATPRFTELAEIIESVPGIGRTTSAALIAAMPELGQANNKIVAALLGAAPYDDDSGRRRGERHIKGGRRRTRNVFYMACLGAATRHNPVLKAFYDRLVAKGKEKKVALIACMRKLICILNVMITRGQRWDANRYALS

SEQ ID NO: 49902 - protein, 378 aa, unidentified
MNATTATRSSASVVGVDVAKSVFQLAVADRNWKVIETHRLTRSQFERWFANREVGLVVMEACGSAHHFARWLNGLGIEVLLLPARYVRAYVKRNKTDAKAVEALLEAVRASDISPVRVKSIEQQALQGMHRIRSLWMGTRTSRINALRGFCREFGITISQGSRLGVEQISRVLADPDSAVPTLIRGTMKLLIDEIRLLEARVAQLERELTLLARQSSACTTLLSIPGVGLLTATAMVAATSGSVAHFKSARHFASWLGLTPRERSSGGTRHLGRISKQGDRYLRMLLTHGARSVLHAIGARQAAGKPLDALRAWAGALQGRTNHNKATCALANKLARICYATLRDSQPYAPKEVPLGDGLPAPRFNHKIERTAFAVAT

SEQ ID NO: 49903 - protein, 310 aa, unidentified
MNSISVGIDVSKGLLVSSINQAKPFELANSLQGSRTLASMLPEGSIVHLEATGGFERQVRKTLMESGFTVRVHNPCNARRMNQALSVRAKTDPVDAVSLSRSGHLLPEREPKSVEREMLADHSRAIEAISETIADFKRRLKQPNLDDVAATAYLKVVDDLTQRKLELKDSFAQRILNSSLREQYKLAQSLPGIGAYTAARVLVELPENYLEVDPDQIASYAGLAPMDHSSGKYKGTARVGMGNPHLKGALFMGTQSLIARDAKVKAKYHRLRERGHAHQKAMVALMRHRMTLLIRVLQRGTPWQKEPPTP

SEQ ID NO: 49904 - protein, 334 aa, unidentified
MDHLAIDLGGRESQICVRRADGAVLEERRCRTSGLAAYLASRPHSRVIVETCSEAFRIADAALAAGHEVRVVPATLVRTLGVGARGIKTDRRDAQVLSEVSCQIDLPSVHIPCAETRARKTLCGMREGLVQARTQLINTVRGWLRAEGRLPRSGDTATFPARVRAQASPCPAYVERQLRAIDALTTEIAAADRELAALTRRDPLLQRCLTVPGVGPVTAVRFVAALDDRARFPGAHAVESYLGLTPGEDSSAGRRRRTSITKAGPAAVRWCLVQAAWAARRTRRKDPIHRWVDAIVQRRGVRIAILALARKLAGILYAIWRDGTVYEPRRASLA

SEQ ID NO: 49905 - protein, 388 aa, unidentified
MQNIIHRPEGRAAIRTDLGAIFVSLELSRATWLITSLSPGAGEKMSKHVVQGGDIVSLLRRLAHLQEKVRGRRRKEFPLVVIQEAGLDGFWIHRVLEHEGIESHIVDSASIMTSRRRRRPKTDRIDGEALVRALLAYHRGEPRVCAMVRVPTPEAEDRRRVSRELKTLTAERVGHVNRIKGLLFAQGVSGYAPLRRDRRTRLEELRTGDGRLLPYHLKRQIGRELDRLELLLEQMNAVAAERDALLVPAEEQAAPTPAKMLLGLRGIGPDFASVLWQEGLFRHFDNRRQVAAYAGLAPTPWQSGAVDHEQGVSKSGNPRLRTTMLQLAWLWLRHQPSSALSQWFHQRVGDNGRIRKVMITALARKLLVALWKYVTAGVVIEGATMKTA

SEQ ID NO: 49906 - protein, 607 aa, unidentified
MSTIASLDRIGVGIDTARYGHRVSFLRPDRKPAAKPLTVMENRAGYQTLQDRLNQLHEQHPTAHFHVRIDAAGQYAVNLELFLRGLKLPMTISVGEPKRNKDYQKAHFPKRTTDDTESQAMARFAVIELPNATPAPSTPMILLREVAGRLQSKVKQTTQAINRLHNLLARVFPELATRTEDMSAGWVLKLLDKYPTAERIAQAQIASLEKIPYLSVEQAHAVHQAAKQSVASLRGELAEALVRDHVNQLRLCQKAEQHLHQLLLEAFADLPASPHLQVLTITGIGEATAAALVAKIVDINRFATPNHLVSYFGVFPEESSSGVDKRGRPLPPGTLIMSPKGNDLVRFYLWNAARNAIQHNPAIRALYRRLRAKGKRGDVAFGHCMRKLLHLVYAVWKTDRPFDKEHFPWEGSSDTQPSTTTPLSAEADTTPSANEKAVGHKRDLPAEAVVTTADSTLEPASPAVKPASQSAAPRPKVDFACVREHVTMEQVLQHLGYFASLRGRGQQRRGPCPVHSQPTAPERTFSVHLGKNAFQCFHAECAVKGNVLDLWAAIHRLPLYEAALDLAETFQVPRNREEEPVKGTSSPRTATAKTSAPAAATATDGAK

SEQ ID NO: 49907 - protein, 413 aa, unidentified
MPQKTDYVYVGLDIHKETHTAVLMTYMEERLGKIKITNNIAGYRRLQAYVDKFRGELIPLYGLDDVSHYGRDLAIYLLDQDYTVKEVNSALSCMERNSYATVKKSDEWDAQCISAVLSRRSAILPDANPQDYYWTMKHLVGRRDALVKNTSSLIQQFHEQIQKQYPSYKQFFHDIECQTSLAFFERFPSTGHLNGVTVEELGAFLREKSHNTCSDKRAELILKLVEQDHTKEREYQSGRDLILQSISRQVYFNQQEIKQLERMQGELLKELGYHLETIPGISTVTASALVAHIGDIKRFKNADKLANYAGVAPICHSSAGKGKDLQNKGMGNRNLYNVLYLLAMQQIQINRDGKARNPLLRAYFECKVSQGKTKIQAMICIMRRLVSIIYSMMKNQTSYRKPELEDQKEQMIS

SEQ ID NO: 49908 - protein, 344 aa, unidentified
MQITTVGIDLAKSVFQIHGMNERGKAVIRKQLRRDQVATFFANLPACMVGMEACSGAHHWARKLQALGHTVRLMAPQFVKPYVKSNKNDAADAEAICEAVTRPNMRFVPIKNIDQQSVLALHRVRQSFVKSRTAQANQIRGLLAEYGLIVPQGIGNIATRVPDLIEDATNELPGTFCLLIDRLLEHLKLLDRQVAEIEAQIKAWHRRSETCRRLEKVPGIGPLTATALAASVGDAKNFDNGRQLAAWLGLVPRQHSSGGKATLLGMSKRGDAYLRTLLIHGARSVIYRARQKTDQDTWLHKLIARRNPNVAAVALANKTARIAWALLAHDREFRIDFAPASEAA

SEQ ID NO: 49909 - protein, 311 aa, unidentified
MTDDTIGIDISKATLDIHRLSDGKMMSFSNCPAGFKALSKFCAKTSVTRVVYEATGAYHSRLERALGAHLPLVKVNPLQARRFAQAQGMRAKTDAVDAKMLAVMGDTFVLKPDEPATKIQHDLRELRAFRSGLVKDRTRIMSRLKTQTLPITCRQSKTRLAQVDKNIAEVDTEVDRLINSNDTLANSMKILRSIPGIGAVCASTILIEMPEIGSMDRKQVACLTGVAPMTRQSGQWRGKSFIQGGRKVVRDALYMPALVAMRFNPDLKAKYQAMIKAGKPPKVALTALMRKLIELANALIKANRNWVKKAT

SEQ ID NO: 49910 - protein, 362 aa, unidentified
MAKVVSWAGLDVHAATVVAVTVDGESGELRAHRLSGATAEVVAFCAGLPGPTKVAYEAGPTGFGLARALEAAGVACVVAAPGKIERPAQDRVKTDRRDAERLVRLLMVGGLHAVRVPSTGEEALRDLVRAREDVRGDLMRARHRMGKLLLRHDVRYDGAGENWTTRHRDWLGRVELADHGAQVTLLDYLGAIDALVVRRDALEHAIAELVPDSPWAQTIARLRCLRGIDTLTAVGLCAEIGDFERFGRAGQLASYLGVVPSEDSSGQRRRLGAITKTGSRHARRLLVEAAWHYRRPPRRGPTLAARQAGQPAHVLALAWKAQQRLHHTWRRLDHDRGKRRTLVAVAVARELAGFCWAIARTD

SEQ ID NO: 49911 - protein, 342 aa, unidentified
MQITTIGLDIAKNVFQVHGIDAAEKVVVRKQLRRSQVLEFFKALLPCLVGIEACATAHYWARELTKLGHQVRLMPAKDVKAYVKRNKNDAADAEAICEAVRRPTMRFVQVKSAEQQSQLMLHRTRDLLMRQRTQVINALRAHLGELGMTAAQGPAGLKELLAIIAGSADERLPAEAHASLIVLAAEFQAMQTLIASIEKRIIAHHRLDEASKRLRSIPGIGLVGATAIAATVTDPRAFRSGRDLAAWIGLVPRQDSTGGKQKLGPISKQGDRYLRRILVVGAHAVLKLARQKPEKYPWLTQLLARKPFKVVAVALANKMARIAWALLVKGGPYRARALVAAA

SEQ ID NO: 49912 - protein, 352 aa, unidentified
MGNSSNVASGSVVGMDLGDRWSQICRIDWNSGETLEERRLSMTTPSLQRYFSGLAPSRVILESGTQSAWVRRLVESLGHEVITANPAKVQAIASSQQKTDERDAQCLARLGRVDPRLLSPIHVRSPEAQQALAVVRAREGLIKARTMLVNQVRGTVKSFGVRLPGCSAKCFARKVPQTVPQALQAALEPLLAVIADLSDRIYRFDRDVEAWAQQLTATQRLRQIKGVGALTALAFVLTLDDPHRFARSRSVGAYLGLVPASRSSGRSKPQLSITKQGDRLVRQLLVQASHYILGPFGQDSDLRNFGLELARRGGKNGKKRAVIALARKLAVVLHRLWVGDADYEPHRQPATA

SEQ ID NO: 49913 - protein, 369 aa, unidentified
MTFFIGVDLHKTQFTVHVRTEEKVESLDQIKQYPTTTAGYAEFLSRIETYKATGAAVKIGVESTGNTRFFKNQVEKAGAEVTVINTLKFKVINESTKKTDKHDASTISEFLSKDMLPESYLCGKETENIRRLLKSRERLVRSTVGQKNEIHALLVSLGLSDELRSLQSKKGRQRILDTLESNNDYVLEAQSVKLMFEIIERIEESVKIIEKQLSELTKDDEMVNRLMTIRGCGKITAWTIRAYTEDISRFATAKKYAAFCGLVPWVQDSNETIHHGKITKRGPQELRTCFVQLVMGIRRCKDTSEWRMMRRYEYMKKNKGSGKSIVAAARKMAEIVWAMLNDKQDFDSAKMIGKYKPMILADEALAAMN

SEQ ID NO: 49914 - protein, 369 aa, unidentified
MEKDTTYVALDDSKRKIVVGILRSGDTQPELREIANDPRQIRRLFERLKREGPVAACYEAGVSGYDLHRQLIALGVAGAVIAPALTPRRPGQRIKTDRRDAAKLVRLFRAGELTAIHVLDESEEAVRDLVRCRDDIRRDVLRWRHRVLKLLARHGRACLTGKNWSRAHWQWIREQRFDLPPLQRAFEATLFALEQALAGQAELDKELEAVAATASYREPVGWLRCFRGIDTLSALILLAEVGDFQRFRRPRELMAYLGLVPSEYSSGASQRRGALTKAGNSHARRILVEAAWHYRHRPTIGRALASRTHGQPDEVVAQAWRAQQRLHRRYRHLVGHGKRTPVAVAAVARELVGFIWAAMTRHESRRAAA

SEQ ID NO: 49915 - protein, 438 aa, unidentified
MRSIGLDVHKHFAEVAIVQPGQGIVSRQRLPVTPAHLRQFAAGLGPDDQVVLEASFNTWAVADLLREHAGRVIVSNPKKTRAIASAKVKTDQVDAGVLAHLLAADYIPAVWVPDDATRTLRRRVSEHRGLVVQRSQFRNRIHAILNRNLVECPYTDAFGRAGRQWLTALPLPGPERCEVNRLLRLMAALEREIAQLEMELAQARLQDAGLRHLITVPGIGLITALALLAVIGDVKRFARPNRLVGYLGLDPRVRQSGDRPAYTGHISRQGQAHARGLLLEAAHAAIRVPGPLHAFYERVRARRGAQIALVAVARKLATLAWHLLTKDREYQWVRPSLKAQKWRLVELRAGLPKGAIRGIWTRPNREQEDEILRQAEAAYRSLVAARRPQTDAAAPMRKRLEGRRPDARRRSHPHPPLFSQGSTASAASIVLQLPEKRE

SEQ ID NO: 49916 - protein, 344 aa, unidentified
MNNHTQYLGFAGVDLAKKVMQIHFVTEDGEITDKSAKRAEFLDFFRNRGKCLIGMEACGSSQDWARRLEAMGHEVHLMSPKAVKPFVSGQKNDHNDAIGIYKAMFNGVRRVPVKSTEIRDLQTLRRIRSQVAKDKIKEINHVRGLLAEYGIVMGKSVAAFNKGISSALVSLKERGDVSPLVAEELRTTVESIKTKIERQKRLDREIEQLARGCKNYENFLKTPGVGPFTAAMLCVLLCDPAIFANGRQFAAYIGLAPRSRGSGGKNFIIGIPSKFNCDSESRAVFVECAQALARYKNKSPWVDGILRRKPKKVAVIAIANKLARQVWAMANKGESFKQMTILTA

SEQ ID NO: 49917 - protein, 403 aa, unidentified
MSGYFAGLDWASTTHAVCIIDEHGGVQREFEIAHTAAGLSELVRHLKRCGTPPIAIERPSGLLVDTLVEAGFTVVPIHPNVVKATRPRYRSHGAKSDASDAYLLADLLRTDGHRFKPLAPQSDELRALRALVRGRDDLLATRVQLANQLHALLESFWPGAAEIFADIASPIAVAFIERYPTPEAAARLGPKRLAAFCAQHAYCGRRPIEELLARLQRAPASACAELEMEAKGELARALARTLRGLLEQQRALSSRIEHHVAELEDGRLLMSFPRAGRICAAQLLAEIGTVRERFTSEAHLAAEAGVAPLTFASGKSKAVAFRFSCNHRLRAALTCLADNSRHASPWAAAVYARARARGCDHPHATRILARAWTRVIWRAWQDRKPYDPTRHRAAQQLVPTITG

SEQ ID NO: 49918 - protein, 340 aa, unidentified
MSKRSNPEQTSVFCGIDVSAATLAVAVQQQDQPAEQREFANSTSGHKALIAWLGKRKAKVRVSLEATGIYSLDLALALDVAQNIEVAVLNPKLVNRFAQTLQRSKTDRADAHMLAEYSRRMPFTAWRAPAREGLGVRTLVRHIDSLTVQHTREKNRLHAAQGSVATSRCVVEDLKRSLAALQRRIARLRREARALVQADETMRQNFALLISMPGIAEISALQLMGELTLLSPEMSVRQWVAHSGLDPAHKVSGSSIHLPSRISRAGNRHLRRALYMPALVAVRRDPHLKAFYETLLARHKAKLQALIAVARKLLHAIYGIFRSRTPYDGRKLFPHLLLTE

SEQ ID NO: 49919 - protein, 339 aa, unidentified
MREVSTIGLDLAKKVFQVHGVDAAGETVVRRVLRRARVLAYFAQLPPCLIGMEACATAYYWARELGKLGHRVKLIPPAYAKAYLRRNKNDAADAAAICEAVSRPSMRFVEIKSEAQQAAAGIHKVRDMLMKQRTMLINALRGLMAEFGIVVGAGTRHVGELTAILADPEEQRIPALLRDGLRRMAEMLRGLERQLEGIDKQIVDWGRGNAACRHLITAPGYGPILSSAMAAIVVNPAAFRSGRDFSASLGLVPRQDGTGGKVKLGPISKRGNGYLRRLLVNGAMSVLNSKRAKQDPWLVKLLANKERKVAAVALANKMARIGWALMTRQEDFRATPAAA

SEQ ID NO: 49920 - protein, 387 aa, unidentified
MSQLNDLSKSLVALEQDATLIAVIEMSQSSWLVAGIVPGVERQPLKKLTTDQDALLQLLHRWRKEANEAGHVIKRITVAYEAGRDGFWLARWLRAHEIEAYVIHPSSIPVSREHRRAKTDRLDTELLKRAFLGWLRGEPKHCSMAAVPTIADEDARRPSRERENLVREVTRLVNRMKANLARLGIRGFRPHLAQAAGQLQTLQTPEGTAVPANTLAELRRDMDRLRFVKQQIKQIEAARVQRLESEPGERRHAMVYLLARVVGIGVESADMLVQEVFSRKLRDRRAVARYAGLTGAPDESGNKRRERGLAKAGNARVRRGMIQLAWTHLLHQKDSVLAQWYRARTADARGRTRKIMIIALARKLLIALWRLVTTGEAPAGLLIRPAA

SEQ ID NO: 49921 - protein, 365 aa, unidentified
MLSRKVENDEDDLLKLIDEALCLAEEVIWAVDQPGGGAALLLALLWERNQRVLYVPGLTVDRARDAYRGESKTDARDARVIADQARMRSDLGELRPGEQEIAELQLLLARRRDLVTDQSRTITRLREALLSLFPALERALDVNSKGPLTLLTHYQTPTQLRRAGHKRIATYLRNRGVKGSNKVAHKALGAARSQSVTLPAQEVAAAIVAELAEDVLGLKDRLESIDQELGQRFFARPEARVLVSLPGMGPILGAEFLVVVGEISAFESADRLAAYAGLVPAARDSGKRVGNNKRMRGGNKVLKRVFYQSAFASLRSAPESRVFYDRKRAEGKKHTQALIALARRRVNVLWAMLRDGTTFEDRSAA

SEQ ID NO: 49922 - protein, 391 aa, unidentified
MVYIGIDIAKENHYASFADSNGEVIQEAFLVKNSINGFNYIMNKLEEHNINIDDCLVGMESTGHYGESLIHFLHNKGFNIGIINPIQTDALRNSNIRKTKTDKIDTYLIIQSLMLKHYTPFVAKDIKILELRSLCRHRDDVLKYRTKLKVRLVTFVDQLFPELNLVFNSVHLKSCYALLSAYPSPKEIASTRVDAIANLLSKASKGHFSLEKAQTLKELAKKSIGVNNSSLSIQIKHSLKQIELLDSQIKDIDIKIKEIMDELNSVILTIPGISYTLGAIILSEIGNIDKFASSTKLLAFEGLDPCVKQSGNFNATIVKMSKRGSKLLRYAILRASGLIIWNSETYNTYYNRKLSQGKSHNNAVCHVAHKLTRVIFHMLKENIDFKEQLEN

SEQ ID NO: 49923 - protein, 327 aa, unidentified
MPDSTVGVDISKAHLDAYRAPDGKAARFTNDAAGFKALIAWIECPVRAVTYEPTGHWHRAFEEALLTAKLPLARVNPLQARRFAQAIGQRAKTDVVDARVLAQMGAALDLRPTERTSPAWRALEELRVARDALIRDRTAALNRQKHTRQRLLKQQNKTQLAQLDRHLAAIDAEIGKRLAEDAALTRRAEILTSIPGVSRITATGLLIQMPELGRLDAKAVASLAGLAPVTRQSGTWQGRSFIQAGRAQVRRILYMPAVTAMRCNPDLRAKYRQLVAQGKPGKVALVAVMRKLLVLANALLEQDRTWQPERPGQDRTPSTGEAPLVAA

SEQ ID NO: 49924 - protein, 386 aa, unidentified
MQTLNDLSRSLIALEPASTLIAVIEMSLSSWLVAGIVPDIERQPLKKLAVDESALLRLLHRWREEAEKAGCRIERIVVAFEAGRDGFWLARWLKARSIEAHVIHAASVAVSREHRRAKTDRLDAELLKRAFLGWLRGERNHCKVVAIPTLKDEDAKRPSRERESLVGEQSRIVNRMKAALIRLGIRGFNPKLKRAAGRLDDLRTPEGEPIPPNTLAELRRDMERRRLISNQIRQIEEARLKRFEQAPNDGPHAMVRLLARVIGVGIETADMLVHEVLSRNMHDRRAIARYAGLTGSPDESGRKRREKGLARSGNGRVRRGMVQLAWRFLTYQKESALAQWYRARTENARGARKPMIVALARKLLIALWRFVWQGVVPDGIVLRPAQ

SEQ ID NO: 49925 - protein, 357 aa, unidentified
MTSIISKQLYYLGIDLHKQTAYWTVLDEDRSVVWQKNTKTTKEGIEEAVESVPGEPHLYKAAIESITNAPWYAGMLERFGMEVKIVNPLAVGLIARNRLKTDKADSKILAELLRNGFLPECYRAPAKIRNMRETVRFRQKLVRIRTIIKNRMHSLLAKEGIQHKFSDLFGKEGILWLREESKTFPTCDQMDSLFKLLDDTNAEIERFEHTIRTHNKHSSEIQILKTIPGIGDVSACTILAEVGDFGRFPTANKLASYAGLVPSSRSSGPRDKLGHITKKGSRTLRFAMVQAAQRIPPKYEHLHSLYRKVSKKKGTKVARVAVARKLLVIAYHLIKKKEPFQILSFEHSSSVKHGSCV

SEQ ID NO: 49926 - protein, 338 aa, unidentified
MDRQYVGIDFHRRRSVIVRIAADGERLGLHRIVNEPLELAKVIALCGEAPQVVIEATYGWYWAVDLLQELGAVVHLANPRALNWGDRRVKNDVNDATDLADMLRLNRLAEAWIAPAALRELRELVRYRAKLVQLRSGLKAQVHAVMAKEGVLPAVTDIFGPAGTRQLDQLELGTPFARRIGSLRGLIVAYDGEITALEREIHEHLRHHAGYRAVQAINGIGPISAAVLVAEIGDVTRFPTPAHLCSWVGLTPRHRESDLKTRRGHISKQGSRLVRATLIEGISRYHGGPHLDAQYHKLAKRRGRNKARVALARKVLTLVYYGLRDGEIRCLAPVETAA

SEQ ID NO: 49927 - protein, 311 aa, unidentified
MTDDTIGIDISKATLDIHRLSDGKMMSFSNCPAGFKALSKFCAKTAVTRVVYEATGAYHGGLERALGAHLPLVKVNPLQARRFAQAQGVRAKTDAVDAKMLADMGHVFALEPDEPAAEIQHDLKELRSFRSGLIKDRTGIMSRMKTQTLPITCRQSKARLAQVDKQIAEINAEIDRLIHSSDTLAHSMKILRSIPGIGAVCAATILIEMPEIGSMDRKQVASLTGLAPMTRQSGQWRGKSFIQGGRKVVRDALYMPALVAMRHNPDLRAKYQAMINVGKPPKVALTALMRKLIELANALIKANRNWVKKAA

SEQ ID NO: 49928 - protein, 344 aa, unidentified
MKTTEALDQVCCGMDLHSSNVYICVKDIDGTLRYSKRLKNDLNAILKALRPYKTLKHIAVESTFNWYWLVDGLMENGYQVHLANPAQLSDCAAPKVTGDRYDAARLAYLLQRGDLPEGYIYPKEIRPVRDVLRRRLMLVRQRTQTILSLQAMYARTTGKQVSGAKLKKWTLIDVQKVFEQDADQFSAGELLATIQGLEKRVKKMDDYVRKFLKTYPNYERVMQLPGVGQALSLTILLETGPVERFASPGQYASYCRAVPSKRTTNGKSKGQNNRKNGNKFLGWAWVEAAQYAQQHHPRIQSWFQKKQRRTCRNVALKSLAAKLSKATYIMLRDQSDFNEQLLFG

SEQ ID NO: 49929 - protein, 465 aa, unidentified
MSKLRKRNRARSSQGATRPFEGMRQVHPHAAGVDIGAHEIVACVPDGDDQQIVRTFGTDTVDLQTLADWFVDRGIQTVAMASTGVSWIPLCEEREARGLPCCLISAQSIKRVPGRKSDVLDCQWIQTLHSYGLRAASCRPAADLVALRTLLRHRAQLLEHRAPHVLHMQQALLQMHSPLSHALRDITGATGQRLIRAMVAGARAPQHWAAWRNDRCKKDAHEIAMALTGTWREEHLFVLTQALALFDFSTTQLSACDAQVEHAFAVITPHFESTAEASVPARAAVPPRRKPHSPSKNAPEGNTRAHILRITGVDLVAVHGMSDSLAPTIVAEIGTDMSQWPDDTHFCSWLGLAPNNDISGGKVLKSRTMKHRNRAAQAFRMAAQSVIRSHCAFGAFYRRLTGRLGPAQALVATAHKIARTVYHMLKHRVPYYDIGAAEYNKRFREREMHSLQKKAAKLGYKLSPG

SEQ ID NO: 49930 - protein, 412 aa, unidentified
MDVIVDRCAGLDVHKRTVVACVRTPGTGRRKRDVEVRTFETFSDDLVRLREWLIASHVTEVAMEATGVFWKPVWDALEGHGFEVLLVNPAHIKNVPGRKTDVNDATWIATLLECGLLRGSFVPPGEIRQLREITRYRRQLVEERSREVLRLQKLLEDAGVKLSSVASDTLGVTGRAMLEALIDGERDPGVLAGLAKGRLKVKSELLARSVPGRFNNFHAVMARELLDHIDYLDLAVTRLDDQVDVLMIPFVDARDRLDTIPGIAKRCAEIVIAEIGVDMTRFPTPGHLASWAGLCPGNNESAGKHKSTGTRSGNPWLTSALVEAAWAAIRTKDCYLAVRFQRIRKRRGEQRALIAIAHTLLVICWHILADDTVYNEIGTDYLAGRDQPERRRRHLVAQLEQLGYTVELAPAA

SEQ ID NO: 49931 - protein, 392 aa, unidentified
MFFLGIDIGKNTHVASLIDDNGKTVFKAFSFPNSTIGATSLLDKLTPFSNEIEIGMEATGHYWLALYSFLVEHGFVIHVINPIQTDGWRNATEIRKHKTDIIDSLIIADFIRYGEFLETSLANEDILSLRNLTRFRNYLVSSIGDLKRKTICILDQIFPEYESVFSNIFGKTSKEILLHFSSPAEFESITSEQLETALEQVSFKKFASKKISYISNIAKTSFGITFAVQSLTLQLKLLIKQINFIEQQVHDVEIQIKQLLHKINTPITTIPGIGDIIGATILGEIGDIERFSNPSKLVAYAGIDASVHQSGDYISTNNKISKRGSPYLRTALFRAALIASVHDPVFKAYYQKKRSEGKHHLTCLGAVARKLCYTIHAILKNNCEYKVQLPTE

SEQ ID NO: 49932 - protein, 401 aa, unidentified
MIYAGIDVSKASARCVFLDNEGEKLKAFSVGTDKEGFDKLLALIKELKLNKDNSLFGIEATGILWENLFSFLTELGFKVILLNPYQTKRYREALRFKAKTDDIDAYVIAGLLRSKDFSSSFIPEDRIQALRDFTKLRYELVKDRTNYQRQALSLLTLVFPEYSNTALKHPFGIASLAVLKQFPTAKHLAAAKLKQIEAIVRSIKGNNFSVDNIQNLIDTAKISVFSGRASDARALSLKILLSQIESFDNSITSLDAQIDALLTDDQQNNTPGSNLLDIPGVGPKTVAALLSAVGDGKSFLNGINLIGYIGFFPVIKDSGETKFKRHISKAGPKYLRCALYLAAVSCIRHNPQFKRIYTIKRSQGKSAKQAIICVAVKLTHTMLSMLKSGKPYDPARVFACS

SEQ ID NO: 49933 - protein, 387 aa, unidentified
MPQPNDLSRSLVTLEQDSILIAVIEMGQSSWLVAGIVPGIERQPLKKLAADQDGLLQLLHRWRKEAAQAGHPIKRIAVAYEAGRDGFWLARWLRAREIEAYVIHPSSVPVSREHRRAKTDRLDTELLKRAFLGWLRGEPKHCSMAAIPTVEDEDARRPSRERESLVGECTRIVNRVKANLARLGIRGFRPRLAHAPKRLETLRTPEGTAVPANTLAELQRDMAHLRFVKQQIKEIETARAKRLEQASGGGRDAMVRLLARVVGIGIETADMLVQEVFSRKLRDRKAVARYAGLTGAPDESGQKRRERGLAKAGNARVRHAMIELAWGHLLHQKDSALAEWYQKRTVDARGGTRKTMIVALARKLLIALWRLVTTGEAPAGLLLRPAA

SEQ ID NO: 49934 - protein, 462 aa, unidentified
MPERNDRESGESNRRQLQGLPVIRRNVAGVDLGSERHWVCAPTQDGNGREIASFRATTPELLRLAEWLKARQVESVAMESTGVYWIAPHEVLEAQGLQVLLVDTRQLARVPGRDKKTDPSDCEWIQRLHSCGLLRGSFRPEEAVCMLRTLVRDKANLVAESGDWLRRMQKSLDQMNVRVHRAVSDIDGVTGMAILRAIAAGERDAQKLAQLRDRRCNKTEQEIAEQLTGHWREDHLFSLQQALKMYDAVQERIAAYEQEILRQLEEMEEPGQRGQTAPQLNNANKTQAIKKRGQEAKRQALYRMSAVDITQIDAIGVETVEVVLSEYGPDLSRFPTEKEFVSHVTLAPRVPRSGGKPLKKKKRNSASTRVAAALRMAALSLRHSQTALGAYYRKLAQRLGGDVAVFATARKLATLIYRLLRWGQPYMDEGVEAYEKRYRQQRVKSLTAKAKDLGYELTALNT

SEQ ID NO: 49935 - protein, 320 aa, unidentified
MQNITKYKHFVGIDVSKDKLDIYDSRTGTFSQVANTRTAIKQFVYQNKPQSDLLIVIDLTGGYEALAVELFHTAGYCVHRASGVQVKAFMRACGQRAKTDRIDAYHLALYGDKMQENLKLYTDGQNKLKPIVERLEDLKSMLQQEKNRLSAPTLDPTIKTGLKRTTAFLQRQIKELEQAAAALIDKDAELSAKQAVLLQEKGIGRQIALVLLALLPELGVVNRRQIAALAGVAPYAKDSGTLSAHRFVRSGRPPVKKALFMAALVAVRHNETIKTFYDRLIDNKKPKLLAITAAMRKLTIIINAKIKNYLKNSNGDIKVG

SEQ ID NO: 49936 - protein, 347 aa, unidentified
MKFYTKSHQYYCGIDLHARLLYVCILDERGNKVLHQKIKADPHQLFKLLEPYIGNVVVGVECMHCWYWVSDFCRELKVDFILGHALYMKAIHGGKAKNDKIDSYKIASLMRGGYFPLAYNYPAETRSTRDLLRRRTHIMRHGGELKAHVVNTDSQYNLPAQSLNLKNVSAREGLRHHYDDPIVQRMIELDMNILDCYIRELKHVESFIENKAKQHYGALLSIVRTFPGIGQILGLTILYEIGDIERFASVQKFASYSRLVKCKAESAGKTYGTSGNKIGNGYLKWAFSEAAVLYLRNNDKAKHYLTTLQKRMNKAKALSALAHKIGRCVYFMIRDKQVFDEKKFLKG

SEQ ID NO: 49937 - protein, 351 aa, unidentified
MRIIGCDLHTRQQTIAMLDTDTGELVERTLEHDGEKGREFYAALPGPVLVGIEATGSMHWFLKLMEELKIECRVGHPAKIREADTRKQKHDRRDARLLLKLLAEKRFPTIWMPSNEQRDLRTLLRHRHQWVRMRTRVQNTLQSMALSNGLRRGTSLWSQAGQHALQALPLAPHASQRRTALLALYPQLQESIDGLDKQVSEQVLQRSQAHRLMTHPGVGPITALATEVFLGDPMRFADGKELASYVGMIPGEHSSGGRRQRLGGLSKQGNALLRYLWCEATIHAVQQDPELKRFYRRKLMQKGLGKARVAAARKLGIRLWIMLRDQIDYEEFCRRGQIRQKSGDARAGMPD

SEQ ID NO: 49938 - protein, 405 aa, unidentified
MRVIHERCAGMDVHKKTVVVCAITPEGRQVRTFATMTESLLALTEWLEGLECRVVAMESTGVYWKPVYNLLEAANFKAMVVNAQHIKAVPGRKTDVRDAEWIADLLRHGLLRASFIPDRGQRELRELVRYRRSLVQERSREANRLQKVLERANVKLSSVATDVLGRSGRDMLRAIVQGTEDPAALASLARGRLKQKSDKLEQALRGLVGSHQRFLLREQLDRIEEIEARIARLNTEIEGRLRPFEPILQRLETIPGVGRRVAEEVLAEIGTDMSRFATARHLASWAKVCPGNRRSAGQAKPEHVGRGNPWIRSPLLEAAWAASRSKDTFLAAQYHRLARRLGSKRAAMAVAHAILVIIYNLIRDEKTYQELGATYHDQRSQDIVVRRLTKRLEDLGFQVTRKEAA

SEQ ID NO: 49939 - protein, 368 aa, unidentified
MEWTRPLYEASKSRNDLVVAKNHSKKEGGPVEKISVLGIDLAKEVFQVHGNDSGGRCVLKKQLKRKELSEFIANLPTCLIGMEACGGANFWARKFQGFGHEVRLISPQFVKPYVKSNKNDVADAEAIAEAVVRPNMRFVSIKQVWQQDLQLLHRIRQRLVRKRVGLCNEMRSILHEYGIVLPKSSHHIRNQLPMILEDAENGLTLLIREALHDLFEELHSVVKQVNGYDKKLEQISRKNEMCQRIEKIEGVGKITSTAIVAAMGDVRSFENSRQFAAWLGLVPRQNSSGGKSKLLGISKRGDRYVRTLLVHGARSMLKTAKFKSDKRSVWAMRKVTERGFNRACVAIANKNARIIWALAAHNREYKVA

SEQ ID NO: 49940 - protein, 363 aa, unidentified
MTYERSTLVNSEKYIGLDVHQATISVAVMDSSGKVVMESILETKATTILDFLAGLRGTLAVTFEEGTWAAWLYDLLKPHVAKLVVCNPRKNALLKHGNKSDKIDARKLADLLRLNDLEAVYHGETGVRMLRELARSYLTIVKDLSRVMNRLKALYRSWAIPCAGRDVYYTRHRSEWLGKIPEAGTRRRAEQLYQQLDMLQHLRQQARRELLTESRKHAITAKLRKIPSLGPIRSALAVALIQTPHRFRTKRQLWAYSGLALETRTSGEHCYVHGQLRRSKKQISIRGLNQDHNHDLKGLFKAAATRASVQPGPFQDFYQRSLTKGIKPTMARLTLARKIAAITLTLWKKGENFDAEKLKSQAA

SEQ ID NO: 49941 - protein, 325 aa, unidentified
MDIVGIDISKATFDAALLLGKRVRHAAFSNTEAGFAQLLAWLARHRPNPVASLHACMEATGNWGLELANFLHARQVRVSVVNPARIKAYGDSELARNKTDRLDAGLIARFCRVHVPPAWVPAAPYLRELRELVRRCGALKSARVQELNRQTSGFASPAVARSIAAHVEWLDRQIEAVTQEARALIAADATLSKNLTLLRSITGFGEISATIVLAELPNIAEFTPKALAAFVGLSPSEHSSGTSVRRPGKVSRIGTERLRSTLYMCALSAKRSNKPLVAFVARLSAAGKPPKVILVAVARKLLVYAHAVIRTQKEFDSSPDAPLPA

SEQ ID NO: 49942 - protein, 331 aa, unidentified
MEQKEQMIMGCDISKDKIDLCLLEKATGKIIISKSYANNSSGHQRIVKQLSDKDNCLVVLEATGNYHLRFISCLAAYNLCFAVINPLVLKRFAQMKMLRTKTDKLDAFIIAQYGKEQSPKAHQMPSKEQQELKALITVLNNLLKQRTQTKNLLHSQLLLPGNSIEFQKPIKKVLFTLNKQIQAIQKSIDKIIVNNFEHLKELITSIKGIGDKTAQGVIAYLGDLKSYSSYKQVASYVGINPAIKQSGQSLNKTSGISKQGNAVLRTLFYMSALSAIRVNKACKAFYIRLLQKGKKKKTALIAVANKLIKQLFAIIKKNIFYLDDYYHPKFT

SEQ ID NO: 49943 - protein, 444 aa, unidentified
MPRTIKQRRKCTSSVVSLPVLRPNAAGIDIGAREIYVAVPPHRDPHPVQAFPTFTSDLLELADWLKQCGVDTVAMESTGVYWIPLFQILEARGFEVFLVNAHHVKNVPGRKSDVSDCQWLQYLHSVGLLRAILRHRDNLVQMAATHVQHMQKALDQMNLQLHHVISDLTGTTGLAILDAILNGERDPQVLAQLRDPRIQASSETIAQSLVGDYRPEHLFVLRQSLASYRAYQALILECDKEIQAVLAHFQTQADPASMPTPTQKPHKPQRNQFHFDLHAEHYRILGVDLTRVPGLETLSVHTLLSEVGPDLSAFPHEGEFASWLGLCPHRRITGGRLLSSRTRKVRQRLARALRMAAESLHHSQSWLGEFYRRMRAQHGAPKAITITAHKLARIIYHLLKARRPYDESVFAREQQRHCRRTQARLQRQAKALGFQLVPIDAPTT

SEQ ID NO: 49944 - protein, 349 aa, unidentified
MKILAIDLGKFKSTACIFEGISSEHSFTTVRTVAAEMHDLLAMHRPDRVVIEVGPSAGWIKDMAEAMGLTVQVANPNHEAWRWKNVKRKTDQDDALKLAQLSAMNQLPTLQLPANRVRQWRSLIGYRWTLVCRRTAIKNHVRSIFDRQGQSFPGGKSGWTDQTLAGLRREARTMKDVGMEDLWRFELHVELEALDQVAALLEPVEAKLQAISVADERVQRLQSIPGVGPRLSEVVVATIDDPKRFKTAKEVGAYAGLTPKQFESGTMSRQGGISGRGNKLLRALLVEVCWLMRRHNSHLRAIFDQVCRGSKTRRKIAVVATARRLLIICWAMLRDGTNWQPPIEMAIAN

SEQ ID NO: 49945 - protein, 538 aa, unidentified
MTEYIGLDVSMKETAVSIRREGERIWRGKCASDPNIIAELVRKRAPAAKRIVFETGPLSVWFYHSLRSVGLPAVCIDARHAKAALDMAANKTDANDADGLAHLAEVGFFREVRVKGFDSMLTRTLVAARTRLVRITVELSNQIRGIMKTFGLLVPAGKGTTFEKNVRSLLTDQNELAPIVLPMLEAWRGIRIRAAELGRQLVADARQSQACRTLMSIPGIGVITATSFVTAIENPDNFKKSRSVAAWIGLTTRRYQSGEVDYDGHISRRGDRHLRGLLYEAAAVILTRCSTESSLRTWGLKLRERIGFKRAAVAVARKLMAAELKKPATVFDRLNISVFHDPRSIAASRANAYRFLDDNRRDLFIPFAADVVVTDLAMAQKLTVSGRRLPQQILLQYIWREDVLLEGKRFGQFTGETTSALCGGTLALDIDGNCLGWMRKPGTLPLIKGSRKRQAEEEEVKLGKARREAFLNALAARIAAGRIGDGVAGGAAGLLQKSIAPLTAEWVDGNLRFALSPHIGIGGDEDEEMGERPWQISS

SEQ ID NO: 49946 - protein, 343 aa, unidentified
MYPQQIYFGLDVSLETTAICVIDQAGVIVWRGMCASDPMAIYAAIAKHAPKVIRVGIETGQLSNWLTLSLRRRGVPIVCLDARHAKAALSLQINKTDANDAFGLAQVVRTGWYREVAVKSMDAHTLRMLLLASSRLVSQRQTIANTIRGLLKTFGLVIARGSGGLFAVRVREQMNGNPVVTAIIEPLLIVWQALREQVAVLDKQIMARAKTDPVTRRLMTIPGVGVIVALAYTAVIDDPARFRRSATVGAYLGLTPRRYQSGEVDHGGRISKCGDGFLRSYLFEAATVLLQRQTRASALKAWGLALAKRIGMRRAKVAVARKLAVVMHRIWVDGSEFRWGGVA

SEQ ID NO: 49947 - protein, 341 aa, unidentified
MTITRIGLDIAKSVFQLHGVDARGKTVLRKTLARGEVLGFFANCPVCLIGIEACAGSHYWARELIRLGHDVRLMAAQFVIPYRKSGKNDATDAEAICEAVGRPNMRFVPVKSEEAQAVLAVHRARALTVSERTALVNQVRGLLGEFGIVASAGIAHARKLLAEIGAGARSLPVLARETFGELHERLRTLDERILAYDRKISALAQQSEAARRLMAIEGIGPVTASAIVASVGPATTFTSARQFAAWLGLTPRQHSSGGKTVLGGISKRGDVVLRTLLIHGARSVLRLTAARADRKSQWVERLKARSCNNVAAVALAAKNARIIWAMLVRGTDYRVAAAATA

SEQ ID NO: 49948 - protein, 418 aa, unidentified
MTTIAKKLAQINPGTLLAGVDLGLDSMAVVMLDNNGQRVDRFLASQSREGYDYFHERLLRVVRKQGACGVLVGMEPTNYYWKQVGAFLTQEQLPFRLVNPFTVNRHRQGDQLDKAKDDWRDAFMIADLLRTGKFTETELRTGGYAELQIGHAAYWRLRYDRGRQLILLTNSQRQVFPELQQVFKDLTGKTAQALLRSVPAAAHIRAMSCSELIARVRQAAAGVRLAVSRLRQAYALAQQSIGLTEGVETLCFDLQNSLTTLSLLDHQAAELLTILLRQFRALPEAPYLSSIQGLGERYAMGLLAETGDLSCYHTIKSLTKLAGTQPTPNETGHYHRSLTPFSKQGRSRLRAALFWATLHMLRHNDAIAYHYQRLQTRKQRPLEKMEALGACMNKLLAYVWATGHNRVRYTPDLWLSLT

SEQ ID NO: 49949 - protein, 408 aa, unidentified
MNPLYVGIDVSSKTNVVYLMKPDGSKISNFSVANSLDGSKKLVKNILSALDKHSLGEVVIGLEATSVYGDNLVYFLREDGSLAAHQNRIHVLNPKQVKKFKEAYNDLPKNDFVDSFVIADCLRFGRINKAVYLDDYRYDALKTLTRARFYAVQNLVKEKQRLINIIFKKYSSLTQDKIFSDTYGATACAIYTEFESADTLVNMDLNELTEFIKKKGKNRFDDPDAVAKAIQKAARSSYRLPKTVNDSVNQVLSISINSIRATEAQIKALEKAIAEQMALIPNTLQSIPGVGPVYAAGIIAEIGEINRFNSQAALAKYAGLAWKQKQSGDFESENTHLIHTGNRFLKYYLCEAAFSLVRCDTEYNRFYHLKYKEVNKYQHKRALALTARKFVRLVFRLLKDNRLYISKS

SEQ ID NO: 49950 - protein, 316 aa, unidentified
MVPSPRFVGMDVAKATLDIAVRPTAETWSVSNDATGLDALVLRLGAWAPTLIVLEATGGSQGPLVAALVAAALPVVVVNPRHIRAFAQAVGILAKTDRIDARVIAHFAEAVKPAPRPLPDAETQELRALLVRRRQLVEMVSAERARLDTAPRSIQDASQAHIAWLTTQIAGLDDALTRASQTPPVWQAKDDVLQSIPGVGPVLARTMLGQVPELGTLGPKPLAALIGVAPFNRDSGTLRGRRTVYGGRAEVRAVLYMGALVATRHNPVIKTFYERLLAAGKAKKVALTACMHKLLTIMNAMVRDLKPWQPQEVPSA

SEQ ID NO: 49951 - protein, 407 aa, unidentified
MELVALYKRVIGLDIHQAQITACALIEETDGSTRIEQRQFGGFKRDRRELANWVASLRPDEVVMESTGIYWKSPYAALEAAGIRAKVVNARHVKNVPGRKTDVGDAHWLATLARAGLLRGSFVPPAKLRELRLIARQRQKLVGQLASEKNRLHKVLTDSGIRLGVVVSDLHGQSARTMVKAIIAGQSAHEVLKLASARLKASREEIFDALQGDLSASHQFVLDELMHHIEEIEARIARFDARLLAELESERNTLALLQTIPGVDLIGAAMLLIEIGTDMDAFGSPDRLASWVGVCPGNNESAGKRKSGHVRKGNLYVRRLLCEFAHAASRTMSGFKSKFQAIFVRRGYKRAIIAIGHKILRTIFFMLKRREHYRDSATDYEALSVQRNAPRWIKALTKFGFITPANA

SEQ ID NO: 49952 - protein, 465 aa, unidentified
MKRHARRPSPKPRTSPAVLDRLHPHAAGIDCGSAEHFVAVPPDRDPTPIRAFPTFTGDLYRLADWLTACRVTHVAMEATGVYWIPIFEILDARGFAVILVNARHVKNLPGRKSDVSDCEWLRDLHTLGLLRGSFRPADGISALRGYVRHRATLIESTSTLVQRMQKALVQMNVQLPLVVSDITGVTGLRILRDIVAGRRDPQQLAQHRDPRCRASIAELVAALTGNYRPEHVFVLQQNLELYDVYQQQLAACDTAIEAHLAHLTASMAPAPTPLPPARRRHTPHENQPRFDLRTPLHQLTGADLSQVDGLGPYNGLRLVAEIGTDMARWPTEHHFTSWLTLAPHNKISGGRLLGSRTPRSANRAAAILRLAASTVGRTQTALGAFYRRLAFRIGAPKAITATARKLAILVYRTLKEHLVYKDPGADAYDAQHRTHVVRRLRQRATNLGFGLVNLSTGELVEGAVS

SEQ ID NO: 49953 - protein, 323 aa, unidentified
MMSVSVLGIDIAKQKFDVALLMDGKTKHKTCKNSAEGFETLTLWLEKQGIRKVHACLEATGNYGEDLAIYLHEAGHIVSMVNPARIKGFAQSELLRTKTDKMDAALIARFCLAMKPGAWIPPSPEIRSLRALVRRVDSLIDMRSQEKNRISTAHESVSLLIKEHIAYLDQEIERIRQQIAGLIEQYPNLKGRKELLDSIPALGKATIPHILAELDDLEKFNNVRELVAFIGLAPKETLSGSSMKGKPRLCKIGHARLRKVLYMPALVSIQCNPVMIAFYNRLKDKGKNGKVIVCAIMRKLVHVIFGVLKSGKKYDPNYKPAFA

SEQ ID NO: 49954 - protein, 372 aa, unidentified
MQEDSEVYVGLDTSKLKIPVALAAAGRDGEVRFSGDIGSTPEAVERLVRKLEKRHGKLSFAYEAGPTGYGLQRQIVALGHDCAVVAPSLIPKRPGERVKTNRRDALALAKLHRAGELTPVWVPDPEHEAIRELVRAREAAMEDLRAKRQHLQSFLLRHGRVYSGRSAWSRAHARWLCELRFEHPAQYLVLAEYRQAIADAEKRLQRLSEQVAELVPHWSMAPVIAAYQAMRGVAFLTAVTLVAEIGDVRRFETPRQLMAYLGLVPSESSTGEQVRRGGITKAGNSRARRVLIEGAWTYRFPARMSRLLEERQAGLPEAVSDIAWKAQLRLCGRYRKLMARGKQKAVVTTAIAREMAAFLWAIGREVEPLRAS

SEQ ID NO: 49955 - protein, 360 aa, unidentified
MRTKVNENLFKDQPFYVGIDNHKKNWTVTILSDTYEHKTMSQNPDAEILAKYLQRNFPGGVFNAVYEAGFNGFSSCRELNELGVRCIVVHPADVPTTQKEKVQKTDKADSRKLAKSLRGNDFEAIDVPDPKLEADRALVRQRFRVMKDYSRTKNRIKSLLFQFGINIPDHFTKAQTRQLTREYLNWLHELPIEAKSLKQTLENYIAISKTQRGDLLILTRQVRELSQTDDYRNNYYLLLSIPGIGATTAMYILTQLGDIKRFPRMDDLCNYVGLVPSMHNTGETIHTGKMVRRGRKELKIMLIESSWEAIRKDPALMAKFNELSKRMHKNKAIIRIARKLLSRIRYILVNQQPYELSIVK

SEQ ID NO: 49956 - protein, 428 aa, unidentified
MIYRVAAIDVHKKMLAVVVADVAGEGEYQFERRKFGTTPEQLELLTQWLVQQEVEEVVMESTAEYWRPVWGTLEQHWQPERRKREGATKMSGALHLCQAKSNRGRRGRKSDFTDAERMVKRLVAQELVLSFVPDPEQRLWRTVTRRKYQLTRDKVRFQNQLESLLEQAHIKLSSWVSDLLGLSARRMLQALAEGETDPAAVAALADQRLRATPAQLRDALGACAHLHPVYRRLLKMALEELKLLEEQIAKLDGEAAELLQEHQEALQRLAEVPGLGVSSAVQIVAEVGPEAKAFESAKEMSSWVGVCPGSNETAGEAHSTTSPKGNQNMRRLLNQAAQAAVKVKGSIFEITFRKFLSRGMEYKEAIWAIAHRLCRLIWLLLRRRVRYEERGPAVSAKSQRTRTSRMIKELRKLGYRVDAGPLPASTLS

SEQ ID NO: 49957 - protein, 495 aa, unidentified
MKKVSTVATKQSRNISQQKLTIGLDLGDRTSCYCVLDEGGRIVQEQRLSTTAKALREAFGKVPRSRIALETGMHSPWVSRLLDELGHEVIVAHARNVRLIGESRKKDDRLDAQTLARLARIDPELLSPVKHRSARAQADLTVIRARASLVRARTALANTARGLAKSYGERLRGCNVRNLDREKAQKLSPELQKALEPLLLASAALSEQIAEYNGRIEEMAKASYPQTALLKQVKGVGTLIALTFLLTLEDPHRFQKSRDVGCYLGLQPGRRNSGQSEPQMHISKEGDPYLRTLLVQGAQHILGPFGVDCDLRRWGLRLAERGGRSGKKRAIIAVARKLAVLLHHLWVSGEVYDPSYNTKQNGGSDRGIKKTKTFLTKEQTKAKERRVSVTASNAWPRFHSQEMGCEVDNQVAAPAETRTPNLHRATNRSTECGWKGGDRSGRLGGGRKLVQQRKTKRIYLTPTGLLMEGVSHSSTQRSVISNPLRRPVLRQAQGS

SEQ ID NO: 49958 - protein, 375 aa, unidentified
MGKNTRFVGLDVHAETIAVAVAEGRNQVRSLGTIANRPEAVRRLLGKLGKLTELRVCYEAGPTGYALYWQLTQLGVQCEVIAPSLVPMKSGDRIKTDRRDAERLARSYQAGDLTAVWVPDAKHEALRDMVRAREATKEDQLRAKHRLLKYLLRYGQRPADDCRSWTAAWWQWVRALQFPHAEQNTTLVELVLEVDHQAQRVERFDAAIDRAVDAAPEQLRAIVDALQALRGVAKVTAVTLATEFGCFSRFEKAGQVMSYTGMVPSEHSSGPKTRRGAITKTGNSHLRRVLVESAWHYRHRPRLCKRQKDMQTSLPPKIAMIAWAAQERLHRRYWALSSKSKPSAKIVTALARELAGFVWAIGVETERSLKTAKAA

SEQ ID NO: 49959 - protein, 345 aa, unidentified
MPIVGGLDIHRKQITFDYLDTVTGEVRRGQIAPADRAHLRAWLARFAGCGDAAFAVEGCAGWRYVAEELAAAGIAAHLGEPADTAALRGRKRHAKTDKTDARHLRSLLAEGRLPECWIPPAHILECRALLETYHDLRTAHTAWVQRIHAVFFHQGAPPLGEGALRTGPGLAGLRAAAAAHLSAVGQQQVATALDMLAATEAQLGPLRHQLRDAARHLTGAKVLAERLYGVGPLTALALTCWLAGKGRFSSSRKAVRFTGLDITVHSSDRKGPPGRLSRQGPPVLRWAVYEAGKTHARTSAPDHAYYAAVADRKNTKRACLSEARKIVRQACHILAELGDDALTAA

SEQ ID NO: 49960 - protein, 416 aa, unidentified
MKYAPTVLAAEPVNGLTCGIDWARDDHAVSIVDNRGVEIHRSTVEHSTAGLRTLAALLAGTGVGEVAIERPDGPIVDTLLTAGVTVVVISPNQLKNLRGRYGSAGNKDDRFDAFVLADTLRTDRTRLRPLVPDTPATTALRTACRARKDLIGHRVALANQLREHLNRVFPGAVGLFADLDSVISMTFLTRYDRQDRADWLTPKRLGAWLASVGYTGGTDPTVLHARLIAAPRGATGEEAAAHAHITGALVATLKTVVEQIKTLSDTIAEQLAAHADGHIFTSLPRSGKIRAAKLLAEMGDCRGRFPTPESLACLAGVAPSTRQSGTMRSVGFRWSCDKHLRDAVTDFAADSRHANPWAADLYNRARARKHDHAHATRIVARAWLHVIWHCWQTNQPYDPAQHRALQALLKDQKPAA

SEQ ID NO: 49961 - protein, 315 aa, unidentified
MTTAGIDVSKAHLDLALLGPSYQRNLRFPNTPEGREALLAALRLHHPQAIAMEPTGPYHLPLLKLLQAAHLPVGLVHPAQAKALRVGMGHRNKGDRTDALALARIALSWPEALRAPEALPPWLVELKALMGYRENLLKQKQMVEGQLETLGEGKGAVEAWLKEDLERLKGKLKEVEARVEALLSLVEEAQVLLQEPGAGLWVVAAVLAYLPPRVWGKAKAAAAYAGLHPANRESGTSVRGSRLSRRGPGVLRRYLYMGAMVGRRWNGELGAYYEALIGRGKRPKQALVAVAHKLLRRLMGRLKAFYREKGVGGRS

SEQ ID NO: 49962 - protein, 372 aa, unidentified
MGNVSIFLGLDVHKDSIDIALVEGERKATVRFYGTVGGDLADLEKAVKRIRKAHPFAAFHFVYEAGPCGYDIYRYLTRAGYECMVVAPSMIPKRSGNRIKTDRRDAIMLASLHRAGELAPVFVPREEDEAMRDLVRAREDAVKATRVAKQQLKGFLLRHGIKFTGSGDWKPSYMKWLAELKMPNPAQQIVMQDYINAVKDGNERVTRFNVQIREVLPSWELAPVVKALQAMRGVALITAVTVIAELGDLKRFDNPRQLMSYLGLVPSEHTTGTKRRIGSITKAGNGHVRKALVEAAQTYRLPARISKTLLERQEGLPKVIRDIAWKAQVRLCTRFRKMIARGKKNQTVVCAIARELCAFMWAIAREVKLVTA

SEQ ID NO: 49963 - protein, 355 aa, unidentified
MDSVRYIGLDVHRDTISAAVLDSEGKLLMQSVLATRAAAILDFIAGIKGPLHITFEAGSHSAWLYDLLVRRVAKLVVCDARKNALLKSGSKSDIIDARKLAELLRAGLLSGVYQGQSSALAVQHLARSYTLLTEDTTRVMGRLKAVLRSHAVACAGKKPYGKKHREYYLAQLSTSSLRRRAECLYQQLDALQPLRRQAKRELIVECRKHATATWLRSVPFLGPIRAALLIGRVQTPHRFRTKRQFWAYCGLALETRDSGEYRVVHGHIERRRKPTLVRGLNWNHNHELKNLFKSAATTASGCPGVFREFYLGLLAKNMRPEMARLTLARKIAAITLRIWKKGETFDPAYLKPQAA

SEQ ID NO: 49964 - protein, 348 aa, unidentified
MNNHSESKEIKVVGIDLAKSIFHLHGANSQGKVVVRKKLSRSKLTVFMANLPPCLVAMEACGGSHDWARKLMEMGHDVRLISPQFVKPYVKSNKNDVADAEAICEAVQRPGMRFVPIKSVEQQDVQCIHRARSMAVSHRTAQANQIRGLLLEYGLVVAKGIASLRKAVPEALEDADNALTPMFRELLCGLWEEMLRLDEHIVAYDLQIKHLSEQSDVCKRLMTIPGVGPMVATALAASVADGKAFKSGREMAAWLGLVPRQHSTGGKPRLLGISKRGDVYLRKLLIHGARSALRWADRKQDRRSQWASELATRRGQNIAAVALANKTVRTAWVLMTRNETYRTATAAV

SEQ ID NO: 49965 - protein, 363 aa, unidentified
MTEDKRRYVGIDLGKREYTMAIIGKNGKMSIHLGKTSAQGRQALYKKLDKTDKVALEAGNLAFKMAQEIMRQVGCEVRVLNAAKLPFIWDAPTKTDKEDAMKLAHLIEERRDEKLPTVPLPSEKEMEMRKITSNKDRETRNRTRHINRLHSLFHNQGHTEIVKKDIATAERRNEAVKLLTGIDREEAEWILKYLELHERRIKELEDTIKGEAKINEDIQRLLTITGIGPITAYAFLAHVGDGSRFSAGAQVSNYIGFVPRLDFSGTIMRHGHITKRGNGYLRGLLVQAAWSAVRSKKGGTLRERFIYYTQCKGESKKKTVVAVARRLAELMYSVLRNKTEFEVRKWDGPKKIINLKAVLENCA

SEQ ID NO: 49966 - protein, 401 aa, unidentified
MAKLWAGIDAGKAHHHCVVIDADGNRLLSQKIPNDEPALLDLIANVLKLADGDEVIWATDLNHGGPALLIAILVAHGQNVLYIPGRIVHHASKLYRGEGKTDAKDAAVIADQARMRRDLQPLRAGDEISTGLRILTARRADKSADRVRAINRLQAQLLEYFPALERAFDYSRSKAALLLLTKHRTPDGIRRTGQTRIHAWLKKHGARSSAAVAQAAVDAAKSQHTTVPAQHVGELIVAALAREIITLNEELAELDALISEKVTEHRHTRVLLSMPGFGPVLAAEFLGATGGDLTVFETADRFAGVAGLAPAPRDSGRITGNHHRPRRYDRRLLRVFYLSGLSALKSCPASRTYYDRKRAEGKTHIQAMLSLARRRLNVLWAMFRDGTTYTPVPAPTARLAA

SEQ ID NO: 49967 - protein, 319 aa, unidentified
MTKIICGVDVCSRFLEARIGQDGAAACFSNTAAGIAELASFCRHHGVALVAMEATGGYEKQPYALLWTQGLPAAIVNPRAVRRFAEAMGQLEKTDHIDAAMIAWFAEVKKVVAGPPPTSQQEHLKALVIRLRQLTDLQTAQRNQRLLVQDEMVLESFTQLLALISSQMRQIETAIAQLISADPLWEKLNQAFRSIKGVADRTVARLMAEMPEIGTLSNKKISKLAGLAPLARDSGKHQGKRSVRGGRSGIRGILFVVVSIVRRYNPDFADFDQRLNRAGKPKKVIRIALAHKLLVRLNAKARSVRNELAISTVSPAKVG

SEQ ID NO: 49968 - protein, 400 aa, unidentified
MVVMIGIDPHKGSHTAVAVGAAEEPLGKLRVRACPDQAGKLVAWAQAWPERTWAVEGARGLGRLLAQQLVAAGERVLDVQPKLAARVRLLEAGDTNKTDPNDARSVAVAALRSKGGQEVTADGHAVVLKVWAKRHRDLSRTRNQVACRLHAVLCELIPGGVPDEITAGQAARILEQVAPDGAVAQARCELAAELLADIRHLDAQRREVKKKLAAAVTASGTSLTEVFGVGPVIAATVIGDVITVARFPSRDHFAACNGTAPVEVSSGQRKIYRLSLRGNRRLNHAVHMAAITQIRHKHSDGRAYYQRRLAEGKTHKEALRCLKRRISDAIYARLRADARAAGPGGQPGNDTGSSVTGSHPGHRLFGQAAPGPEPSPRAPATFTQATPAPEPSAKKIRRAT

SEQ ID NO: 49969 - protein, 343 aa, unidentified
MKLSYVGVDLAKNVFQLHGIDQHGQAIWRRRLRRGQWLQVLRETVEPGCIIGMEACASAHHWARQLEAYGYDVRLVAPQFVKPFVKSNKNDRNDAEAICEAITRPHMRFVPVKTVEQQDLQAIHRVRSTLMSQRNAKANQIRGLVAEYGIVAPQQMLALRRAVPAWLEDAENGLSACFRALLHDMWMDLQHLQDRLTELDRQIEQIAKDNPVTRRLQQLRGVGPLVATALVASVGDGSHFRKGRQMAAAIGLTPRQHSSGDKRRVLGISKRGDVYLRTLLIHGARAVVSQAKRRDDPLSLWVTGIAERSHINVAAAALANKTARIAWAMLRNESDYEPALAVT

SEQ ID NO: 49970 - protein, 405 aa, unidentified
MSQSFSIFVGIDISKHKFNACAIQNPNSIIFESAFDMSKQGFSSFVQKLSVFPKSSVLIAMESTGCYHLNLLSFLSLNDFSCVVLNPLLVNKSLPVGLRKTKTDKIDARSIALTIFYTHQLLPTSSFLNSDFRDIARKKESITHQISRVKNDIEKLLALLFPELEKVTNIYNDAILDLLSSFPSAKAIQKASIDSLRVFFSKTIGRKLKLTPETLKELANNSIAQYWPVKEKILIQTIKELRFLQEQLNEFDEMLKEYCKCASLNQDVEILTSIDGIGENSALYFLAEVGDISRFSTYKKLIAYCGLDPSVDESGKHKGESRISKRGNAHLRRIIWLMSVNVVRHNEYFKAYFQRKRSQGLVYKKAMMSVAHKLLRTIFAMMKKREKFNIEHTFSSSTQNLILHS

SEQ ID NO: 49971 - protein, 341 aa, unidentified
MEKATIIGVDLAKHVFQVHGASADGSVAFRKKISRVKLLPFLSSQPRCVVAMEACAGAHGWARDIQAQGHEVRLIAPAYVKPFVKRQKNDMADAEAITEAAGRPTMRFVAVKSAEKQASGMVFKTRDLLVRQRTQTINALRGHLTEHGIIAPQGVFHIGRLAAEVENANNHLPVIVTELCTLLLRHIATLDEQIASLDRRIRDRAREDETARRLMSIPGVGPVCATALEALAPPPETFARGRDFAAWLGLTPRQNSSGGKVRLGRISRMGQRDLRRLLIIGATAVVRWAARRGAPAGSWLARMMARKPRMLVAVALANKIARIAWALMAKGGIYRSLAAAA

SEQ ID NO: 49972 - protein, 413 aa, unidentified
MSRTVGIDWGAREHAVCVLDQRGSVLARFACPHTKAGLADLSSRLERIAVPADLPIAIERPSGLVVETLLAAGHPIVPVHPNVVKACRPRYRAAGGKSDPGDAYMLADILRTDGHRFRPLRACSDAIRALQALVRGRDDLVATRVALANQLRSLLDGFWPGAGVIFADIDSPIALAFLARHPTPDSAARLGRKRMQAFMAQHRYSGRRTADELLDRLHTAPAGRAADAESDAKGELVRVLVASLTGIVTAIRELTSRIEHAVADLPDGRIVMSFPRAGRIGACPPATLRVDRGAAQILAELGDVRERFPTESQLAAEAGVCPVTHASGQSRGVTFRFACNHRLRAAITCFADNSRHSSPWAASIYQRARKRGCDHPHATRILARAWTRILWKAWQNHQTYDLDAHRAAANIPA

SEQ ID NO: 49973 - protein, 389 aa, unidentified
MKIYVGIDIAKLNHFAAAISFDGEIIIEPFKFTNDADGFQLLVSKLESFDKNSPIIGLESTAHYGDNLVRFLVTELYQVCVLNPIKTCQMRKNNVRKTKTDKVDTYVIAKTLMIQDNLRFVSFFDLDMMDLKALGRFRQKTIKQRTRLKIQLTTYVDQVFPEIQYFFKSGLHQHAVYALLKEAPSPKEIASMHMTHLANLLKVNSHGHFTKEQAKELRVLAQKSVGANDSAISIQITQTIQQIELLDSQLEKIEAEMTDIMKFNDSVIMTIPGIGYINGGMILGEIGDIHRFSNPNKLLAFAGLDPSVYQSGNFQAKTTRMSKRGSRVLRYALVNAAWNVVRNNATFKAYYDAKRAEGRSHYNALGHCSGKLVRVIWKMLTDNVEFNLK

SEQ ID NO: 49974 - protein, 342 aa, unidentified
MKFYCGIDLSARDCHVCVIDQELKIVVQQKLRNELPKICQLLEPYKANLKIVVESTFNWYWLIDGLQAEGFDVVLAHTLGLYLITGAKVKTDRRDAYALAKLLLVGAVPAAYIYPVETRPVRDLLRRRGHLVQVRAGEYGSLRRLLLRQGILSSQQQEIKTATEAELEQWFAHPLVRLHASQELQRIELYSQQIAELEKTILVLAKTEQSYELLLQLPGVGQTIALTILYEVGELTRFANVKDFSSYCRVVPGIAQSGNVTRRGRASKQGNHYLKAAFSQAAVHAVRCYPKVRRCYERQLKRHQGRGRQMICYNIIAHKLAQGAFHILKEQTDYREELLFGR

SEQ ID NO: 49975 - protein, 312 aa, unidentified
MPCKTEVAVARTIGIDTGKNTLHMVGLDQEGAIVLREKVSRTRIAARLVNVPRCLVGIEAGMASHHVARELLALGHEVKQVPPAYAKPFRQGHKNDFRDAYAVAEAVQRPSTRCVPVKTADQLDLQALHRVRSRLIGNRAAVINQLRGFLLEHGIPVRQGLRFLRQQLPQILATRNDVLSPRMVRIIGALIGDWTYLDERIERVTDEIETLARADENCRRLMTVPGIGPIIASAMVAAIGNGAAFAKGRDFAAWLGLVPKQMSTGDRTILGRITKRGPNRARDQIGAATRSRDPVSRPGCSGLRIHFRLNGS

SEQ ID NO: 49976 - protein, 411 aa, unidentified
MTVLLVGDDWAADHHDVELMDQAGRVLARARLSEGAAGMARLHALVGEHAGDGDDEDELEVRVGIETDHGPWVMALVASGYVVFAVNPLQAARYRDRHAVSGAKSDTGDGHILADMVRTGAHQLRPVAADTEEAQAVKVVARAHKTLIWERNRQVTRLQYQLRDFFPAALDAYGGLGLDSADVLELLAKSPDPAAAAKLTTAQVSAALKRAHRRHVAGKTAVLRAALRAPQLAQPAQVTTASAAVVRALAAVIVTLNQQLERQVEAHFLVHPDAEIMLSQPGLGRILGARVPGEFGDDPARYASAKARKNYAATSPITRQSGKRKTVMARYVHNDRLRDAPGRQAYSALTASAGARAYYDQLRARGIEHDPALRQLANRLVGILHGCLKTRTLYDEATAWPQNDSQDPPVA

SEQ ID NO: 49977 - protein, 341 aa, unidentified
MKDTMIGVDLAKNVFQLHGSTMMGHVKFRKKLTRLQFCQFMSDQPPAMVVMEACGSASYWAREMIKLGHEVRLIAPQYVRPFVKRQKNDTADAEAIVIAAQRPEMRFVDPKSEEQQARAVLFRARERLVHQRTELMNALRAVLYEYGHPVPKGIGQLRQIEAIIEEPNSDLPALVREECQDLVEQISENTAKIETKTKKAKDLAAQTDMSRRLQTMPGIGPLTSLAVEAFAPQMVSFQCGRGFAAWLGLVPRQHSSGGKERLGRVSKAGQADIRRLLIMGAMSRLAWLARRAIRGSSWITQMMARKPRMLVAIALANKMARAIWAMLTKKEDYRDPTLAAA

SEQ ID NO: 49978 - protein, 400 aa, unidentified
MRTVFGIDVSKASSEVAILVNGERVHGYTMPNDIIGFSRLLEDLKTVSNPEIIFEATGVYSRRLQAFLEENSYDYTRLNPLEAKKQLDGLRVRKTDKIDAEKLASSQFVLNRKPTYVQEEVYQNLHDLSRFYQNLTEDIVRTKNRLHKVLQVAFPEIENLLSTPTGEQYWNLVSIFPTKHWVLELSEVELKEAIRNSTSKRISENRVGNLTEKLVGLAKQSYAGISKTSPMVEEVKYDAQELIRLTNRREQVLQQLIELAEPLPEYKILLSIPGIAETTATSIIGELGDIRRFKSANQINAFIGIDLKHYESGDFLGQEHITKRGNPYARKILYKCIHNIASASHTNPCHIADFYEKRKRQSQITSTKPHTIASIHRLIRTMYYLIMHNKLYDYTLAQSH

SEQ ID NO: 49979 - protein, 340 aa, unidentified
MTITTVGIDLAKNVFAVHCVDQNGKTVLVKPKVSRAALPELIASLPPCVIGMEACSGAHYWARLFRQYGHEPRLMAAKFVSPYRMAGKSGKNDAADAQAICEAVRRPHMRFVPVKDESQQAMQCLHRIRQGFIEEKTATYNRLRGLISEFGVIAPQSTDALRHMVSEQKSSLPLQVQQCVNDLLEHIDRIEDNITEYDRILSRMAKTDHRSQRLMELKGIGPTTACALVASIGNAHDFKNGRQLAAWLGLTPSQYSSGGKSKLGRITKAGDSYLRTLLVQGARSVLIGAEKRTDSFSRWVCMLVERRGYWRAVVAIAAKNARLCWASLHYGDDFRLYSVN

SEQ ID NO: 49980 - protein, 486 aa, unidentified
MSAKTSVYERLTRGNRKQRKDLQRRLYSGDPGLDVVHADAAGIDIGNESHFVAVPPARDAEPVREFGSWTADLERMAAWLKSCGIETVAMQSTGVYWFAVYDVLEKHGLKVFLVNASHTKNLPGRKSDVQESQWLMKLHTYGLLRNSFRPPEEIRPIRAVWRLRDRHVQDAARSIQHMQKSLTSMNVQLANAISDIGGVSGQAIIRSILAGERDAHKLARLRDRRIKASQEEVARSLEGNWQEDQLFELQQAVDEYDFRQKQLTECDRKLQSYLAVLPSRLVPPADTGNVTLPPHASKKKKRRAKKTGGGNAPQSFDLAAELKRVTGVDAIRIEGVNLMTIQTVVAELGTELGKWWPTEQHFASWLSLSPKRDVSGGKVIRHTREKSRNRVAGILRLAATSLLRSDSYLGARYRNLRARLGAPKAIKAMARYLSCIIYRLFTKGQAWVDRGVEQFEQNRRTRDLAKLQAQATSRGFRLVPTTDQIA

SEQ ID NO: 49981 - protein, 347 aa, unidentified
MTQAQIYIYGIDLGKNWFHLVAMDRMGHVLTKQKLTRSQLKQFISTTPPCRVAFEACPGSQYWGRLFQQAGFEPKIIPAQFVKPYLKSNKNDFNDATAIAEAGSRGTMRCVPLKSHEQLALQATHRVRQRFIVERTATVNQMRALLLEYGLTVPVGRKVFERSLPTILEDAENGLPDFIRALVLRLRERWQQLDIQIDEMSLMLGQASSASSLCQKVSTVPGIGPIVSTALIAAIGNGSQFKKARDLSAWLGLVPRQYSTGGKSSLGGISKRGNNYLRQMVIQGAKALKIHMKRDKSSLGEWVARLEAGHHHHVVLIALANKIMRICWKVLTSGRDYQPYPDASSAV

SEQ ID NO: 49982 - protein, 410 aa, unidentified
MTVITIAQNTPVLVAIDIAKARHEVLIAVPGKKRRRRLTVLNELADFTRLIAALKNYGHPVRAAFEATGNYHRALAYHLATAGFEVKLVSSVALARTREALHNSWDKNDPKDAQVILHMMEIGNEQFYHDPLVRGTNDIQELSKTHDIVSKSKTELWHRILTHYLPLYFPEADRFHRSSRSDWFFAFLERYPSPHFISAMSKDAFIADAWDVVGRKVAKERLLADIYETSKVSVGLPVGLDSDAISMFRLVLGEGRSLIAQRNQIEDRAVALLKDLPDYQLLTSIPGIGPINALTILAEAGDLRRFGHHRQFLKFCGMDLATIQSGTFRGQTKLSKYGNARLRRTLWMAGQVAILQRANSFRDKFERYIAKDRHNTHLRRKAYTAIAAKMARTVHGIIKNGEPYRPFFEG

SEQ ID NO: 49983 - protein, 383 aa, unidentified
MHESITAYVGLDVHKDSIAVAVAGNDREVPHFVGTVRPDFKQVRKALSRYGSPNSLQVVYEAGPCGYTLARQLLADGFGCQVIAASRITRSPTERIKTDRRDALTLARLARSGDLIAVRIPDERDEAVRDLSRARQDAVRACLKARQQLKAFLLRHGRPLRGSKPWSPTGELYLSKISFVHPAQNIAFADYRQAVLDTRARVERLTEALRAQCENWRMQPLVSALACLRGVDFLTAVILVAEIGDFSRFAHPKELMGYLGLVPSEYSTGERHHRGDITKTGNAHARRVLVEAAWNYRFPARLSHPITRRQEGQSKPVRDIAWKAQLRLSHRYRRLQSRKLHQNKITIAIARELTGFLWDIARHVPLPHDIAIHQHAGVRIAEA

SEQ ID NO: 49984 - protein, 400 aa, unidentified
MNRTRTVAGLDVHKDSIYLCIMGYDQAIIWENTYGVLTPDLRQMHHDMRAHGVTEAAMESTAVYWVPVWTELCESMELRLVNPYFIKQLPGRKSDVKDARWIAECLLKNLIKGSFVPEPIVQDMRKLNRRIMDLCEDTTYNSNKLDAALQRCGFRLSNYVATTKSKSYRSVLKAIIDGQTDPDELLRLVHGRILNKHGRERVKAALTGSFSETDLIVLRQLKETLDLIEEQTAYCQQELVRLCKEHYPKPYERLQTIPGVKERAATAIIAETGVDMKMFATAASLVGWCGLKPRNDVSNGRFKSRKVTHGNRYLRQILIEIAWAASRTRNCFFSHFSYLQTTVKKKNKMKIQVAIARKILVAVWHMLSKEEDFIDIYLKRQEELKRTEGQIKLLESYMAD

SEQ ID NO: 49985 - protein, 411 aa, unidentified
MEVVHERCCGLDVHKRSVAACVLAPGAAGRPDKEVRTFGTVTEELERLADWLAERGVGAVALESTGSYWKPVWNILEERRFALVLANAQHVRNVPGRKTDVKDAEWLAELLRHGLLRGSFVPDRAQRELRELTRYRTSLVQERTAAVNRLQKVLEGANVQLASVATDVMGVSGRAMLAELVAGSTDAAALADLAVGKLREKIGDLQRALTGRMGDHQRFLLAQQLAHVDFLDEQIARLDAEVAERTRPFEAAIARLDTIPGVSRRVAEILVAEIGTAVDRFPTAGHLASWAGMCPGNHESAGKRRSGATRKGSPALRRALVQAAHATGRTRSTYLGAQYRRLSARRGAKRAAVAVGHSILVVAFHLLARASVYQDLGPGYFDERDRDAVRRRLVARLEKLGDTVTTEPVAA

SEQ ID NO: 49986 - protein, 362 aa, unidentified
MNKKRIQTSQDPKPLAPDKVDPCGAEVSAEELIVALCRKGVQQPLKSFPNTPEGHREIGRYLARPGRRVRVCMESTGVYGLDLALALAAQAGIQVRVANPRAVRNFAKALMERNKNDRVDAGVLQEFAARMPFEPWQPPARPALHLCALARRLEAITDLCAAEENRLHASQATEALPAIIRQDLERSIRFHQRAAQRLTREALKIISEDSNLQQHYTLLVTVPGIAQTSALRILAELVMISAHLDARQWVAYAGLDPREYSSGTSVHKKVRISKAGNRHLRRGLYMPALVAVRHDPHLRGFYQHLLANGKLKMQALVAVERKLLHAIYGMFKHQQAYDGTKVYRLPDGLTPASSAPVRTEAA

SEQ ID NO: 49987 - protein, 415 aa, unidentified
MKKHSNSVKKSESSMKRRNPRAEQRRDSSEVMAELVSQLRQQLEEKSVPAAESAVEERDAVGPNLDRLTVGVDLGDQWSNYCILGLGGETLREGQFRTRRQEVEEFFQGLAVSRVVIEVGTHSAWVRELIAGLGHEVLVANAQRMEGRKRRRRKNDRIDAVKLARLGRVDPKALYPIQHRSTEVREDLLVIRVRDSLVESRTKLISTVRGMVKTMGARVQGCSSVSFSAKAAEQIPAEVRETLEPLLRLIQTLSEEIKSYEKRIEKLGSEKYMDTKLLRQVNGVGPVTSLAYVLTLESPQRFKRSRDVGPYLGLVPQQEDSGDSQPQLGISKAGDRMLRKLLVGSAHYILGPFGPDTDLRRFGMKLCERGGKNAKKRASVAVARKLAVLLHRLWSSGEVYEPLGYGKTITESAAA

SEQ ID NO: 49988 - protein, 406 aa, unidentified
MNAVGIDVSKGKSTVTICRPGGVVLMPPCDIPHTQSAVNAFISQLRGLDGETKVCMEHTGRYYEPVATWLSDAGIFVSAVNPILIKGFGDDSLRSPKTDKADSKKIARYTLDRWAKLKQYGSMDKTRNQLKTMNRQFGFFMAQKTAMKNNLIALLDQTYPGANNFFDSPARNDGSQKWVDFVHTYWHVDCVRSKTLNTFTEHYRNWCKRKGYNFSAAKAEKIYQSSSDLIAVFPKDDSTKLLIRQAVAMLNTASETVESLRLKMDETASSLPEYTVVMAMNGVGPTLGPQLMAEIGDVTRFTHRGALTAFAGVDPGKNDSGQHIQKSVHTTKKGSPSLRRTLFQIMDGLIKRSPIDDPVYAFMDKKRAQGKPYYVYMTAGANKFLRIYYGRVKEYLSTLTESEKLK

SEQ ID NO: 49989 - protein, 394 aa, unidentified
MTAAYTSKGNTSGLVLHLAFELGWSQWKLAFTIGAGQKPRQRTIRARDLAALEVEIAKAKKRFQLDADAPVVSCYEAGRDGFWLHRYLTARGVSNVIVDSASIEVKRRRRRVKSDRLDADKLVTMLVRYQGGERKVWSTVCVPSVSEEDQRQLHRELQELKDDRTRHTNRIKGLLASQGLALEGVDENLPAWLPTARLWDGTALGADLQQRLVREWQRWHFVHGQVLELSRERSRRLRCDATPQVDKVRQLLGLAGIGVNGAWLLVYEFFGWRKLLNRKQAGALVGLTGTPYHSGSSEHEQGISKAGSRRMRKMLVELAWCWLRWQPESALSLWYAQRFASGKGPARKIGVVAVARKLLIACWRYLERGEIPAGAKVVDWRCKMTRPKAKKPAA

SEQ ID NO: 49990 - protein, 356 aa, unidentified
MVDKVTEAAVVGGVDTHKDLHVAAVVDQNNKVLGTQYFSTTRQGYRQMLAWMTSFGTLKRIGVECTGTYGSGLLRYFQNAGLEVLEVTVPDRMERRKRGKSDTIDAECAAHAAFSGIRTVTPKTRDGMIESLRVLKTCRKTAISARRVALQIIHSNIISAPDELREQLRNMTRMQLIRTLGSWRPDASEYRNVTNVYRISLKSLARRYLELHDEIADLDVMIAAIVDELAPELIKRNAIGYESASQLLITAGDNPQRLRSESGFAALCGVSPVPVSSGKTNRYRLNRGGDRAANSALHIIAIGRLRTDAKTKEYVARRVAEGHTKMEAIRCLKRYISREVYTLLRNQNVSVQQEPY

SEQ ID NO: 49991 - protein, 371 aa, unidentified
MVSDGVDAPRRHRCAKVAGVEAPLRRGASMGEVSIIGLDLAKNVFQAHGAAADGAVVFRRKLSRAQLLKFMAAQPPCVVAMEACASAHHWGRAIGDLGHEVRLIPPAYVKPFVKRQKNDMADAEAIAEAASRPTMRFVAVKSEAQQAAAMAYRTRDLLVRQRTQTINALRAHLAEQGIVAPTGPAHVGRLAAIIDGDDGVLPAAVRDLARLLLDQIAGLAGKIAGLDAELRKRVTTDDTARRLTTIPGVGAVTAAAITTFAPPMETFSKGRDFAAWVGLTPRQHSSGGKDRLGRTSKMGQRDIRRLLIVGAVAVVRWAARKGAPDGSWLGRMMARKPKMLVAVALANRMARTAWALLRKGEDYKNPAMAAA

SEQ ID NO: 49992 - protein, 428 aa, unidentified
MKDNLTQTKPPEPALLIGIDWADQKHDTYTIDRQGHGVWEQIEHSPEAIDAWLAEKLRQADGQPIAILLEQSRGALIHTLMFRKNVILYPINPKQFARYRESYSNAGCKDDPTDAQLLARMLRERIRLLKPWTPDDESTRLLARLCQTRRQLVNERTRLTQQLIDQLKAYFPLVLEFNSSQSVSSLVLELLRRWPDPRCLKRADRRILHRVLREHGYRNEDKRQEVIERIRSARLLSHDRALIEPAAIVVQCLARQIPVLERSIEALEASIDKEMANHPDAKLFTALPGAGKTLAPRLLTAFGSQRDRFASANEVATFSGIAPVTKRSGKSCIVHRRYACPKYLRQTFHEFADHARKWCPWSRAYYRLQKSRGMKHHAALRKLAMRWIRILFRVWKNRTAYDPAAYIATIKRKNPEIVPFLQTLQGEA

SEQ ID NO: 49993 - protein, 410 aa, unidentified
MQVLYPRCCALDVHKLTVVACLRIADDSKVTSEVRTFETTTASLIGLRDWLTANKCTHVAMEATGVYWKPVWHILSDGEFELVLANAAHVKNVPGRKTDVSDAEWVVDLLAHGLIRPSFVPNSQTQELRALMRTRKQLVREAASHIQRVQKTLEDANIKLDSVISDIMGKSARAMIEAMIAGETNPAKLARLAHRSLKASPAQLREALRGRVTKQHRFLLRLHLKQIDGLEAAIAAIDQQVEADIEPFRAAVKQLSSAPGVKALSAQVIVSEIGIDMSRFPSDGHLVSWAGICPRNDESAGKRRSNRLRKGAPWLKTTLVQCAWSAVRQKDSYLSAQFYHVKARRGPKKAIIAVAASILTAVYHMLKTGKTYQDLGPNHFQRRNKDQQKHLLIKRLADLGYAAALTPLPG

SEQ ID NO: 49994 - protein, 343 aa, unidentified
MDSYVGLDVSLREVSVCVVDEAGPIQCERTVAADPDVIAALLDAHAPTVRRVGLESGPTSVWLWRELAERGLPVICIDARHAKAALSMQINKSDRNDAAGIARIMQTGWYRQVQVKSPHSHAIRGLLNSRALLVKVQRDLENQVRGLLKSVGLIIGRAKDGVFGTRTRQLLAAHADLAAIALPLLEAREAIHQQLTRLERRVRQLAKEHKQTSAFMSVPGVGPMTALAFLATVDDPTRFRRARAVGAYVGLTPRRYASGEVDWTGRISKCGDTMLRTYLFEAAGVLLTRVQKWCALKAWGLRLAKRSGMKKARTAVARKLAVILLRMWRDGTQFHWTAAPPAT

SEQ ID NO: 49995 - protein, 335 aa, unidentified
MKHYAGLDLSMETTQVCIVDETGRRIASMKIESAPAMIAHALREAGGVERAVIETGRMSPAICHGLRALGIPVVCIDARQAHQSLKALKANKTDPHDAAGLAQLARTGFYKEVHVKSPAAHGVRSVITTRNHLVESRVRLDNMIRGLCATFGFKPGPGQGKAFIGRVLEAANIPGLGQSISALLAVRTGLMKQIKEMDRVLREFALRSQSCRQLMSIPGVGVQTSAAFAAAIDEVGRFRQSRTAGAYFGLVPRRHQSGEVDWTGRITKQGDSMVRKLLYEAANSILTRSRGSFALKGWAMKIVKQRGLRKARVALARRLAVVMHAMLRDGTLFEA

SEQ ID NO: 49996 - protein, 312 aa, unidentified
MNDKTTSVYAGLDIAKASLQLHLQSKSYDLPNTSQGHVQLIKRLAAIPGGHVICEATGGYERAAVAALHAATIPVSVLNPARVRQFARASGKLAKTDPIDATMLTAFGQAFTPEPTTARTASEIKMAALVTRRVQLLELRVAEAQRADTCADLDLRKLFTPWLAQMQKQITKIEALIEALLKTQAPLADQVRRLDDIMGVGRITAVMVLATMPELGQLNRRQAAALAGLCPYNRDSGQWAGKRCISGGRAEVRRALYMAALSASRSNHLLKPFYDRLIAAGKPAKVALTAVMRKLIVLMNHLLKNPNFSLAH

SEQ ID NO: 49997 - protein, 343 aa, unidentified
MNILKQTVGIDVSYKSFDARFGTTNTQQQITLSPSKSFKNSLAGFKLFLRWLKKYILSDDIPLVFVMEATGVYCEQLAHFLFQQGYQVAVILPNKIRNYAKSLESKSKTDPLDAAVITRFGLERQLNLWTPPSETMKVLRDLCREYQSLKTNCTQIKNQLHALNASFKPHRESFKRKTLHLKFLQRQIGLIQKELRALVKTEPDLAQWLKNIKTTKGLGDMTILTVLSETRCFELVTNLKQLASYAGFDIVFNDSGLKKGRTSISKKGNTFIHKALFMPALSACRANPQMKQLYQRLVAKGKNKKLAIIAVARKLLLLIYTLWKSNSPYSPDFKSVQHVYDIP

SEQ ID NO: 49998 - protein, 452 aa, unidentified
MIMEEKEHGNYNLLRLVSVGNKNTLTGGVTAMHRKNDNRQVEKRQRITDATLVIGMDIGCEFNAMCLMSKEGTILGRYPKIYNSRKGFDYFHGIVESMKEKYGFTDVLIGMEPTGHYWRKIAYFAMDKQYEVRFIRTTALKHQRELDESSSAKNDIRDAYTIANIAREGKYIDTVIEDNIFRQLRTLAHTREKIQRISTGAKHALKGMLEDYFPELKHIFWSMKAKGLWALLEHYPFPEDVLKTDIDTVTELIAQSTRRKIQAHEKALQIYKAAQHSIGLQRVGDADRFRVAAYLSEIRHSETQLKEIEAQIEALLKKIPLAEYILSMPGIGTLTCGVFLGELGNPCNFTNPKQIVKYAGYDPKEHDSGQRTGRRIISKKGRWLLRKYLYFMAMRVVHRSPFLKDYYENKQKTMTKKEALCAVVIKLIKVIFALLRDKRTFTEKQSCLKQAA

SEQ ID NO: 49999 - protein, 408 aa, unidentified
MRVIGMDIHRAFAEVAAFEAGKLTRLGRVDMRRPLLQAFAEQLRKDDEVVIEATGNAAAVAEVIGPHVKRVVIANPKQVRLIAHAKIKTDKIDAAVLAQLYASGFLPEVWIADPRTQALRRQVTRRNQIVRQRSRLKNIIQSILHAHLIPPCPAADLFNHKGRAWLEAQPLPEDERLAIERHVREIDSLGEDLQGIERDLARHALACDDVRRLMTIPGVDMVVAIALVAAIGDITRFASPQQLVGYLGLHPSVRQSGPGPAQHGRITKQGRGHARGMLVEAAWAAVRAPGPLHAFFLRLRARRGQHVAAVATARKLAVVVWHLLRKQENYAWSRPALHARKLRDLELKAGHGRQRGQRGTAHAYNLASVREEERCWVEQAEKAYERFVIGWQPRGPKARPSAAREERH

SEQ ID NO: 50000 - protein, 405 aa, unidentified
MKRFAGIDIGSERHVVAVVDEHGAVMVKPSPFGEEAAGYRRLVELLGSPQGCLIAMEATGHYWRNLFAYLVTEGFTVALLNPLRTRRFAEEELERTKTDAIDALGIARFAAQKHPAASQVAEEGLDELREVVRLRDRLLQDLGDRVRQLHRVLDLSFPEFTRYVRGLDSELATMILARYPTAAALRNVSVKKLAGLRYDGRHHVGEELARDLIGAAKLSVGRHQSEPYRLQVHYACEDIVMLRRRVRELEGDIERRLEQHQVGKLLTSIAGIGPQTAACIIAELGDPARFGSIKALASYVGVAPRLRQSGKRRLSGRRMLPLGNARLRRALWMPTLSAIRVNPWLRAYYLRLRAAGKRPKVALIAVMHKLLAAIFSVARRRQPFVPSFVFPPVVAAGGAVTEPIG

SEQ ID NO: 50001 - protein, 425 aa, unidentified
MSLIQPTQLPAVLVAIDIAKLRHDVLIEAPGWKNRKRMILPNTATEFRLFADFLHGLKHPVRVVFEATGNYHRPLAHFLQTEGFHLELIASLAVARTREAMHNSWDKNDPKDAQVLLHLLKTGVTQHYHDPLTNQIHDFQELSLTYAQISLEKTRTQHRLLTHYLPLYFPEIERYYHASRSEWLLAFLQVFPTPALIARLPMGDFVQQAWAVVGRKVSKQRLLEDIYHTAQSSIGIPVAEDSEAVAMFRVVLGEMVRLCQLRDQLEERAEHHLKDNADFRRLQQLPGVGPILALTILAEAGDLRRFNHHRQFLKFCGLDLSTQQSGQFRGTTKLSKYGNARLRCAFWMAATVAVRLRENSFRDKFERYLRRDPASADRKRMAYVAVAAKMARVAHGIIKTGTDFRCFYEAAAPSGRAASPGPSRP

SEQ ID NO: 50002 - protein, 361 aa, unidentified
MKSTTIIAFDQHAATTVAAVLLPAHRTPALHTLASDSATILRFVARVQRQGPITCCYEAGPCGFDLQRALTAHHVPCEVIAPALIPRRPGDRIKTDRRDAGQLAVLYRAGALTAIHIPTEQEEAARDLLRCREDIRADLLRCRHRLSKFLLRHGRRFTATKKAWSKRHDVWLRKQTWPIAALEQTHRAYLRAVDETLARLRAVEEDLRGLLDLEPLRPRVERLRCFRGIDDLTALTIAAELGDARRFPTAPSTMAFVGLVPSEHSSGAKRARGGITKTGNGHLRRVLVEAAWHYRHHPFVSAAVRHRQRGAPDAVIAQAWTAQHRLHRRYQRFAARGKPKQHIVTAIARELTGFVWAALTQ

SEQ ID NO: 50003 - protein, 315 aa, unidentified
MLGIDVSKDQLTCTLLEGATKRLLWETTVPNSPAGVSHLLQRTPATVAWVLEPTGRSSTGVARQARAAGRTVLLAVPRRADHFLESLPKRAQTDRLDSRGLGLYALSVALPDYPLPTPAVERLRQLLTVRQTLAQDLARYQQQCQELPLGAELLTPMITTTRTQIQALDRQIAAAQTDFPLMARLQQVPGIGPVTAAHAAARLAASEFAPSDQFVSFIGLDIRVRQSGQRKGHEGLTKQGEAERRRRFFLGAQASLRAKDSPFRVQYEREQKKGLSKTAALCAVARKMARLCWSLAKHGTDYEPDRVYRQQGEAP

SEQ ID NO: 50004 - protein, 387 aa, unidentified
MIFVGIDIAKLNHFASAISSDGKVLIKPFKFTNDNDGFLLLLSKLSSFEKNNIIIGLESTAHYANNLIAFLVPKGFNVCLINPLQTSTMRKNNIRKTKTDKVDTFIICKTLMMQPHRFVTLYDIALMQLKNLGRFRQKTVKQRTRLKIQLTSYVDQAFPELQYFFKSGIHHKGCYSLLKEAPSPGAVASMHLTHLTHLLKSASHGHFKKETAVELRVLAQKSVGNSDKSLSIQITQSIEQIELLDSQLNKIESEIEDTVKSLDSVILSIPGIGYINGGMILGEIGEITRFSTPSKLLAFAGLDPSVYQSGNFHAKNTRMSKRGSRVLRYALINAAHNIVKNNNTFKTYYEQKKAEGRSHYNALGHCAGKLVRVIHKMLTNNLEFNLA

SEQ ID NO: 50005 - protein, 364 aa, unidentified
MEGKKKEAARFVGIDLGKRTYEVAIVEKGAVKNSNGRTCVSGRQLLYKKLRATDKVALEAGNLAFIIAKELEAIVGCRVYVLNPSQLPLIYGSMKKTDKEDSLKLAHILEDFQEERLPVVPVPSDKEMMRRKLLAGYRRAQQSRNRDINKLHALFLAQAITDVVRKDLSTGEERKESIKVLTGLEREEAEYLVSCLELHERRIKAMSQQIKKESAGDEVIKRLQSVPGVGPMVAYAFVAHVGAERYEKASQVSNYLGLVPRVYISGETVRYGRITKRGNGYLRALLTQAAWALIRTRRGGKLKERFEYMTLEQSKSKKKAIVAIARRIAELLYTMMRDGTWYASRPFIPGKKMAEGMARLAISV

SEQ ID NO: 50006 - protein, 343 aa, unidentified
MQAITTIGLDIAKSVFQVHGVDAEGNVILRRQLKRRYVLAFFQKLPPCLVGIEACASSHHWSRELQTLGHTVRLMPPAYVKPYVKRHKNDAIDAEAICEAVTRPNMRFVATKTREQQSCLTLHRTRHLCIRQQTSVINAIRAHMAEFGIVAPVGRNGVEELLTVAADASDKRLPDVARACIVALGAQLRTLKAQILQFDRLIMAWHRSNQASRRLDDIPGVGPVLATALVATVADPIAFRSGRNFSAWIGIVPRQHSSGGKDRLGSISKRGDRYLRGLFVAGALAVIRYAKIHGTKHRPWLTALLARRPTKVAAIALANKIARMAWAMMAKGECYKEPVALAA

SEQ ID NO: 50007 - protein, 355 aa, unidentified
MAIRKQCIGIDISKSTFTACLCQQAEDGKLTFSKVVDFSNDNKGFNQLLRWAKGLIVSESELVFLMEATGVYYENLAHHLHKIRKKVHVVLPNTSKHYFSSLNVKTKTDAVDARILSQFGVERVHKLWSPPPGALLQLRNLTRYYVQLQEQKTALGNIKHSKDCSYDIQIFITKSNKKLINEIDKEIEKCLKEIKKTILDDKVLKERIRKVLTIKGVGLITAATIIAETMGFEQFHSSKQLVSYSGYDVVQRESGTSIKGKTRISKKGNRYIRNALYFPAMVACRHNETLKETYIRINRNNKASKMIGQVAIQRKLLVLIYTLWKNDTEFIENYQRGSLDPKTETTQDSSVAELP

SEQ ID NO: 50008 - protein, 338 aa, unidentified
MKLYGGIDLHSNNSVIALSDEEDRVVFRRREANDLERVLSDLEPYGDSIEGLVVESTYNWYWLVDGLMAAGYQVHLANTAAIVQYEGLKYADDDTDARWLAKLLRLGLLPEGYIYPKQERPVRDLLRRRSHLVHQRTSNVHSIQNLMARNRGRSLSANQIKRLTDEDVEQLLPDADLALPVKGNVTVMHTLDEVIGALEQRVKARIKLRPEFKLLLTVSGIGQILGLTIMLESGEMTRFAKVGNYASYCRCVGSEHLSNGKRKGRGNTKNGNKYLAWAFVEAANFAVRYDPQIKRYYQRKCARTHRIVAIKTVAHKLARACYYILRDQVPFDVNRAFA

SEQ ID NO: 50009 - protein, 345 aa, unidentified
MNIIRVGVDIAKSVFHVHGVDRHSQTQWQGKYSRSKWLDALSRKVPAGAEIGMEACASSHHWARELQKRGYHVRLIAAQFVKPYVKSNKNDRVDAEAICEAMSRPNMRFVAPKTVAQQDIQAAHRIREELVGQRTAKANQIRGLVGEYGIVAPVGIQQLRRAVPDWLEDAENGLTDSFRVLLSGLAEDLRYLDTRIKALDERITESAKEDPVAKRLMTLRGVGPLTASALSGALGDGKAFRRGRDFAASLGLTPKQHSTGGRDRLLGISKRGDSYLRKLLVHGARAVLRHVEGKDDGLSHWLRGLAARKHVNVAVVALANKTARIAWALTHNGAAYDEGLAAAGA

SEQ ID NO: 50010 - protein, 367 aa, unidentified
MIIIGVDFHPEFQQIAWVDTDTGELQEQRLQHREEAEAFYRELAARAVQVRIGMEASGHARWFERLMGELRIELWIGDAAEIRTKRVRKQKTDRQDAQLILRLLLEDRFPRIWVPSWENRDLRQLLWHRQRMVQTRTRIMNQLQAVALNEGLRCKKSLWRERGRQQLESFQLAPWASRRRHDLLELLDRLNPSIAELSQAIEQEVESCPLAQRLMTHPGVGPLTALAFVLIIGKAERFQCGKQITSYLGLAPLEESSGNRRRLGHITKQGSSILRFLLVEAAQVTVRSLPEWRSKYSHLMMRRGRKIAKVAMARRLAVRLYWMMRQGWDYQQWVKFGSQGRKPMLSRCKTLIGQGRFHVLSRAGGPE

SEQ ID NO: 50011 - protein, 373 aa, unidentified
MGMKMKVRCCNDSPSFIDERLVREQRTMSNVPLFVGLDYHQDSIQVCVLDQQGKVLLNRSAANDCHALSRLVQPLGVVQRVGIEACCGAADLGQELVEQLGWTVSLGHPAYIAKIKRSPDKSDYTDGRLIADLTRVGYLPRVWLAPANLRELRQLVNHRQRLVDRGRAIKLQVGGVLREQRVRIDADRGSRWSKSWVASVRDNLRLSAHARWIVNDLLDDLTYTDGKIRRAEQRLREASQGDAVIEKLLQQPGIGEVTAWVLRAYVGDFGRFRTAKQLARYCGLSPCNASSGKRVADAGLIDGCNRLLRLTVVQAAHRLIRTVDRWRKLADAMRSRGKPACVIVGAVGNRWLRTLHHAMKQQSTLEPAATSMN

SEQ ID NO: 50012 - protein, 428 aa, unidentified
MNNGETIRREQFCQIKDEIRRSDAYLIVGIDVAKDKHHTFMGNATGKSLLRKLVFENNLEGFRKLLERSDAVKTQNALSKIVFGMEPTGNYHKPLGAYLIRCGRHVVLVTGKAVKNNRELLDGRWDKNDDKDAANVADLVSRAKCLYYDYPSSSINDLRQLLSLRRRLKKEEHSLRMRIRNNLLAQYFPELDRFYSACESESLAIVRWCLDPGRIAGMELDEFFSMVTRTKRGVAQKLRLQKIHRLAVESIGCPLGPAAELEATLLVQKLKEVRGQLKQVADQMEDICLQFAEYNWLLTIPGFGPYVAARVLASISNPWRFDSSNQVLKMAGYDLGANRSGKRSDDAVPVISKRGNSELRYALYQAAHVASTRNRDFIGYFTRILRGRERERGIKTKMKVKLAAKMLKIAWTLMRKQEVFDPDHLIIE

SEQ ID NO: 50013 - protein, 346 aa, unidentified
MIPVASDVHKGRCWMAMIPPGEELKMLEPIECTREAWRERLAELPPEAEIALEVSTSGYFVMSVLEEAGWRERAHWVHTAGIDSLRKQKSDRLDTRRLVKKLAVHNVEPLPEAWFPPPPIRALRLLARQRCGMARQRAQTKNRVNSLLEMHGLRPERCVFTAKGRAWIQQQGLSQAAQWCFDRFFRLYDFLTEERKTSEAELLAAAAAFPQVALLQTIPGLGHMLAAVVWSEIGDLARFASADALLNYTGLVPSSYDSGEVSIHGPITRQGPAWLRWALVTAANALTRSKSPLGQRYWHLRRCHKLPNVAKTAVAGSVARCAYGVLKHGAPFQAERWGRRAGKLGQ

SEQ ID NO: 50014 - protein, 359 aa, unidentified
MEITTVGLDIAKRVFQLHGVDAAGKAVLRRKLQRSEVLAFFKDLPPCLVGIEACGTAHYWAREIRELGHEVRLMPPAYVAAYVKRGKTDATDAAAICEAVTRPTMRFVPIKTAEQQAVLMLHRTRDLLVRQRTMLVNALRGHMAELGIIAPQGIARVADLMAVLLGEDTTNVPALAREALRGLAAELEALDRRVKEIEVAIVRWHKDNEASRRLAAIPGVGPITASAIVATITDPFQFPSARHLAAWIGLVPRQHSSGGKQRQGGISKQGDRYLRRLLVLGATAVIRHSRSKSTAEAGWLKSLLERRPARLVSVAQANKTARIVWALLVRGEAYRMPQQSQVAQPEAEGTPSAVATADG

SEQ ID NO: 50015 - protein, 339 aa, unidentified
MNYTAVGVDIAKSVFQVHWVDPHTVEVINKAVRRDRFLDYFANREPCLIGMEACGGAQHWARQFTKMGHQVKLMPPKFVKAFNIGNKNDPADARAIWMATQIPSKPVAVKTETQQAVLALHRMRQQLVKFRTMQINSLRGLLAEYGEVMGKSREALDKAIPGILAKLSDRLPTMLIDTLREQWSGLTGLDRQIAGIEQRLQAWMKDDVACQTIAAIPGVGLLSATAAVATMGDAKAFRSGREFAAWLGLVPKQTGSGGKVQLLGISKRGDTYVRTLLIHGARSVLRHPDKAGAWVQQLGKRRPFNVVIVALANKIARTIWALLAHDRQYGREYMSSKPL

SEQ ID NO: 50016 - protein, 411 aa, unidentified
MLEVRVERGAGIDVAKKFVVVCVMTGPADQKPVEEVRRFGTSVKELERLRAWLLEKGCTAAVMESTGSYWKPVFNIMEGSLNIVLANPEQVKALRGKKTDPKDSRWLAGLLRHGLVQPSFIPPRDIRELRDLTRRRRILLGDGTAERNRIQKILEDANVKIGDVLSDVFGVSGQAMLEGLLENTSNAEAIAERAHWSLQAKIPHLVEALEGHRMSEHHRFMIRQSLNHMHYIEAQVTELDKEIQRRLEPYQKQVKLACSVPGIGVNSAASILAETGMDMSPEGPFPDCHHLASWSTVCPGNDESGGKRKSGHMRRGNRWLRASITQTAWAGVRKKNSSFQARFQRIKQRRGAQRAIMAVAHAQLIAIYWALRNGTPYQDQIRMAENERRQNQIQYHLRQLEKLGHELEESI

SEQ ID NO: 50017 - protein, 315 aa, unidentified
MDVLSVGIDVSKATLVIAVSPTGESWSSETTPAAIDALVARLQGLTPTIIVVEATGGYERALVAACVAVGLPVAVVNPRQVRAFAQALGRTAKTDDIDGHVLAEFGARMQRTARAISDGETQALAALVVRRRQLVEMIGMERRRLEQAPPTGKITRDLRNHIRWLERRVEHVDEEIGTAIQASAVWRVQDDLLRSVPGIGPTTARTLLAELPELGRLDRRCIAALVGVAPFNCDSGQQRGQRHIWGGRAAVRAVLYMAAVSGTRHNPVLRAFYRRLRDAGKPAKVALVATMRKLLTIVNTMIKHQTKWNPEVRTV

SEQ ID NO: 50018 - protein, 357 aa, unidentified
MNYAGIDYHKRYSVVNIIDDHGELHVDNARVAPNSVEGFRAVFTRVSGPITATFECGLNWGWLYDTLEETGLVERIVVANPGKVKVIAAAEIKTDKIDALKLAGLLQARLIPAVHVPDRKTRGRKDIVRQRAQWVRMRTRIRNRIHVIIDRQRDLHLAQVTDIFGRKGLSALQRAILSEPDATLLRQNLAAHETLVALIREDERLMAADNNDDAVVTLLLSLPGVGPIIASVIALEIDGIERFTDADRLCSYAGVVPSTYSSGGHTRHGHMLVCANHWLKWALIEAAWVAVGCDPYFGGLYRRQRARGKKATTAITIVARRMCRIIWCLLKEQRCYQHYEQIKLPVASCQFLTKACA

SEQ ID NO: 50019 - protein, 403 aa, unidentified
MANWIGIDVSKSTHKYRHVTDAGEPIGKAVPLPNARDAFNTFVEHLRTLDDVRIALEATGPYWLAVYDFLTNAGFKITVLNPLQVNAFRESGLRKTKCDSKDAYWIAEFLRIGYGKPMSVPGATVQTLRELSRYRFALVDEICDHKRRALGLIVRVFPEYEGLFSDVFLVSSMKLLETAATPEDILALDTDALVELLQKASRGRFGQEKAHLIQEAAAKTIGVSWLADAARVELVSILQIIRFLEMQVKQLEAELARLMESQCEFLTTVTGVGPVLGAAIVGEVLDIDRFETGKAFVAFAGIEPAVHQSGQFNGQQMHMSKRGSPHLRRALWLVASNAYKDDPDMQAFYARKKAEGKHHNTVIGAIARKMAGRIYAVWKGNQPYRLAGPAEAGTLGGDQAKAQ

SEQ ID NO: 50020 - protein, 325 aa, unidentified
MTYIGIDISKATFVAAFPLGKGHRTETFPNDAKGIRRFISKLDPDIHHCVMEATGNYCFFLLYLLDKAGIKASLVNPKKIKNYARVMMSVTKTDSKDACLIADFGERFKPEPYKLPSEQIMILKQKKTVLRQLQKQMTATKNLLSSLEPLPVKDKKCVHSLRQTITFLEKQIKYMQQEMEAVVTDVFDKQLKLLTSIKGIGVTLATALIISTGGFTYFDNAKQLSRFIGICPTIEQSGTSINIRGHINRNGDETLRSMLYVAAWSASQHNEACRECYRRLRGKGKSGKVAMIAVANKLVRQAFAVVTSNKSYIDGFVSTKPDAAV

SEQ ID NO: 50021 - protein, 313 aa, unidentified
MSQNNTVILYVGLDVAKLSLELHLAGRFHSLANNPKGHVQLLKLLRPHAGAHVVCEATGGYEQAILRALQAADIPVSLIEAARVRYYARAQGQRAKTDPIDAAVLTAYGHAFKPAATLVTSPQQQRLADLSQRRRQLIHTRTAEHNRAEHYTDALCVRQARQLQKTLDKQIEQCDQGITTLIAEDAVLARKARRLEAIAGVGPVVAATVLAELPELGTLNPQTAAALAGVAPYNRDSGGQKGLRHISGGRRTVRCALYMAALSAVRHDRILKAFYTRLLAAGKKPLVAMTACMRKLIILMNHILKNDKFQLAN

SEQ ID NO: 50022 - protein, 316 aa, unidentified
MVPSPLFGGIDVAKATLDIAVRPTAETWSVSNDATGIDALVLRLGAWAPTLIVLEATGGSQGPRVAALVAAALPVVVVNPRHIRAFAQAVGILAKTDRIDARVIAHFAEAVKPAPRPLPDAETQELRALLVRRRQLVEMVSAERARLDTVPPSIQDAIQAHIAWLTTQIAGLDDALTRASQTHPVWQAKDDVLQSIPGVGPVLARTMLGQVPELGTLGPKPLAALIGVAPFNRDSGTLRGRRTVYGGRAEVRAVLYMGALVATRHNPVIKTFYERLLAAGKAKKVALTACMHKLLTIMNAMVRDLKPWQPQEVPSA

SEQ ID NO: 50023 - protein, 348 aa, unidentified
MTVYIGVDFHARQQTISFLTTETGEIQHLVLLHQDLATVRVFYAQFAGQRVVVGFESSGYAAWFEELLEELGCEIWIGHALYIRQFAKRRQKNDRRDADLILDLLVKGDFPRIHRYSRRTREILQQLRYRQRLVKMRTMAMNMLLFMASSRGVSLRTQLTSKRGQARLAQLTLPPPFNSQRDELLQLLQALDEKIKTVEQWLTQETRADAAVQRLQTHPGIGLLTSICVRYTLEQVERFTTTRQVSAFAGFDPMQDQTDERNRMGAISKQGSRWLRFYLVEAGQIAIRKDADLARVYKRICLRGGHAKAKVAIGRRLLVRAFIMLRDEIDYDEFLRRGVAARSSRGTA

SEQ ID NO: 50024 - protein, 343 aa, unidentified
MQTVTTIGFDIAKSVFQVHGVDAAGQMVVRRQLKRRQVVAFFQKLPPCLVGIEACASSHYWSRELQALGHSVRLMPPAYVRPYVKRQKNDMADAEAICEAVTRANMRFVPTKTPEQQSGLMLHRTRHLFMRQQTSVINAIRAHLAEFGIVAPVGRRGVEELLRVIADPSDKRLPEVVRACLAALGSQLLSLKRQILDFDRMIMAWHRSNQTSKRLNCIPGVGPLLSTALVASVADPKTFRSGRNFSAWIGLVPKQNSSGGRDKLGSISKQGDRYLRGLFVAGAFAVIRYAKIHGTKHRPWLTALLARRHTKVAAIALANKLARMAWAMMATGERYNYPASLKV

SEQ ID NO: 50025 - protein, 347 aa, unidentified
MRKIAYLAMDVHARNCVLGDMDGNGKFRGNRSFITCENNIIKALKAIKARRKHLIMEAGPLSNWAAQVASDHVTRVIICDPRENALIYKSSKKRDKVDTKKMCRLLRLGEFKEVYRPENDQRAIFKAAVQHYLDLRDQLIALKNKIKAMYRQWGVIDVFTDSVYSTSGRDKFLNQLNQRPIYLQLKRLYDLMDHTAAIKQAAQKSMTSLARNYLEIKEFKKIPGMGPIGAHTFDAYIQTPHRFAKRSRLWRYCRLGVTDCTSDGKPLGYKRLDKSGINELKALSYRAFLSAIKGDNEVKRFYLNSLQRTHDRKHARLNTQRKILSVMLSIWKKGKPYRSELFLDPSI

SEQ ID NO: 50026 - protein, 418 aa, unidentified
MSREKRKVCGIDVHKRFLVATILDREGTSETRRIQQNAESLLEFRRWILSENCDSAAFESTADYWRSLYLVLEGHVPVTVANAYHIKHVPGRKTDITDSRWIAQLELNSLTGPSRIFSGDLYDLRSLTRSRELLVQNRTELKNKIHHLLDSASIHLSSVLSDLFGKSGTIILNGLVQNKPFEEIIKSLPKKMRGSADAIAATVPASIPQVTLVLLQSYLKLVDDLDNEIKLLEGRIRESLAGKSREIQILTSIPGIGFIGASTLIAEIGNIHDFEDADKLTKWAGLTPSVYQSANVTRTGSITKQGSRHIRWILVELAHVAIRSPGRLKSFFERLMPKKGYKKAIVAVARKMLRIVWHLLVHDEVFADEVPRSKQVKFPKMPKKIQAFGITRIIDLLSKASEVIIRDQDREIFRIGPD

SEQ ID NO: 50027 - protein, 339 aa, unidentified
MKLYCGMDLHSTNTYTAIMDENRKRVIDCKLANQPKVILGFLEPYRTDLEGIVIESTYNWYWLVDMLQENGYRVHLANPSAIQQYSGLKYVDDRHDAYWLADLLRLGLLREGYIYPKEIRPIRDLLRKRAHLGRLRTSLLLSAQNIVLRNQAIKVNSEDIKKLTTDLLTPHLQESEGLFLTGKISKDLIDAFTRQIKAIETWVMKRLQPEKLFLNLLTIPGVGEILAMTILLETGCIARFPKVGNYVSYCRLVASQRLSNDKVKGKGNDRNGNKYLAWAFSEAAEHARRHYPMCRSFYNRKLSQKNATVAHCALARKLSRAAYYIQKDQVAFDETRLFS

SEQ ID NO: 50028 - protein, 336 aa, unidentified
MKKYIGLDAHSSTCNFCVMDGTGKVLDAVKITTNGRLLREYVKGISGEKKLTFEECELSSWLYEMFKNEDCELLVCNPVENRNYKKAKTDKIDARNLADLLRGNFLKPVYHDGSTREKFRDLMSGYQQLVDDAVKVKNRYKSLFRKGGKRHVGIRLYNDENLLEEFDRKDLKFVGVQTYELLREMEKRRKEYIIEIKKHSKKFKEIKVLKTLTGIGDIQAAKIVAQVVNPARFKNKYKYYSYCGLVRHRQISGDKAYGDKKIWGNRTLKCAYKMAAHSALKGNNVFRKYYDNLRSTGTNHKCASNAVSRKIAAISLVLWKNNVRFDPKMVTNSIIE

SEQ ID NO: 50029 - protein, 352 aa, unidentified
MDNTNSATIIIGVDTHKSTHVAVAINTQGARLAALSIPANAKGYQELESWSCALGKIEAFGIEGTGSYGAGLSRSLLFLGHKVIEVTRPNRQLRYRHGKTDSLDAEGAARSVLNGQAVAKPKTQTGPVEMIRHLKIARDTAVKCRTQAMVTLKTLIINVPAELRGVLDSIKGKIALIRYVAAFRPGKITSTTASAKAAMRALARRWLALHEEIRTHDKELERLVVAKAPSLMASHGIATMTVAEMLILVGDDPSRIESEAALAKLCGVCPIPASSGKTNRFRLNRGGNRQANAALYRVAIVRMRNHEPTIAYVRKRTQDGKTKSEIIRCLKRYIVREIYRHLCSPKTAPATA

SEQ ID NO: 50030 - protein, 424 aa, unidentified
MNCNQNFKISQVTEGTLVLGIDVGSNTHYARAFDWSGLELSKVFKFKNSFEGFQSFVLWVNDLCCKYNKSKVIAGLEPTGHYWFSLGELLKENNITIAIVNPYHVKQSKELDDNLQTKNDSKDPKVIAKLVIDGRYSFPYIPEGIYGELRVADKLKNDITQQIISIKNKIHRWLSIYFPEYEKIYSLIDSKSGFLLLKETPLPKDIVELGSEGIVERWKQTKLRAVGLDKAKKLEEAAKKSIGCKNITSSARFEIKLLIEDYEYKQNQLNSITEELNKLCEKIPMIKEIAEIKGIGIATAISFVAEVGDIRRFKSAKQVQKYAGLALKENSSGKHKGLTRISKRGRKKLRTILFRATIPLIGFNKEFSSIYNYYIERKDNPLKKKQALTAICCKMIRIFFTILSKGIKYDETKMLHDIKRPVAA

SEQ ID NO: 50031 - protein, 322 aa, unidentified
MERRGFVGIDVSSGRLDVAFRPGTELFQVSNEPRGIARLVRMLERRQPELVVLEASGGYEMAVLERLLAKEVPVALLNPRQVRQFARASGRMAKTDAIDAEVLAHFAEVMRPHPRRWADLETRQLRALVNRRHQLVQMVTAESNRRRLALAVVRDGFGATLRCLKLQITAINKQLSALIRQIPTLRQKAELLRSVPGVGEVATATLLARLPELGSLDRKKIAALVGVAPFNRDSGRFNGKRAIWGGRGDVRTVLYMSTLVGVRRNPSLRDFYQRLRGAGKTPKMALTACMRKLIVTLNAIVKHETHWYCPLSLSGKASPNAT

SEQ ID NO: 50032 - protein, 402 aa, unidentified
MNAVGIDVSKGKSTVAVIQPFGVVIAEPFDVHHTGSELKKLADFIKSLSGETKVVMEYTGTYYEPIANALHNEGIFVSAVNPLLIDDYSTNRVRKVKTDKKDSLKLASYALDKWLELREYVPADTIRKTLKIMNRQYIQYSKLLVMQKNSLIALLDSCFPNANKLFSSPQRKSDGHEKWVDFVLKFPHADSVSKLSLSAFKTKYQSFCRKNHYDYSETKAAEIHACSRTQVSSLPMTESVVKLVTEAVNLLCSTLETLNTLRVEMDKLSSQLPEYETVMNLYGVGHILGAQLIAEIGDVRRFERSKSVAAMAGIDPPPNQSGKIDVKSRSISKRGSPSLRKILFQIMQVILKNKPADNPVYQFLDKKRSEGKPYRVYMIAAAHKFLRIYYAKVKEAMLVKNT

SEQ ID NO: 50033 - protein, 442 aa, unidentified
MTTEKIKNKVSPDEIVAWVGLDWADSEHRISMYDVATGQIEDSVLKQSGEALQQWLAELGKRYGGGRVAVILEQSRGGVVYGLMGYDFIVLYPVNPQSLAGYRKALYPSGAKDDPVDATLLREMVQKNPERFRQWVADDPETRSLRLLVEGRRKQVDEMTRLTNRLTSQLKSYYPQALEWAGELNSRQACDFLEEWPTLDAVKAARPARLRKFYSKHGRPRPETLDRRIESIREATGLTRDPAAVIGGSMMVQAIVKQIRSLIIAVEDYDDEIKRLFHKHPDRLIFESLPGAGPVLAPRLLAAFGADRDRWSLAAEMEMLSGIAPVREKSGKQCWVHWRMACSKFLRQTFHEFAASSVRWCNWAKAYYDCLRERGKSHHAAVRALAFKWIRVIFACWKNRTPYDNQVFLDALAKRGSHLALRAASAVPPCRAHRTVMTVENL

SEQ ID NO: 50034 - protein, 343 aa, unidentified
MQEVATVGLDIAKQVFQAHGADASGETLFNTQIKRENVLEFFGKLKPCLIGMESCASSYYWARQLLKFGHEVRLIHTSYVKPFVKRGKTDANDAEAINVALTQKTMRFVPVKTINQQAAITIFRTRSLFVSQRTQLVNALRGHLAEVGLIAARGVRNSSKLVKLMESAPDEVVPAVMRRALEDICEQLQRLDGLVAKLDKEIERRVQHDGNACRLLTIPGVGPKTAMCVIATIPDIHRFPSGRHFSSWLGLTPRTHSSGGRSVLRRITKMGNSELRTMLYLGGTVIMMRDSKTPIGRWAARLRARRPYKVAVIAVANRIARIIWALLANGGVYNPTYGREASA

SEQ ID NO: 50035 - protein, 344 aa, unidentified
MKTITIGLDLAKNVFQVHAIDEAGEVVARKALRRRQVMAFFSKLEPCLIGMEACATSHHWARELSALGHDVKLMPPAYVKAYVKRGKTDAADAEAICEAVTRSTMRFVAIKSLEQQSVLALHRTRDMLIGQRTQLVNMIRAQLAEFGIALAKGIQHALGLVRQLLNGEELDIPPLALKVLKVLAKQVHDLQVRLAELDKDLTAWFRDNQVARRLETIPGIGIITASALAATVTDPRQFTSGRQFAAWLGLTPRANCSGGKERLGRISKMGDQYLRRLLVNGMMSRLRWARQRPDAHPWVANLLHRKPPKLVAVAMANKTARIAWAVMTRGQVYRAPQASTEAVA

SEQ ID NO: 50036 - protein, 423 aa, unidentified
MSKQNVELAAFIGLDWADEQHAVCLQGAGESRREISTLDQTPEGLQAWIHQLRARFGGRPVAVAVEQARGSLIYALMHVDFLHLYPVNPQTLAKLRQAFYPSGAKDDPGDAQLLLEVLLNHRDHLRVWVPDDVLTRSIQLLTEGRRKLVGERTALTNQLIAALKMYFPQALDWFGDLHTPRACAFLYRWPSLQQLKTATSSSVRKFYQNQGYRGEDKLKQLIQDIQQALPLTGDEAVLLASTMMVQALVKQIPSLTESIEEYDRKIAALFKSHDDSTLFGSFPGAGPTLAPRLLAVFGSDRSRFEYAAEVQQLSGIAPVTEKSGKACWVHWRFACSKFLRQSLHEFAGQSILKSAWARAYYQQQRARGSSHQAALRALAFKWIRIIFRCWKDRTPYDEAKYCQSLQLRGSRLASTLKTASTEV

SEQ ID NO: 50037 - protein, 345 aa, unidentified
MPVATIGLDLAKAVFQAHGVDDAGQTVLRRRLGRSELLAFFAKLSPCKVAMEACSSAHHWARELVRLGHEVRLIPPQYVKPYVKRNKTDAADAEAICEAATRPNMRFVPIKTRDQQAVLALHRSRSLLVRQRTASINAVRGLVGEFGLVAAKGRYRMSELRQRMNSMSPDDLPGIACQTINTLFDHIDMLEEKIAAVERQIVEWHKNNEDSRRLATAPGVGPITASAIVAAVGDGRQFQSARHFAAWLGLTPRIHASGKKERIGRISKGGDRYLRALLIHGARAIVGTLFRKSVTPRPWLLALAARRPTNVTAVAVAHKTARALWAMLTRDEAYRKPVAATRSAA

SEQ ID NO: 50038 - protein, 460 aa, unidentified
MRKPTKKQLSGMKQTGKSGFPLLNPDAAGIDVGAREHYVAVPADRDAQPVRCFGAFTEDLHRLAKWLLQCGINTVAMESTGVYWIPLYQILESYGLAVKLVNARHVKHVPGRKSDVQDCQWLQQLESFGLLSGSFRPEAKICVLRSYMRQREMLIRNASRYIQQMQKALTQMNLKLHQVISDLSGHTGLRIVRAIIAGERDGLKLAALKDRRIKSDVTTIAKALEGDYRAEHLFALKQGLELYDYYQQKIAECDAEICKELQTLESRGTAGAVLKRKPRSRHHPVTFDSQAELYRVLGVDLTRIDGVNENTAQLILSELGLDICQKWTTEGQFTSWLGLCPNNEISGGKLLKRGTRKVVNRVANALRMCAQSLLNSKSALGAYARRLRTRKDTPVAITATAHKLARLIYRTLKYGQEYVDTGGDSYEAKYKAMLLKSLQRRAKSLGYQLVSYQTLDTVVP

SEQ ID NO: 50039 - protein, 409 aa, unidentified
MERQLERCCGLDVHKDSVAACVRLGGRTGKPEQYVQTFGTTVAELLVLHDWLAAHGVTHVAMESTGVFWKPVFYALESDFTCLLVNAAHIKQVPGRKTDVKDCVWIAQLLEHGLLRGSFVPPAPIRDLRDLTRYRKALIHDRTRVANRLHKALEEAGIKLASVASDILGVSGRAMLAALVQGTTDPAVLADLARASLRRKLPALRQALASRFRPHHAFVLGQLLAHLDYLEEAITTLSTEIERVMAPFAEPLRRLDTIPGINQRTAEVILAEMGPDMGAFPSAGHLASWAALCPGQHESAGKHKSGKTRKGNRWLRTALIEAAAGASRAKNSALQARFRRVLRHRGPKKAVVAVAHALLRMVYHVLADGTVYREAGADYYDRHHSQRITRRALQTLERQGYRVTLEPAA

SEQ ID NO: 50040 - protein, 359 aa, unidentified
MNSSAPKFTAGIDVGDRLCHMCVLDADGNVERRDEFPTSRAGVSGALEDFDGERIRVVLEVGTHSPWMHEVIVDLGHEVIVANARELELIAKNDKKNDRNDAELLARLGRVDPKLLAPIWHRPKEHRRALALLRTRDALVRSRTILINNVRGLVKTTGGRLAKFSSETFAAKAKLELPKELLKIVKGALRTIEATTKEIRGYDKEIAKLAKKKFPETELLQQVHGVGPVTALAFRLTISDPSRFKKSRTVGSYLGLCRRQQQSGHDPELRISKCGDGFVRKLLVGSAHCILRGGAPDSDLRRWGKAIYVRGGRNAKKRAVVAVARKLAVLLHRLWVTGEVYEPLRNSSRSAQADLVTRN

SEQ ID NO: 50041 - protein, 436 aa, unidentified
MTTHATTASPIKATTRVTRGTRHKQARKERRSKRIPKDALIIGVDLARENQAICFMHHEKVLGRISCQLAPMQFETIFEAADSVCQKHHLTQQVWAMEPTGHYWMLLAEQCERHGRDYVLIHPLSVARQRETENFNREKSDPRDAELIATLATQGRIIDTVLPSTAERAALQDLAYAYFSVRSLSASAKTALYNFWHRLLPEFFDHLKNVDGLTALAIGRALVPFSQLSQWTKAQWLEKVKALVPKQRILRSRVMAIYDAILLAAADPHRRSGEGMPWRIRHAAERRVLLQTQKQELRDLILEHYRATEESLYLDSIAGSDPLYNALTLGLIGDFQAYDHPRTLVKLAGTEINMFTSGDSVKNSRISHRGRRRLRAAAYLQARYLVKRNTCYAQRFISLRKTKKLREIQCYVAIANSYLRTAHALVTQKKFYSSPQ

SEQ ID NO: 50042 - protein, 398 aa, unidentified
MTEPHPDAIRPMPCHPARVAQALADTVEAVIGVDTHTDTHSACLVSAVGSVLAECTAPASPVGYRQLMDWAKDEQQSRGLAEPVWVLEGSRSHGTGLARFLTAAQQRVLEATRPLRPSRRPGGKSDAKDALLAARSALAATHHGQPRVDGPREALRTLLVIRASAITARTDAINQLKSLILQAPDELRDRLRSMTSAAQIAACRRLRVPAAPPRSILKSTPGLVLDDAEHRTRVASMRRLANRIRTLTGEIDDAQTELVDLTRALAPGLLAETGIGPITTAQILVSWSHPKRLRNEAAFAALAGVSPIDASSGRQQRHRLNRNGDRALNRALHTIAVTRERCHPATKDYIARRLDQGSTRREARRMVKRYLARHIYRHLEAAAAAEPAEPAPIPELAA

SEQ ID NO: 50043 - protein, 345 aa, unidentified
MLYVGLDLSRKRLDWQALLPDGERAALGAVPPDRDGLSKLARRLGDAEVVAVIESMSGARFVHDELERAGWDVRIADALKARGIAPLACKTDTIDTWVLAELARLELVPEIWLPDPEVRAERERARFRLHLVKHRSSLKNRIHATLFQHGVSTESSDLFGAGGRALLERLCLPEPWASTVAASLELIDVLDEQIAACEAELRALGADHRYIPRLMTCPGIGWVLAFTIASEIGDIGRFASPRKLVGYSGLCPRVEQSGELDRRGPLRKNGPTYLRWALVEAAHSAIRWHPPYRDVRERMRTRHGRKRGTKIAAIEIGRRLSEAIWHMLTRNESFAPAGAPGSLAA

SEQ ID NO: 50044 - protein, 337 aa, unidentified
MAISFLGIDVAKNVFQLHGVDASGKITLRRRVARSQLMEVILRLTPCTIGMEACGSAHHWAREFAKLGHAVRLISPQFVKPFVKGNKTDSNDAEAICEALQRPSMRFVPVKSIEQQDVQSLHRARSRLVNNRTGLVSQMRGILAERGIVFAQSITRARREIPTIVADTSNALTPLAREMLSDLIDQLRELDGRIAGFDKRIDAVFKASETCQRIAKIEGVGPKTATAIVAAVSDPKDFKNGRHFSAWLGLVPRQCSSGDKTRLQGISKRGDRHLRTLLIHGARAVLRTAPTKQDRKHAWALALQERRGANRAIVAMANKMARTIWAVLASGQPYHPA

SEQ ID NO: 50045 - protein, 319 aa, unidentified
MAQNDRVVVGIDVAKDKVDACIRALSQRQTFESTAEERRKLIAWLRKHKVTAAVMEASGGYERDWAKALREAGIEVRIVDPKRVRNFARSAGRLAKNDVIDAEMIAWFAETFGEAKGQAYDAAREKLSQIVSARCALIDLQTSLQNRGEQTLPGPVQKMQARLLRQLAREIAGLEAAIAALIKATAHFAELAEIIESVPGLAEITSAGLIAAMPELGQVSNRAISALLGVAPYDDDSGKRRGERQIKGGRRKVRNLFYMACLGAATRHNPVLKAFYQRLLAKGKEKKVALVACMRKLIGILNTMIARGEKWDASRCALS

SEQ ID NO: 50046 - protein, 393 aa, unidentified
MICVGIDVAKDKHDCFILSSEGEVLADVFTIQNNADGFGTLLQTIRRCARPEDKIKVGLEATGHYSYNILGFLLDKGLPTYVINPLHTNLYRKSLSLRKTKTDRVDARTIAAMLMSDVDLKSYTDTVYHNEELKSLTRYRFDKVRERAKLKQSVSRLVTILFPELEKLVSTLHMASVYALLSEFPGAKQVAGAHLTHLKAVLYDASKGRYGRDMATTFRDAARCSVGSVMPAKSLELRHTIRLIHELDAEIEDIEAAIQSMMDEIQSPITTIPGMGVRRGAMILAEIGDFSRFDSPDKILAYAGISPSTYQSGQLSLSGAYSHMEKRGSRYLRYALYNATKYVCLWNPNFAAYLAKKRAEGKHYNVALSHATKKLVRLIYALEKSKRPYSTAA

SEQ ID NO: 50047 - protein, 341 aa, unidentified
MKLIRVGVDLAKNVFQLHGVDRLEKTVWRRKLVRGDWIKELLERIEPGCEIGMEACSGAHHWARMLQAKGYTVKLIAPQFVKPYVKSNKNDANDAEAICEAMSRPSMRFVAIKTVEQQDIQAVHRVRSGLMDQRKAKANQLRGLASEYGLVAPKELLHLRSAIPRWLEDQENGLTERFRRLLHGLWRDLKALDERVEELDREIGQIARQDPVAIRLQQVRGIGPLTATALLATVGDATQFASGREMAASFGLTPKQNSSGGKERLLGISKRGDAYLRSLLVHGARAVIRTAQAKTDRLSIWVIRIATTRHPNIAAVALANKTARIAWAMLTKGTDYRSQAA

SEQ ID NO: 50048 - protein, 350 aa, unidentified
MIIIGCDFHTRYQQIALVDDSTGELSERRLDHENGEAHTFYRSLPKPVRVGIEATGPMHWFERLLAEHGHELWIGDSAKIRSSELRKQKTDERDARLILELLLANRFPRIWVPTAAERDLRQLLWHRHKLVRLRTMLGNQLHFLAMSQGLCRKKKLFTQKGRHELVGLALGPWASRRREELLKLLDQVEPSIAQLDRAVLEQANRREDAVRLMTHPGIGPVNALAFVLTIGPVSRFRRSKQVVSYLGLNPSEHSSGGRRRLGAISKQGNTLVRWLLIEAAHHTVRFDPELRQDYQRLRFRRGNAVAKVAIARKLAVRMFWMLRSGADYAQLVRMQGSPGATLMDASSSLG

SEQ ID NO: 50049 - protein, 369 aa, unidentified
MADYTEAFVAFDVAKIKHAVAVADSGRAGEVRFLGEVENRPATIERTIGKLAKRYHRLHVCFEAGPTGYGLYRQVRDLGHDCMVVAPALIPKRSGERIKTNRRDAVTLARLHRAGELSAVWVPDIVHEAVRDLVRARQAVAEDLRRKRQQLLSFLLRHGRIYDAGGHWTLAHRRWLARQAFEHPAAQIVFQEMSDAIEDAAQRLHRFDEQLAAIVETWSMKPVVEAYQAMRGASFLVAVIFAAEIGDVRRFETPPQLMAFLGLVPGERSTGDTVRRSGLTLAGNRRARRALVEAAWTYRYPARVSEPLRARLEGLPKAVRDIAWKAQVRLCARYRRLAAAGKKPPVIAAAIAREMAAFLWAIGREVAPS

SEQ ID NO: 50050 - protein, 351 aa, unidentified
MLQKTNAVSVRTIGIDMGKNTLHLIGLDQQGTIVLREKLARGRIGRRLANASPCLIGIEAGMATHYVARELLALGHDVRQVPPAYAKPFRQGHKNDFRDAHAIAEAVLRPSTRCVPVKTDNQLDLQALHRVRSRLVGQRTAVINQIRSFLLERGIAVRQGPRFLRQQLPEILAKRTDVLSPRMIGIIEDLSGDWRRLDERIERVTEEIEQLAHGSEICRQLMTVPGIGPLIASAMVAAIANGAAFAKGRDFAAWLGLVPKQMSTGDRTILGHISKRGNRYLRTLFMQGARVILLRPANWARHSFGPWLTAAAKRLHHNVLATALANKLARIAWTVLAQRRNYETRVVTEAA

SEQ ID NO: 50051 - protein, 442 aa, unidentified
MLMSLFALFERRYHMDFEVKHLICAGLDVHKKTVVAAVCITDPVTLEATYKVKSFSTNNSQIAAMRDWLLSYNCLHVCMESTGKYWIPVFNILEPHMHVILTHPKYVKAIKGKKTDKRDAKWIANLFRFDIVKASFIPPADIRALRELSRYRLKLSYMRSAEKNRYQNSMTISRIRIDCVLTDPFGKTASSIMNYLLSDVPFDEKECAKLIHGGIKVSNEEIFDSIRGFEILSEQRFKMSHAKQHMELLSSYMDEIETELFRLSRPYDEVIKRISRIAGFTERSALFVISEIGADMGVFESDKHLCSWAGLTPANNESANKKKSTRCSKAGQYLKPLLIQCALAAVKSRKNPYYAIKYNRLAKRRGRKKAIIAIARMMLTSIYHMILNNEEWKPDDYEAIIHPSKPEKVALTLDNVIQFLGEQGADPETLKLLQQQCAVHSG

SEQ ID NO: 50052 - protein, 332 aa, unidentified
MKFTSFIGIDISKLDYDVAHLDVNGTVVDTKKFSNNSSGFRSMLSWIKKSSATEQLLFCLEHTGVYCLGICVFFEEYGLNYSLQSGLQIKRSMGIQRGKNDKADACVIGKYAYLNRNEIDCYRLPSRIILKLKQLVSYRERLVKSNVALKIAAKELKAFTDKDMHGYIVSDSQEHIKHITKSIIEIDHSLKQIVAEDPALNRMFKLITSVKGVGLHIAINMIVVTHGFTRFKNWRKFSCYCGLAPFEHRSGSSIRGKTKVSHLGNKKIKAIIGNGIASAIQHDPEIASYYKRKLEEGKHKMVVMNAIKNKLISRVFAVVKRGTPFVPLYQHI

SEQ ID NO: 50053 - protein, 433 aa, unidentified
MNSNHPYDLVIGLDRSDRKADLHLINPRSAIAEKQTIDTSPEALHEWLFQLRQKHPQARVAICLEQPAANLILFLEPYSWITLYAINPITLQKFREAFVTSRAKDDGKDAQYLAQLLLTHHDKLKAWQPDDCQTRQLQQLVVHRRAVIDERTSLTNRLKALLKQYFPQALELCGEDLWRPLATAFLLKWPTLQRLQKAKSATIKTFYYRYGSRSQKLIDQRLERLARAVPLTDEPAVLESHALRVQLICRQLELLHQTIDQFDGQIALVFRSHEDRALFESFPGAGPVLGPRLLASMGSERERFGSASNLQRFSGIAPVTKQSGGKCYIHRRYLCPKFLKQSFHEYAKESVLHSRWAAAFYWQQRQKGCGHHTAVRALAYKWQRIIWKCWQTRSVYQEERHEAALKKNGSPLVSLLDQIQPGKSPMNTTTKKS

SEQ ID NO: 50054 - protein, 328 aa, unidentified
MLPERLEGQMFVGIDVAKAELVISVLPSAERFTVENDEPGVRALVQRIAASRPQLIVLEATGGYELLAVAALAAAALPVVVVNPRQVRDFAKATGQLAKTDRIDADILARFADVVRPEVRIIPDMAAQELDALLTRRRQLLEMLQAERNRVGQVFGTGKKQVRKSLKAHITFLERERHKTDTDLSEMVRQSPVWRERDELLRSVPGVGPVLSRTLLADLPELGRLSRRAIAKLVGVAPLSRDSGTLRGRRFVQGGRAAVRGVLYMAALVANRRNTVIREFYLRLVAAGKPKKLALVACMRKLLTILNTMVRTNTTWSVKAATAILAVA

SEQ ID NO: 50055 - protein, 465 aa, unidentified
MKRQMRRRTPKARQSPAALERLHPHAAGIDCGSAEHFVAVPPDRDTAPVQSFPTFTGDLHRLAEWLTACRITHVAMEATGVYWIPIFEILDARGFQVILVNARHVKNLPGRKSDVSDCEWLRDLHILGLLRGSFRPADGIVALRGYLRHRTTLIESAGALVQRMQKALVQMNVQLPLVVSDITGVTGLRILRDIVAGQRDPQQLAQHRDYRCHASEGEIVAALTGNYRPEHLFALQQNLELFDIYQRQLAASDVAVEAHLAQLAATTTPPPAPLPAARRRQKPRDNEPRFDVRTPMHQLTGVDLSQIDGIGPYNALRLLSEIGTDMTRWPTEKHFTAWLTLAPQNKISGGRLLSSRTQPSANRAAAIFRLGAMNLGRTQTALGAFSRRVAFRIGKAKAITATARKLAVLVYRTLKGHLVYVDPGAEAYDAQDRTRIVRRLRHRAEHLGFGLINLSTGEVVEGSVS

SEQ ID NO: 50056 - protein, 343 aa, unidentified
MGHYAGIDVSLELSSVCVVDGTGRIVREAKVASEPEALVAWFRGLRLEVARVGLEAGPLSQWLFAAMRAAGLAVELLETRHVRDAFRAMPVKTDRKDARGIAQLMRLGWSRPVHCKSASAQETRSLLTARELLRSKGHDTEMSLRGVLRGFGLKVGPTTARSFAGRVRELVAGHPTLTAVAEALLAAREVLGEQLRGLEKRLRDQAREDERVRLLMTTPGVGVIVALTFVAAVDDPARFRSSRSVGAHFGLTPRRYQSGETDVTGRISKVGGAGARTMLYEAANVILTKPVKGSALKSWATRLAARAGMRKAKVALARKLAVVLHRMLADDTPFAAERAAAAA

SEQ ID NO: 50057 - protein, 391 aa, unidentified
MKTEFNVAQISAFYGMDLHQDTVTISRCTTFGEPEYVTTLPYDLEQIRGFFVEEIQTYPKIMSTYEAGGCGSEVHRLLCDMGVYNVIAVPSLLPKRKKKRKNDILDSKALTSYLRNGEIHEVYVHDLDDEARRELTRLRLATKKKQRVAQQQVLAFLRRHGKRYPGKTNWTKTYWKWLWAVTMPSPALQNILLLLIEAVEHERSVIQKLESQLKESNDSWIRKEVVKALMTLKGIDFVTAIGLVSEIGSFHRFSSAREFMAYLGLMPSEYSSGERITPTQVLTNKVRRGHITKEGNIRMRSLLVEAAQAYRHRPKKSPELLKRWEGVPSDITDHAWNAQKYLHRVHTRFFLRGKPHNVTKVAIARKLAGFVWHIARLAEAQLATQNTSQAA

SEQ ID NO: 50058 - protein, 367 aa, unidentified
MKKISTAAAKQTRNFQDQKLTIGLDLGDRTSWYCVLDGAGEVVLEQKLSTTPKAMKEVFGGMPRSRIALETGMHSPWVSRLLSELGHEVIVAHARNVRLIGESRKKDDRLDARTLARLVRIDPQLLAPVKHRSVQAQAHLMVIRARAGLVRARTSLLNTARGLTKSYGERLRGCHPRNMNPEKAQGLSPELRAALEPLLGEIESLSERIREYSARTEQIAKENYPEVARLKQVQGVGTLIALTYVLTLEDAHRFGKSRDVGCYVGLQPGRRNSGQSEPQLHISKEGDPYLRTLLVQGAHHILGPFGADSDLRRWGLKLAERGGKNGKKRAVIAVARKLAVLLHRLWVSGEAYEPLRNHQPVALPAVA

SEQ ID NO: 50059 - protein, 344 aa, unidentified
MNISRVGVDIAKSVFHVHGVDRHEKPQWRGKYTRAKWLEAVCRRVPQGATIGMEACAAAHYWARELQARGYHVKLIAAQFVKPYVKTNKNDRADAEAICEALGRPTMRFVAVKTVDQQDSQATHRIREELISQRTAKANQIRGLIGEYGFIAPTGIQQLRRALPLWLEDATNGLSDRFRRLLADLADDLRYLDERVAQLTSAIETHANTDPVAKRLMTLRGIGPITASALSGVLGDGAIYKRGRDFAASLGLTPRQHSTGGRERLLGISKRGNSYLRKLLVHGARAVLRYAVKKDDGLSQWIKHLAVRKHRNVAIVALANKTARMAWAVTRYEVPYNPELSAAA

SEQ ID NO: 50060 - protein, 412 aa, unidentified
MNQDKLYVGIDVSSKNNVCYLMYSDGSKHSSFSVPNNRNGAKIIVDRVTSVLLLQDIPQVVIGMEATSVYGDNLMRFLRESGSLGRFERSLHMLNPKQVKKFRDAYSDIPKNDYVDSYVIADHLRFGRINKEVYMDDYKYQALKMYTRARHQLVQELTREKQRFLNTVFISFSGLTQEKIFSNKFGATSMALIEEFSSLDELAYMSTDELVDYIRKKGKNHFDDPEEIAEAVQRAAKNSYRPPQVIADAAKQMLAISMNTIRLLQKQIKEYDKAIEKMLEAFPQTLTSIKGIGNIYAAGIIAEIGDINRFPSQASLAKYAGLVWTQHQSSDFEAEDKRMIQGGNHHLKYYLCEAANALRRCDPEFKRFYALKYKEANKHNHKRALALTARKLVRLVYTLLKTNRLYIPPEEY

SEQ ID NO: 50061 - protein, 370 aa, unidentified
MQFIGIDLHTNKFTCCYRNENSPLDGKDGKLTETFELTDYGLAAFYQTLTSETYVLIEATNPTFTFVRLIQPLVKEVIVANTYELKQISLARKKTDKIDADKLCRILKMQILSGEQTISAVTVPPVEIQELRALFSTYRLYRKQTTQYKNRIHSLLKENLYGFTQEEIFDKKNREMIRGIASGTVLSCQINDLLDLLENLEVHITLLQDRIKELAGPYMREIEILTSMKGVSVFIAIAIIADIIRVDRFKDSKSFTSYLRSAPSVAASNTSVSSRGTNKKGRKMSATLITQSLNHVLKASPKLNKWYTRLTKYKKTGLVRTALRRRVFAEIYQMLKKEEYHYDRDVRNHEAKILQYRKFLEKRNIFLETA

SEQ ID NO: 50062 - protein, 413 aa, unidentified
MKSLRRQNFTAYVGLDWADSKHDICLLEAGSEQREFACVAHQVECIDEWAKSLQQRFGGPIAVALELAKGPIVYALQKYDFLVLFPINPLTLAKYREAFRPSRAKDDPSDAELALDLLVRHPERFAPLQPQSVGMRTLISLTERRRELINDKTRVTNRLTNTLKQYYPQALEWFDQHDTVMFCDFLSRWPTPLQAKRAHRASIKAFHHAHNAHRPKLIAERLAAIKAAVPLTQDPGVVVPCRLHAMVLVEQLRLALQAIEQFDRHIAELAPTLPDYRLFEGLPGAGPHLAPRLLVAFGEDRERFQRAEELQKYSGIAPVTERSGKKNWVHWRWQCPTFLRQTFVEWAGQTINKSFWAGAYYNQQRAKGSTYQAAVRALAFKWIRILYRCWKSRIPYDETKYLKALKKNDALRY

SEQ ID NO: 50063 - protein, 347 aa, unidentified
MRFYNRQHRHYCGIDLHVKTMYICILDASGQVLVHRNVKSTPEAFLETVAPYRDDLVVAAECMFTWYWLADLCAAEGIAFVLGHALAMKAIHGGKAKNDKIDSRKIAGLLRGGLLPQAYVYPAAMRSTRDLLRRRLHLVRKRGQLLAHIQNTRAQYNLPAFKWRLAYPANRDGVREHFVDPSVRKSIDVDLVLIDQYDGLINDLEGTLVRDAKRHDADTFHRLRTVPGIGKILALTILYEVHDITRVDRVQEFASYARLVKGQKQSGGKMLGTSGAKMGNVHLKWAFSEAAVLFLCHNAEGKHLLAQIQKKHGKGKALSILAHKIGRAVYYMLARGTVFSMEKFLHA

SEQ ID NO: 50064 - protein, 434 aa, unidentified
MIKVVYPNCAGLDVHKKFVTVCRLTVDRQSVVQKELCEYSTMTADLQAMADWLAEGSVTHVAMESTGVYWQPINNILEGHFEVFLVNAQAVKRMPGRKTDLKDAEWLATLMQHGLLQRSFIPERQQRELRELARYRLSLVQERSRFANRLQKVLEDTNIKLSAVATDMQGVSAQAMLRALIQGETDPSVLAGMAKGRMRKKQNELARALVGKLTEHHRFMLSQLLDQLDVLDQQIAKIEGRIEEQLAQMPLFQSAVTLLDTLPGVDRQLAITIVAEIGVDMSRFPSDRHITAWAGVAPGNNETGGKQRSGKTRKGNKYLRRALVLAAWGAVRSRANYLRSMYYRLAARRGKPRAAMAVGRTILQAAYHMLLRGEPYNELGTDYLDQLDRERTAKRLLKRLDSLGYDISSVKDRLTLPPTIPEPAPPRQPLPVPG

SEQ ID NO: 50065 - protein, 346 aa, unidentified
MKILALDLGKYKTVGCDYESESGAHQFKRGFTTRAGLAKMVQEVKPDRVVIEVCSIAGWVCDLLWGMGIEVQVANTSDDAWRWRKVKQKDDRRDALKAARLSAVNQLREVYIPAQAVRQWRALITYRQHVIRRRTKIKNHIRDLLLREGQILGRGSSCWSQAGIAALAAQARPFSDCGPAELWRGELQLELEQLKEIQRQVTTVTAQLDKIGAADARVQLLRTVPGVGPRLAEAIVALLDQPQRFRKASQVSGYIGMVPKALDSGETERRGHITRQGSRLVRSLLVEVAWAGLRHNAWVRQTYQRLSGGKKARKKIAIVAVGRKLLVKCWAMLRDNRAWDWQPQIT

SEQ ID NO: 50066 - protein, 399 aa, unidentified
MMTPQALQLRVGVDVGSQSHRVAVGLSDGSLLEEFEIPHTAAGFEDFFSRIEGHAKRHPYPIAVAMEGYNGHVRPLDSLVRARGWQLFNVNNLKLARFKEIFPAAAKSDRIDSAKTLELFQLRDHLPMAGDVLQEVMATPEENDILKRLSRRRRRLVGERVRVVNSMHADLQAVAPGLSRITQNVANLWFLSFVTCRDDIRKLARVRRASLLKLPAIGHSYADRIQAWQNGACFGHDARLVGDMIRQDAMRILELNRQIKALEIETARIAAKSAIACQLASIPGYGSVCTAELAGEIGTIARFRSEASLALYLGMATLDNSSGKYRGSKAPKHVNARAKAAMVAAVDHHRKRVPQSQRYYEKKRAEGKRHNQAIRALGRHLCRVIFKMLSQERPYRIDP

SEQ ID NO: 50067 - protein, 337 aa, unidentified
MEQYVGLDVSMRETSIAVRQNGKRVWRGKCPSDPRALADVIRQRAPNAVRIVFETGPLSTWLYHALKAEALPAVCIDARHAKAALDMAPNKTDANDADGLAQIAEIGFYREVRVKGYGPMLMRTLVGARSQLLRISIQLSNQIRGIMKTFGLIVPKGAGRIFESNARALLKTNEAVARVVLPLLETWRVVRARAAELDRQLIAAARTGPSYRLLMTIPGVGAITAVSFVAAIGVPENFKRSRAVGAWLGLTTRRYQSGETDYDGHISRRGDRHLRALVYEAAVAVLTRARTDCALRSWGLKLKAKVGFKRAAVAVARKLSVIMHTMLKTRAAFAAAA

SEQ ID NO: 50068 - protein, 368 aa, unidentified
MKKNSRKAESPTRGRSIRKSDRVTIGIDLGDKTSRYCELNAAGEVLVEGACATTKKGMSELFGAMAPCRIAIEVGTHSPWVSRELKKYGHEVIVANARQVQLISQSSRKNDKLDAQMLARLARVDPALLRPIRHRSEEAQKDLMTIRVRAGLVEARTELVNAARGLAKAVGERLPTCDADQMEAEHLEGLPAELQETLKPLLEAVAKLTEKIKECDRKIEQIARERYPETQLLRQVSGVGPLIALTFILTIEDKERFRKSRDVGCYVGLRPKQSESGERQPELRISKEGDVYLRKLLVQGAHCILARRGPDTDLKRWGTKLAGGGGKNAKKRAIVAVARKLAILLHSLWVTAEVYEPLRHSQAMAKAA

SEQ ID NO: 50069 - protein, 387 aa, unidentified
MPDVTPCLHPGQVRGWVAIDQHKFSIVAAVLPPDGGKPEVSRIETTERAIRRFIAKQGGPEGLSVCYEAGPGGFALWRLLTSMGVACDVVAPSLIPVRKGDRVKTDRRDAKKLVALYRAGLLRFVHPPTAELEGLRDLLRARDDLRCARMAARNRVLKQVLRHGRIFREGKTAWTKLHRAWLARQRLEDPFAQEALEQLLIHLDGIERQLATLDARLAQIAAGERWSGQVQILTRFRGISTLTALGLIAEIGDFARFSHPRELAAWLGITPSEYSSGPQQHRGHITLAGNRHARRLLIEAAWHYRHAPRRAASGPEVDERAWQAQVRLHHRHRHLTQHGKRPTVANIAVARELVGFLWAAMTDQPLRSTDTAAPPPSITDHLQEATA

SEQ ID NO: 50070 - protein, 338 aa, unidentified
MSLYCGIDLHSNNSYVAVLDEERRDVDCRRLRNELPAVLGFLEPYKEELEAIAVESTYNWYWLVDGLMRAGFDVRLMNPTKATAHRGLKYTDDKHDARWIACLLALGILPEGHIMPVEERGLRDLLRRRLYLVQKRTAHLLSLKGIFARSTGKQVSVADIQKWDCEAIREVIDDPLVVESITIMLPVVRVLTAQINAVEKRALEIGKLRDEFGLLQTAPGIGQVLALTIMCETGDIRRFSGVGNYASYCRCVPSDRMSNFKRKGSGNRKNGNKYLSWAFSEAAHHAIRFEPLAKRYYDRKRARSHLMVASRALANKMARACYYVLRDQVPFDPARAFC

SEQ ID NO: 50071 - protein, 366 aa, unidentified
MKKTSTVRVNGNMIFKGHKLTIGLDLGDRWSFYCVMDEAGQIILEQKLTTTPEAMKQTFAKIPRSLIALETGTHSPWVSRLFTQLGHEVIVAHAQKVQLISKSNRKDDRHDARTLARLARIDPELLGPVRHRSAKAQIHLTVIRARAELVSARTALVNAARGLAKSYGERLRKCGTQQVSRELAAELSVELREVLEPLLQEVESLNERIKQYDARMEKIARESYPQVELLKQVKGVGTQIALTFVLTLEDPHRFPKSREVGCFLGLRPGRRDSGESQPQMHISKEGDPYLRTMLVQGAHYILGPFGQDSDLRRWGLKLAARGGKNAKKRAVIAVARKLAVLLHRLWVGGEVYEPLRNSHKAMRAVA

SEQ ID NO: 50072 - protein, 411 aa, unidentified
MRLFVGDDWAEDHHDVELMDAAGRVLAKKRLPEGVAGMARLHELIAQHAQDPDERGEDAEVVIGIETDRGPWVAALVAAGYTVYAVNPLQASRYRERHGVSGAKSDTGDAHMLTDMVRTDSHQLRAVAGDSADAGAVKAVARTHKTLIWDRTRQTQRLRHQLREYFPAALAAFEDLDAPDALELLAKAPDPARAAKLTRAQVSAALKRARRRDIPGKATAIMAALRSAQLGQPPAVNAAYAATVRSLIAVITTLNEQVKTLQGQVEADFGRHPDAEIYLSQPGLGPVLGARVLGEFGDDPDRYASGKARKNYAGTSPVTRASGKKKTVIARFIRNDRLIDAIMAQAMSALTSSPGARALYDAERAREVEHNPALRKVANRLVGIQHGCLKTRTLYDEATAWPQQQKIELAA

SEQ ID NO: 50073 - protein, 347 aa, unidentified
MRFYTEQHGYYCGIDLHARTMYVCIISQDGTVLVEKNIRARPGPFLELIAPYRDDLVVAVECIFTWYWLADLCDEEGISFVLGHALYMKAIHGGKAKNDRIDAGKIAVLLRGGMIPQAYVYPSQMRSTRDLLRRRLHLVRHRARLLAHIQNTNHQCNHDDFRKKLTYKANREGIAEQFNDPSTRKSVEVDLALIGYYDGIIRDLELFIVRMAKQHDAEMFHRLRSITGVGKILALTILYEVHDITRFETVQRFASYARLVKCSRESAGKRMGTGGAKIGNVHLKWAFSEAAVLYLRKNPVGQKYLARLARKHGKGKALSILAHKLGRATYLVMTRSRNFDEKKFLAA

SEQ ID NO: 50074 - protein, 341 aa, unidentified
MKNVAIVAIDLGKLSFHIHAQDDSGQELYHRKFNRMGLVKHLASLAPCTVVMEACGGSHFMAREVTRLGHTPKLIPAQFVKPYVKSNKNDFADAAAIGEAATRDKMRFVHPKTEAQQALAMLNSLRDTFIKERTATMNRVHSYLLEVGISLPPGFKSVRELPILLDDCTFSLLIKKLLMDLHAHFNYLDGQVKALDKEVHCQAASDDLASRLMTLPCVGPITATALAAELGDGKQYRSGRDYSASVGLVPKQFTTGGKPRLGGISKRGDGNQRRLLIQCARVYLMGLERQSGKLADWVRELLRTHHTNLVVCAIANKLARIAWAITAHHSEFDAGSSAISA

SEQ ID NO: 50075 - protein, 406 aa, unidentified
MELTALHKRVIACDVHQAQVTVCAILEEPDGSVRIEQQRFGAFQRDRRALAEWVGARRPDVVVMESTGIYWKSLYAALEAVGIRAVVVNARHVKNVPGRKTDIGDAQWLATLARAGLLRGSFVPPATLRELRLIARQRQKLMGQLASEKNRLHKVLTDGGVRLGVVVSDLHGQSARAMVKALIRGQAPHEVLRHASRRLKATRAEILDAVQGELTDSHRFVLDELMQHIEGLEARVARFEARLLAGLADQRPVLALLQTLPGVDLIGAALLLVEIGADMDVFASADRLASWVGICPGNNESAGKRKSGRVRKGNPYARRLLCEFAHAASRTPSAFQGKYKTLVVRRGHKRAIVALAHKLLRTIFFMLKRGEPYRDSATDYEALAVQRNAPRWIKALTRFGYITPAA

SEQ ID NO: 50076 - protein, 484 aa, unidentified
MKKPSNKARRPAPPIVARGKGPIRPATSLPVVHPHAAGIDVGASELYVCVPEDAVSPGESPVRRFGVFTGELDKLVEWLQSCGVKTVAMESTGVYWIPPYQKLEAGGLEVVLANARHLRQVPGRKTDVKDCQWLQRLHSYGMLQGSFRPAEEYCRLRSLMRHRENLVDGCVQQVQYMQKALDLMNVRLHQVVSDLNGETGLRILDAILAGERDPKKLTSLRDERIKRSTPPEMEAALQGDWREEQLFILQQARETYRFVETQLARCDAQIEKVLQQIVVVAERRPSLETPPNPTAAPTPRKKKERRPRKTGHGLKRDLRAELQRICGIDLTQVIGLNVLSVLIIISEIGVNMSRWRSAKAFCSWLGLNPGNRISGGKVLSSRTPHVVNRVSLLLRTLATAVGRSETWLGIFHRRMKARLGPAGANTATARKMACLIYHLLKYQEQYIDMDTLIYAEKIQRIRLNKLRKTAHELGFELLPIKEAA

SEQ ID NO: 50077 - protein, 347 aa, unidentified
MRFYKHAHAFYAGVDLHARSMFTHILDHEGNTVFEADLPASPDAFRTAIAPYRAGLVVGCECMFSWYWLADLCEDDEIPFTLGHALYMKAIHGGKAKNDRIDAGKIAGLLRGGMFPMAYVYPRAKRDTRDLLRRRCFFVNQRAQLTAHIVNTNSQYNHPPLTKKLCYAGNRSDDLAERFTQASTQASIRADLALIDAYDTQIDEVERTVLKHAKITDPTTLKLLRTIPGIGKILSLVLLYEIDQITRFPAVGNFLSYSRLVRCEHESAGKKKGSGGKKIGNAHLKWAFSEAACLMLRAESEAKKWLDRQARKRGKKKALSILEAKLGRAVYHVWSKQRAFDPRRFFA

SEQ ID NO: 50078 - protein, 343 aa, unidentified
MKHYIGLDVSMKRTFICIINEYGKIIREGSENTEPHVIVDYLEKLGLEEMTVGFESGSLTPYLLAGFKERAIDAVCMDARKLSPILALKVNKTDKNDARGIAEALRSGMYTRVHCKPEESINRAILLTARRALIEQQTHLKNTVRGLLKSYGIRMGAISAKKFSAAVMKRIDGWQEIVILSIKCLLNAFDKLVEEIVKIDKKMLEIAFEDKEVRRFMTVPGIGPVTALTYKTEIFDATRFKESRSVGAYVGMTPTQYASGDTQKQGKTSKCGSKELRFLLVEAGVVILTRSKKWSKLKAWGLKIMRKKGLKKAAVAVGRKLAVIMHRMMLEEKDFIYREPKAA

SEQ ID NO: 50079 - protein, 327 aa, unidentified
MRQAKSLTEKAKTTVAFDVCKAALDVHIRVDGKAFQVPNTYEGFDQIALVLADYDVSLLLMESTGGYEDAAACNFQSLGYDVAVINPRHGRNFAMAMGKFAKTDRIDAAILADFAAVIDSRPDRARFIKPPTDEERKFLSQMVARRRQVVDLLSTEKQRLSHADDYAKQSINKVVAFIESQLDEINKDVSFYLKKNYSGLSKMLSEIPGIGELSVGLLVGDVPELGQIGNRQLSAVIGVAPFNHDSGKMRGKRCISGGRQNVRNVLFMGVMSATRYNPVIKAFYDRLINKGKPKRVAYIACVHKLLRIINAMVRDGTSFNPDLHAVS

SEQ ID NO: 50080 - protein, 312 aa, unidentified
MESGIFVGIDISKSHLDVFAPPLGAFRVEYTDAGLAEILERLSEHAIKLVVMEATGKLEAVCAATLSRSNIPVAVVNPRKVRDFARASGRLAKTDRIDAEVISRFGEALQPEVRRVRDEDEERFDELLTRRRQVVAMITTEKNRLGTVRDRKVRRRITAHITWLRVELKDVDREMSDAIKESPLWRVKDALLRSVPGIGETTSKVLIAELPELGDLNRKEIASLVGVAPMNRDSGTMRGRRTIFGGRSVVRSALYMAVLAATKHNPDLKTFYQRMLAKGKPKKVALTATMRKLVILLNTVLARGTKWQPERP

SEQ ID NO: 50081 - protein, 426 aa, unidentified
MEVIYSKACGVDVHKTFIVAVICDSTSITPKYLRKRFSTFNNSLIQFRNWLIENDCQNVCMESTGKYYIPVYNALEGYISNVVVANPKWVKCIKGEKDDNKDAKWIADLFKLGIVRSSFIPHKDFRILREYTRYLYKLTCNMVSEKNRFTNALTVGNCKLDMTFSDIFGKSSQDIINIILNNDSFSDNDIIKCLRKNCKSSHEDILSSVNGITFTLEQKLRIKLIKDHIDYLTNEINNLRDIIDNLVAPYENYINLLMTIPGIDRNSAITILSEIGIDMSEFSSHYKLTSWAGLAPGCNESAGKKKSVKISRAGVYLKPCLVEVAHCAVKDKTNTYYANKFNKISKRRGKKRAYIAIARKILVAIYHMLLTGEVWNPRDLASNETSDKDRLKYNKNNFKQSLKQLLSLGLTSDELLEIVNQNAIIE

SEQ ID NO: 50082 - protein, 403 aa, unidentified
MYSSFVGIDIGKWNHQAAFLELSGKETARSLAFQNTSEGFQSLLESLATFDKGQTVIGLEATGHYWLALFSFLVDNGWTVKVINPMQSDALRNMNIRKAKTDRKDCVVIADVLRFGRYTETVLPDEDLLQLRELSRCRVAHVELLGDLKRRVLGILDRIFPEFASCFSTVFGAAPTELLQECSDPEELADYDVDKLIKLLEKESRGRHSREKAEELKAKASRSVGTRFGRDALKFELKMLLEQLDFIKGQVKEFDKFLKNLMKNHELIYTIPGISVTLGSAILGEIGDVKRFGTPQQLQAFAGMDPSVTQSGNFQGTQGKMSKRGSPYLRRAVYLAANAARRFDPVFKEFYDRMIARGKHPKQALAAVGTKLLRVIHAVMTSQKPYNPQKLLPPAARISQVTP

SEQ ID NO: 50083 - protein, 307 aa, unidentified
MDYTTIGIDVSKATLDICFLPTGEYLKISNDINGFKQLKKYIASSKVGKIIMESTGSYHRSLQKFLTVFGFNVFVINPKQIRDFAKACGILAKTDKIDAQVIAQFGERMPLQDKIKKDLFSEELKDLITRRRQIVYSLVNEKNHLEKTNNKFILKSVKSSIAFLQKQLTQIDNLILNFIKSNDFYNQIYNKLLAVKEMGKVTASVLLAELPELGQVNKRKIAALVGVAPMNCESGTTRGQMHIRGGRMSVRNTLYMAAVAGVRANDILKNYYNRLRNNGKTPKMALTAVMRKLLIFLNSLIAKEFFA

SEQ ID NO: 50084 - protein, 334 aa, unidentified
MKELKSSVGIDISKDSFEVCIKQLKDERAVIKATHSFQNDFMGFESLLKWTLHKVSNPVFVMETTGVYHEDLTHFLYSNDQKVSVVLANKMKHFAKSLNMKTKTDKADAQMIAQYGLERPLEWWQPMMPQMKNLRDLCRERLSLKKDLVRCKCQIHGLRHAHSTLDVVLKLKEQQIEFLEKNIQVIEHEIIRITEEDTEFSQRVKNIETIKGLRLLTIVTVLCETNGFAQFNNIRQVVSYAGMDIAERQSGLFKGKTRISKKGNSRIRECLFMPALSATSYNEQIKALYQRVIERNPTIKRKGVVAGMRKLLILIFVLWKKNEAYNAEYKWDAH

SEQ ID NO: 50085 - protein, 411 aa, unidentified
MNTNPVFLRYLALDAHKHYVVIGGVNAACELVLSPRRLEWAELEDWLRTHLQPTDKVVIEATTNTWTLYDQVARYAGAVVVAHPPHIKLIGAALVKTDKRDVQVLAKLLALDLIPEVWVPPQPVRELRELTAHRLRLTHARTQTTNRLHSMLQRHNLAAPTGDPFAAQHRARWEALDLSPTEKLHVRQDLATLDLLNTQLAEVEQELARLSTVAPWAEQVPFLIQLPGIGLITAMIILAAVGDITRFARAKNLVGYAGLGTYVHDSGKTHRHGGITKHGRADLRSALVEAAWVAVRTHPRWQAEFARLSKRMPANQAIVAIARKLLVVVWHVLHDHQPDRHAQADKVAAKFFVWSGRLGQTYRGCFTPRQFVRWQLMQLGLGDDLTHIRFGGDLRSLPTAEELAALIPTVT

SEQ ID NO: 50086 - protein, 338 aa, unidentified
MIVIGVDVHKQSVTAVAVDEAGRMLDERTAAVGSDKLIGWAGELAEERLWALEDCRQLTRWLERQLLTHGEDLVRVPPKLMAPERRAGRSRGKSDAIDALAVARAAVREPDLSRPRPDEQVFRELKLLVDHRDDLVDERRRTQQRLRWHLHQLDPTFAVPLRMLGRSSHLERVSRWLARREQELQVRLARELVVRCRSLTRTITELDRELERGTAETAPALLELPGCAAVTAAKLLAEIGPIDRFKSDAQLARHAGVAPLDASSGRVQRHRLDRGGNRQLNSALYRIAITQARYHPEARAYLERKQAEGKSRREAIRCLKRLLVRVVFQTMKTNPALT

SEQ ID NO: 50087 - protein, 337 aa, unidentified
MSKDQFSSPPGDALPILGIDVSKLTLDTCLALEGKLVRQRVANTAEGHRQMLEALQKHGVSTALIVMEATGPYHLALATTAFEAGHRVAVINPRRVLDYAKAKGRRNKTDRVDAAIIASFASAHAPALWQPLPAAQNVLRELLRRQGDLEAYLQAEERRLEMAPSVPALRESLRRAIRWIQAEKLRMEKSVVRHLQEEPALADDIRRLEAIPGFGEKTARLLTAEIPRHFKNARAVAAWLSVVPQQWTSGTSVRNGSHLGFPAPSLRGKLYFPAISAMRWDARSKAFAERLRAAGKAKMSIIFAVLHKLVRAAFAILKTGSEYQPTHAVKLDAPCSP

SEQ ID NO: 50088 - protein, 360 aa, unidentified
MKKVSKQMRNMEVAEKPEMTLGLDMGDRYSHYCLLNPQGDVVEEGRMQSTEAALRRHFEDEPEMRIALECGTHSPWVSRLLTALGHQVIVANARKIPAITGSESKNDRNDAEKLARFAAYDPKLLSPLQHRSSERQLDLNLIHARATLVRARTMIVNALRGLVKSAGGRLPACSTESLPARAPAAIPPALAAVATPLVQQIALLNAQIEGMDKQVEKLGAKYPEIGLLRTVPGVGPIVAAAYVLTLDRPDTASNRSAGAFVGLRPGQSQSGDSDPQRRISKTGDSCLRSLLVQSAQYILGRFGPDSELRRWGLKLAATGGKRGKKRAIVAVARKLAVVLHAMWRSGQRFQPFPQPATAAA

SEQ ID NO: 50089 - protein, 325 aa, unidentified
MKTILAIDLGKHKSVFCRLNTSSLKPEYFTAKTAPQKFHNIFAELDSSNSIVLFEVGSQAGWLCDMLRAMRIGFKVANVNHSAWKWSNNPNKSDKTDAHRLAMMYHHGFFPEVYVPVKPVRQKRSLIYYRQKIVNRLTQVKNRQLEQLALPFDTIDDPCQLWRGRLHMELHQLDILQASLDKITAKLDELNKQKQSIKLLETIPGIGPRTAEAIVAVIDDPHRFKSCRQICNYVGFTPKRFQSGQMDRTGRISKRGNPLLRALLVQASWAALRFDWAKHIYKRVSRGSAKRRKIAIIAVARHLLMRCWAMLRDNKPWQYKTQTAV

SEQ ID NO: 50090 - protein, 452 aa, unidentified
MQKQAGKVKTKRLQLECIESNAAGIDVGATEIYVAVPQDRDPQPVRCFKSFTEDLRQMAAWLVHCGVTTAAMESTGVYWLPPYEILEDAGVRVCLVNSKHVKHVPGRKTDVQDCQWLQYLHSVGLLRASFRPESEVCAVRSLSRHRSSLLENAALHVQHIHKALTQMNLQIHHVLSDITGQSGMAIVEAIVDGEHDPARLAALCHQRVRSDRQTVIKSLVGNYRSEHLFTLKQSLQAYRYCRELMTDCDREIEQRIRQLNGKVHLPEKAPPPDPRVHRRSKNEFTFEMVPELYRIFGVDLTAIPGISALTAHILLAEIGPDLSRFPNVAAFASWLALCPANKKSGGKVLSSKTRQSNSRANTALRVAAQTLGRSRTHLGNFYRRLRGRLGAPQAITATAHKLARIVYHLLTTGQAYDESVFLHEDQRQAQRQEKHLRKQARSLGFQLTPIPA

SEQ ID NO: 50091 - protein, 340 aa, unidentified
MFTNFVGIDVSKSKFDLALIKGQNKDHVIQGVFDNTHKGIKTMSKFLEKEHQVRLSETIFCMEFTGVYCRPLTSFFVEQDCHVWIEMPVNIIRSLGLQRGKNDRVDAHRIALYAYKNRDDIKLWKPQRDIILQLRDLLALRDRLITSQKALTNPIEELIAMGAKNAAANVRKNCQKTLSAIENEIGQIEKNLDDIIKDDPQLKELFRLATSVPGVGKLTALFMICFTNEFSMYTNPKQLACYCGVAPFEHSSGTSVRGRTRVSHMANKVLKRMLHMGAISVISRDPELRDYYQRKVAQGKNKMLVINAVRNKIINRLCAVIKRGYGYQSEIIFRERLVLS

SEQ ID NO: 50092 - protein, 356 aa, unidentified
MSRDIKYIGMDVHKEAIVIAVLNGSGKLVMESIVETTASSILEFIHGLRGELHVTWEEGTWASWLYDLLQPQVEQVLVCNPRRNALLKEGSKSDKVDARKLAELLRTGMLRPVYHGENGLRTLRELARSYQTISKDLNRVMNRLKALYRGWGIACAGTQVYSLRYREEWLNKIPHVGVRRRAELLYQQLDGLQGLRRILRPELLAESRKHKAVKLLRQIPCIGPIRAARLLALMQTPHRFRSKRQLWTYSGLGIETHDSAQYRYVGGQLQRSKNPQQIRGLNQNHNHEMKEIFKGAATRASCGRGPLHDFYAALLAKGMQPEMARLTLARKIAAITLTLWKGGKAFDAEQLKPQAA

SEQ ID NO: 50093 - protein, 466 aa, unidentified
MKARDPPLPRGRWIVASSTSVKLLTYLVPPETRPARATARPGRSAAREGLTVVEVLHERCAGMDISKKDVKVCIRVPGGRGGRYRNEVTTFGSMTGQILELRAFLLEQQVTLVVMESTGDYWKPFYYVLEGAPFELLLVNPRHVRGLPGRKTDVSDAQWLADLGAHGLVRGSLVPPPPIRVLRDLTRTHADLTRDRTREYNRLQSVLEDAGIKLTSVASKINGVSCRLMLDALVAGERNPKVLAQLAKGSLREKQADLTQAMTGRFTDHHTFMVRLHLQVIDQLTTAIDQLTTKIEVVTEPFRPQLAVLETIPGVSTHIAVVIIAETGGDMTKFPTAGHLASWAGVCPGHNQSADVTKKAKTRPGNSYLKGALGSAAMSSMQVHETFLQDRHHRLKPRIGGLRTIVALEHSILRSVWHMLTTDQPYRELGAGYHQRRHPQNALRSITRQANRLGYTVRFDPIPQTA

SEQ ID NO: 50094 - protein, 436 aa, unidentified
MEEVEDEPLFAERVAGIDIGKKEVMVTIRVPSDTRRGRRQQETRSFRAVRKDLLALADWLRSWGVTKIGMEATGDYWKPVYFLLEREGFDCVLYHAAQVKALPGRPKTDKLDSVWLAKITERGSLPGSFVPPEEIRRLRTHTRYRRHLTQARTAEKARCEKLLEDAHLKLSSVITDIHGVSGRDMLTAIIAGERNPKVLAQMAQTRMRGKIAQLEEALDCSFFTDEHAFILQMMLANIDHITAQIKELTAKIEILCEPYARQIAQLDGIPGFGVITAQDIIGEIGVDMAVFPTAGHLCSWARQAPRVSESGGKRKGKNATGQGNPYLGGALGESAVNAGRTQTFLGTKYRRLVRHMPKKKAQGAISRTQLVITHALLSDPDAVYEDLGTDYYERRANIRREVRSHARAIERRGYKVILEPIDPGLDPDILPVTKAS

SEQ ID NO: 50095 - protein, 346 aa, unidentified
MCSGKDIVLVVDYHDNNLSVRRFDEATGEEQVLTVPTAAETIQRLVADAVAELPAGGRVVWVMESTTGWARVRDLIGEQVRFGLANVLQMPRPPKARRRKTDKVDTKRLLREYLAGTLPWAYQPDRMMREARRLVACRESLVSRRTAVRNWLDRYLAHETWASRSGLWSQRGQARLRRFAASLNEIDRTVWEVKLDELAQIEGFLGRVEAVILRVYDAWPAARRLDAILGIAENSAVSILARIGSVDRFDGPEQLIAFAGLAPGVQQSDQTVRNGRVGGAGTDKHLRHYLIEATLWARKIPRYRKTYERIARRRGKKVGRLVVARMLVRSIYKMLRDGVAFEADVA

SEQ ID NO: 50096 - protein, 359 aa, unidentified
MDAQEGAVRHIVGGVDTHKDLHVAAVVDEQDRVLGTRSFASTRQGYRQMLAWMRCFGQIQRVGVESTGSYGAGLLRFLQQAGIAVLEVTTPDRQDRRRRGKNDDFDAQNAAHAAFAGIRTVTPKSRDGMIEALRVLSACRKTAVAARRIALQMIQNTIVCAPESLREGLRRMTRMQLVRTLAAWRPDLTAYRDVEVAYRISLKSLARRYLELDDEIADLDAMIAAIVNELAPNLVARTSIGHVGAAQLLLTAGDNPERLRSEAGFAALCGVSPVPASSGKTARHRLNRGGDRAANSALHIIAIGRLRTDARTQAYVAKRIGEGHSKMEAIRCLKRYIAREVFILIKQRQREINQTRIAA

SEQ ID NO: 50097 - protein, 346 aa, unidentified
MRFYNRQHTYYCGIDLHVKTLYVCILDGTGQVLVHSNVPSTPEAFLEIVAPYRDGLVVAVECMFTWYWVADLCAAECIPCVLGHALAMKALHGGKAKNDRIDSHKIAVLLRGGLLPQASVYPAAMRSTRDLIRRRLHLVRKRGQLLAHIQNTRAQYNLPVFGRTLAYRTNRAGVVEHFPDPSVQKSIAVDRALIDQYDALVIDLELTIVREAKRHNADACHRLRSVPGIGKVLALTILYEIHDITRVDRVQEFASYARLVKCKNQSGGKTLGTGGAKMGTVHVKWAFSEAAVLFLRHTEGKKLIARIQKQHGKGQALSILAHTIGRAVFYMLSRGTVFSRETFLAA

SEQ ID NO: 50098 - protein, 347 aa, unidentified
MVRNRLAFGRSRFAVFQVHGVDARVKVVLRKQLKRSQVNAFFNQLAPCLIGMEVCGSAHFWARKLTEFGHTVKLIAPQFVKPHVKSNKNDAADAEAICEALGRPNTRFVPIKNTGQQALLGLHRARRGFVSERTAQANQIRGLLSEFGLVMPVGIRSIKGKVPGILEDAENGSSGVSRALIARLFEHLRLLDHQVAELEREITAWHREDTASQRLQAIPGIGPLTASALVASVGDAKVFHNGRQFAAWLGLVPRQSSSGGKTNLLGTSKRGDTYLRTLLIHGVRSVLFNLKRHPDRVEGWLAQVVARRHPNIAAVALANKNTRTVWALLAHGRDYRAGFRSVNSMAA

SEQ ID NO: 50099 - protein, 423 aa, unidentified
MPYRIAAIDVHKKMLAVVTADIAVEGEYDFDRRQFSTSPDQLRALTEWLVEQKIQEVVMESTAQYWRPVWQTLERHWKAECRKWEGAGPMCGTLHLAQAQSNRGPRGRKKDFVDAERLLRRLVAQELIMSFVPDAEQRLWRTVVRRKYQLTCARVRLQNQLESLLEEAQLKLSILVSDLLGASARRMLKALAAGETSPSTLAALADQRLRATQQQLCDALGASKELNQVYRLLLKMALEELQLIEQQMDQLDREIANLLSHYQDAVERLAEVPGLGVDSAQQILAEVGATAATFPSEKHLASWVGVCPGQEESAGVSTSNRSPKGNRFMRRLLNQAANAAVKVKGSIFEIVFRRMLPRLGFKQAIWAIAHRLCRLIWKILHQGVRYDERGPAVNQKSRAARMSKMIRELRSLGYHVDPPVNPA

SEQ ID NO: 50100 - protein, 301 aa, unidentified
MKDNSHSKEKLLVAMELSNSKWRLAFSTGEKVRQKVVEARDRDRFLKEVDRAKEKLGLSGNAPVVCCYEAGRDGFWIYHWIESRDMVCHVVDPASIEVNRRKRRAKTDRLDAQSLVRLLQRYEDGDRYVWAVVHVPSEEQEDELRLHREMSRLKKERAAHLCRMKSLLILHGIKVSGNLKALDRELGEMTRWNQHPLPKALLAELHRECLRMGQINEQIDVLEKQKLERIKKPQTNADHQAAELIRLKGVGEVSAWVLSKEFFGWREFKNRREVGSLAGLTPTPYDSGDSCREQGGEPAGA

SEQ ID NO: 50101 - protein, 345 aa, unidentified
MKITTIGIDLAKNVFQVHGVDEHGRTVLNKPLKREQMAAFFVNLPACLIGMEACGSAHHWARKLQGMGHTVRLMAPQFVKPYVKTNKNDAADAQAICEAVTRPSMRFVPIKNVEQQGVLALHRVRQGFVKARTAQANQIRGLLAEFGLIVPQGIGHISERVPELIEDACNELPGAFRRLVQRLLEHLKELDRQVQELEAQIVAWHRQSDLSRKLEQIPGIGPITACALVASLGDAKSFKDGRQVAAWLGLVPRQHSSGGKQNLLGISKRGDTYLRTLLIHGARSVIYHAQNKAADNPQCCWINGVVQRRNKNVAAVALANKNARIVWALLAHERSYEPGYVREQA

SEQ ID NO: 50102 - protein, 345 aa, unidentified
MELHTIGIDLGKTVFHLVGLNLRGEVVVRKKCSRKQLLQFTANLKVELIGMEACGGSHFLGRALREQGHEVRLIPAQYVKPYVKTNKSDYIDAEAIAEAVGRPRMRFVAIKTDDQLDLQSLHRVRERWVMRRTAVINQIRGLLLERGITLRKGRCHVDAALPGILEDADAKLSGALRVLLAQLKLELDHLEMRIDQADAVIKKTAGENEACQRLVAIPGIGPVTATAVIAAIGNGAAFHKGREFAAWLGVVPGEHTTGGKQKLLGISKRGNSYLRKLFVHGARAVLQQSAKQSSGLSAWLAQLTARTHRNVAAVALANKLARFAWAVLARNEPYRPPMLAGAATT

SEQ ID NO: 50103 - protein, 412 aa, unidentified
MEVVYPCCCGLDVHKKSITACVLWAEAKGKSRKEKKRFGTFTHDLLQLADWLQECGVTHVAMESTGVYWKPVWNILAEQFEVLLVNAQHIKAVPGRKTDQKDSEWIADLLQHGLLRGSFVPPRPTRELRDLTRYRVSLAQEINRIANRVQKVLEDANIKLASVATDPLGASGRAMLEAMLAGEQNAAQLAELSKGLLRNKIPELKLALEGRVTEHHRFLLQQLYDHLLFTESKRKQIEEEIERRMRPFQAEMVRLCTIPGVDRVTAWGLLAEIGLNMNQFPSAAHLASWACLCPGSFESAGKRLSGKMRKGNVSLRRCLSQAAWAISMMKNNYLSALYRRIAARRGAKRAVMAVAHALLEIAYHMLKRKEDYRELGADHFDRIDVNRIRRSLVRRLERLGHKVTLEPLALTA

SEQ ID NO: 50104 - protein, 340 aa, unidentified
METTATFYVGIDVSKPYFDASIMQVIDHKKGELQTEQFPNSKEGLLLFQKWCKSAGAKKMQQLFVVIENTGLYHRPIWQFCSKQNIALHIGNAAQIKWSLGITRGKNDKIDSKRLCNYAFKNHDDLQATAALNPVFLQLKDLMTARTNLLCHYTATKSYLKELSPSNAKATQALLEQAHKAALEGLKKSIEKIEAAIAQIINEEASIKNNYNLIKTIPGIGHITAVYIICCTNNFAGKISGKQLASYAGVVPFEHTSGISVKGKNRVHKMANKDLKKLLHLCALAAIKYDTEMKAYYDRKKAEGKNGMLVLNAIRNKLILRVAAVVNNQTPFVSNYKHAC

SEQ ID NO: 50105 - protein, 404 aa, unidentified
MIFVGDDWSEDHHDVCLMDQAGKRLASRRLPEGLTGIRQLHELIAEHAEEPDQVVIGIETDRGLWAGALAAAGYQVFAVNPLAVARYRDRHHVSGGKSDASDAKLLADLVRTDRHNHRPIAGDSLDAEAIKVLARAHQSLIWARTRHTNAMRSALREYYPAALLAFEDLAHGDALGVLGRAPTPEQGAHLDLPAIQSALKRGGRKRNIAARARQIRAALRSEQLAAPAPVAAAFGATTRAAVGIIVELNRQIAELEAELATHFEAHPDADIYRSLPGLGVILGARVLGEFGDDPNRYTTAKSRRNYAGTSPLTVASGKKRAVLARHVRNRRLYDAIDHWALRALTSSPGARAYYDHHRAAGDVHHQALRALGNRLVGILHGCLRHHTTYSEHTAWAHRQITQAA

SEQ ID NO: 50106 - protein, 387 aa, unidentified
MIYVGIDIAKNTHWASAMSSDGEILLQPFSFQNNNEGFQKFISKLSCFDKQKMLIGLESTAHYGENIISYLFNLDYKIGVINPIQTSNLRKSNIRKTKNDKVDTFIIIKSLTLNNYNLVTTRDINNIKLKGLSRSRHNLIVMRSRSKIQLASFIDQLFPELNQFFKGNLHLNVSYQLLKEYSSPNDIFSLHLTKLSNILHDNSHGRYKKEDAIHLRELAKNSVGIDNPTLSLQIKQAILQIELYTEQIEEVEKLSKQILDEMESKLLTIPGMSYNQATTIHGFIGDINRFNKSCQLLAYSGLDPSVYQSGNFEARSTRMSKRGNSLLRYNLVYAAHNLVLHNKTFKEYYDLKRSQGKTHYCALGHCAHKLVRIIFKMLKSNVGFDLD

SEQ ID NO: 50107 - protein, 464 aa, unidentified
MKDNRRRDQPRRSPAVLDRINPHVAGIDCGSAVHYVAVPPDRDPCPVQSFTTFTQDLGRLVEWLVACRVTSVAMEATGVYWIPIYDLLEARGLEVLLVNARHLKHVPGRKSDVSDCEWLRDLHSVGLLRGSFRPAEDILTLRTYLRHRHRVVEDAGSYVQRMQKALVQMNVQLPLVVSDITGVTGLKILRDIVAGHHDPVHLARHRDYRCRATPAEIVAALTGCYRPEHVFVLQQNLELFDACQRQLAVCDEAIAAHLQRLTAAQPVPATPLPAPRVPRRPIDNDPTFDMRTPLHQLTGGVDLTQIDGIGPYTALKLIAEIGTDMSRWGSAKRFTSWLTLAPKNKISGGRLLSSRTEPSANRAAAILRMAAMTLGRGSTALGAFYRRLAGRIGKPQAITATARKLAVLVYRALAGELTYRDPGADAYDRQQRSRVLRRLRRTATTLGFELVNRNTGEVLQPASL

SEQ ID NO: 50108 - protein, 403 aa, unidentified
MLAGIDWAAEEHAVCVLDDEGRVVDRFTIAHSAEGFDRLTTRLARHGDPAQVPVAIERPDGRLVDRLLEIGHPVVPVKTNAIKAWREAEVLSGAKSDPGDAEVIADYLRQRRGRLRELLPFSAETRALRAVSRSRTDLVDQRVAAANQLEAVLDAFWPGAKAIFADIWSPIALDFLERYPTPASAARVGEARMAAFLTKHGYSGRRPPAELIERLRAAPAGIPAGPEAEARRDVVLAMVCVLRALVRAIKDLDRSVAAHLDEHPDAETFRSLPRSGQINAAQMLAEWGDCREAFDSPEAVAALSGATPVTKKSGKHEAVHFRWACNKRFRNAMTTFADNSRRASPWAQAIYQAALDRGHDHPHAVRILTRAWIRVIYRCWINHTTYDPERHGAITRMKQPSAA

SEQ ID NO: 50109 - protein, 417 aa, unidentified
MLFIGDDWAEGHHDVVAQDDAGKTLARRRLPEGADGIARFHEMVASCLGEDAEPDPARVIVVIETDRGPWVKVKALAAAGYRVYPANPRQAARHKETVANSGKKDDFFDAGCLADMGRTRLHQMRELAADSDVAEAVKIAARAHQKLVWERTRHLLRMRSALREYFPAALEAYADLTLAGKDALELLAKAPDPESAARLTVTQITAALKRAGRRGDLAQRARDIQAALRAPHLDQPDVIAEAYAASVQAAAAVITALNEQVKIMEAKVSGLFRRHPDAGLHLSQPGIGDITGARILGEFGDAPGRYASAKARKNYAGTSPLTIQSGKKKTVHARYIRNRHLIDALHAQALSALSVSPGARAFYDDLRARETGHDDAMRRVASRLVGILHGCLKTGREYDEATAWSHRAETPEAAEAA

SEQ ID NO: 50110 - protein, 357 aa, unidentified
MSITMIGLDTARSVFQVHAVDDAGQVVIRRKLHRDELLTFFEKQGACTVAMEACGAAHHWGRALTGLGHTVRLIAPEAVRPFVKRGKKNDAADTAAICEAASRPGVTFVPIKSLEQQGTLAVHAARSLLVKQQTMLANAMRGLAAEFGLTVPKSMGKLGDLMTLVDADEAMPEEARQVLGALFGQCRALDESIGAFEAKIVAHARRDDAAHRLATVPGIGPITSSLIAATAQTFGFAEVADIGVFQSARHFAAWLGLVPRQHSTGGKTRLGRITKAGNREIRRLLVLGATSMVHRAAGWNSAAGAWTRGVLKRRPVRLVTVALANKMARIAWALMTRKEVYHAKGHLAVAAPAPAAA

SEQ ID NO: 50111 - protein, 389 aa, unidentified
MLLDHPFDGPTAIRTHIAAIFISLELSRSNWLVTSLSPGKGEKMSKHSVAAGDTAELLALFAELRRKAEVRTGHSYPIVTIQEAGLDGFWLHRVLQQNGIESHVVDPASIATPRRRRRAKTDRLDGETLLRALLAYKRGEPRVCAMVVAPSPEEEDRRRLCRERRTLIEERITHVNRIKGLLFAQGISDYAPLRRDRRARLEALRTGDGRELPSHLKAQLGRALDRIELLVDQIKAVEAGQEALLAAARKPASEEAVPDPVTMLLALKGMGANFAAVLWSEAFYRQFANRRQVAAYAGLAATPWQSGGIRHEQGVSKAGNPRLRTTMIQLAWLWIRHQPQSALTRWFKERSQQGRKRAIVALARKLLVALWKYVTQGVVIEGAVMKPAA

SEQ ID NO: 50112 - protein, 367 aa, unidentified
MAIELSKANWLIGVLTPLSDKISLRSIPCGAVRQLMELVDRVIEKVTRATGRPVQIVSCYEAGYDGFWLHRVLEAGGVSNHVLDAASLMVSRKARRAKTDRLDAEKLVRALIAFWRGEPKVCTVVRPPSVAEEDAKRLHREREFLMKERVQHIGRVKGLLATQGIYDFQPSRRDWRTRLAEMVTGDGRPLSVRLAAEIERHCRRLGLVDSMLKEIDEERDAMAEPNATSSATPPDRVQRLARLKGIGPQIATVLATEVFYREFKSRRSLGSYLGLTPSPFQSGGMARDQGITKAGNPRARTISIELAWLWLRYQPQSALARWFRERTNGLKGRIRRIIIVAVARKLAIALWRYLETGLVPDGAELKA

SEQ ID NO: 50113 - protein, 338 aa, unidentified
MKNYVGIDLHGTNSYIGIIDQDGKRIFNKRTLNELNTIIMTLKPFQNTIKTIAIESTFNWYWLVDGLMDEGYNVSLANVPAMKQYEGIKYTDDKSDAFWLAEMLRLNILPTGYIYPKNERPIRDLLRRRMQLVQHRTSLYLSMASMIQNCTSIRLTRSEKKDLSNGEIERLLSDPHQIMSAQAVNDIIAQLNQHINCIEKEVIKKLRLRKAYKKLLTVWGIGEILGITIMLETGDIRRFQSISDYSSYSRCVPTRKTSNGKIKGKGNKKNGNKYLAWTYLEAAHYMQRAYPKARAWVQRKTAKKGRIIAYKALSNKIARACYYVIRDQVDFNPTKLFA

SEQ ID NO: 50114 - protein, 347 aa, unidentified
MNKVMAGIDLHSNNAMVGVVDQAGGRLAHQKVECELKEIVRFLAPYKERLESVAVESTYNWYWLVDGLKAQGYPVVLANPAKIDQYSGIKHADDKNDAFFLAELSRLKILPTGYVYDPVLRPVRDLLRRRMSLVHQRTSLMLSFKSLYTRTTGRAMKLSQLKGMTVSEAKALYEHPANQLIAQAHKGHIEGLSKSIEKIEEVVLKASSHLPYYPKLKTLPGVGVVLGLTITMEVGEIGRFADAGHFASYCRAVDSQRLSNNKKKGENNQKCGNKYLAWAFVEAAHFARRSDDLCRRWYDRKAAKTSTVIATKALACKLAKAAWYLMAESSEYDAKRVFPELAEKAQN

SEQ ID NO: 50115 - protein, 400 aa, unidentified
MLSIGIDVSKGKSTVCGMKPGGEIVYAPFEVQHTREGMSELVSLLRSSGEEVRAVLESTGSYHCPVVAALLENGIFVSVVNSLRMKRFCSQSIRKVKTDRIDAMQIALYGLAYWQELQPTRLPEDTYRELQLLARQYYQMTSLLIKAKVDFNAICDQVLPGMQELMNDHAGRHKLSDFVLRYHHTTHILEMGETRFRKDYCKWAEKKGYRNCERMAALIFATAQNGIPVLPNAPSTQIVITEAIRVLHTVEASRDAILTQMQALAKTLPEYSLVREMPCIGDTLAPRLIAEIGDVRRFHSKRALIAYAGIDAPPYQSGKFCANNRHISKRGNRYLRKTGYEVMQSYVMHKPANDPIFTFIEKKRSEGKCGKLAMVAGLNKFLRVYYGKVTELYRSLPAIE

SEQ ID NO: 50116 - protein, 321 aa, unidentified
MFLGIDVSKSKLACAMFLCGKYKNKTFANTPAGFEDLWRWLDRFDCLPEHVCLEATGSYGEDVATFLYDRGLTVSIVNPTRIKGFAQSEGLRTKTDKVDARLIANFCHSKREKLRSWKPAPKEQRELRDMTRRLDALIRMRVQEENRLEGNLSDLVVANLNKHIRFLKKQIAELEEKISDHINRHPVLRQQCDLLNSIPGVAETTSANLISELNFEQFSSARQAAAYAGLTPSDRQSGTSVKGRPKLSKIGSKRLRKALYMPAMSAMRCNPVLSQFADRLKRQGKAGKVIIAAVMRKIIHMAFGILKSGRPFDPDYQPALA

SEQ ID NO: 50117 - protein, 399 aa, unidentified
MFSRNPLDIRVCVDVGCKSHQVAVGLSTGEVIAEFSIPHHPDGFRTFFAKLEQLEQQYRCPVRVAMEGYNGYARPLDSMVLARGWQLNNINNLKLARFKEIFPGAAKTDAIDARRGLELFQIKDHLPTAKDVLQVVAESPRENQILKRLSRRRRRLVNERVRVSNNLQADLQAICPSLLALTGDACNYWFLQLLTHTDDLRKLARLHLKTLRKIPGIGAAFANRVRQWQKQAQFSTETEWVGEMIQQDAARILELNSQIKALEAKMATAASQSKLAKGLATIPGFGPICTAELVGEIGHEGRFAKEASLALYLGMAPLDNSSGEFRGSKIPRQVNSRAKAAMMTAVDRHRKQVPASQRYYEKKRAEGQKHNQAIRALGRHLCRIIFKMFKEQRPYMPPN

SEQ ID NO: 50118 - protein, 369 aa, unidentified
MGNCITYVGLDVHKNSIDVALADEGRAREVRHYGTINGDLDSLDKIVRKLLSRGNTLRFVYEAGPCGYEVYRHLTKHGFDCVVVAPSLIPKKSGNRIKNDRRDAEMLARLHRAGELTPVYVPRIEDEAVRDLCRARIDAKNAERKARQQLNAFLLRSGFRYSGKTAWSLAHWRWISDIKMPHPAQQITLQEYVDTIRSCSERVERITEQIRQLAVEWRLGPVVEAFQALRGVSLVVAATTVAELGDLSRFDKPRHLMAYLGLVPSEHSSGDSTQRGGITKTGNSHARRMLVEAAWSYRLPARVSRRLRDRQHNLPQAVWEIAWKAQLRLCARYRRLVARGKQTQLAIAAIARELAAFMWAIAQVVPTAG

SEQ ID NO: 50119 - protein, 359 aa, unidentified
MKTTLNHASKTTTLPNIETQARIQQLKLGVDWHADHFRVVRMCDGQSPQPAQRFTPASFLPFVQKQLTLADQVFVVYEAGPGGFHLHRQLTALGVTAFVVHPQKLDPQHKGVVTDKTDARELTLNLDRYLRGNVRAMSVVRVPSPAEEQRRALSRQREQLRRERQRLAAQGRSLCLTQGIRLRGSWWKNSLTLPDWLEQRLAVWRQLIVAVEGQLAALTQQVETLAPKERPKGLGPLTLGMLIAELCDWSRFRNRKQIGSYTGLCGGVSSSGQSHCDLSITKAGNARVRWLLVELAWRMVLYQPQCRAVQRWRHVLLNPQAALRQRKRALIALARQLAVDIWRWQTGKVTPQQLGWVMV

SEQ ID NO: 50120 - protein, 361 aa, unidentified
MLQGPKSFPKEAFMRFYTKQHKFYCGVDLHAKTMYLCILNQEGKILLHRDVKTNPEIFLKTIAPYREDIVIAVECIFTWYWVADLCSQENIPFVLGHALYMKAIHGGKAKNDKIDAYKIASLLRGGMMPMAYVYPSEMRSTRDLLRRRNHLARKRAELIAHIQNTNHQYNFDDLGRISRKCDRNKAGVADRFTEPSVQKTIELDISLIEPYDKLLNHLQHELSIIAKVHDADSYFRLRSIPGVGRVLGLSILYEIHDISRFPSVQDFVSYCRLVKCAKESAGKIMGPSGKKIGNAHLKWAFSEAAVLFLRRNPEAVKYRAKLERKHGKAKSLSILAHKLARALYNILKKKEVFHPQTFFAK

SEQ ID NO: 50121 - protein, 394 aa, unidentified
MKLVGIDVGKNSHHFCVMDKETGEFNVTPTSFSNNKEGFDFLINSLKPYSKKSILIGMEDTGHYHVALLKFLLSNGYTVALINPKTTDLTRKMEGGITKNDKLDTITICDVLDTPERKKQYRITKVDRFDLYEQRQLTRHHHNLKEELNVYCNRLQKSIDLVFPEFNTLFSSKYGIVYMNLLKTFGSAEAIASTDIRTIRKFFEIKGKGNRISLTPEKLKECAKNSIGISSEVETIQIKHLVSQITLIKEQIAEIDKKIEEFSIPNNSPILSIPGISHFSGTSILAELGDIGNYSKPSQIIKFAGVAPYHYESSQYNAQHTAITKKGSKYLRKTLYQIILTVINNNPVFKKYYRLKISQGKGHRCAQGHCIRKLLRIIYHLLETGQSFDPALLR

SEQ ID NO: 50122 - protein, 375 aa, unidentified
MEHHTEAFVALDTAKLRNAVAIADAGRNGEIRYLGEFDNTEAATRKLVTKLASKHARLTFCYEAGPTGYGLYRLIKSIGHDCIVVAPSLIPSKPGDRVKTNRRDAVNLAKLLRAGELTAVWVPDERHEAMRDLVRARDAAVKDYRIKRQNVSSLLLRLGRHYPGKKTWGRAHINWLTSLKLEHREQRIAFEEMLLAVRQVRERIERLEQAMREAVADWTLAPVIEAVQAMRGIDMVGAIAFLAELGDLSRFENPRQLMAYLGLTPSERSTGESVKRGGITKAGNTRARRLLIEAAWSYRFPPRVSKDMQTRIGAAPRTAREIAWKAQMRLCGRFRTLTRKGKRPTIVVTAIARELSAFIWAINREIVGSHATANQ

SEQ ID NO: 50123 - protein, 321 aa, unidentified
MSVSNQRCAGIDVSKGTLDIAISNNASQFTVPNGSDGFTQVIGELKRNETRLILMEATGGLESSVACHLQSEGFDVVVINPRQARDFARAMGYLAKTDRIDARVLLQMSEVINQHPEREKYIRPLPDAHRQILTAMVVRRRQLTIMLTAERNRLHPSHPQSYESIKSIISALKGELARIEGEMAIHIKDHFSELSDLLSAVKGVGAATVAVLPAEVPELGSLSRREISALIGVTPVNRDSGTMRGRRTVFGGRASVRTALYMSALVGTRHNPVIKEFYTRLVAAGKPKKVALTAWSDHAPVDSFCPHCEAFSKASGLTPPR

SEQ ID NO: 50124 - protein, 369 aa, unidentified
MTATEKPASSRSKSNELRLADGEIAHIGVDVHKANYHVAVVSDQRDLVATWVQPASPEALVERLAPIASQVALVVYEAGPTGYTLFRRLQDTGFRAEVVAPSKIPTMPGPEAKCDRLDCRKLAVFAQKGMLRAVRVPSPQEEADRQLQRLREMAIRKHRSIQQQIRSFLLQHGIAEPKGLRSWSIEAVNKLRSLELAAELRICLDVMLDEKQHAAALVLRITRELEKLAKEERHQQTIDNLRTVPGVGPVTAMTFRVEMHEPSRFADGRQVARMIGLAPQVQQSGTKRREGGILKSGNARLRTVLIEAAWRWIANDEAAKRTYRRLAAKTGSGKKAIVAMARRLAILLWRMCLSGEPYRSAALAPDPQT

SEQ ID NO: 50125 - protein, 343 aa, unidentified
MEYYVGLDVSLKQTSICVVDQAGLVVREGVVGSDPEAISVFVRSKAPGAVRIGLETGPTSTWLWTELKRLDLPVICIDARHAKAVLKMQINKNDRNDAIGIARIMQTGWFKEVHVKDIDSHSVRALLASRALLVKIKRDLENHIRGLLKNLGLVIGRATFNVFAVRAEELIEDRPDLVAAVRPLLEARNAVEQQVSELDRKVMKLARRDAQVQRFMTVPGVGPITALAFKATIDDPARFARSRSVGAYVGLTSRRHASGEIDWSGRISKCGDAMLRSYLFEAAGVLLTRVPKWSTVKAWGTRLAKRNGLRKAKVAVARKLAVILHRMWIDGTEFNWSKKEIAA

SEQ ID NO: 50126 - protein, 348 aa, unidentified
MPLIGPKRIHQAVALGRDGEISERTIDNTPEGWASLLAWAQQWPERLWAVEGSGSLGRGVAQFLAEHGQRVHEVSPKWTAQRRRTQRKPGKSDRLDALAVARLLREEATSLPLVLPDEDDVASLQLWSRLREDVVADMTRVRNRLHALLLLCDPTYKTHIPDLTTRTGIRACQAYTAPGQGVLARHREQAVRQVAAQLTLLADQEQQLHRQLEGAVARRFAPLQAIPGLGPLTAAALVAELGAPRPGLGESQLAALAGVAPLEASSAGGVRYRLNRQGNRRLNRLFHQITLTQQRIYPPAQGYLARRKQQGRTPREARRALKRLLVRSVWRQWQACWSPASGAAPLAA

SEQ ID NO: 50127 - protein, 431 aa, unidentified
MARVIIGTDPHKRSATIEVMDGREKVLAQGRYGTDSSGYRAMLAAGRRYPQRVWAVEGCNGIGRHIAQRLVADGETVVDVPAKLSARARVFATGQGRKTDPVDAHSVAVVALRTTGLRQVTVDDDTVALRLMVDRRDWLGRARTDTVNRLHALLLELVPGGAKKHLSALQARTILAGVRPRDVVGRTRRQLASELITELAVIDKKIKQANAVLTELIAATGSNLQQLHGIGPSVAARLLGDIGDISRFASRNHFASWNGTAPIDASSGDQHRHRLSRAGNRRINRALHIMAVVQLRHDTEGRAYFRRKLAAGKTPMEAMRCLKRRLSDVVYRQMVADAKVSPGGHSGATLTSSADDPTPTVDSSDKPQPGLTHEPTPATRLVETYPAPAPARTQAAKRPRTRTAKPARPAALTSIFGTSSTHPRKRSSSRA

SEQ ID NO: 50128 - protein, 452 aa, unidentified
MAKQKRQKSKSNIKPMHVLQPNSAGIDVGATEIYVAVPDDRSSKPVRRFDTFTDDLHETAKWLKECGIESIAMESTGVYWIPIFQILDTYGFDVILVNARHVKNVPGRKTDVQDCQWLQYLHSVGLLRGSFRPDQDICAVRSLLRHRDNMVKDASSHVQHIHKSLTQMNLQIHNVISDITGVTGLAIIDAILAGERNPDILADLKNPRIKADRQTIVKSLTGDYRSEHIFTLKQTLQSYRNYRQMIQDCDAEIERHLKEFDSRIDLDDCPKPPEKKLKRKPRGNEPTFDLKSHMHRLLGTDLTRIDGISDLTAHVFFTEVGPDLSKFINADHFCSWLGLCPNNKISGGKILSSHTRPGSNRVAQALRISANSLWNCKSYLGDYFRRMRARHGAPKAITATAHKLARIIYHLVKEQRAFDETIFSEQEKNHQIRLRKRVISQAKSLGLQLVPA

SEQ ID NO: 50129 - protein, 361 aa, unidentified
MSIVTKRQSKKKCGRVNFDGKACWVGVDVHKVSYAVAILDEEGQRLEFSTPAEPRKLLLQLLGMGMTIKALAYESGPTGYGLAWACQKLGIPVLVAAPSRIPRPVSKTGKTDRLDSMKLAELLARDMIKSIAIPTEAENHLRSLERCRQQLVERRRTVRQQIKSLLLFHGLDRSAGLSHWTKSSVQLLQAMVLPDVLRITLDSYLKEHAFLLEELNHLRKQLSAALQSVGKIQTVKHLCTIPGVGETIATTFMTEVFRPERFKRAEELCAYVGLAPVTSHSGSGKATARLGQVGQNYLRSILVQGAWRFISSEPQYHDTFIKIRTKTGLFAKALVALARKLLVLLWRVAVENRPYRPIPVQ

SEQ ID NO: 50130 - protein, 367 aa, unidentified
MKEKNINADQRFVGIDLGKRTYHVAIVGGNGKVTMSNGMTYAEGRQALYKKLRPSDTVALESGGLAFIMAKEMEKAVGCTVHVLNPYRLSVIYASMKKTDKEDALKLAHILVDFSEERLPTVPVPSDKEITRRKLLASSRRVVQSRCRYINQLHGLFVSQGITTVTRKDLASAENRKKAIALLTGIEREEAEYFCNCLKLCDDRIAKLEEQMEAEAAGDKVIEDLQTVPGVGPKIAFAFAAHVGAERFENAGQVSNYLGLVPRVYMSGDTVRYGSITKRGNSYLRALLVQGAWALVRANRGGKLKERYEYMTLEKSISKKKAIVAIARRMAELMYTLMKDGTRYECRPFIREKKTAGEKSAELAMGA

SEQ ID NO: 50131 - protein, 389 aa, unidentified
MKIYVGIDIAKLNHFAAAISSDGEIIIEPFKFSNDADGFQLLVSKLESFDKNSLIIGLESTAHYGDNLVRYLVTELYQVCVLNPIKTCQMRKNNVRKTKTDKVDTYVIAKTLMMQDNLRFVSFFDLDMMDLKALGRFRQKTIKQRTRLKIQLTTYVDQVFPEIQYFFKSGLHQHAVYALLKEAPSPKEIASMHMTHLANLLKVNSHGHFTKEQAKELRVLAQKSVGANDSAISIQITQTIQQIELLDSQLEKIEAEMTDIMKFNDSVIMTIPGIGYINGGMILGEIGDIHRFSNPNKLLAFAGLDPSVYQSGNFQAKTTRMSKRGSRVLRYALVNAAWNVVRNNATFKAYYDAKRAEGRSHYNALGHCAGKLVRVIWKMLTDEVEFNLE

SEQ ID NO: 50132 - protein, 349 aa, unidentified
MKTYYVGMDVHSATIAIAVLNGAGKVVMESTIETGAERVRGFLKQLRGKVYVTFEEGTQANWLHDIVRSLVTEVVVCDPRHNKLLQSGNKNDRVDARKLAELLRNKSLKAVYHGDNGVRTLKELVRTYDCLVSDTTRVMNRLKAIYRGRAIACGGHEIYRQDRRGQWLGKLHEPGAKQRAGFLYEQLAALKPLRHKAKLAMVKEVRRQTAYLWLMSVPRLGSVSVAQLIAVVGTPHRFRSKHQFWTYVGLAVVTCSSADHEVVNGVLRRSQRPVSTRGLNRNHNHLLKRVFKNAATSACHSGPFQAGYEARVARGMAPSLARLTIARQLAATTLAIWKREEQFDPERKK

SEQ ID NO: 50133 - protein, 347 aa, unidentified
MLADELDYVIGVDPHRDTHALAVVHVLSGAVVFEANVAASSEGYADALRLADRHASGRRAFAVEGTGSFGAGLTRFLTGRGERVLEVGRLRRERRSGGKTDALDAVRAARSVLAQERPATPRAGGERQALQALVAAREGAVNAKRGGHCQLRDLLITTPEPLRSELRPLTRARLLQRLAATRPNGRRDPELRGSMLALRSIARRVLQLTAEERELAREIETITRALAPQLPDQPGVGPHAAAQLVLSWSHRGRIGSEAAFARLAGAAPIPASSGQTVRYRLDRSGDRKLNRALHMILVTRKRSHPATIAYIERRVQEGKSRREANRCLKRYLARNLYRLLENPPMPT

SEQ ID NO: 50134 - protein, 417 aa, unidentified
MESTAQTTLPDVPPNGVTCGIDWARDDHAVSIVDARGREVRRATVEHNAAGMRELLDLLSRTGAREVAIERPDGPVVDNLLQAGITVVVISPNQLKNLRGRYGSAGNKDDRFDAFVLADTLRTDRTRLRPLLPDTPATATLRRTCRARKDLVEHRVALANQLRAHLRVVFPGVVGLFAEIDSPISLAFLTRFDCQDRADWLSVKRLAAWLAAASYCGRVDPAVLHGRLTRAPRGAAGDEGAANAHVTRALATALTSVATQIRTLDAQIAEQLALHADAHIFTSLPRSGTVRAARLLAEIGDCRARFPTPESLACLAGVAPSTRQSGKVKHVGFRWAADKQLRDAVCDFAGDSRRANPWAADLYNRAIARGHDHPHAVRILARAWLYVIWHCWQDNTTYDPDQHQALQRLIHLKTAAA

SEQ ID NO: 50135 - protein, 409 aa, unidentified
MEVVHERCCGIDVHKQFITACLVVPGSTGKAVKEIQTFRTMTADLERFRDWLLAAGCTHVAMESTGVYWKPLYNLLEETDLTILVVNAQHIKQVPGRKTDVRDCEWIADLLRHGLLQASFIPDQAQRELRELTRYRTSLIQERAAEVNRVQKVLEGANIKLAAVTKDIMGVSAREILAELVAGSTDAVGMAKLARGRLRAKIPALEQALRGRLRPHHQFLIAQQLAHIDALDEAIERVSEEIERRTHPFAETIALLDTIPGVAQRTAEVLVAEIGTDMSRFPTAAHLASWAGLAPGNNESGGKRRSGKTRKGSPWLRAALVEAAHGAGLKKETYLQAQYRHLVRRKGKKRAAVAVAHSIIVIAYHVIKEQRPYTDLGPDYLDRRRSDAAEQRLVAQLRARGYTVSREAA

SEQ ID NO: 50136 - protein, 343 aa, unidentified
MVHYIGLDVSLKKTSICVVNQAGSVVREGVVDSEPEAIAAFVRSKAPGAVRVGLETGPTATWLWSELKQLGLPVICIDARHARAVLKMQINKSDRNDAAGIARIMQTGWFKEVRVKGLDSHSVRALLASRALLVKIKRDLENQIRGLLKNVGLVIGRAKFNVFAVRAEELIEVRPELIAVVGPLLKARQAIEQQTDDLDRKVLKLARHDAQVRRFMTVPGIGPITALCFKATVDDPTRFKRSRSVGAYVGLTTRRHASGEIDWTGRISKCGDAMLRSYLFEAAGVLLTRVPKWSALKAWGMRLAKRNGLRKATVAVARKLAVILHRMWIDRTEFNWSKKEVAA

SEQ ID NO: 50137 - protein, 327 aa, unidentified
MSQTLNAAIAVVGIDIGKNSFHIVGHDERGAIVLRQKWSRGQVEARLANMPPCLIGMEACVGAHHLSRKLRALGHDARLMPAKYVRPYSKGQKNDFRDAEAIAEAVQRPTMKFVATKTADQLDLQALHRVRERLVSQRTGIINQIRAFLLERGIAVRQGQRFLRAELPRILATPPDVLSPRMVRIIEDLAGDWRRLDERVEGLSNEIEAIARQDTGCERLMSVPGIGPIISSAMVAAIGGGDVFTKGRDFAAWLGLVPKQISTGDRTILGKISRRGNRYLRVLFVQAAWVVLIKPTVWERHGLKPWIEAARKRLHRKRSSAALLIGA

SEQ ID NO: 50138 - protein, 342 aa, unidentified
MEITTVGIDLAKSIFQVHAVDAAGHVVVRKALRRAQVAPFFAKLPRCLVGMEACGTAHHWARELTKLGHDVRLMPPAYVKPYVKRGKTDANDAAAICEAVTRPSMRFVPVKSTEQQAALALHRTRDLLVKQRTQLVNMIRGLLAEFGIEMARGLRHALELAARLSAGDAAEVPSLAQRVVTGLADQIGAVQIQLTRLEKELLAWHRDNDLSQRLTTIPGVGIVSATALAASVSEPERFRSGRQFAASLGLTPLQNCSGGKERLGRISRMGDRYLRRLLVVGMTSLIRRAKATPTSVDPRLPALLQRKPVRVVTVAAANRTARVAWAIMTRGGTYRAPAATAA

SEQ ID NO: 50139 - protein, 412 aa, unidentified
MQVLYARCAGLDVHSKTVSVCVSVCETGAKKRQQVRAFSTFTRDLLEMADWLKRERVTHVAMEATGVYWRPVWAVLEDQFEQMLVNPQHMKAVPGRKTDTKDCEWIADLLQHGLLKGSFVPPTPIQDLRDLTRYRAQLRQDQGRAANRIQKLLEQANLKLSSVASNALGVSGRRILKEIISGEVDPERLAQLARGALKNKIPQLMQALEGRVREHHRFLLAKFLREWDWYEEEIASLDHRIEEQIRPFAFAVAFWQTIPGISQVTAWSLVAEIGVRMEQFPSAQHLASWAALCPGNHESAGKRKSGKTRDGNKCLRRSLCQAAWCATRKKDCYLASQFRRLGARRGLKRAIIAVAHSMLEIGYHMLKTNQGYRELGGNYLDRIHKESLQRYHVKRLQNLGFAVTLDPGFAAS

SEQ ID NO: 50140 - protein, 304 aa, unidentified
MTSIIYVGMDVHTTNYTLCCYSMEDDRFFAEAQVEPDAKNILKYLARIEKQQSRDCRIVCGYEAGCLGYSLYHQLHAHGIDCVILAPTTMMTKPGKRIKTDRRDARLISKCLAFHTYSPVYIPTEVDDAVKEYIRMRDDANSALARVKQQIIAFCIRHGKIHDGKSYWTNKHLEWLSSLDLGNKILSEVLQEYLIRYYQLREQVDMYDMRINELAQAEPYRQKVEKLGCFRGIAAHTALSFCVEVGDFRRFATAQQFASYLGLVPGECSSGDKQQYTGITKAGNSHLRKLLVETAQVFQKAENQ

SEQ ID NO: 50141 - protein, 335 aa, unidentified
MHYLYYVGLDVSKETFDASLVAFEDANEMAHRKFANSRKGICSCLHWVEKRHGIRLDDVIFCAEDMGSYISEMAVCASDRTLNFNFSLISPLVIKYSMGIARGKTDRVDARRIAEYAITHYRKIALYLPAEKELCQLRTWLILRAHLAKQRVAKLVLLEKLDYKEKFADVSIQRSMLQEEIAYAETHMKTIEREMKELIAAVSNICRNYKLLTSIKGVGPITAIVMLCSTLNFTKITDHRKFACYCGLAPFEHSSGTSVRGGCHTSSMANRDIKVQLNRSALIAIRCDPQLKAYYERKVAEGKHKFSVLNAVRAKIAARCFAVVRRGTPYVALQI

SEQ ID NO: 50142 - protein, 457 aa, unidentified
MNKRREKNQRRKHVVEMAMVNPFAAGIDISVSEFVVAIPDGILSDRVRTFGTMTSDLKDLSAWLKECGITSVAMESTNVYWKPLFSHLLAEGFDLCLANAKVARNISGRKTDENDAMWIQKLHTCGLLPSSYLPEGEQEALRTLVRFRRSLVQDSSRFTNRIQKSLELMNIKFHTIISDIMGKSGRAVLDAIVNGERNPEAFLPLLSSRMKASRETIIKSLEGTWQKEHLFTLSMSYDLWKNFQLQVEKVDVEIETYLQRYEAKTNDGLVEEIREEQIHPAKDKKKVKNHPQTNVREYLRRIHRVDVLAIYGLSDIGGLELLSETGTNLRNKWPTDSHFVSWLNLCPKTKISGGKVLSSKLQKKKTNQASQAFRQAANSIQRSDHWLGDYFRRMKAKGGNKYAIVATANKMARIYYRMVTKKVEFVPLDLKQYQSQYQQAKISYLERKLQTLKNQAA

SEQ ID NO: 50143 - protein, 376 aa, unidentified
MKNVRFVGLDVHAETIAVAVAEASGEVRSLGTIPNRVESIGRLVRKLGKPEQLRVCYEAGPTGYVLYWQLSELGVKCEVVAPTLVPVKTGDRVKTDRRDAEKLARSYRAGDLTPVWVPDAAHEALRDLVRARWAAKRDQLRARHRLSKLLLRHGRRPPQGTSAWTDKYLQWAKTLHFAHHAQELTLDDYLHEVAHAAARIARLEQAIDAAIGTPPVKMRVVIEALQSLRGIAQISAVSIVAELGELSRFAHPRQLMGYSGLVCREYSSGPRVHRGPISKTGNAHLRRIVVEAAWAYRHRPSIGKTLAARQQRSSAAVVELAWKAQQRLHRRYARLMARGKNKQQTVTAVGRELLGFIWAIGVHAEQELSAPVRQAA

SEQ ID NO: 50144 - protein, 442 aa, unidentified
MGHDYLPLAIEALRRWSPTVSSRAPHAPIEYCQVEALHTRLARRTRPFLMRNRGIPMMNDPHLHRLFVGVDVHKDNHAAVAVNGFGTALLEQELGNAVNEFEALLARIQTLAAEHQLTPLFGLEDTSGSGDCLARFLVTRGLEVRTVNPVLVQRERRYETHPEKSDLADALGVAKVLIQRIDSVPSYSVTETTELAKDLRAVVNDRTTIVHEQTRLKNQLHALLHHTYGSPYRTLFRDPFAKKALVFWQEFPSARILRQTRRQAIIKPSWITGIAAEALPISSPTVANQIRRKAQRLLGIRDELRDLGKELEALVGKTGQHLTTLPGCGAISSAAVLAEVKDIARFATPATLAKYAGLAPRKLESGKRKRHVKSRSGNRRLNQAIHHIALTQISNQGVPKAKAYFQRKVSEGKSKMHALTCLKRQISDIVWSMLKGRRAYYP

SEQ ID NO: 50145 - protein, 387 aa, unidentified
MTVRTVNNLPASAHAETVRCLFAIELSKQSWVIGFTTPLSAKISRRILSGGDWKGLLELIEEVRARVSREIGRPVEVMSCYEAGYDGFWLHRQLEAHGVRNYVIDPASLQVDRRMRRAKTDRIDTERLLRSLMAYLRGEPKVWSVVQVPSVAAEDARRLHRERDRLISERVQHVNRIKGLCALQGIYDYHPLHPQAMARLEQLRTAQGIALPPRLKSEIKRELHRLTLVVEMIATLEAERDAIVENEASTHVNAEKIHALHELKAIGPEFATVLVGEIFHRDFNNRRQLASYVGYAPSPFQSGNVAHDQGISKAGNRKGRTTGIELAWLWLRYQPDSDLSAWFRARVGAVKGRIRRIAIVALARKLLVALWRYLETGLVPRGAVFKA

SEQ ID NO: 50146 - protein, 424 aa, unidentified
MLGVGVDWAEGFHDVALGVAGRGVSEQFRIEHGPAGVSRLVTRCLELEPDPAEVRVVLETRHGLLVEALIDAGFTVLPVNPDLVARRRGPAKKKDDAEDARICCLMALDQYAELRKLIPHGETGTELRAIARDDERAARDERRISNRLRADLLAVFPAAIDIAAGDLGSAVFLRMLERWPSAQDLAAASGQEVEDFARSARHGWPGRFAGRVAEALAEPRLAVRPELARAKAGSIRLAAAQLLLLRAQRKVWEKRMGELLLGAPRYGRGHTPKDADPGKAFPGGEIYLSMPGLGDRLAARVAGEIGEHFGQFTTPNALQCYAGRAPVTRRSGRSEFTIARRLAYNRHLGEAVQQWAFCSLSRSAWAREFYDTKVSAGDRHHAALRKLANRWLEILWHCLNKSTIYDEAVHAANRLKTRAFKPAA

SEQ ID NO: 50147 - protein, 366 aa, unidentified
MRKHHHFGTFDAVRRGHPLHHYAGIDVSLELSSVCIVDAKGKIVREAKVASDPDALVAFFKQLGFRVVRIGLEAGPLSQWLYAGLAQAGFEAVLLETRHVKAALSAMTVKTDRKDARGIAQLIRMGWFRPVHCKSLGSQEVRALLVARKQLLGKLLDVELSIRGILRGFGLKMGVVTRKTFEARARELSSGQTMLETVVGAMLTARAALQSEYAKLHKTMLVIVRDDKICRRLMTAPGVGPVVAITFKTAVDDPTRISKSKAVGPLFGLTPKKYQSGETDVTGGITCVGDTMVRTALYKAANILLSRVTRFSALKRWAVEVAKRRGLKRAKVALARKIGVILHRMWVDGTDFRWTKAELGSGVAAH

SEQ ID NO: 50148 - protein, 319 aa, unidentified
MNQTELFIGVDVSKNHLDVAFGHLEDAPVERFQNAPEPVAQLMARLQQLQPTLIVLESTGGYERLLMEACHKARLPVAQVQPQRVRAFAKAEGLLAKTDRLDARLLARFGARMRPAAVEPPDEKQTIMDELAKRREQLLQMRTAELNRLKTARYTARERIQKHLEFLEQELADVEREINELMQQSEELSAARKLLMSVPGVGPVTANILLIRLPEILTLGPKAVAALAGLAPMANQSGSKDKRRRIHGGRQDVRNVLYMATLSATRFNPVIKRFYQRLIERGKPFKVALVAAMHKLVCILNAMLRHNQPWKPNLSPSTP

SEQ ID NO: 50149 - protein, 320 aa, unidentified
MTTFDSQVVVGVDVAKDEIVVHRRDLEKTQIIANETPALKKWLRSLPSDSAIAIEATNIYHVETVELAYSMGHRVFVVDPGKLSKYRDSLGKRAKTDASDAALLARYLAYEGAALRLWSPPPEVYTELKNLLHRRAKLVSIQVTLKQSWGNRADLPKEFGAVIDSLKALDQAIQDLMKDILNKAGLMPQIKRCEGIEGVGFLTATAFLTAYMRGDFASSDAYIAYLGLDLCVRDSGKKTGRRRLTKKGDPEIRRLGHNASMAACRSETWKPFYQRHLDSGKARTQALVILTRKLARVAFALMKNQTDYRPNSIFGASPQT

SEQ ID NO: 50150 - protein, 341 aa, unidentified
MWIIGCDFHPRFQQIAFVNTEGGEWGQRRLEHRGEAEEFYRKLAGQVVRVGMETGGSSRWFERLLGELGHELWIGDAAKIRAAETRKQKTDARDAEHLRQLLCSGQFEKLRIWIPPAENRDLRQLLWHRHRLVQMRTRVKNQLRSLATSEGMERKPGLWSQAGQKQFQALELAPWAGRRRQDNLELLAELWHRTDPLDEEVAQQAARQPEVVRLMTHPGVGPITALAFVLVIGDPGRFANSKKLASYLGLIPAEDSSGGKQRLGHISKQGNAMLRGLLVEAAHVAVRHETEWKRDYHRLAMRKNRSIAVVAIARKLAVRLWWMWRRGVDYAQLSASGSHAG

SEQ ID NO: 50151 - protein, 379 aa, unidentified
MSKVYIGLDTHKVQITIAVSLDHGEAIVYGSCSSDLLRFMTTLRGLLKKYGLEKEDVWICYEAGPCGFTLARHLLRIGYHVDVVAPSLIPVKSGEKVKTDKRDARKLARLYRAGELTPVHIPDEADEVIRDLCRARTDAIDDQTRIKHRLTSFLLRNGHHYTGKSPWTEAHMRYLRELVLIDPIQKLILEENIQAVDRAAQRVKAMEDHMRIRLDKWVRQPFVKALQAFRGFQMVAAMVITSELGDLTRFEHPRKLMAYLGLVPSESSSGDKRHQGGITKSGNSHVRWILVEVARHYANAPKVSKELSVRQEGLDEPVKQLSWRTQKRLYKRYVRLQMRRLHENKIKVAIARELTAFIWELAQIHKVNKPMTTPILIPS

SEQ ID NO: 50152 - protein, 340 aa, unidentified
MPLYGGIDLHANNSVIVLLNEQDEVIYGKRLPNALSTVLDQLAPYHTEIKGLVVESTYNWYWLVDGLMDADYRVHLANPAAIQQYSGLKYSDDHSDARWLAHLLRLGVLPEGYIYPKAERAVRDLLRKRAHLVRQHTSNVLSVQNILARNTGARFSVKRIQELTKQELKSLLAEEPQVLAVTSSLAVLDCLRQQIKTLEKTVHKRLHHTPAYEQLLTVDGIGTILAQTITLETGAISRFPTVGNYASYCRCVDSNKISNGKSKGTGNVKNGNPYLAWAYMEAAQFALRFQPAAQRFYQRKLAKSRNNTVLARKAVAHKLSRACYYIMRDLVPFEAAKAFG

SEQ ID NO: 50153 - protein, 386 aa, unidentified
MSKPNDLSRSLTAFEQDSTLIVVIEMSQASWLVAGIVPGVDREPLKKVEPNGDALLRLLQRWRDEATKAGRMLKRIAVAYEAGRDGFWLARWLRERGVEAYVIHPTSVAVSREHRRAKTDRLDTALLKRVFLGWLRGEPNHCNMVAIPTLAEEDAKRPNREHESLVGERTRLVNRIKSGLVRLGIRTFKPMLRRAPEHLDALRTPEGAPVPVNTLAELRRDLARLHLIRAQIKVIEAARLERLQQGPEQGPHAMVRLLARVIGIGVETADMLVQEVLSRNLRDRRAVARYAGLTGAPDESGAKRREKGLAKAGNARVRRGMIQLAWRFLMFQSESALAQWFRSRTAQAPKTRKTMIVALARKLLIALWRLVRTGAVPEGLALRPAI

SEQ ID NO: 50154 - protein, 348 aa, unidentified
MAMTIVEVDRAIVGGVDTHLDNHVAAALDPLGALLGTESFATTPAGYKLLLSWLGQFGTVTKVGVEGTGAYGAGLARFLRKEGIDVVEVDRPNRMARRLHGKSDPLDAVEAARAALSGRAGGQAKSRDGAVEAIRVLHVAKRSATRARAKALTQMRHLTYTAPDQLRCSMKGLPGNKLVTEARRLRPRSSSDPVTSATKASLSSLAHRIDSLDREIVELEALLAPLVKATAPELLALLGVGIDTAAALLVAAGDNAQRLHSESAWAHLCGVAPIQASSGKVTRHRLDRGGDRQANNALWRIVIVRLAHDPDTRAYMERRLKEGRSKREVIRILKRYVAREVYHYLPRG

SEQ ID NO: 50155 - protein, 333 aa, unidentified
MYKSFYVGIDVSKKSMDVAVCKEGVVLKEHQHRVENTEDGFRSMMTWLFRITGGGTEDLFVCMEHTGIYTLTYQCLLEEAQVACTMVSPLHLKKSLGLVRGKNDRVDALRIADFCYTHRHKLQVSKLPADSLQRLKRLMGERDRYVNHKRMLEQTKTDMEAFDSKSTNDRTRRMLDEVKSVIEEIEEEMLTIIQKDPALNRNYELLTGITGIGLVNAINTIIYTGNFEAFDNARQYACFVGVAPFPNESGTSVKGKTKVSHLGNKHLKADLTQGARSAAYWDPEIKLYCQRKIGQGKSYGSVINAVKFKLIQRMFAVVGRGTPFVKMATFSRN

SEQ ID NO: 50156 - protein, 338 aa, unidentified
MQFKHFFGIDVSKNTLDLTVLDSQGNQIAYEHLANDLKSIKKCFLGVLKRHQILMEDCLFCLEYTGIYNLPLVQWLTSLEAHIWLESGSQILKSQGIVRGKSDKVDSLRIAKYAFLNRNEVRLWKAPREIIQHLALLMSLRSRFIKNKKQLEVSVKELNGFFNKATIRSINKHNKAPLNALKLQIDKIEKEILEVIKSDERIHQLYKIITSVDGVGLVTATQVIITTNEFINITEGRKYACYSGVVPFEHRSGTSIRGKNRVSHMANKKIKTLLHLAAISAIRVKGDIQDYYLRKVAEGKHKMSVLNAVRNKIILRIFACVTQERMFEKKINLCLEKP

SEQ ID NO: 50157 - protein, 357 aa, unidentified
MSSEKYIGLDVHQATISVAIMDSQGKIIMESILETKASTLLEFLGGLRGSLFVTFEEGTWAAWLYDLLKPHVAEVLVCNPRKLPLLKQGNKSDKIDARKLAERLRLHDLKPVYHGENGVRMLRELARSYLTVVKDLSRVMNRLKALYRGWAIPCAGRDVYYTRHRRQWLEKIPEAGTRRRAEQLYQQLDMLQHLRQQARRELLAESRKHAITAKLRQIPSLGPIRSALAVALIQTPHRFRSKRQLWTYSGLGLETRDSGEYHYVDGQVRRRKKQATIRGLNKDYNHDLKGLFKAAAIRASVLPGPFQEFYQRSLAKGIKPTMVRLTLARKIAAIALTLWKKGAPATPLGWLYDLETG

SEQ ID NO: 50158 - protein, 419 aa, unidentified
MSGKREIACGVDVHNKFIVATILSSDSMKLQARFDTNLEDLLKFKYWLKENGCHKVALESTGNYWLPIYHVLEGSVNFILANAYQIKHIPGRKTDMLDSEWIAEICLKNLITPSRIFCRDYRELRSLTRTRENLINVRTKIKNKVTHELEAACIKLSSVLSDVFGKSGRHIINGLLKGLDLDEILESIPSRKVRAIKEKIRGTIQLNLSPLQVFLIQSHLDMIDAITKQIAEVDSKVSDQLFTRNNDMRIALSMPGMGFVSASTILAEIGDISDFNSPDKLAAYCGLVPSVYQSAGKLINGHITKHGSPHIRSMIIEVAHAIIRTRKNTKLKRFFLRIKARRGIKIGVVALARKILCILYHLLIHQEFYHDELLVKPRSIRRSSECSTTSMSLDDMIKTIIEAGYEVRRNEYMGSGQGR

SEQ ID NO: 50159 - protein, 417 aa, unidentified
MLGVGIDWAEEFHVVALGSPGEGVTEVVRVEHRPRAVSALVERIAGLEPDPAEVRVVIETRHGLLVEALVEAGYTVLPVNPELVSRRRGPARKKDDAEDARICCLIALDRHAGLRRLIPHGELAGELRSIARDDERACRDERRLLNRLRADLLATFPAALTIAGEDLGAPRVLRLLEHWPTAQALAAASREEIIEFGRAHHSGYLQRFADLVQQALAEDHFTAPGHLVRAKVDTIRLLARQLLLIDAQRRAWEKRMGQLLLGTPACPEDDQPGQAFPGGEIYLSFPGLGRRLAARIAGEIGEHIEQFTTPNSLQCYAGRAPVTRRSGKRDLVVAHRLACNRYLADAVHKWAFASLRRSAWAKEFYDAQRARGKNHHAALRALGNRWLEVLWHCLTTEAPYDEATHIANRNRALSLAA

SEQ ID NO: 50160 - protein, 439 aa, unidentified
MNNHTIQSNSQLPLVPAPIDIWIGADWADQAHVLAICTRSGATRTCSLEQKPELLDQFFLGLRQEHPQSRIGVCIEQTRGALIYALMKYDFLVIYSINPRSLADFRRAFCVSGAKSDPSDAQLLCEMGCKHQERLRPLQAEDACTRKLRLLVEARRSFVDRNTSVLNEFGAVLKCYYPLMIELFEGNLDSQMACDLLKRWPHLAALKQAKPATLRAFCYAHNCRGKQRIEQRLEAIAKAVPLTEDPAIVEPLQLQALALAELLCVLAKQIKSYDERIQRVFNEHSEAWLFRELPGAGLVIAPRLAALFGTQRANWPNALDLLCRTGVAPVQKQSGNQCLVQFRWARPKFLHQTVVEFAKCSLRFCPWAKLLYEDQLAKGKSRFSAIRMVAFKWIRILWRCWTQRVAYHETTYVLGLQRRGVKLYQSLYGNPAGEPVNNP

SEQ ID NO: 50161 - protein, 354 aa, unidentified
MIIIGADYHPGFQQIAFVDTETGDCGEQRLEHCEGAQKFYRELASQGKKVRVGMEASGHARWFERLLEELKIELWMGDAEVIRAKRGRKPKTDREDALHILNLLLTGDFPKIWVPNWENRDLRQLLWHRHRMVQARTRAMNQLQAVALNEGLRCKKKLWRAHGREQLEAFRLAPWASRRRKDLLELVDRLNPRIAELTQAIEQEAQKCPPAQRLMTHPGVGALTALAFVLIIGKAERFQCGKQVGCYLGFVPLEESSGDRRRLGHITKQGNSLLRFLLVEAAQVTSRTLPEWRSKYMHLTLRRGRKIAKVAMARKLAVRLFWMMRKEWDYQQVMKFGSHVEQPGNRHGVQSNIE

SEQ ID NO: 50162 - protein, 411 aa, unidentified
MIEPLVKCCAGLDVHRASVVGTVIREDDTGEIHRETQEYSCYRKGLLELGRWLCVHGVELAVMESTSIYWKPVYEVLEGLLPRLYLVNSRYVKQVPGRKTDVRDSEWLAELARCGLLKSSFIPPKDLRGIRFLTRYLMKLSGYIASEKNRLHKTLDDAGIKIGCVVSNMGGLTATSIVEALIEGKMTPEQMAELARGHLKKKKEELRMSLHQDLSDRHRYLLRCIQKHLKWLENQREEIVCQVVAAMEPYREQWQLLQTIPGFDELSAAVLLVEIGIDMSRFGKSDRLTSWAGVCPGSHESAGKNKTGRTRKGNRYLRQMLCEASNSARKTESQFKYIYQGLAIRRGHNRAILAIGRKLLEVAFAILSKKEPYRDPRVNYEELLVMRNAPRWIAKLRKYGYLPVYPKQKAA

SEQ ID NO: 50163 - protein, 570 aa, unidentified
MVVVGTDAHKYSHTFVATDEVGRQLGEKTVKATTAGHATAIMWAREQFGLELIWGIEDCRNMSARLERDLLAAGQQVVRVPTKLMAQTRKSARSRGKSDPIDALAVARAVMRETDLPLATHDETSRELKLLTDRRDVLVAQRTSAINRLRWLVHELDPERAPAARSLDAAKHQQALRTWLDTQPGLVAELARAELTDIIRLTGEINTLAQRISARVHQVAPALLEIPGCAELTAAKIVGEAAGVTRFKSEAAFACHAAVAPIPVWSGNTAGQMRLSRSGNRQLNAALHRIALTQIRMTDSRGQAYYQRLQDAGKTKRAALRCLKRRLARTVFQALRTVHQPSSEHTQPAAACHRSYCSSHLGEPPRLTDMTQKTRIQPLPPKRAGLLIRALYRIAKRRFGEVPEPFTVTAHHRGLLIANVVHEALLQRASRKLPPSVRELAVFWTARSIGCSWCVDFGAMLQRLDGLDVDRLTDIDNYATSSKFSDDERAAIAYAEAMTADPHSVTDEQVADLRARFGEAGVIELTYQIGVENMRARMNSALGITEQGFNSGDACRVPWAAPDVPSAESR

SEQ ID NO: 50164 - protein, 479 aa, unidentified
MAARRKGGQKPAAGVAGPVEIVDAEYELVIERAAAIDVAKAAGKVCVRLPAKSGRRLSRVWDVPARTGAIGELAETLRELGVQKVTVESTSDYWRIWYYVLEAAGHSVQLVNARDVKNVPGRPKTDKLDAVWLAKLTEKGLLRPSFVPPAEIRQVRDYTRLRAELTRERTRYWQRLEKLLEDALIKISSVASRLDTLSTRDMIEALIGGERDPHRLAGLARRKMKAKRGELITALDGRFDAHHAELARLLLSQIDTLSTQIDVLSARIEEQLAELPAEVALERIDPDDDPDPDPDPVSGVAAPNPIRVDPATTAECALSPLQRLDEIPGIGAHNAQVILAEVGLDMTRFPTPEQLVSWAKLCPRTIQSGPITHAGKTGKGNPYLKGALGEAAAAAARTDTFLGERYRRLVKRRGKLKALVAVARSILVIVWHLLANPAARFRDLGADYHTTRIAIERRLRNHIAQLNAMGYRVTVEPAA

SEQ ID NO: 50165 - protein, 309 aa, unidentified
MEAIAFEQLIKVGCGIDVHKDLIVATIRKGNEEFETKEFDSFTSSLKCLRDWCKSEGVSHVAMESTGVYWRPVFNVLEEDFEVILVNARHVKNVPGHKTDKKDSIWLSKLLLSGLLKGSFIPKVEIRDLRDLVRYRRKVVGEMAREKNRIIKILEDANIKLSSVLTNVDGVVGTKIINALIEGKSELEELMVFYHGKIKAGKTNFGLALEGTLRDHHRTMLRLIKKSIEDKEAFLKDLDEQIDRLAKEYEVEIENLQSIPGVGRQSAIGIISEIGADMDQFPDETHLASWSGMSPGNNESGGKKKPQKP

SEQ ID NO: 50166 - protein, 359 aa, unidentified
MIYETLFCGIDISKDKHDIAVLNQDKKQMHKTFVIQESHAGYQFLLEKFKWLQEKYQTRQFLIGMEATGDYWKNLYHFLIGQSNGFLVSVINPFQTRAYANSELRRAKTDPVEARDIACFMIEKTPPATKQASPVFDSIKDLDRQIYAVKKQKGMTINKLRVELSKVAPEIEKAFRQIGRRQILAVLEQFPTSQVINAASVKEIAEVRFGIRQWRIPLILAKKVKSLTRNSIAYKTGPGAGLAVQSLVRRILESQFEIERLENQIIRLYENFKEQDSVLASIYGIGFETAIALEAYIGDVNRFSNSKKIVAYFGMNPTICQSGKSLKRKSRLQKKGLSTSTTRALWMPENLKWLPLALP

SEQ ID NO: 50167 - protein, 351 aa, unidentified
MKTKDTTSSKLFIGIDVHKRSWKIHTATDLFDGSSLTIPPDAFSLKKYVDRHFKGYTVYCCYESGCCGFSHYRHFISFGWHAKVVNPADVHRPAKAQFQKTDKIDARMLCKELKDDRLKGIHVPSIEQEQLRCLFRRRNELVKEHRKIKTQIKMQLLYLGIEIPKPFDNSHWSHNFRDWLRNLTFEYPTMDYCFETRLITYEYIDKQKRDVSTKLRAYCRKHYKKDYYLLRSVPGVGGIVACGLLCELGDLRRFKNFKQLASYVGLVPWVHQSGDNLKTSGLTPRANRLMRSYLVEATWQALRFDPVMQAYYRSHSGKDVKRILVKVARKLLSRIHAVIRTEIPYEVGVVS

SEQ ID NO: 50168 - protein, 413 aa, unidentified
MSEAYRVAGIDVHKIMLAVVVTDVSGGGEFHFQRRKFGTVDSELKMLSQWLGELGVREAVMESTAQYWKPVWRQLEGQCALHLAQAQSNRAPRGRKRDFQDAERLVRRHVAGELILSFVPDAEQRLWRTITRTKYQLTRDRVRLQNQLESLLEDARLKLDTCVSDLLGVSSRRILQAIAKGEGDPAVLAALAEETLRATPEQLADALHAARTMSPLHRQILQLFLDRLDLIERQLQTLHRQIAKALHQHQQAVLRLAAVPGFGVDSAQQVIAEVGPTAATFSSSQQLASWVGVCPGREESAEVSKSNRSPKGNRAMRRVLSQVANAAVKSKGSIFQLHYRRLVTRLGHNKAIWAIAHRLCKLAWTILHRGIDYIEYGAERSLQALQRRTAKQLRELRGLGYQIIPPTKNEQLA

SEQ ID NO: 50169 - protein, 355 aa, unidentified
MNSSTQTNKLSFKGQLFFIGIDVHKKSWTVTIRVNGMHLKSFTMEPSASKLAKFLNKNYPGGIYYSVYEAGFSGYWLHYQLLDLNIKNIVINPGDVPISNKEKSYKDDVIDSRKLARELENNSLKAIYVPTLKQSATRQLSRLYALQSEQCRRTKMRIKSFLNYLGISIPVEVGERWTNRLIKWLERLEFKEEGLCYYLKQLTKDLKRKRKEMAKTIQKIKDHYAEEEIIKLLRTIPGVGLITAFTFYAEIMDITRFSNQDKLASWVGLIPSLKSSGERVKVRGLNNRQNKLLKWRLIESAWVAIKHDPALTACYLEYVKRMSRQEAIIRIARKLLNRMRSIWIKREAYQKGRTL

SEQ ID NO: 50170 - protein, 361 aa, unidentified
MVGTMTWVGLDVHARSTHAAAIDVMTGELSRVRFGPGVEAPVAWLQSLSGPVRACYEAGPTGFGLYRALTEAGIATEVIAPGKTPRGPSDRVKTDRKDAELLARQLLAGSLTAVVVPSPEVEAAREMTRAHDVCRQELMRARHRVSKMLLRHGRVYPKPKTWTAEHRRWLSQQHFQEEPSNAVFADLLAAVDGISARKAAIALSLSQLATDERWWPTVARLRAFRGIDTLTAFSLHLELGADWKRFQTAPALSAWLGLTPSLNQSGESSRQGAITKTGSMLARRLLVESAWHYSRQPRLGATLANRQAGQPDHILAIANRAQQRLYRVNRSMRSRGKPHNLTVVACARQLACFLWAAATAD

SEQ ID NO: 50171 - protein, 390 aa, unidentified
MLYLGIDIAKNNHVATLIDSQSKSLFKGFSFTNTTDGGESLIAKLYNYIQSPSDVEIGMEATGHYWLSLYSFLVNLGFSVFVINPIQTDGWRKGIEIRKRKTDKIDSFLIADLLRYGDFVETSLSDESIMSLRNLTRFRHYLVGSIGDLKRKAICVLDQTFPEYQGVFSDTFGKTSSELLLHFQTADDFVSITAEQLEAVLSNVTMKSLAKSKLTHISEIAAKSFGLKFCRDSFSLQLKLLIEQIRFIEAQVSDVESEIASILEKLNSPITTIPGIGIITGATILSEIGDINRFSNPSKLVAYAGIDAAVIQSGENAGTYKMSKRGSPYLRKSLFQAALVASNFDPVFKAYYQKKRAEGKHHLTAVGAVARKLCYTIHAILKNNTPYEVQ

SEQ ID NO: 50172 - protein, 342 aa, unidentified
MTCTNTYIGVDLHKKTCYVTVMDKDGHIAKQTEIPNKKEKVLSFFTTYASDSKIAVESTMNWIPFFEKLESIGCNVGLSNPLQTKAIAFARIKNDKVDSRILADLLRTNLLPMAYIQPQSIRDIKEVVRERYGYVQMRTKVKNNIRSILFKAGVENIPDNLFTKKGRRFLDELDLRKVFKIELNRYLRSLSFLDDQITEIEQRIEELAIDDYDCKLLMTIPGIGFYSALMIKAEIGDIDRFPNANKLCAYAGLIPSTYASADKIRTGRITKRGSKWLRKTLVDSITSGSRKNHKLSVFYRKLKKNKGTGKAKVATARKLCSVIFAMLKDKQPYREFVPTKQR

SEQ ID NO: 50173 - protein, 316 aa, unidentified
MNETIVEKFVGIDVSKSTLDVSIEPIGQTLHVAYDEAGISQIVACLKEASPALIVMEATGGLEVRIATELVSKGLLVAVTNPRQARDFAKATGRLAKTDRVDAAMLAAFAKAIRPQARPLKDEDTCALNDMVSRRRQLIDMRVQETLRLGTAASKPLQKNLNKHIAWLDKQITAVDNDLTKRLRGSSVWRAKNDLLREIPGVGAVTTLTMLAKCPELGTLNRREIAALTGVAPLANDSGKHRGKRFIWGGRADVRAVLYMAAVSAIQHNEPIKAFADRLKKAGKPPKVVIVACMRKLLTIMNSMLKNNAPWNPKFA

SEQ ID NO: 50174 - protein, 397 aa, unidentified
MKGFCISLDVSKGTSFYQGFKGLDEPITKPKKIEHNLEGFKELLNLKEKIRKEYNEDCVVVFESTGIYHKPLQTYLDEHDFKYTIISPLLSAKVRKSDIRGTKTDAKDCASIAKVFYLKELRIYSKIDEIYADLKEKSRYYDFLVDEMKRWKIEFRRLLDIIYPGFDKIFDDLYSDFIQAFLLEYSHPEIIRKLRLDTIAKFLEKHTCHKEAYCIRQAQTLKEYTENCASGCSSKSYLVNQFDTVIHNLNAQIKHLEMVLDEIVELAKTLPNYDSIRSIPGIGDNLAARILAEIGDISRFNNASQLVAYSGIDPQIYQSGQMSGLHLKISKKGNKKLRCLLYLAVTCMIRTSREIVIIDFYKKKKADGLASKSALVASMNKLVRIIYSLCKNGCLFE

SEQ ID NO: 50175 - protein, 406 aa, unidentified
MDTIVIVGAGLDVHKKTVVACVIDGRVTPPRVLKRTFRTFLHDLEGLHAWLTELGCTHVAMESTGVYWLPVYRVLEPHFTLVLGNARHMANVPGRKTDLSDAEWIATLLRHGLIRANFVPPAPIRQLRQLTRFRRKLIQTRTASQLRVQKLLESTNIKLGAVASEVFGVSGVLMLRHLAAYVSDPVLLANLAKGKLRSKIPLLRQALSGTFTSEDADLLAIQLAVIDGLEERLPDLERLLTQHAAPYEPILRRLQTVPGIHRVLAIEILAEIGPDVAPWANERRLAAWAGVAPGNKQSADKRRRAKSRDGNTYLKTALTQAATSAIKTDPYLRRRYGRICARRGQRVATLAIAHELLVSIYSMLQRGEDYRPPAISDPVVHRDRERQFLVRKLEKLGYQVSCSATN

SEQ ID NO: 50176 - protein, 311 aa, unidentified
MEHSRFVGIDISKDHLDVHVRPTGDSFRVRDDDAGLVTLVAHLRPLAPVVLVLEATGGYEVTVAATLASAALPVAVVNPRQVRDFARATGQLAKTDTLDARVLALFAEAVRPAARPVPDAQAAALGELIARRRQLVDMLGAEHNRRRLLRDRRLQRHLEAHIAWLEEALRRLDHDLTTLIRSTPVWRETDDLLRSVPGIGPVTAGTLIADLPERGRLDRRRIAALAGLAPIARDSGAFRGRRMIMGGRAHIRRVLYMATLTAITHNPVIRAFHQRLVAAGRPGKVALTAAMRKLLTILNAMLRDRRPWHPA

SEQ ID NO: 50177 - protein, 324 aa, unidentified
MQGQIQPEARSAHTEVYVGVDVCKDYLDVYLHPIGQSLRVANDRLGLKRLRTALVGHAVALVVMEATGKYHRLAHRTLSHRGLPVAVVNPARSRLFAQARGTLAKTDRVDARMLAVLGEALAPQARPPAPEALEALQELVRARTQATANRTALTNRLAACHTTFLKRELKRQLASLDRHIARLTDEIAERIANDPTLARRYHILVSIPGVGPAVAAHLIADLPELGALDRRAIACLAGLAPFADDSGNAQGSRHIRGGRAHPRRALYWAALAAARYNPDLADFYKRLRQTGKKPKVALTAVMRKLVVLANTLLHENRNWINRRA

SEQ ID NO: 50178 - protein, 340 aa, unidentified
MKATVTLGIDLAKNSFSPHGISADGTVTIKKSVTRVNLAKFIAKLEPCLIGMEACAGAHYWARKFTHFGHEVKLMPPQYVKPYVKTNKNDAADAEAICEAVTRPNMRFVPAKSVDQQAILSVHRARELLVQSKTAQTNQIRGLLAEFGVVIARGRGPFKEQLPDIIEDASNELPCVIRETLQCLLELVEKLSKKITALERTIQAWSRQSADASRLEQVPGIGPITASALVATVGNAKHFKNARQLAAWLGLVPRQHSTGGKTVLLGISKRGDGYVRKLLVHGARAVVSHSKRAKSGSSEWLNSLLETKHTNTAIVALANKNARIAWALLTNQSEYVPQSN

SEQ ID NO: 50179 - protein, 401 aa, unidentified
MVSDFRKGRYNLMKIYVGIDIAKLNHFAAAISSNGEIILEPFKFTNDADGFQLLVSKLESFDKNSIIIGLESTAHYGDNLVRYLVAEFYQVCVLNPIKTCQMRKNNIRKTKTDKVDTFVIAKTLMMQDDLRFVSFYDLDMMDLKALGRFRQKTIKQRTRLKIQLTTYVDQVFPEIQYFFKSGLHQHAVYALLKEAPSPKEIASMHMTHLANLLKVNSHGHFTKEQAKELRVLAQKSVGANDSSISIQITQTIQQIELLDSQLEKIKAEMTDIMRFNDSVIMTIPGIGYINGGMILGEIGDIHRFSNPNKLLAFAGLDPSVYQSGNFQAKTTRMSKRGSRVLRYALVNAAWNVVRNNATFKAYYDAKRAEGRSHYNALGHCAGKLVRVIWKMLTDEVEFNLE

SEQ ID NO: 50180 - protein, 350 aa, unidentified
MNSNKYVGMDVHTATISVAVREAAGKLIMESVIEAKASTILQFIQGLRGNLYVTFEEGTWAAWLYDLIKPYVCDPRRNALLKEGSRCDRIDARKLAELLRVNLLRPVYHGEKGLRTLKELARAYLTISKDLTRVMNRVKAIYRSWGIPCAGKSVYNPRHREVWLSKITQASVRRRAELYYEQLDALIRLRKQARQELLAESKKHQAWKLLRSIPALGPIRAAVLMAIVQTPHRFRNKRLLWKYSGFGVVTHTSADHRYVKGQLERSKKPVSVRGLDRDHNHHLKDLFKSAAIQASTRKGPFQEFYEALVAKGMRPEMARLTLARKIAVIALTVWKKGGAFDAKYLKPQTV

SEQ ID NO: 50181 - protein, 386 aa, unidentified
MQKLNDLSRCLTPLEPDSTLMAVIEMSLSSWLVAGIVPGVERQPLKKLAVDESVLLKLLHRWREEAEKAGYMIKRITVAFEAGRDGFWLARWLRARDVEVHVIHASSVAVSREHRRAKTDRLDTELLKRAFLGWLRGERDHCKMVAIPTIIDEDGKRPNRERESLVGEQSRIINRIKATLVRLGIRGFNPKLKKAAERLEGLRTPEGEPIPPNTLSELYRDMERRRLVRGQIRQIESARLDRLEHAPGEGAHAMVRLLARVMGIGIETADMLVQEVLSRNLRDRRAVARYAGLTGSPDESGKKRREKGLARSGNARVRRGMIQLAWRFLLFQKDSALAQWFRARTENARGTRKTMIVALARKLLISLWRLVREGVVPDGVILRPAQ

SEQ ID NO: 50182 - protein, 611 aa, unidentified
MLVRKILSRRLRDSERQIDDLDPLLGVDDAFAPDGVEIGKRLFRDGFLGGFSRGLQFLNAIARSNEHVPRFREVRFVAERAVPRNNLGVIVGERENLVGGDDHAIDIASRTGVDVGIHAVEKQVAHRNHVGLLKMNADIRIRMRGSNVLESEGFAIGLQLVTGSEGLLRQGLRGRGVEMQAGERAVCSSVQDRQIMRLGHALLSHNGMTGSDSQAWVMLRIGRQAVQSHKRRSRSMKRIKFVGLDVHAETIAVAVAEQDGEVRTLGVIPNREESIRKLVKKLGPVEQLCFCYEAGPTGYVVYWQLTALGAKCEVVAPTLVPVKSGERVKTDRRDALKLARNYRAGELTAVWVPDAAHEALRDLVRAREAAKKDQLRAKRLSKFLLRHGRRPASGVKAWTLNYLAWVKQEVHFEQPAQEATLLDYLHEVEHAEARIARLDLAIEEAVKSTPPKMKAVIEGLQALRGIAQVAAVTIVAELGEISRFPRARQLMGYGGIVASEHSTGESTWRGGITKTGNAHLRRVVVEAAWAYRHRPNVGGTLRKRQELVSEEIREIAWKAQHRLHTRYRKLTARGKEKGKVVTAIGRELLGFIWAIGIKVEAAQKETERRAA

SEQ ID NO: 50183 - protein, 436 aa, unidentified
MNTCERRTRFELIKKTIKEAQNYLLVGVDVAKENCDGCFIISSGRMLNKHFRFANTKEGYTQFLTKLKGYQQVIKPGQTVIGIETTGNYMTPLVHYLEGHNIFTVMVSSFVTKRNRDTLDLSWNKNDIKDAWNIVDCMKQGKIIYNPYPNKPYGDMKRLITIYNRLSNERGRYKIRLQNNVLCIVFPEFTSVFDEVDEAVPMAILEHYSLPKNIRKVSEQDFIDDIIKRIDPTIKKSKLSRIYQLAWETIGSDLESTSLQWEIKFIIRRIREIRNTQAEIMEQIKILAKDCSEYELLQTIPGVGPVIAAIFMTEIGDINNFRSARQILKLAGLDLARIQSGQFSGETHISKRGRASLRSAAFQAALVAARNDTNLRMKYLDIIQKKEISKGDRRKAVIALACKILRITYAVMKNKKPYDDSYHALEKEEDKLPVMV

SEQ ID NO: 50184 - protein, 341 aa, unidentified
MKKFIRTAIDLGKNYFQVHGLESEGGRSISRKIKRSKMHEVYSQIEPCRVGMEACGSAHYWARQLTAMGHEVVLIPPAYIKPYVKRGKNDVVDAAAICEAMSRPDMRYVPIKSADQQAVLMLHKTRELLVKQRTMAVNALRGHLAEFGIVAAKGIGRVDELLALAKADAELPHIAGAAVACMAQHLEGLDLSIETVDEEIARAHRQNPTSRLLDEIPGIGTLIASATAASVPDPGVFKSGRDFAAWLGLTPRQNSSGGKEKLGAITKQGNRYIRKMLVTGATSVLRVAGKRKGALADWINALRARKPERLVAVALANKLARICWAIMNTGEGFRTDTYVKA

SEQ ID NO: 50185 - protein, 342 aa, unidentified
MAAIGIDSHKRTLAACAVDELGMPLGERTFANDPVGHRALLDWAEQVASQGTIGIEGSASFGAAAARFLVAAGRAVREVPPQLSHRERARIRRAGKSDPGDALAIARVTARESALPPVRLADSTREIQLLVEAREDLVAEATRLRNRLHADLVVLAPGYEAKADNLVAERHRRVVARRLRRLTGIQAQLARRRLARLERLLAEARELEAQLAARVGDHPLLALPGAGVLTVAKLIGEAGDMARFRSADAFAMLAGVAPIPASSGQRQRMRLNRGGNRQLNRALYVIALIQAWHHPPAKAYVARKRAEGRSWREAIRGLKRHLARVVFQLLRLGAVRAASVAA

SEQ ID NO: 50186 - protein, 348 aa, unidentified
MEQIIRIGVDTSKNVFQLHGVNAEEKAVVRKKLTRTQMLSFFKDLPPTVIAIEACGSAHHWARHLGSLGHEVKLIAPQLAKPYVKRGKNDAADAEALCEAMSRPTMRFVPVKTAEQQAALMLVGMRDRLVRNRTQLANAIRGYAAEFGLTAAKGMSRIELLLGDIASDDSLPELARDLFAIHRREYEVLQAEIEKVEAKLMEWHRNDECSQRLARIPGVGPIGASLLMMKTPDPGLFKSGRDFAAWIGLTPRDHSTAGRARPGGITRAGDELLRSVLVVGATSVLKNVRAGRGKNPSPWLIKLLELNKKPKLVAVALANRIARIAWKLMVSGESYRTITAQPVLAKAA

SEQ ID NO: 50187 - protein, 433 aa, unidentified
MKVLYERVAGIDVHKEMIKVAIRSPGEKPWTRKTEILEFRTFYGVLQAMARELRRRGVTHVVMEASGVYTEPVFYALAEQDFTEVAVINPAHAKALKGHKTDAKDCARLAELFECGLLHGSYIPAPELKEVRDLTRYRMKTVQARTSEIQRLGKALESAGIKLGSVASSITGASATAMIEALIDGERRGQVLADLARGRMRAAGKLADLSMALTGRFTEHHALLCRLHQDRIADFDAAVAGLDERIAGKVTRWQREAGLLTSVPGFGDVVAQAWLGEIGPAPHLHFATHEKLASWVTLCPGNNISARKRKHGRTGDAGTYIKPMLVQAAWNAIRVRGRLQARYNRLVRRFGGDKNPGAKKKAIIAIAHTLLKIAYQVLKSGTPYQDLGADFYTRRESPEQKQAWLEHQLQKLHPGCTITISISPPEAALTPGA

SEQ ID NO: 50188 - protein, 387 aa, unidentified
MARKRTLSTLDTSIAYEAVGLDLAKEDTAIAAFGPDHEGPYLIDRMPYDKLYELLADMAPTLVAMEPCSGAHQIAEQIQELGHEVMMISGRHVQAWVKDHCNGQKTDLNDAFAILNLAYDRWLTPIRGKTREECRLLALQASYRQLKGQRTKTMVHVKATLHAWGFPIRAGSFNQKVLHELIDTNREAFGDEVVETLHLMINRVRDLDHDIAMVLKLLTEATKRDPRASLLRSIPGFGVLTMSRWCAVIGDIARFDSPKQTMAFIGLVPNNRITGHHTETSSGREARGQGRMSKRGDKMLRSLCIMGAGSLCLMVRNDRLPDCPFVASIKERLASPRPWFKVLVYVAAKLVRIATALLKYGETFSFEKAGISKAVLKQWELEQAKAA

SEQ ID NO: 50189 - protein, 388 aa, unidentified
MQVIADRPEAPNAIRSDLGAIFVSLELSRSTWLITSLSPGAGEKMSKHSVPAGDIGVLLARFSEFKQKTFARTGKSFPIIVIQEAGLDGFWIHRVLQKEGIESHVVDPASIATSRRRRRAKTDRIDGEALLRALLAYKRGEPRVCAMVKAPTPEEEDRRRLCRERKVLIAERVEHVNRIKGLLFCQGVSGYEPLRRDRRRRLDELKTGDGRALPDHLKAQISRELDRLELLLEQIKAVEAERNTLFDAATAPTPTPVAMLLDLKGIGPEFAAILWMEAFFRSFANRRQVAAYAGLAPTLWQSGSVDREQGVSKAGNPRLRTTLIQLAWLWLRHQPQSALALWFKERVTRNGGRFKKTAIVALARKLLVALWKYVTAGVVIEGAVMKSA

SEQ ID NO: 50190 - protein, 352 aa, unidentified
MERYVGVDAHSKSCTLGVMSASGQRLKALVVETSGRALIEAVRGIPGRLHVCLEEGTQSAWLYELLKPHAAEVVVAVAPERKGSKDDQRDAWSRANELRTGSVETRVYKAPEYLAGLRNAVRAYGFAVTDVVRAKNRLKAVFLSRGLSVDASVYDAEKRPAWVKKLASPYRELAEWLGRQLDQLEPLRDEAERWLLKESKSHPIIRKLATAPGMGPIRTAQFVAIVATPDRFRTRRQLWSYCGLGIVTRSSADWVRDGSQRWVRSQVAQTRGLSRKRHPRLKAVFKGAATTVIAQLRDDPLHGDYERMLQSGIKPPLAKLTVARKIAAMVLSMWKHQEVYDPKRHQPLPDQP

SEQ ID NO: 50191 - protein, 408 aa, unidentified
MEVVYRCCCGIDVHKKIIVACLNQGGEQSLREFGTTTSEIKSLATWLTESGCEIIAMESTGVFWKPLYNLFELMDLDAIVVNAAHMKALPGRKTDVKDAEWIADLLRHGLLKASYIPSREQRELREITRYRKSLTEERCRETNRLQKILEGANIKLDSVVKDINRKSARKLLEKIIEDDVPTSEEEISKMIHGRMRSKLGQLVTAIEGITTPLQRKLLAQVIDHIDDLNRRIADLDKLVQDYMDEYEAAITALCDIPGIARRSAEVILAEIGLDMSRFPSAAHLCSWAGVCPGNCQSAGRRKHGKTTKGNKPLKTILTQCAKSARSVKGSYFSAQYQRIAARRGKNRATLAVAHSMLIAIYHMLRNNVPFRDLGSDYYDSFNRDRKIHGYLKRLKALGWEPDALPGSA

SEQ ID NO: 50192 - protein, 347 aa, unidentified
MTGNRRCIGLDVHREFAQVAVWQGGTVTQAATFATTPEGVREFAAGLGPGDEVALEATGNTWAIATVLASRAGRVVVSNPAKTRAIAEAKVKTDKVDAAILAQLLAADFLPPVWMPDAATSALRRQVLRRAHVVRQRTRLKNQVHAILARNLVPRCPAADLFGIKGRHWLAQQDLPPDERDAAGALLRQLDFHADELRLIDADLGRAALERPDVLRLMTIPGVDATVALSIVAAVGDFTRFRTPDKLVACLGLNPRVRQSGGQPASHGRISRSMNRITLTWSPWPGCCHGSHRGQCGSSGRATVTRSAGCSSGTATTSLARPSISTSATCLPTSSAGPSTRPGTRRY

SEQ ID NO: 50193 - protein, 339 aa, unidentified
MNILKQTIGIDVSYKSFDARFGTTNTQQQITLSPSKSFKNSLAGFKLFLRWLKKYVLSDDIPLVFVMEATGVYYEQLAHFLFQHGYQVAVILPNKIRNYAKSLESKSKTDPLDAAVITRFGLERQLHLWTPPSETVKALRDLCREYQSLKTNCTQIKNQLHALNASFKPHRESFKRKTLHLKFLQRQIVLIQKELRALVKTEPHLALRLKNIKTAKGLGDMTILTVLSETRCFELVSNLKQLASYAGFDIVFNDSGLKKGRTSISKKGNTFIRKALFMPALSACRANPQMKQLYQRLVAKGKNKKLAIIAVARKLLLLIYTLWKSNSPYRPDFKSVQHL

SEQ ID NO: 50194 - protein, 346 aa, unidentified
MARPSSPCRGYGGAGLDAEGAVVLRKRMRRETVIAFATKLPTCVVAMEACCGAHHLGRLLAGLGHEVRLMSPEYVRPYVKAQKNDDRDAEAIAEAATRPTMRFVELKREEQLDLQTLHRVRDRLVGLRTMLTNQLRAILLERGLVFPKGRRKLELAIDALLLEAQPALGVRMQKLIGDLREEWRGIDQRIGSLDTEFVARARADSATRRLMTIPGVGTLTATALVAAVDDAAAFRRARDLPAWLGLVPRQHTTGGKPKLLGISRRGNSYLRRLFIHGARSALPTLSKADTPTGAWLRALLSRAHANVVVVALAAKMARIAWAMLRRSTEFTPEPGLAMTRLVAPPR

SEQ ID NO: 50195 - protein, 425 aa, unidentified
MGEAGLGRCNSFKGDSFMNAVGIDVSKGKSTVTIRQPGDVVVLAPRDYRHTQSSINELITTIKCLEGETKVCMEHTGRYYEQMASWLSAAGIFVSAVNPWLIKDFGNESIRTPKTDKADAKKIARFALDRWAKLPQYSRMDELRNQLKTMNRQFGFYMEQKTAMKNNLIALLDQTFPGVNNFFDSPARSDGSQKWVDFVYTYWHVDCVRSKSLEAFTAHYKNWCKRKGYNFSAAKAEEVYLTAADLIAVFPKDDYTKLLVRQAVAMLNVASETVETLRIKMNQTASQLPEYHVVMEMDGVGATLGPQLIAEIGDVTRFKHRGALTAYAGVDPRPNESGDYVRKSNPTTKKGSPHLRKTLFQIMDGLIQRSPVDDPVYAFMDKKRSEGKPYYVYMTAGANKFLRRYYGIVMKYFEALGRNGPAHDS

SEQ ID NO: 50196 - protein, 314 aa, unidentified
MLDTTTFIGLDVHARSIKAVSLDVMTGEVRAATFGYDAGAVAEWVRSVDPRARCVYESGVTGFDLQKRLSGLGVDRVVGAVSKMIKPSADRRRKNDRNDAEFLARMLSVGNVAEVWVPDDECEAARDLTRALEDARDDLSRSKQRLSKFLLRHGLVFDERTPTGRRKGNWTRAHWSRIESIRFAERADNDVLAYYVDAVRRAAEEKARLEGLVGAEARKPRWRKRVDSLRCLKGVDTASAADLVFEAGEFSRFRNARSFAAWVGLTPSEHSSGESDRRGAITKAGNKHLREALLARGVHGNKANVATARELACW

SEQ ID NO: 50197 - protein, 324 aa, unidentified
MVFYLGVDVSKKNLDCMLLDSTTGKLKSKSLPNTNAGFEQLVEWLSEKKAPNAHVVMEPTGVYHEPAALALTDAGLTLSLVNPAQLRQFAQGLGVKTKTDKADSTVLARYGATQQPQAWQPPSKSARRLKALLARRDAVADDLQREQNRQEAIDFGQSPDEVKASIAQSIEFLQAELKRLEAMIQTHIDDAPDLRDKKELLESIPGVGERVSTHMTALFAAKTFDSAEQLAAYLGLVPVHWESGSSVRGRPRMSKAGPSHLRKLLYMPAVTARRWNPHIKAFSERLLAKGKSKMAVIGACMRKLAHLCFGVVHSGRPYDPNFAM

SEQ ID NO: 50198 - protein, 348 aa, unidentified
MLIIGCDYHPGFQQIAFVDTETGECGERRLSHREEAEQFYRALKGRIVRVGMEASGHARWFERLLSELQFELWIGDAAEIRTKRVRKQKTDRQDAQLLLRLMMEGRFPQIWVPDAANRDMRQLLWHRHRLVQMRTRVMNQLHVVALNEGLRRKKALWRPAGRKELESIALAPWATRRRQDLLDLLDQLTPKIQELTRALEEEVEKRPVARRLRTHPGVGPLTALAFELVIGTPERFHCGKQIASYVGLVPSEESSGDRRRLGHISKQGSALLRFLLVEAAQVTVRSQSEWRSKFFHLAMRRGRKIAKVAMARKLAVHLYWMWRQGLDYGQMHKLGSHAGEPGNLDGGK

SEQ ID NO: 50199 - protein, 333 aa, unidentified
MKFELFIGIDVSKLTLDVAVLSKDAEIESFTIENKPLAIKKFFSKLSKNFDLANSLICGEYTGHYCYPLRKVCLAEGYSLWFESGAEIKQRSGVTRYKNDKVDAIRIADYARRHQDKANLQAEQDYKLESIKSLTSERDLFIKERVKYKTQVKDLKGFMDEELYKARSKRLKKQVDSLTKLIKEIEKQVKDLIESSEQLTNQKQILTSIDGIGDQVAIQTMIATNAFTKFSSGRKFACHVGVAPFAFESGTSQRSRRKVSHRANLDLKKLYHMAALSAIKMKGEFREYFERKVAEGKNKMTVINAVRAKLINRVFALIRDNRTHQENYNLILA

SEQ ID NO: 50200 - protein, 346 aa, unidentified
MAPLKCVVGIDIAKDSFVACFGQSSLSQQLHFGKEKTFDNTASGFAALLSWVAKQHVSDSPLWFVVEATGVYYEELAYFLADKNQLLSVLLPNKVKHFARSTELKSKTDQLDARLLCRLGLERSLPAWQPPTPALRQLRALARERQVLVRQAAQLKIRAHAYQHSYQPDSRTLARLAAQQQLLVSLLKALDQDLADLLQAEPELARKLDQLTSIPGIGLTTAIVVVAETNGFVLVENERQLTSYAGLDVVQRQSGLSAHATRISRRGNVRLRTALYLPAVSSLRYNPQQMAFYARLRARQPSGKPGVIAVMRKLLVLCYSLWKNDCVYDPHYHPAHLAEKEVAPTT

SEQ ID NO: 50201 - protein, 341 aa, unidentified
MTEIKRIAIDTSKSVFTLHGVDVADRPVLRRNLRRGELLRFFERLPPVEVALEACGGSHYWGRALLALGHRVRLIPPQYVKPFVKRSKNDRNDAEAISVAAAQPSIGSVPVKSAEQQAAAMLLSVRELLVRQRTQLANAMRGHAAEMGLVAPLGEKGLRELRAEVAAADEAAVPAAAKQAIALLGREAERLEVRLAAIDATLMQQHKTNPLSRRLAAIPGIGPIGALNFALRVDPGQFASARHFAAWLGLVPRECSTAGKQRLGGISRAGDERLRQLLVLGATAVIQHAKPGRPAASQWLLNLLSRKPRKLAAVALANKMARIVWAMMASGEAYRPRPAAA

SEQ ID NO: 50202 - protein, 414 aa, unidentified
MEVLYSHCAGLDVHKKTVVACRLGVDAQGHKVKAIETFGTTTAELLRLSDWLTAGGCTHVAMESTGEFWKPIWNLLEGSFELLLVNAQHVKRVPGRKTDVQDAEWLADLLQHGLLKASFIPPVEQRDRRDLTRQRTQLVRDRASVLNRIQKVLEGANIKLSSVVSQIDGVSSRAILEELVADQLNPAQLEELVHGRLRNKLPELEQALTGRVRAHHRFLLAQHLAHLDFLDEQITAFSQEIEHLTAPFEELVTLLDTIPGVARTTAELILAEVGADLSRFPSADHLASWAGLVPGNNESAGKRLSGKLRQGSQWLRAGLTQAAHAAAHQKNNYLAAHYHRLAGRRGKKRATMAVARSILVIAYYLIQRREPYQDLGSNYYDEHQKVSTANRLTHRLEKLGYRIVITPPATQVAV

SEQ ID NO: 50203 - protein, 342 aa, unidentified
MHSVTTIGLDIAKSVFQVHGIDAIGKVVIRRQLKRRYVLAFFQKLPPCLVGIEACASSHHWSRELKALGHTVRLMPPAYVKPYVKRQKNDAADAEAICEAVTRANMRFVETKTPEQQSCLMLHRTRHLLIRQQTAVINAIRAHLAEFGVVAPVGRRGVAELLDVVAASSEERVPEVARGCVAALGVQLRMLKAQILEFDRQIMAWHRSNETSRRLDEIPGVGPALATALVASVADPKAFRSGRNFSAWIGLVPKQHSSGGKHRLGSISKQGDRYLRSLFTAGALAVIRYAKIHGTKRPWLTALLARRPTKVAAIALANKIARMAWAMMVKGERYKEPAALAA

SEQ ID NO: 50204 - protein, 426 aa, unidentified
MKLEEKELEKQICAWIGIDWADEKHDVSLYDVGTGKQEAWIIRQSPEALQEWLGQLRSRYEGGYVAVVLEQGRGGLLNALMGCEFLVLYIINPKSLSSFRDAFYGSGATSDPVDAALMRDMVRQNPSRFRAWRPDDVMTRSLRLLTEGRRHLVNQSTALTNQLTALLKGYYPQALSWVGTLDTAWACDFLEQWPTLQSLQASSRRQILRFYEKHPRASLDLSEQLKQIHDARALTQDAAVLESSALMVHALVSQLRPLLASIAEFDRKIAMIFRKHPDRPIFESFPGAGAALAPRLTAAFGTDRDRFQAATEMQELAGIAPVTEKSGKKSFVHWRYACPKFMRQTFQEFAEHSRRWCKWAKAHYELLRKRGKSHNAAIRALAYKWIRILFRCWKDRKPYQDEVYMKSLLKHGSPLSSILAKPVENQ

SEQ ID NO: 50205 - protein, 343 aa, unidentified
MEAITTIGLDIAKSVFQVHGIDAEGNVILRRQLKRRYVLTFFQKLPPCLVGIEACASSHHWSRELQALGHTVRLMPPAYVKPYVKRHKNDATDAEAICEAVTRPNMRFVATKTPEQQSCLTLHRTRHLFIRQQTSVINAIRAHLAEFGIVAPVGRRGVEQLLGVAADTNDKRLSEVARACVAALGAQLRMLKAQILQFDRMIRAWHRSNEESRRLDDIPGVGPALATALVASVADPKAFRSGRDFSAWIGLVPKQNSSGGKDKLGNISKRGDRYLRSLFTTGALAVIRYAKIHGTKHRPWLTALLTRRPTKVAAIALANKIARIAWAMMAKGERYKEPAALAA

SEQ ID NO: 50206 - protein, 411 aa, unidentified
MNPVVGLDVSKGESQVQAFLDKKKPYRKSFKVEHTSDGLAILHEFLKYLKEITGQNPAIVLEATGHYHASVVQFLEDHHYLLIIVNPLISYRAKSSSLRKVKTDAVDAYLLCELYYKEDLEPYKRRGVRLLNLRNLTRQHENITGNFIQTKLQFQAVLEQVFPEYRGVFGELYSYVSLRILQEYKASEDILKTSEDKLTNRIADLCTSRSKKWAYEKAQKLKTAAARNPFKKTLYQSHLLSMGMYIDMLLQFKEHLSKLEAEIDTLAKGIEEYKIIKSIPGIGEKIAATILSEIGEIDRFNHPKKLVAFAGVDPSVFESGRFTASINRITKRGSSRLRHALYLAIRCAIRDKRKKKTSDKIIPRNKKMREFYDKKRSEGKPFRVAVIACVNKLLHWIYALLKNKTTFQDIA

SEQ ID NO: 50207 - protein, 385 aa, unidentified
MTNQDQETTFVPRDYDIFGGLDVDKKSIAVTFKDHGIMRKSLRLPYSANQLLNYTRKHFPGQRVAFVYEAGPTGFGLHDELTAASHPCLVVSPSMVPTVARKQVKTNRLDSNKLSDGLRGGQLRGIHVPPLSYRELRHLVQLRDTQVAQLRASKCRIKSLPLYEGIPFPTANGKWSAQVLRQLEALPCNATVRFKLDQLIDALQFHFLAAAKVQKQIRYFCQNDPELRRCISFLVSLPGVGTITATHALARLGDWRQIKDVRQIAGFLGLVSSEHSTGDKENRGEITRIGDSRLRNKLIQCAWTAIRKDPELRAFYRRIYERQPKKVAARKAIVAVARKLTTRMYAVLKEQRPFVIRADSSIAPLTAEETGGPRERLDAAQNEQP

SEQ ID NO: 50208 - protein, 431 aa, unidentified
MSKYYNNPVIGVDVAADFSVATILAPDGSIYKKAFKFKHDAKGFLFFLETIKKVEETYDRPSPVFMESTGIYHLNLFYFLISNKVQAFVINPLVTNCNKNKEIRKVKNDKSDSYSIATMGKFENIKTCNMLDVNIFELRMLCREYYDLVDERGNIKKQLASVLRLSFPGYQDIFSDTCGKSSMAILKAYPSPQTILDASPDDLINLLKKESKKGLTWSTNIYKELIDVAQDALKICFLSADATNKYIRLMSLYDFYTLQIDSVESQVYEFIQSDRASVKLKDCVQLLDGIPGIALMSAITLIAEIGDIDSFEKPKQLVAYFGIDPSVNQSGKFNGTKNKMSKRGTKIGRKVLYAVALASVRNKRNGVPNNQVLQKYYQENMIGKPKKVALVAIMHKLLTYIFSVLKKQTEFVIRDPKVHKQMFLENKLLVA

SEQ ID NO: 50209 - protein, 357 aa, unidentified
MLSSNVKYIGLDVHKEAIAIAVLNGAGKLVMESIVETKSSTVLDFLHGLRGELHVTLEEGTWAAWLYDVLKPQVKEIVVCNPRRNALLKEGSKSDKIDARKLAEWLRAGLLRAVYHGENGLQTLRELARSYLTISKDLKRVKNRLKALYHSWGICCAGKQVYAARHREQWLNKIAQVGVHRRAELFYQQLDGLLVLRNTVRGELLAESRKHQAVKILRQVPSIGPLRAALLLALMQTPHRFRSKRQLWTYSGLAVVTHDSAQHRYVDGQLQRSKKPQQIRGLNQNHNHAMKEIFKSAALNSSRCAGPLQDFYARLLAKGMKPDMARLTLARKIAAITLALWKKGGSFDTEHLKAQAA

SEQ ID NO: 50210 - protein, 400 aa, unidentified
MSTPHARIWVGIDAGKGHHWAVAVNADGETLFSTKVINDEAQILTLIDTAREKADEVAWAVDISGRASALLLALLIAHGQRVVYVPGRTVNRMTGAYRGEGKTDAKDALVIADQARMRRDFAPIETPPELVSALQLLTGYRRDLIADRVRLINRLRDLLVGICPALERAFDYSAAKGPVVMLTEYQTPAALHRTGAKRLTTWLERRKVRGADAVAVKAVEAAQSQSTALPGEARAAKLVRDLAHQLLALDERIKDNDREIRETFRADDRAEIIESMPGMGPILGAEFVAIVGDLSGYRDAGRLASHAGLAPVPRDSGRRTGNYHRPKRYNRRLRWLFYMSAQSAMMRPGPSRDYYLKKRAEGLLHIQALLALARRRVDVLWALLRDKRLFTSAPPVTQAA

SEQ ID NO: 50211 - protein, 467 aa, unidentified
MTPHAGKRFRTSPPGDDLAVQHPQAAGIDVHAAVHFVAVPAEDVPPGFVNPEPRLPAGVRKFGTNTGDLEALADWLTACRVTTVAMESTGVFWIPLFDLLASRGFHVILVDPRQTAHAPGRPKSDVLDCQWIRRLHSYGLLTGAFRPADEIVRWRGFQRQREMLIRYAAQHIQHMQKVLEEMNVKLTEVVSDIVGQTGMKILRDIVRGVRDPVKLAKHRHELCKATKEQIAAALCGNWRPELLFALRQALKLYDVYQKQLQECEGRIEECLRAMEDKSKGAPLPPPPRQRKSQKNEVRFGARVLLFKMAGVDLTQIEGISATTALVILSELGVDLSAFPHEKNFVSWLGLCPQHRGSGGKIFKRRTRRGANRVARALRMAAQGCHHAKNALGAFYRRIQARCGGAKAVVATARKLAERVYRMLRYGQEYVRQSQEAYQEAYQLRLVKALAKKAASLGYKLVPEARTP

SEQ ID NO: 50212 - protein, 339 aa, unidentified
MDCIGLDLHKRESQLCILTAGGEVVEQRIVTSRERFSAVLGGRPPARILLEASTESEWVARHLESLGHEVIVADPTYAPMYATRSRRVKTDRRDARTLAEACRLGAYRAVHRASDAQRHVRAELAVREALIRTRTRYVAVVKALLRRDGWRLPSGMPEHTARKVAALPLGAAARAELTPLLTLLAPLQDQIDAADRQLEAVAAQDPVVRRLESVPGIGPVTAVAFVAALDTVDRFTSARQVAGYLGLAPSERSSGEHQRRGRISKTGNPRVRVLLVEAGWRLLRSRQSAAAPLRAWAERIATRRGRAIAAVALARRLARILYALWRDASQYRPAVSRAA

SEQ ID NO: 50213 - protein, 352 aa, unidentified
MPNHTRIVIGGVDTHGRTHHAAVLDTQGRLLGDREFPADRDGYRQLLGWLGRHGQVGVVGVEGTGSYGAGLACYLGDQQVRVVEVDRPDRRTRRQRGKSDPIDAEAAARAVLAGTATAAPKRRDGIVEAIRVLRTARRGASKARTAAINQLKALLVTAPAPVREALDDLSTSALVTTCARFRPDEAGLADPLYASKAALQAIAKRIELLEAELELADQRLAKLVSRAAPRLLGLLAIGNDHAGQLLITAGQHPERLRGEAAFAHLCGVAPIPASSGKIRRHRLHRGGDRDANRALHLAVVVRMRFCPRTRAYVERRTKEGLSKPEIMRCIKRYLAREVYHALVADFEALHAT

SEQ ID NO: 50214 - protein, 354 aa, unidentified
MSDKSNLLIATMGIDIGKNAFHVVGLDRRGAIVLRQRWSRGQVEARLVNMPPCLIGMEACVGAHHLSRRLHSQGHDDRLMPAKYVRPYSKGQKNDFRDAEAIAEAVQRPTMKFVATKTADQLDLQALHRVRARLVSQRTGIINQIRAFLLERGVAVRQGLRFLRAELPIILATRSDVLSPRMVRVIEELAGDWRRVDERIDGLSQEIEALARQDPACERLMTVPGIGPIISSAMVAAIGNGAVFTEGRDFGAWLGLVPKQISTGDRTILGAISRRGNRYLRALFVQAAWVVLVRIKDWDRYGLKAWIDAAKKRLHHNVLAIALANKLARIAWAVLNKERGFEYVKTRATASQPA

SEQ ID NO: 50215 - protein, 368 aa, unidentified
MIVIGVDTHKRTHTLAAVNASTGTVCGERTIVASDAGSLEALRFVRGLDEQRVWAIEDCRHVSGRIERALVAAGERVIRIPPAMTATSRRVQRRAGKSDPIDATAVALAALREGVERFPAAFLDEQAMEIRLVHDHRDQLIAERTRLINRLRWQLLAIDPELEARLQPRAFEQDRVRASVLRRLAKLGDGGRVRIARELLKRVSQITRQARELEAELKLLTSAHSPQLLAEPGCGPITAALLIGHTAGAERFATDSSFARHAGVAPIPASSGNTTRHRLHRGGDRQLNRALHTIALSRARNHPPTRAYLDRKVAEGKTKREALRCLKRHLARHFWKLLYTTDRTPSPPATTSRPALDVGAPALMLCTT

SEQ ID NO: 50216 - protein, 312 aa, unidentified
MDLLVVGIDVSKDRLDVTVRPTGESVTFRRTGGGIDDLIARLKSLAPKMIAIEATGGFETVVVAGLAGAGLPVVVVNPAQVRAFAQALGKRAKTDPIDSAVIAHFAEATKPKLRQMPDKTTRLLADLVARRRQIVEMIAAEGQRARRMNDKRLTKSVARLRKALEKELSELDALIGDQIRGSAVWAEKEDLLASVPGIGKTIARTLIAELPELGSLDRRQIAALVGLAPWTRQSGQWRGKSFIGGGRKSVRSSLFVGAMVAARHNPHLKSFRDKLVAAGKSKLVALVAVARKLTTILNAILRDRRPWQQNFA

SEQ ID NO: 50217 - protein, 305 aa, unidentified
MISWIGIDISKSNLVVWVQPQNDGFEVPNTIEGFDVLIARLAQYTVGRVLLEATGGYERRVMAALQQASFSVLRINPRRARAFAVAMGKNAKTDPIDAAVLADFAEALHASREKPMSPEREALRELVQLREHFVQQRDDNKRRLQQAQLPAVVEAIKDHIRYLQTQIKQFGKAIDQSMRELDAEKADRLISVKGIGTVATASLLVYLPELGELDRREIAALAGIAPYNDDSGNHRGKRQIFGGRARVRRALYMSCWVVIRYHTDFKARYKALRERGKSAKVALIACMRILLIRLNAMLRDGTEWR

SEQ ID NO: 50218 - protein, 400 aa, unidentified
MVRRELLFTLEVIFMVFVGIDVAKDKHELYAVDSDGVVLCDHLTFANSAVGFVSLLERVSAWGKIKVGIEATGHYSSNLLSFLKAHDFEVVVFNPLSVSRLRSANSLRRTKTDKNDSRYIARLLMTGNANPYQSQSYDISVLKSLTRARFRLFQEIQPLKNRFRRLLHILFPELQGFFSNLYGNTSLNLLSALPSAKDIAECNILKLTKILSVSSHGKLKRSRAEQLKSLAKSSIAAYNYGDAFELKQTVQRILFLSSQMSEIEKEIDSVMAELNSPITSIPGIGNLLGATILSEIGDIKNFNNPDKLLAFAGCEPSTYQSGKYTASNTPMVKHGSRYLRRALYCAADMAYVNSISFRTYIDRKRAQGKHYYVAMSHGMKKLVRIIFAVLSRNIPFSEPA

SEQ ID NO: 50219 - protein, 378 aa, unidentified
MHLRRLSLSNVTTTFVGLDVHARKIVAAALDVMTGEVRNAAFGYDHAAVADWVSSVDPAAKCVYESGVTGFDLQKKLTALGIDCAIGAVSKMIKPSADRRRKSDRNDAEFLARMLSVGNVVEVWVPDDECEAARDLTRALEDAREEVTRSKQMPSKLLLRHGRVFDEKTPTGHRRKNWTAAHRAWMKAVEFPEKADGDVLDYYIDRVKSALGEKSRLEGLVEAEASKARWKRRVDSVKRLKGIDTMSAADLVFEAGEFSRFKNARSFAAWVGLTPSEHSSGESVRKGGITKAGNKHLRRTLVEAAWRYLLCSPHSKGLAKGQVPDQAARRHATKGVRRLAERRASMLERGVHKNKANVATALELACWVWAIGCMVEAA

SEQ ID NO: 50220 - protein, 342 aa, unidentified
MDLGKYKTVGCAYESESGAHQFQRTFTAPADLQRLVQEVKPDRVVIEVCSIAGWVCDLMGQLGIEVQVANTSDDAWRWRKVKQKDDRRDALKAARLSAVNQVREVYIPQTEVRQWRALITYRRHLVGRRTKIKNHIRDLLVREGQILARGSRCWTKLGQELLSSMARPLAEVGVAELWRGELWEELQQLQMVQARIASVEEKLNAIGEADKRVQLLRTIPGVGPRLAEAIVALLDQPQRFRKASQVSGYIGMVPKAFDSGESERRGHITRQGSGLVRSLLVEVAWAGLRHNTWMRQTYRRLSGGGKKARKKIAIVAVGRKLLVRCWAMLRDNCAWDWQPQIT

SEQ ID NO: 50221 - protein, 373 aa, unidentified
MRKYTLKDDTLKATPAARAKEIKDEKAAKAKLIAIGIDTGLGSNQASRKVDNAAIGPVQNLRSETEVLLYVDKQLELAEEVVVVYEAGPFGYGLYRKLTARGAKCLVSAPDSTQQKRKRRKNNSIDSRTLTSNLSNYLNGNEAALQLVRVPTEEQERARLVSRQHDQLVEERKRLGAQGNALLLSQGFGSWKNWWRPKAFNSLQRVVPQWVLEMLQSWVDLLRALDEKIQKAKAALAKGWSGPRPKGAGANSLVQLQSQVLDWHLYSNRRKIACLAGMVPSEWSTGESQRLGSITKVGVPAIRRIITEMVWRMILFQPHYRPVQKWQEVLRGTNRALKKKAVVAIGRQLIVDLWRLQTGRISAQELNLIMIGG

SEQ ID NO: 50222 - protein, 346 aa, unidentified
MEHYVGLDVSLKLTAICIVDRTGKIQREGVVPSDPEAIAAFIESHAPHVTRIGLETGATSTWLWTELNRLGLPVICIDARHAKAALKMQINKSDRNDAVGIARIMQCGWYKEVRVKALDSHAVKALLVSRALLVKIKRDLENQIRGLLKNLGLVIGPAKMNVFALRAAELTADRPELAAAVTPLLNARVGIAQQIADLDRKVMKLARNNAQVRQFMTAPGIGPVTALCFLATIDDPRRFRRSRSVGAYVGLTTRRFASGEIDWTGRISKCGDKMLRSYLYEAANVLLTRVAKWSALKAWGIRLAKRSGLRKAKVAVARKLAVILHRMWIDGTEFKWSSKETAKQTA

SEQ ID NO: 50223 - protein, 343 aa, unidentified
MQVVTTVGLDIAKSVFQVHGVDAAGQVVIRRQLKRRYVLAFFEKLPACLVGIEACASSHHWSRELKTLGHTVRLMPPAYVKPYVKRQKNDTADAEAICEAVTRANMRFVATKTPVQQSCLTLHRTRHLFIRQQTAVINVIRAHLAEFGIVAPVGRKGIETLLDVVANPTDKRVPVIARACLAALGAQLRRLKEQILEFDRMIMAWHRSNEASKRLDAIPGVGPVLATALVASIADPKAFRSGRNFSAWIGLVPKQHSSGGKDRLDNISKQGDRYLRSLFMAGALAVIRYAKIHGTTHRPWLTALLARRPTKVAAIALANKMARMVWAMMTRGERYKDPIALAA

SEQ ID NO: 50224 - protein, 337 aa, unidentified
MSTTFYVGIDIACDDFQVALGQTGGSQAVSSFANEFEGFRQLARHLKRHCSEQTTLCLVMEPTGGYELALVAFAHQQGWQVALPNPLHVRRWAESCGIRAKTDRVDAQVLAAFGVERQPVPQAPLPSHVAELDEMLRRKEDLEKMLRQEQNRQHALDRRPGVPAAVTESLDSMIDALTQGLCELEQQIKAHLANHSDLVHYRQLLLSVPGIGLHTVLYILVFLYRWQVLTQGEGNAKGLTAYAGLDPAPFRSGRSVHKRTTISKQGNRQLRRRVVHGAFGGIRGDNPLRQFYLRLVGRNKPKRLAQVAAARKMLVWAWAVFRSQTAFQPDLAVSTHA

SEQ ID NO: 50225 - protein, 321 aa, unidentified
MEKFSLYVGIDVSKAWLDIAIVSQDNQLQQLDRIDNTVDAIRHYVRTSFPQTAGILFCIENTGKYGNAFLQVTATYHLNTWVEHPLQIKRSLGMTRGKTDQQDAVRIAQYAFRFQDKLSLWKPEEKIISQLKELQSKRELLIKSYRMLKQSMVGNDRDLLQPVKVLQKTIDKIDVKIEALITTDAKLFSQYRLIQSVPGIGKIVATRLLITTKAFTHLTNPKKLACYMGVAPFPYQSGSSIKYKNRVSKLGDQKLKSVLSLSAWNAIRSVPALKAYFERKIGQGKHKMSVINAIRNKLIAIVLSVVRRNQPFTKDYSLVIS

SEQ ID NO: 50226 - protein, 422 aa, unidentified
MKNVTDSGQKVKGQKRLMALERASWILGIDVGKEKLSCALLLKDETFRCRFDVEASLHGFQMMLERVKTETKGEGAVMFALEPTGHYWMVLGQFFEDHNQSYVLVHPLVVARSREVKQLNRGKTDAFDACLIAELACRGSVTRTQIPEDDWATIRFYAREYMDREKEIAREKNRMMSYLETTLPGFLEIFPKPLGMNSRACLRVLANFREVLQGDIVQFESQARKHITGKRLMTSRVRRLFEMLQRGDALGLRAGRKTLFWRIINSLDRLELYEKQQDMASKALISLYEECEFKPYLDSVWGTSPLTNSLVLGFMGDPTSYDTPASLIKMAGCDPVPNESGKFKGKASISHRGRNLLRKAGDRISFLLEKRNTVFRNFMHHLTARPKNKLTKRQARIACINKYFRIIWVLCNHRVLFNPALA

SEQ ID NO: 50227 - protein, 348 aa, unidentified
MKNVVRQIVGIDVAQDELVVCLSRMDEDLHQECYIRKVFTNNVKGFGFLTQWVSKHTDAVVELRYVMEATGVYHERLAYYLEEKGCLLSIVLPNKISNFFRTLDVKTVTDKTAAETIAFFGLTRKLTDWKKPRPIFQQLRQLTRERGQIIDERTVLKNQIHAQKAGAKCSESSIARSKKRIDLLNKQEKEVRVELDQALKGDEEVKKLVKIICTIPGVGVLTAMTVLAETNGFDLIRSKKQLTSYAGLDVREKQSGTSVRGKPRISKRGNKYLRKSMHLPALTAIRHDERYKAIFARLVGRHGIKMKAVVAVQRKLLEMIYTVFKKNEAYDKNYFLHQKEKNEAAIKN

SEQ ID NO: 50228 - protein, 373 aa, unidentified
MRKEPVVNQGITHVGLDAHQAKIHAAILLPGTEGALEETFANTPEGIRRFVRRLRRRAPGEILCGYEAGPLGYGLQRTLIVLGLGCIVVAPSLIPVKPGERIKTDRRDARKLAELLRGGLLTEVHAPTPEQEAVRDLCRAREAAKADQKRIRHRLSKLLLRRGIRYTAGRKAWTRAHRAWLRGQRLDHPADQAILDDHLLALEQIEGRLAALDAQLESWAQEPPYAEPVGWLRCFRGIDTLTALSIVAELHDWRRFDSPRRLMAYLGMVPSEHSSGGQERRGALTKAGNRRLRRLLIEAAWHYRHRPAVGYKLGKRRQGQPARVVAVADQAQQRLHRRYRRLLERGKPHNKIVAAVGRELVGFLWAALRPQEG

SEQ ID NO: 50229 - protein, 370 aa, unidentified
MRIIGCDLHARQQTLAMLDTETGEVVNLTLMHEGNNVREFYSKLPPPVLVGIEATGSMQWFLNLMEELGIECRVGHPAQIRAAEPRKQKHDRRDADLILKLLAQNRFPAIWLPSKELLDLRALLLHRHQWVRMRVRMQNALQAIALANGLRRGPALWSYDGQAKIAFLPLLPHAAYRRSALQAMYKNMQSEIENLTRRVAEQAGNRCGARLLMTHPGVGPVTALATEVFLGDPQRFTDSKTLASYVGIIPREYSSGEHQRLGGVTKQGSPLLRFLWGEAGAHAARRDPELKRFYRRKLVQKGLGKARVAVARKLGIRLWIMLRDEIDYQEFCRRGQIQQKTVRPVVGMPETGNGAKSHRPSDEATRLPES

SEQ ID NO: 50230 - protein, 341 aa, unidentified
MSAVALVGIDLGKHSFHLHGQDKSGREVFRKKTTRQQMMRLLGNLPSCTVVMEACAGAHFAARQLATFGHEVKLIAPQFVRPFVKGNKNDFIDAEAICEAASRPTMRFVTPKTEAQQTLSVLHRIRESLVRDRTKTVNQVHGFLLEFGISLPKGLSLVRHLSNTLAEHELPPRLCLLLMRLHSHFCYLEQQLGELDKEMASELAEDDLGSRLLGVPGVGPITASLLSAELGDGKQYGCSRDFAASLGLVPRQYSTGGRNTLLGISKRGDKNLRRLLVQCARSYLQRVDRHQGALADWVRSLRERRHSNVVACALANKLARIVWAMAVNHSEFEARPSACAA

SEQ ID NO: 50231 - protein, 363 aa, unidentified
MTSMTTTTADVTGGVDTHGETHHAAALDPVGRQLGDREFPTTPAGYRALVNWLQAFGHLERVGVEGTGTYGAGLTRQLRAAGVTVVEVDRPDRKARRAKGKSDPLDAYSAARAALAGTATGVPKARDGRIEAIRSLRVARSSAVKARSQATNQLKALLVTAPADQREQLRHLTTTTLVAACARLRPGADIADPAQATKTALRRLAHRHQHLSEEITAADADLRTLVTAAAPRLLALSGVGTEVAGQILVTAGDNPDRLRSEAAFAHLCGVAPIPASSGRTHRHRLNRGGDRGANNALYIVVLGRLRYDSRTRAYAARRTTEGLSKPEIIRCLKRYVAREIFTVLTARTADDQSRRACATSTAA

SEQ ID NO: 50232 - protein, 318 aa, unidentified
MGNVASVFVGIDVAKLKLDVVVLPTGEHFQILNSREGFGQLLEKLQAQPPACIVLEASGGYERPCVAALVEAGLPVAVINPRRARDLARGLGKRAKTDRIDAGVLAYCAQHCELHKAVKTPEKQVQLEALVTRRRQLVAMRSIEQTRLEQATIARTRTDIQESLRFLGRHIENIEKQIADLIDSDDYWSGLAARLQSVPGIGKATAAVLLAELPELGTLNRQEIAALAGVAPYHRDSGTRKGKRAIAGGRPALRNCLYMAVLTARTWNDTIRIFHQRLTAAGKPFKVAQVACIRKLLTILNQIAKTGLHWKQHLPKTV

SEQ ID NO: 50233 - protein, 410 aa, unidentified
MSMLEVALDPATVIVAVDPGKVLNRVWVSNGTGLLTQPVSLPVSREGVGLLEHLLAERADGEPVIAVEATGDLHRSWVTEMERRHPGSVRMFAPSETKAARMQLVSGRFKTDDRDCAALTYLARQGRGRRYGEESAVDALRAAVRHRRGLVIDRKVAQQRLHAQLNALCPGLSAPAGHGRSLPVASPTGLAVLACAAAFAGRPPRLRSLNARAPGRMTQATAEYWVHRWRACLGPPADAEARARRLDRDLHRYRTLQSDIASLEEEITGLLAATEGQVLTTLPGVAVNRAAAFAAFSLPIARFPDAEHLYSATGLAPALYQSATLHRRGRISRQGLPEHRDALMGMAWGLSVNSPSFAERNAELRGRGMAPIQARVALARNVCRLAYRLLRTQQPFDEQRYCRGRLSRGR

SEQ ID NO: 50234 - protein, 369 aa, unidentified
MEKRIKYIGLDVHKNSIAIAIADQGQDQEVRFYGTIINRMDLFDKFTRKLISDGSELRFVYEAGPCGYQLYRHLTKKGFECMVTAPSQIPKKSGSRIKNDRRDAIDLARLYRAGELTAVYVPNAEDEAMRDLSRAREDAKFATRKAKQQLGGFLLRNGHIFTGKSNWSKAHFNWIADIKLAHPCQQITLQEYVDAVQTGCERVDRITEQIQKLTKTWRMAPVVKALQAMRGVSTIVATTTVAELGDLGRFDHPQQLMAYLGLVPSEHSSGEKVKRGAITKTGNGHVRRVLVEAAQAYRLPARISRVLLKRQDGLSPQIREIAWKAQLRLCQRYRRLIGRGKPANVVITSIARELIAFMWAIAKQVAPVV

SEQ ID NO: 50235 - protein, 321 aa, unidentified
MTYIGIDVSKNDFVVAYSPDKSCRTRTFKNTTKGIHEFIRTICKDEHHCVMEATGNYSALLVYLLSEAGITTSLENPLKVKNFARAMLSTVKTDEIDARLIALYGEKMQPAPYKLRSDAILTLKQKRTVIRQLKKQLFATRNLKGSMEVLPFFDAKCKRSIDKTIAFLEKQVKDLEEDLASLAKSEYKKQIDLLTSVKGIGITLAAALIMVTGGFTYFDNAKQLTRYLGLSPTYQQSGTSVNFKGHINRNGDSSLRSQLYVAAFSSIRCNTECRACYDRLRSKGKPGKVAVIAVANKLIRQAFAVVTQEKPYVDGYISSKK

SEQ ID NO: 50236 - protein, 318 aa, unidentified
MVVIGVDSHKRTHTVVAVDEAGRKLGERTVAATAEGHLELLGWSRSWPDHVWALEDCRNLTRRLEADLLRAGEAVRRVPTKLMAGARRSAREPGKSDPIDAEMIAWFAETFSQAPGQIPDAAREELATLAKARKALVDVKIRLQAQDEHAAPEPARKAYARVLKSLAAEIDKLEAAISAKVKATPEFAERAEIIESVPGLAQATSAILIAGMPELGQVSDEVAAALIGVAPYDDDSGKRRGERYIKGGRRWVRNAIYMPCLGAATQYNPVLKAFYQRLLAKGKEPKVALVACMRKLIIILNTMLARRQKWNPGRHAMA

SEQ ID NO: 50237 - protein, 336 aa, unidentified
MSPNPARLGRKGKGDPLAESFVGIDVSKARLDVSARPSSERWSVPNNERGIADLVDRMLKVGPSLIVLEATGGFELACVGALAAAAAPVVVINPRQVRDFAKATGRLAKTDAIDAEVLAQFAEAVRPEVRVLPDETTEELKALVARRRQIVEMLGVEGNRLLSARPRVRPDIEAHIAWLKKRLGDFDRELEACIRSSSVWREKENVLRSAPGVGPVLTTSLLANVPELGSLNRKQIAALVGVAPLNRDSGTLKGRRTVWGGRASVRAALYMATLVAVRHNPVIKQFYVRLTSAGKPHKVAMVACMRKLLTILNLMIRDGKRWQFSDAPLLDIKDSC

SEQ ID NO: 50238 - protein, 462 aa, unidentified
MGHARARKIPAQLVEDEEYQLRHERVAGIDIAKAKADVCTRLPPQRDGGRRASRVEDVPARAREILALAVRLAADGVELVVMESTSDYWRMWYYLLEAAGLSVQLVNPAHARQLAGRPKTDRLDAQWLARLAEMGLLRPSFVPPPEIRALRDLTRTRLQLVRDRAREWQRLEKLLEGALVKLSSVVHSLAKVHSARAILEAIAGGERDPGTLAALAHPNVKGGRAAVAEALEGMALGGHHPMLIRVHLDHITLLDRSIDAVEDEIEAALDAIPAAWGTDAGGETGPGAGRGPDPAILPAVERLAEIPGISPALARAIIAETGLDMTRFQTADHLVSWAGLAPVARQSGPRSRKPKKGQGDAYLRGYCTQAANGAARTDTFLGERLRRLSRRLDGNRARCAVARSILIIVWHLLASPEARYADLGPGWHQRKADTDRRTRSLLNQLRALHPDAEITITPATAA

SEQ ID NO: 50239 - protein, 338 aa, unidentified
MIVIGVDVHKQSVTAVAVDEAGRMLDERTVAVGSDELIGWASALGTERLWALEDCRQLTRWLERQLLTRGEELVRVPPKLMAPERRAGRTRGKSDPIDALAVARAALREPDLSRPRPGEQVFRDLKLLVDHRDDLVDERRRTQQRLRWHLHQLDPTFAVPLRMLGRPSHLERVSRWLARQEHELQVRLARELVARCRALTRTITELDRELEQRTAETAPTLLKLPGCAALTAAKLLAEIGPIDRFKTDAQLARHGGVAPLEASSGRVQRHRLDRGGNRQLNAALYRVAITQARYHPAARAYLERKQAEGKSRREAIRCLKRQLVRVVFNTLKASPALT

SEQ ID NO: 50240 - protein, 407 aa, unidentified
MSLDHPREEPTAIRTDLGAIFVSLELSRSTWLITSLSPGSGEKLSKHSVPAGDIAALLMRFCELEQKALARTGKTFPVIVIQEAGLDGFWIHRALQSEGIESYVVDPASIATSRRRRRAKTDRIDGEALVRALLAYKRGEPRVCAMVRAPTPEDEDSRRLCRERKTLTIERVQHVNPRRMRSIRPVIKGLLFSQGVSGYEPLRRNRRQRLDELKTGDGRPLPPHFKAQISRELDRLELLLGQIKAVETERDALLAPTAKNDEAPAPQAQTSARNRLAMLMQLKAIGPEFAAVLWSEGLIRSFTNRKQVAAYAGLAPTPWQSGSVALEQGVSKSGNARLRSTMIELAWMWVRHQPHSALTRWFNERVKRNGGRLRKTTIVALARKLLVALWKYVNAGVVIEGTVLKRG

SEQ ID NO: 50241 - protein, 383 aa, unidentified
MIVIGADTHKRTHALAAVDAGTGRVRGQRQIKAEESGHLAAVRWARGLDDGRVWAIEDCRHVSRRLEQTLLAAGERVVRVAPHRMGASRRGEREPGKSDEIDALAIARAVVKDGIEKFPVAYLDEAAMDIRLLLDHRNDLVAERTRTVNRLRWHLLQLAPELERSLKPGSLNQPRVLDRVDRRLRRLPACARVRVAREQVAQIRSLNRRTDELKRELLELVKAHRPHLLAETGCGPLTAAILIGRTAGAERFGSDASFALQSGTAPLPCSSGQRQQHRLNRGGDRQLNHALHIIAITRASHDPATKAYLERKEAEGKTTKGALRCLKRHLARRFHHLLSLPAQTAQPDPGTVKEIPAHPGRRYRGRVDTSIAGAAPTPMPCVT

SEQ ID NO: 50242 - protein, 347 aa, unidentified
MKILALDLGKYKTVGCDYERETGEHRFKASFTTPAALEQLVKEVKPDRVVIEVCNIAGWVCDRLRSMGVEVQVANTNDDAWRWRKVKKKNDRRDALKAAQLSAVNQIKEVHIPTIEVRQWRALIAFRQQLVRRRGRIKNHIRDLLLSEGQILPRGGSCWTQVGVARLEALARPLSEVSMSELWRGQLAMELRQLQAVQQEIAAAEEKLDAIAAADPRIKLLRTIPGVGPRLSEAIVALLDQPERFHKASAVSAYIGMVPKELDSGETVRRGPITKHGSRLVRSLLVEVAWAGLRHNRWVRETYQRISGGKKSRKKIAIVAIGRRLLVRCWAMLRDGTSWRAPVFAAA

SEQ ID NO: 50243 - protein, 340 aa, unidentified
MSNVMTVGLDLAKATFFAVALNHAGKRQWRKKLSRKKLLASFANSGPYKIAMEACASAHYWARVLGAMGHEVALLPPQHVKGYLRGQKNDYNDAEAIAEACLVGRIRPVRPKSVEEQDRQSLLRLRRQLINEQTRLINQTRGLLGEYGLVVAQGRERFIRELPGLLEDAENGLSGPMRELIARQLTRYQQLREELAWYDKQLQQQVKEDELCQRLMRVPGFGPVASSLFRNWLGDGQQYRRGRDASAALGLVPRQHTSGDKPLLLGITKKGDKELRSVLIHGARAVLTHAHRKDDPLSRWVMQVRQRRGFNKAVVALANKLARIGWVIVARGETYRPRTA

SEQ ID NO: 50244 - protein, 312 aa, unidentified
MNTQNTNPIHYVAIDVSKASLQVQDDKRAFAVENTSSGHRKLLDHLKGCSKPLVVYEASGGYERELAAFLRKSAIPQAMLNPARVRDFARSEGVRAKTDPIDTRMILAFAKSKALEAIDPPSEESLKLAALLDRRDHLVEQMAREKNRLQNSEALIHRSIQRMMKILQKEIAVIDKAISQLVDSTPLLKSRAQTMQSVKGVGKVTAWTLLAYLTEMDHLDRNKLVALAGLAPFNRDSGKMSGRRSIQGGRAKVRKCLYMAAHTAASCNPVIAAYVQGLRDRGKPYKCAIVAAMRKLLIHLQCLIKKSQLAPC

SEQ ID NO: 50245 - protein, 342 aa, unidentified
MQITTIGLDIAKNVFQVHGIDATEKVVVRKQLRRGQVLAFFKALAPCLIGMEACATAHYWARELTKLGHQVRLMPAKDVKAYVKRNKNDAADAEAICEAVRRPTMRFVPVKSAEQQARLMQHRARDLLMRQRTQLINALRAHLAELGIAAAQGREGIKELLAIVAQDGDTRLPVDAHASLIVLAAQLQAVQTMIGSIEKRIVAQHRSSEENKRLQTIPGIGVLGASTIAAVVPDPKVFRSGRDFAAWIGIVPREDSTGGKQKLGPISKQGDRYLRRILVVGACAVLRRARQQPEKYPWLTQLLARRPFKVVAVALANKMARIAWALLAKGGTYRAPALAAAA

SEQ ID NO: 50246 - protein, 321 aa, unidentified
MRSVALDVHLDFCEVAIVEDGEVRSAGRIETKPEQIELFASSLGPDDRVALEVTGNAWEIARTIQPHVAEVLVVSPSDTGIRQARAKTDRLDARTLARLLAAGSVDGVWMPDRWTWVMRRRLSRRSQLVWARSRAKNQVHAVLMRQLVGRPPVADLFGVKGRRWLSELQLAPEESETVSAAMRQIEFFEREIAEVEQLIALAAMESAEIKRLMSVPGVNVIVAASFMAAIGNIHRFQSPRKLVGYLGLDPRVHQSGVGPASHGHISKHGSVHVTRSRRRAGRPCASPGHRTPSTSASALAAVTPWRSSPPRASSLLCFGVC

SEQ ID NO: 50247 - protein, 363 aa, unidentified
MHNDSIAVSLAPSESTEVRRYGIIGGEHDDVLKLAHKLQAAHPAATLKFCYEAGPRGFALCRCLQTHGWDCILVCPSKIPRKPGERVKTDRRDADDLARLYRAGELTGIYVPEPEDEAMRDLIRARFQVGKQQHRARQQLKMYLLRHNLRYGGQASWTPAHLRYLAKIKMPFPVQQIVFQEMLDVISAATARLERYDQELERAVPGWRWEPAVRALMSLRGMALLHAATLVAELGDFNRFEHPGQLMGYLGLVPSEHTTGKDRQQGGITKMGNAPARRALVEAAWQYRIPARLSPHLKKRQEGLPKAITDIAWEAQRRLHHRYTHLTRVGKKKSQVAVTAVARELTGFVWAIARQVHPRPAQA

SEQ ID NO: 50248 - protein, 328 aa, unidentified
MENEIHFIGIDVAKAKLDVDMLRPDGRHRSKKFANTPGGHDELVSWLRGHQVIHAHICMEATGTYMEDVAAHLSDAGYQVSVINPMLSKAFVQSQGIRSKTDTVDARQLAYFCREKRPAIWEAPHPVERALRALVLRHQALTEMHVQEQNRRESARDVQLPSIDMHLLWLDTELKRLEKQIKDLTDDDPDMKHRRKLLDSIPGIGPKTSAVLLAYVGLKERFREARQFAAYAGLTARQHESGSSIRRVSRMSKMGHVSLRRALYMPAMVTLYKTEWGREFRERLEKNGKNAKLIIGAMMRKLAQVAYGVLKSGRPFDATLHTKNACMA

SEQ ID NO: 50249 - protein, 337 aa, unidentified
MNKSELNFVPCGIEVSSETLLVARGSKAPREFPNTAAGHQALLRFLEQGGGRVRVCLEATGRYGLDLALALDTARLPVMVANPRAVRHFASALMERSKTDPLDARVLAEYAARMPFQSWQPPSPTVLKLVGVVRRLQALTEMRAAEKNRLHAASLSEALSGYVRLEIAHHLRTLEHSVQRLTRAAEQFIGDDWALAERYQLLQSIPGFGPTSALHVLAELSLLGADLDVRQWVAAAGLDPRHYSSGSSVHQKTRISKLGNARLRRGLYMPALVAIQHEPHLAAFYRKLLGRGKAKMQALVAVMRKLLHAIYGMFKHHQTYDGSKIHALTPLPEALCV

SEQ ID NO: 50250 - protein, 400 aa, unidentified
MIAVGIDVSKYKSTVAIISNTGEILLPPKVYTHTYSALLSLVSLLKKQNDDIRIVMEATWHYHYPILKLLLGHHFFVSVVNPYIIKKYNDNNLRKVKTDKQDAIRLAFYALEKSYCLNAYVPAGEKYADLKFLYQQYTQRIHIIQKEKINLCHLLEESMPGLYDMLSTSVRNPSKNLLYSFVKRFKSFNRIKRMGKERFLNSYFKMAAEIGSRRRKNYALDIYEMAKDCIATGSTEPYSTMVQEECLRSLILAEEAANRLCEQMNSIANTLPEYPLVRSMYGVGDKIAPQLIALIGDIRKFKSGKALNAYAGNDAPPYQSGQFESKNRHISKRGSTELRKVCFEIMCCIKVHKSPEDPIYKFMQKKESEGKAKKVAIMAGINKFLRIYYARVSEVYQKAL

SEQ ID NO: 50251 - protein, 341 aa, unidentified
MLYVGLDVHEKYTQIQAMDEAGFLAMGENLPTTAESLNAFFSQLPDSAAVSIEAGRNYWWISQLLNSHSAIREVKVVDPRRSRNLAKELSVQSGYGRAKNDRIDAEMLAQIHRQGMSPAIHLPTEEQLEWRTLVRHRMGLVQQSTSVAGRLQGLLSMHGVRMSTSALLNDFQAQLESLSHLAGYVRSTLHHLLDQIHLYQKQIQHCERRLSKCLSPSHPEIKILMSAPGIGIVLSRIILSEILYISYFEAPKYLMSYAGLAPIENESGGKKGIIELNHHCNYYLKYAFIQAAHMARSHPKYRKKYNQDEKRHGKIRAKINLARRLVKTVYWMLTRQEPFYC

SEQ ID NO: 50252 - protein, 309 aa, unidentified
MTSNTQYIAIDIAKQTLQVQSDLQSLSLLYNQEGLKQLRAFIKRHQHPMVIAEATGGYERPLMSMLYKYKITVALLNPRLARAFAVSEGIKAKTDPIDAKMLLSFAKEKSPRPTEYIGAQREELGALMDRRAQLTEHIAKEKNRLDKNQKIICGSINKMIRILDKELALIEARITKLIDSNEQMQAQSKLMQQVCGVGPNTAWSILAYLSEITSLNRNQLVALAGLAPYNRDSGKFKGKRTIQGGRAKVRKTLYMAAQTAAIHNPTIKTYVDRLRNEKGKPYKCAMTAAMRKILVHLQSLLKNQQILLD

SEQ ID NO: 50253 - protein, 403 aa, unidentified
MATPEQVTVWIGLDVGKESHFADVLDNDGERLFSRAIGNDQGDIEALLDRAGRHGVPGLAIDQPGSIAQLVLAVAAKREVPVAYVPGLVMRRAADLYPGEAKTDRRDAYIIADTARTRRKQVHWLDTASDELLAQLRVLDGFDTDLAADQTRVTNRLRDALTSISPVLERAIGKRLHQAGVRDLLTQHPTPTALRAAGPEQVRAAVARRSPRLAPKVAEAVAKALAAQDVTVPAEAATGRVIAELAGELDRIFARRDALEKEIEAVFLAHPFGEILASLPGVGARTGARILAEIGDGTDFASGAKLAAYAGLAPVTRQSGTSLNAETRSRRGNHRLKNAMFLAAFCSLRDPGSRAFYERKRAEGKRHNAAIICLARRRCDVILAMLRSRQPYQPNRKKAAKAA

SEQ ID NO: 50254 - protein, 316 aa, unidentified
MTHPYISTIGIDVSKKHLDLYHSLLKITKRYDNNSQSLAKLIKYIVSNPVDCILFEPSGGYERKLLRSLVEKQLPFVMIHALHVRKFAEAKGQWAKTDAIDAALLAEYGLKMQPELTSKISSLNYQVLRTWSRRRTQVTNLIRLEKQYLEQQDNQQIIDLIQKNISTLKDQIKLIDQKIQQVIEQDSSLCKKAALLNREKGIGQVCTTLFLCELPELGQVNHKEIAALVGVAPYNRESGSWKGYQQTTRGRKVVRCALYMAIISAIRYNPKIKSFYDRLIAKGKRKKVALTACMRKLLIVLNATLKQRFYHPEVHT

SEQ ID NO: 50255 - protein, 417 aa, unidentified
MKKNSKSPMKKEQKVKRAKAQRPVQREPKEVLAELVEKLQGKLELKSTSASQAEAGPRGELSPNLNRLTVGVDLGDQWSHFCILGFEGETLSEGQLQTRQAEVAEFFQALPPARVVMEVGTHSPWMQEIIAGEGHEVLVANPRLMEGSKRRKRKNDRIDAKKLARLGRVDPQSLHPIRHRSREVRQDLVVLRAREALVAARTELINATRGLVKSMGTRLPKCSSPSFEQKVKDAIPERVREALLPLVQLASALSDCIQSYDQKIEELGSEKYGHTKLLRQVKGVGPITALAYVLTLENPEHFAKSRDVGPYLGLVPKQEDSGESQPQLGISKTGDTMVRKLLVGSAQYILGPFGPDTDLRRYGLRLCERGGKNAKKRAAVAVARKLAVLLHRLWVSGEVYEPLGYASSRGILQQAAA

SEQ ID NO: 50256 - protein, 494 aa, unidentified
MNDKLYIGIDVSKDWVDIAVHGQHRVVRIANTEAALAAWASQLDPTRIGLICFEPTGGYERALRHRLGAAELRYIRVHPNQVVAYRRQRGIKAKTDAMDARLLAAFCAEELAGRGLAGTIEGDETLCALSVRRRQIVGLRQMEACRLASAAGLPTEDSIRTVMDALGQGLKDIEARIAAHIARNPRQSQLSANLRSFTGVGQVGVHTFIGELPELGCLNGKQIASLVGEAPIQTESGKYKGRATTGFGRPGVRHVLFNIARVAIRHNPAMREVYRHLTEDNGRPAKVALVAVMRRILVILNAIARDNQPWKGATAVAPRSPAAVGKRPAEATVRSQAAAGLLSIAAGDSPRVPLRDEIPVAVPAMADVRENPVTASRDEIEVGASRRGRKPQGERAMTGAERQARYRARQTGDSARATPTIPAPRGKPVKPTRPQRWNRAVQELTALIDEYRASYDATPEQLRDTPTGEALQAIAEMDLEEIVAIQPPKGFGRD

SEQ ID NO: 50257 - protein, 402 aa, unidentified
MNAVGIDVSKGKSMVAIMRPFGEIVSTPFEIKHTASDIHSLVELINSVEGESRIVMEHTGRYYEVLAHQLSEANLFVSAINPKLIKDFDNDSLRKVKSDKADAVKIARYALDKWQNLKQYNVMDELRNQLKTMNRQFSFYMKHKTAMKNNLIGILDQTYPGVNTYFDSPARSDGSQKWVDFASTYWHVDCVRKMSLNAFIDHYQNWCKRKKYNFSQSKAEEIYGKAKELVPVLPKDAITKLIIKQAVDQLNSASTTVESLRTLMNETASKLPEYPVVMAMKGVGTSLGPQLMAEIGDVSRFTHKSAITAFAGVDPGVNESGSYEQKSVPTSKRGSSDLRKTLFQVMDVLIKTHPQDDPVYQFLDKKRAQGKPYYVYMTAGANKFLRIYYGRVKEYLSSLPES

SEQ ID NO: 50258 - protein, 416 aa, unidentified
MKLFVGLDISSFDMKVCILSDEGEKLTSFTVSNDLPGAIQLRDRILDCTMVKNVQALKIGLESTSVYSFHPSMFLHNDESLKSLGAKVFVINPKQIANFKKSYSDMDKTDEMDAFVIADYLRFGRHSMSVVKEEQYIALQQLTRSRYQLIHQVTKEKQHFLQHLSFKCNTFSQEVDSSVFGNAMMEMFSEKFSLDELAQMPLEDLAGFLQEKGKNRFNDAECVAKSIQKAVRSSYRLDKVVEDSIDVLLGTSIEVIRTLQKQVKEIEKAIERIMAGLEESQTLQSIPGVGPVFTAGIIAEIGQIDRFEDETKIAKYAGLYWRKYQSGRFTADDTSLSRNGNQYLRYYLVEAANSVRRYIPEYQEYYAKKYKEVPKHQHKRALVLTARKFVRLVDALLRNHQIYTPKRGRKYMTHMR

SEQ ID NO: 50259 - protein, 355 aa, unidentified
MERYIGMDVHAASCTLAVISETGRKLRDFPVETNGQALVEAVRMIPGRKHLVFEEGLQSAWLYETLSPHVEEIVVAGITESRGPKSDKRDAYGLAEKLRVGNLDKSVFKAPRQFARLRELSRIHMTLVGDVVRAQSRIKSLYRSRGILVSGVNVYGVRPREDWQKQLGSSAQTRAMRLYDHLDFLLEQKKQAESDLLREASKHAIVRILETAPGFGPIRSARLVPIVVTPHRFRTKRQFWSYCGLGIVTRSSADWIQTSDGSWVKARVPQTRGLSRQHNRFLKYLFKGAATTVITQRNKDPTHARYERLLDGGTKPTLAKLSLARMIAATVLRMWKDEEEYDPERAGLPSKTREG

SEQ ID NO: 50260 - protein, 311 aa, unidentified
MYYIGIDVSKKDLSVFDGKDLKFANKEGLKSFKKYLKKRYNLQEIVIIFEPTGIYSFYLKEFCAVNSIKAYIVNPKQSHNFARALGIRPKTDKIDARILYQFHRLIDLKDIKIPKIDQQAKTLASSLTSYEFALKQRVALSNHLESLRDKKLISLLKKDLKRAQKLEDKIFNDIKEYIEQNQDLKEDYQRLLTISGVGDKTAIVLLTLFKTYQGTNRAQITALVGLDPTRRESGTSVRDRVKISKNGKGIYRKIPYLPTICATVHNQKIRVFYQRLLAHHKPKKLAIIASMRKIILIAHAMYRDKTEYVAV

SEQ ID NO: 50261 - protein, 430 aa, unidentified
MKYNQNHKIVQITSRTLIVGVDIAKFAHVARAQDFRGFEFGMPFHFGNASPDFEGFLEWIHQLMKKQSMEKAIVGMEPTGHYWYNLAYFLAEHDIKFVLVNPLHVKKSKELDDNSPTKNDVKDAKVIAQLVKDGRYAEPHIPKGVYAELRVARKIRDLLCVDLQVVQGQIHNWLDRYFPEFLTVFKDWEGKAALQLLKLTKLPHELVMISDEEIFMHLKKAVKRAVGLTKVRELKYVASQSIGIRQGSDMAKLELRILLDKYELFQQRLEELDSKMDQLLSQIPGVEQMLAVQGIGRDTIAGFFAEVGDLSKYSHPKQIIKLAGLNLKENTSGIHKGQTKITKRGRKKLRALLFRVIMPLVAKNMAFKALHQYYTKRKDNPLKKMQSLIALCNKLIRILFAIGQKQCPFSEEKMLRDIPHMDVASIENAA

SEQ ID NO: 50262 - protein, 352 aa, unidentified
MYYVGLDIHKKYCISAVMDKEGKMIYRGRIESKPEALRQYFKGLEEPCHVAMEACYNWGYFLDVLENVTEEISLAHPLKTRLIAEARIKTDAIDAKVLADLLRTNLLPLAYIPCPETRRLKNFLRYRAGLAAMNTQVKNKIHALLDQHEFAEKETLAQLSDLFGKQGRSLLPGVILPGQDTQILRSWMGLWEHVHQDILKADVWIRHHAKEDPLSSLLKTIPGIGDQFALLVRYEIDDIQRFHTAKKLVSYAGLAPSTYSSGGKTRHGGITKQGNKWLRWAFVEAAQKAPLTSPYFKQYYERIKDRAGWDRARVATARKIAEAVFGVMKNQQIYQEYLLGQLPSNGSSRLAA

SEQ ID NO: 50263 - protein, 346 aa, unidentified
MTMLETRPVTGGVDTHLDIHVAAALDANGGLLGVESFATTPQGFTALYRWLASLGSVARVGVEGTGAYGAGLARHLRRAGIAVIEVDRPNRQLRRVAGKSDTVDAVEAARAVLSGRARGVAKTADGNVEAMRALLIAKRSGREARVTCLNQLRHLGFCAPDELRERFRGVSRTQLADVAAALRPRLDSDPVTYATKLAMRALARRVLSAVEDTDHIDTVLAHLVTATAPGLLELYGVGIDTAAILLVAAGDNADRLHSEAAWAHLCGAAPLPATSGKVTQRHRLNRGGNRQANHALWRIVFTRMSSESRTRAYVTRRLDEGLSKPEIMRVLKRYVARETYRHLRPT

SEQ ID NO: 50264 - protein, 452 aa, unidentified
MPAGKDITMHYQKVLKMPESIPYLSVGFDVGADFTWMSIMLPNGILIGKPFKIIHSDPQSRELAISKIKEAQEMYSLESRCFLESTGIYHIPLLCFLRDKGFDCSVINPIITKNSTNINIRKLHNDKFDSKKAAKVGLDASLKASIVPDDAIIDLRNLVRDYYYFKDLQSAIVLKLHAELKVSFPAYLNVFSKVTTQTSLKLLEAYPLAADMLAAPKDELVETIRSTARFGETYALARYDAICTAAKDAAVFGRALPSNALRIRLYIKMYREYQAHLDSILEELHQAVGKLEGTPDYDRISFIQTLHGVGFLSAVVLIAEMGSFDLFSSPKKLYAYFGLDPGVNDSGKFHGDRVHMSKRGSSLARRILHMVAINNLKVDKATKTPVNPVIYDYYTRKCASKKKSVAVGAVMHKICNIIFAMLRDNKPFELITPEEHRERYAAEHPESVNTAA

SEQ ID NO: 50265 - protein, 387 aa, unidentified
MAQVNDLSRSLTAFDPISTLVVVVEMSKASWLVSGVVPGVERQPLKKLAPDATALLRLIERWRSEAIRAGRPINRIALAYEAGRDGFWLARWLIARGIEAHVIHSASVAVSRERKRAKTDRLDAAMLMRVFLGWLRGERGHCGMVVIPTMEEEAARRPSRERENLVNERSRITNRMKSALARLGIRGFKPHLRKAPERLAGLRTAEGTGLPANVIEEFRRDMARLALVRDQISSIEKTRAERLERAPDTGPHAMVRLLARVIGIGIETADMLVREILSRKLRDRRAVARYAGLTGSPDESGLKRREKGLAKAGNARVRRGLIQLAWRFLMFQKDSALAQWYRTRTEGPSGARKTTMIVALARKLLIALWRLVTTGEIPDGVELRPAA

SEQ ID NO: 50266 - protein, 340 aa, unidentified
MEIAVLGIDLGKNSCSIVGFDDGGAVVLRRRMHREGVIKLAGKLRPCVVAMEACCGAHHLGRVLRAQGHEVRLMSPEYVRPYVKSQKNDDRDAEAIAEAATRPTMRFVELKSEEQLDMQTLHRARDRLVGERTALINQLRAVLLERGITVAQGRRKLERHLAGLDAQGGLSQRMRVLIEDMRLQWCELDRRIAELDKELTEWVRNEEAARRLMTIPGIGVLNATALIAAIGQGESFARGRDLAAWLGLVPRQLTTGGRPRLVGISKRGNKYLRKLLIHGARAALPTLLESPTSLGAWLRGLMTRMHKNAVVVALANKLARLAWAVLRHGETFRFAVSAAA

SEQ ID NO: 50267 - protein, 361 aa, unidentified
MTPTVLVGLDVHARQTHATVLDRATGQVSACKLHGLPEEAVLPFLARLGSSILAVYEAGPTGFGLAREARRRGLDVRVISPGSIPKAPGDKVKTDKRDSLRLLRQLAAGELTFVFVPSVADEHFRDLVRAIEDLRGELMRARHRLSKLLLRNGHRYQDGKAWTLKHAAWLRSVHFDDPCAQVTLADYVSSIGLLSTRRAALFETLQAQAPSCSHADSIERLRCFRGIDTLSAAGLCAEVSGFERFQRPNMLSGFLGIVPSERTSDRIRRQGSITKAGSGHARRLLVEAAHHYRHQPAVGVELARRQAGQDPRIIEIAWRAQRRLHGRWQRLYVERRKPSQLVAVAVARELAAFLWEAATLN

SEQ ID NO: 50268 - protein, 330 aa, unidentified
MIDGILGIDVCKNTLDVSISSYTKVRTKSFTNSPDGWRHLLDWLIAQKIQRVHACLESTGRYSLGIACALYGADHVVSIINPAQIRDFVRTKLGRNKTDGVDASHIREYCELFKPSPWAPPSEAHRRLGELQTIRSGIIAGLTEWKNRKNSGIVDAEAQALAAATVSHFTSQLGAVDKAIALTIDNDCDLQSKRDLLLSISGVGETLAGVVLAELPGPDVLRSSAEVVAYAGLNPRRHQSGTCIDRATRISKIGNAVLRAALYMPALSAMRYNSAIVALVTRLKSRGRLKPKQIVVAAMRKLLVLCFGVLKTGRPFDAAIAMGGRATSRS

SEQ ID NO: 50269 - protein, 346 aa, unidentified
MEITTIGIDLAKEVFQIHGVDRHDKGVLCKQLRRNEMVKFFVNLKPCVIGVEACGSSHYWARKLNEFGHTVKLMAPQFVKPYVKTNKHDMADAEAICEAISRPNMRFVPVKNIEQQAILSVHRARQGFVKARTAQTDQIRGLLSEFGIVIPQGIYSIAKRVPDILEDAENGLPGIMRHLLIRLNDHLKELNRQVEELELQIKLWHKENEASQRLEAIPGIGPITASSIVATVGDAREFKNSRQFSAWFGLVPKQRSSGGKQMLLGISKRGDVYLRTLLIHGARAVIRFAEKKAEPDSWLRKLIARRNKNVAVVALANKNARIIWALLAKGTAFHHNHSTVSAATVE

SEQ ID NO: 50270 - protein, 384 aa, unidentified
MNNDSIIFIGLDTHKSFIQVAVLQEQRGATPEHLGRIKSNKSALIKLTQQLQSKYPKATLHFVYEAGPCGYWTYRLLTSLGHCCCVIAPSLIPKKSGDRVKTDKRDAAKLAKLFKAEELTPIYVPESEDEAIRDLSRARETAMKDLKDAKLQLKGFLLRNNVQATVNDNWSKKHLRWLTDLILPHHSQQIVLQEMIITISERMQRLQRLDNELLHQVKNWRYYPVVKAIQAMRGVRLLVALGTIAELGDLRRFDHPRKLMAYVGLVPTESSSGGKTKRGSLTKCGNSRARRLLIEGAHTYKHKANISVELQLRQEGLPKEIVDIAWHAQQRLCRRYQRLLQKGKHRNVVVAAIAREMIAYIWAIAREVVVSAVEPKTRIARLPV

SEQ ID NO: 50271 - protein, 408 aa, unidentified
MGRAAEVVAPSSSIRTDGDCPVAQVNDLSRSLTAFDPISTLVVVVEMSKASWLVSGAVPGVERQPLKKLEPDATALLRLIERWRNEAVRAGRPISRIALAYEAGRDGFWLARWLIARGIEAHVIHSASVAVSRERKRAKTDRLDAAMLMRVFLGWLRGERGHCGMVAIPTMEEEDARRPSRERESLVNERSRITNRMKSALARLGVRGFKPHLRKAPERLAGLRTAEGTGLPANIIEEFRRDMARLALVREQISSIEKTRAERLERAPDTGPHAMVRLLARVIGIGIETADMLVREILSRKLRDRRAVARYAGLTGSPDESGLKRREKGLAKAGNARVRRGVIQLAWRFLMFQKDSALARWYRMRTEGPSGARKTTMIVALARKLLIALWRLVTTGEVPDGVELRPAA

SEQ ID NO: 50272 - protein, 353 aa, unidentified
MAGRRRHVIGGVDTHGKTHHAAVIDRTGRVLGDQEFRATTAGYQQLLVWLNSFGRVSEVGIEGTGSYGAGLTRHLAGAGITVVEVDRPDRAQRRRQGKSDPIDAIAAARAVLSGRATATPKLRTGPVEAVRVLQVTRRGAVKARTAALNQLRAIIVTAPEPLRGQLSGLTPAALLAACRDLPVEEDRLHDPAQAVATALRALAERIVALTTETTQLSGWLSALVATTAPRLTAMLGVGPEVAAQLLATAGDNPDRLHSEAALARLTGAAPLPASSGRTDRHRLSRSGDRQANKALYTIVLTRLRYDPRTRAYVQRRTQQGLTIKEIIRCLKRYIVREVYQALIADFKALAAAA

SEQ ID NO: 50273 - protein, 352 aa, unidentified
MQSTTTIGLDLAKDVFQVHGVDGAQKVTIKRQLRRKDVLEFFTKLPPCLVGMEACAGAHYWARELRKLGHTVKVMAPRYVKGYAKRAKTDAADAAAICEAVTRTHVEQVAVKSEAQQCLLMLHKARELLIATRLSLANALRAHLAELGLVAATGHPGFALLRAKLLDEADGDIPPAARVALLPLEAAIGAAERGIAALEGKIRIAHKVDETSRRLEAVPTVGMFGATAFAAVAADIKAYRSGRCYAASLGLTPKIFGTGGEVTLGSITKQGNGYLRRLLYLGALSQLRVARAAPHKADPKLLRLLAEKPFKVAAIALANRTARTIWALIVRGGEYVANHVPAVPVAAKMGLQ

SEQ ID NO: 50274 - protein, 373 aa, unidentified
MPKYSTAFGMDVHLRSTTVCALDADTGEAVTRRFPGNPWGEIAGWMDGFPGPSLAAYESGYLGFAPQRELAGLGAECVVAAVSKIPRSAADSASKNDRNDAARMAKAILAHDISPVWVPSPEVEGIRDLAGAYDGATARLATAKQRLLAFLARRGFVYGGTTPAGNPRKYWTYDFLRWLDKVRPEDDGGVRTLAAPRNEVEAAAEARADLLSEYRAAVDASPIAAEVAALQSIKGCAFALAAAFSAEVGDFTRFRSGRQVTAYFGLAPSQRSSGDSVRLGGISGAGNALVRKLAVEGSWCYAAARHQPKLMPRDTGVPLEIRMHGRKGSERLLRRREEMLARGMPAAKANAATAAELVRWLWALGMMCREGAE

SEQ ID NO: 50275 - protein, 340 aa, unidentified
MKLYGAIDLHSTNNVTVVIDEQDRVVYQKRLPNDLALILKELSVYQSELQGIVVESTYNWYWLVDGLMEQGYKVHLANTAAIQQYEGLKYTDDHSDARWLAHLLRLDVLPEGYIYPRADRPVRDLLRKRSQLVRYRTMNLLSIQNLLTRNTGSSLSAKQVKALDVQQIDELLPDADLALAVKANLSVLLSTDEQVELLEHTVLQRVQLRPQFRFLKTVSGIGEILGLTIMLETGDIRRFASVGNYASYCRCVGSQKISNGKKKGKGNTKNGNKYLAWAYVEAAHFAIQFNSQIKSYSQKKKAKTKGVVAIKAVAHKLCRACYYIMRDQVPFNINKAFGQK

SEQ ID NO: 50276 - protein, 342 aa, unidentified
MSGDYDGRQYVGIDLHRRRSVIVRTTEQGEQLGWVRIDNDPVALGLELAKAGPDPEVVLEATYGWYWAVDALQTAGAHVHLAHPLGVKGFAYRRVKNDVRDAADLADLLRMHRLPEAYIATPHERELRELVRHRAKLVALRSGLKAQVHATLAKQGQLPAASDVFGRAGPAWLRSAPLELVYRQRIDSLLELIDAYDGEIETFRTMIANRFTGHRGYRAIQQISGIGPTFAAVFVAEIGDINRFSRPEKLCCWAGLTPRHRESDTTVHRGPITKQGSKLVRWAAIEACQHTRAGTKLSADRSRIIAARGRNVGIVAAARRLLTLVFYGLRDGEIRALAARAG

SEQ ID NO: 50277 - protein, 320 aa, unidentified
MSATSVVVGIDVAKAHVDVAVLGAKFDAQRFDNNAEGHSALATALQPLGVALVAMEATGGYEAALACALQAAGLAVAVVNPRQARDFAKSMGRLAKTDTIDARMLAEFAAVLVRREDLASFIRPLADAQQQALAAMVTRRRQLLTMLLSERQRLQLAIPVVRPSIEAMIEAIRKQLDEVEAQMVTHVHEHYAALDKLLRSASGIGPVASATLIAELPELGRLNRRQIAALVGVAPIANDSGTSRGRRRIQGGRFEIRRVLYMAALTASRRNPAIKPFYERLIAIGKQPKVALVACMRKLLTTLNAMVRTNTPWDYSLHLA

SEQ ID NO: 50278 - protein, 446 aa, unidentified
MKKNTKSSTTTGSPAIAVSATPAPTQHDATPPDTSPRILVGIDWADGEHVYVMCDPHGALHRGTVQQSPEAIAQLLADWQRTYPDTRVDVCLETSRGPLINALLEHPQVHLYPVNPNALANYRKAFAHGGGKNDPVDAGLILQFLTSYREQLRPLEPNAPLTRELAALCEDRRGLVEQRVKLAQQLKSLLKAYFPAILLMKPAKIYAAFVIRLVLKYPTLVAAQAAGRSRLRKVFFATGAKDKIEQRLDVLLAAVPLSTDEVLLRTSARHARAICGQLAALNQSIRAYDREIKELVGQHQDYAIVQSLPCGATTKARIIAALGDDRTRYGSAEELAAATGIAPLTTQSGRQRHVSSRWACSKFLRQTFHEFAGLSITKGSWAKAYYEQQRDRGKSSQTARRALAFKWIRIIYRCWQTSESYDEARYVARLQTTQSPLAKRMAAAQI

SEQ ID NO: 50279 - protein, 414 aa, unidentified
MTEHIHVAAGLDLHKKFIIATLLSDEGRKEQRRFERTEHGLLALKEWTKENRCNVVACESTSDYWIPVYDMLEDHTKVIVGNARDIKMFSHKKTDKVDSELIAQLALNGMIPSSRIHPRQHREFRSLSRLRHKLVQKSTDIKNEIHHILDSQLFRLSSVLTDMFGKGGLLILQGIVNGMPSDEIIKVLPRHVRKKIPDLTEILQTTISPEAIYRLRHCLNLLKCLKETTNDITAGILHYATEHFEHEMKILKSVPGIGNIAAVTLLAEIGNFSDFPSGDKLASWLGLVPNVYQSADTLRTGGITKRGSKDARWILIQSAHAAARSRNNDLRRFFDSKKAMIGTGKTIVALARKIVVVIWHLITYDEFFDHRDEKTSVPLKFVKVRIPALVTLEEILKILHEAAVVLKEPDPGGG

SEQ ID NO: 50280 - protein, 523 aa, unidentified
MASKQLSKKSRSRAAAYLQKPRGVIHPRVQKVGPEHFAIVCVDCAKARSKWMLTDFYGRVLVPPTEVAHNRVELAGAVAQVRAALTQHDLRDCLVAIERTGRYHHPVKNTFAQAGFDTRLVHPYATKQFRQPANPDYKTDDADMAAMQLAAVNGFALREATPAESWVQLQLCIRQRRDLVGKCSALACQIRHHLDAALPGYAACFDKLWDSNVAFRLVRDFGSATAIAEQGVTALCHYLNQQKVRFQERTLQTVVLWAKNAAAADVAGDLHRQIALAYEDDRQRKTQEILALERDIAHRLAQTPYVLLMSFPGVNVVSAADFAGEMGPIEHYANARAITGRAGLFPSRYQSDRVDRADGPLVRRANRSLRAVILGIADNLMLCNRHFRTLAVAWKIAGKDPRKSHVKVGMRFCRIAYHMVAGRQVFRHPSLRARGYILDKLLAFHLEHRTPYEQIMRDLHLATNQIPTKEHAAEAKPLADRLRITRAAGKPGPQPLNEILAIVLARLGVGMIPSKPSEERDLT

SEQ ID NO: 50281 - protein, 411 aa, unidentified
MNNTLFVGIDISKRSNVATFMNCEGKVVGRLTFSNNGSGADRLVAKILSYYEKEDFEAIRIGMENTSVYSKNLVWFLYEHEALNEHKLSIIPLNAIMVANYKKSFLDMDKDDITDSFAIADFIRIRPGLLPFKLDDRQEALKIMTRSRYNYVQALSRMKSQFLTRLFLSFSEMEAGKPFYSIFSKTSLSLLEEEFTLDELAEKPIPELVEFLQEKGGGKFQNPEEIAKVLKKAASSSYRVPAMVRESLNRTMASDMEIMRILENEIHNCDKNIEKLMKSVPAILVSIPGIGPVLAAGIMSEIGDISRFQKQESLGKMAGFKWKRNQSGKKESEDKAAVLSGNKKLRYYLVEAANRVRIHDPVFEAYYRKKYAESKTHAHKRALILTARKLVRVIFYLLQENKLYKPDVGIS

SEQ ID NO: 50282 - protein, 387 aa, unidentified
MQVISNRRETSDAVRNDLGAIFVSMELSRSTWLITSLSPGGGEKMSKHTLPAGDIGALLARFSELGQKALTRTERSFPIIVIQEAGLDGFWIHRVLESEGIESHVVDPASIATSPRRRRAKTDKIDGEARLRALLAYKRGEPRVCAMVKTPGPEEEDRRRLCRERRVLTNERVLHVNRIKGLLFSQGAAGYEPLRRGRRQRLEELRTGDGRPLPPHLKAQISRELDRLELLLEQIKSVESERDALLAAQQTTPNPAAMLLAIKGVGPESAAILWSEGLCRHFDNRRQVASYAGLAPTPWQSGTIHREQGVSKAGNPRLRTTLIQLAWLWLRHQPQSVLAIWFKERVNRNGGRLKKTIIVALARKLLVALWRYVTAGVIIEGATMVSA

SEQ ID NO: 50283 - protein, 388 aa, unidentified
MNRIIKIGMDVHSTNYTLCAMEPTIGSEDRIFGEVQVGPDYKAVIYFIESLKMKLGFYDDYSIECGYEAGCLGYTLYHQLTNAGLKCVILAPTTMLTQQGQRVKTDKRDARLIAHCLCYGGYHPVYIPTGEDDAVKEYLRMRDDHKLALKKLKQQINAFVLRHGHQYVGIKWTIKHVTWLNKLELDPMYRETLSEYMASYEEQEAKIERYDKRIEEISAEARYQENVKKLGCFLGIRTHTALSLIVETGDFKRFAKGNTYAAFLGLAPGEHSSSTTVNRLGISKAGNAHLRCLLIEAAKGICKGAIGHKSKELRSRQSGQSGEVIAYADKANTRLRSKYYRMIRHGKKKNVAVAAVARELACFIWGMMTGNINISSEAGTSVPAVSQV

SEQ ID NO: 50284 - protein, 335 aa, unidentified
MYYAGLDVSLNETFVSIIDGEGAIVAEKNVSTNVDELSAYLKNISSTFKHIGIESGQLSIPLCKGLAQQNLPVICVDARHMATALSSRINKNDRNDARGIAQMLRAGLYKKVQIKSDAMCELKLILGSRRQLVRTKLKLMGTIRGLLKIYGIKIGTQSQFCDKTRDLIQPLSDFAKSPLEALLSCIEKNEKALKKLENKLITMGKKDEDCKRLMTIPGVGIITAMTFKVTLDNPERFKHSESVGAYLGLTPRQYASGEVKRQGSISKVGSKECRAVLYEAALSLLIKVKKPLKLKSWGLKLAKKKGNKKAFIAVARKLAVIMHRILIDKKDFCDQ

SEQ ID NO: 50285 - protein, 347 aa, unidentified
MRFYTRQHRHYCGVDLHARTMYLCILSHDGEILLERNLRCDPQLFLRTIEPYREDLVVAVECIFTWYWLADLCAREHIPFVLGHALYMKAIHGGKAKNDRIDAHKIAALLRGGMFPQAYVYPPEMRSTRDLLRRRLYLVRKRGQLLAHIQNTHHQCNLPEPTRKILYKANREGVAEKFTDPSVRRSVEVDFELVAHYDQLIRSLELFLVRTAKQHDPQSFQRLRSLPGVGKILALTLLYEIHDIHRFPRVQDFASYARLVKCSKESAGKRFGTGGRKIGNVHLKWAFSEAAVLFLRNNPKGQALLAKLRRKHGKGKALSILAHKLGRVTYHLLQRETVFDMTKFLAA

SEQ ID NO: 50286 - protein, 482 aa, unidentified
MKKRNIFQNRSQQLLRLFEKAGNRLKMMCVPIDYAKKDHMVMFCNGYGDIMRKPFSVKNTLEGVKYLIDQVMRSCRQRHIKKEYVFFGGEDVNSYAENFANALRTKGFLVANVNAHDAKKQRENLQASTDRIDLMGIAMMLLNLRAKCSPAQDGIYRNLRTLVRHRKKLVVMKTEVKNRVHTLVDRLFPGFLNEKNTGINAFSKSSLALMEDRFSAQQIRRRQKSTLIKILKRCATPDAEKIAAKLHSYVTQVITTPDEYAATLQLSLQHHIKHYRCLQENIDQLLSEIALVLAQTQAAFLTSIKGVGIVLAAGVSSEIGDPFGQKPLNNLTSYCGIIPRVKQSGGIEGHTHTGRVSKRSNHLLKDYVVQSAFHIGIRGPQPLLQDYKRRDAAGQHADFGIGRRFLRMAMCLMRSSQVYLPPKLRNPKTQMQERAGYYLTAWPLLRDKWKKAHAHQAAFAKDQPLGQWRQMVQELYDIKLKL

SEQ ID NO: 50287 - protein, 367 aa, unidentified
MKKGSTAAARQSRNISRQQLTVGLDVGDRNSWYCVVDEGGQIQLEQRVRTNAKGLREVFGAMPRSRIALEIGTHSPWISRLLRELGHEVIVANARKVRLIGESRKKDDRLDAQTLARLARIDPELLYPVKHRSAQAQADLMMIRARAALVRTRTGLVNTARGLAKSYGERLRSCNVRNMDAEKAESLSPELQAALEPLLAAIESVSERIVDYNNRIEGLAQQRYPQVELLKQIKGVGTLIALTFLLTLEDPHRFGKSRDVGGYLGLQPGRRQSGQSEPQMHISKEGDPYLRTLLVQGAQHILGPFGIDCDLRRWGLKLAERGGRNGKKRAIVATARKLAVLLHHLWVSGEVYEPLHNSSRVPVAAAA

SEQ ID NO: 50288 - protein, 476 aa, unidentified
MVVPNEEPKKPTKPKKPAKPRKSRERSLPVPVPVSAAALHVINPDAAGIDVHSDMHMVCVPADRDANPVRQFGANTADLQEIVAWLKKCRVRTVALESTGVYWIPLFELLESEGFEVNLVEPGQLSRCGARPKTDVLDAQWIQRLHSYGLLRASFRPPDSVLALRAYWRQRQMQVRYAASHVQHMQKAMEQMNVKLTEVVSDITGLTGMLIIGAILEGERDPIKLAQLRDRRCQHSEEQIALALEGTWRPEHLFELRQAHELYQFHHRQITECDQQVQAELANFPNRAGEKTRTVKRRKRGRKSNDVRFEATGPLFQALGVDLTSIEGIDVGTALVILAEIGVDVSRFPTEKHFASWLRLCPPQDESNKTKKRRGHRKGTNRVTIALRMCARSLGKTMTPLGLFYRRIRSRIGGLGAVKATAHKLACLVYRMLKYGQQYVTQSMEEYEAKVKANMLKALKRKAAAMGFQLSPLPTQ

SEQ ID NO: 50289 - protein, 349 aa, unidentified
MKIMALDLGKCNTVFCDYDSINGEHAFGTVKTTPQQIHDLLVEKEPDRVVMEVCSIAGWIVDITEALGKESEVANPMHDAWRWKNVKKKTDRDDALKLARLSAMNQLPTVHMPKKAVREKRALLKHRQRLVKYRTSLKNAIRAIFTREGIPMMRGQMMWSCKGLAWLQSQAKELAEISDATELWRGQLQMDLKLLQAVNDSLKTVESKLNQMAASDKRIQRLQKIKGVGPRLAEAVVAFLDDPKRFKNGKQVGSYVGLVPRQYQSGQMERQGRTGGRGNLMLRNLLVEVCWVSLQSNPWARETYHRLLRGTPSRKKIAITALARKLVIRCWAMLRDEQDWRDHIPKRVA

SEQ ID NO: 50290 - protein, 341 aa, unidentified
MQITTIGLDIAKNVFQVHGIDGDEKVVVRKQLRRNQVLQFFDELPPCLVGLEACATSHYWARELARLGHEVRLMPAKDVKAYIKRNKNDAADAEAICEAVRRPTMRFVQIKSADQQAQLMQHRARDLLMQQRTQLINAMRSHLAELGIIAPQGREGVKELLAIIAHDDNRHLPVDARASLVVLAAQLQALQTMIGTIEKRIVKQHRASKESKRIQTVPGIGEIGASAIAATVTNPRIFRSGRDFAAWIGLVPRQMSTGGKPKLGPISKQGDRYLRRLLVVGAISVLRQAKLHPGKFPWVTQMLARRPFKVVAVALANKMARTAWALMMSGKTCRAARYAAA

SEQ ID NO: 50291 - protein, 339 aa, unidentified
MKYTPVGVDIAKHVIQIHFINEHTGEVVDKQLRRQDFLTFFGNREPCLIGMEACGGSQHWARELTKLGHKVRLLQARFVKAFVMGNKNDVMDARAIWMAVQQPGKEIAVKTEEQQSVLVLHRTRMQLVKFRTAQINALHGTLLEFGETIHKGRAAMEREFPEALERMKERLPPYLIMVLENQYNRLNELDSLIEDIEKQLTSVARQNETCKRLLDIPGVGPLIATAAVATMGEASAFKSGREFAAYVGLVSKQTGSGGKVRLLGISKRGDTYLRTLFIHGARAVALVAKEPGPWITELKKRRPASVAIVAMANKLARTVWAISAHDRKYDRNHVSIRPY

SEQ ID NO: 50292 - protein, 391 aa, unidentified
MVCVGIDVAKDKHDCCILDSEGTTLVDCFTIPNNMDGFKSLLQTIQDCSQKSDKIKVGLEATGHYSYNLLGFLLDNDLPVYVMNPLHTNLYRKSLSLRKTKTDRVDAKTIATMLLSDVDLKSYTDTAYHNEELKSLTRYRFDKVQERAKLKQSVSRLVTILFPELEQLVSSIHGTSIYALLSEYPGAKQISEAHLTRLANILVKTSRGHYRKDKATHIRDAARTSIGSVMPAKSLELKHTIKLIQELTSEINEIEDAIRKIMDELKPPILSIPGMGFHSAAMILAEVGDFSNFNSPDKVLAYAGCSPSTYQSGKLTNCYAHMEKRGSRYLRYALYTATKYVCYWNPVFTEYLTKKQAEGKHYNVALSHATKKLVRLIYALQKSGKAYLAVT

SEQ ID NO: 50293 - protein, 357 aa, unidentified
MAIVGGLDIHRKQLTFDYVDTETGEVCAGRIAPADRAHLADWLRGRFGGRDEVTFAVEACTGWRYVAEELAAVGVGVLLAEPADTAAARGPKRRAKTDRADARLLRGLVAEQRVPACWVPPTRVLEDRALLELYHDLRREHTAWVQRVHAVLFHQGAEPPGVEVGGEAGQARLAELSAGLSAAGQVQVATALRMLQAEEDELAAVRRRLEAEARHLRGARLLADELYGVGPVTALALTCWLGGADRFTSSRQAVRFAGLDVTVYSSDGRRSPAHLSRQGPPVLRWCLFEAGKTYARSTAPDHAYYAQAKDRLGGKQATLATARKIVRQASHLLTALGDDAFAPALPRPRRAAPPQAA

SEQ ID NO: 50294 - protein, 364 aa, unidentified
MQESTHIGLDVHKETIAVAVLRPGTGECDERVIANTPAALRKLFARYPDRAALHACYEAGPTGYDTWRLLDSLGVPCEVIAPSLIPRRSGAHVKTDRTDARNLARLHRAGELTAVRVPSPSEEALRDLVRAREDLKDDRRVARQRVKSFLLRYGKRPPTGSGRWGVRYELWLQTLAFEEPAAQAAFDHLMGAASVRAAQLAAIEREIEAATLSGPLEGPVARLRAFRGIDTLTAVTVVTETCDFRRFPTASAYMAFTGLVPREHSSGATRRQGSITKAGNAHVRRVLIEAAWAYRHRPAVRGKLAVRQEGLPPELLAYSWKAQTRLHGTYRKLAAWRGANKAAVAVARELSGFVWGAMTGRTGA

SEQ ID NO: 50295 - protein, 422 aa, unidentified
MQNTAARKLKQVPEGYLIVGIDPHKKKHAAVAITQDLTIRDRFKFDNTREGLEFLVRRVRTEMVKSDCRGVMFAIETGGHYWRNVAYFLDEQGIPFRFINQYTLKRRREGKDLNHRKNDYRDSEVAAQLLCTGEFVESTIPQGVYAELRTAHNAYRHLVKERTRITNLMKGLLDGLFPEFVQVFKDPCAVTALCVLSCCVVPGVIAGMTQDEFVAAIEAHYQGRRLMRRKLGALHQVAKASIGIAAGARSVASEISFLVEKLELIKGHIGTIERTLVRLVDETEEGKYLLSIRGLNYIAVAGLIAELGCFRSYRTAKQMIKMAGSNPTESESAGKRGAHTPMSKQGRPVLRYCAWTSVIPMLRFNADFRAWAKQRRERPVYANPLGGREVVGAALNRLLRLAFALVKNQTLYRSPRLATVTS

SEQ ID NO: 50296 - protein, 320 aa, unidentified
MDDLLEICGGLDVHEKVVVACVLNGKLNKKPIKEIESFETNTQGLLKLLDWLEERKCSQVAMESTGVYWKPVWNILEAGSFELILANARQIKNLPGRKTDVKDAEWIAQLLRSGLVSKSFVPEEPIRDLRDLTRYRKKLVYSINTEKNRVHKILQDCNIKITSHISDIFGDTGRQILNSILDGKKIGAQEIEAMVQGRGKWKLQCKIEEIKKSLIGNVREHHRTMMRYSYDHIIFVERQLIEVERKINELLMPFMQEIEILKSIPGINDNSAAVIIAEIGVDMEQFPSDKHLSSWGGLSPGNNESAGKKKEAQQLKAINI

SEQ ID NO: 50297 - protein, 354 aa, unidentified
MSQDITLTVDYHDRACVIRRLDRPSGREQVLREVPTTPDALAQVVDQARRAAGPRRRVIWIQESTTGWARVRALLGDRVEFLLANVLQMPAPPKARRRKTDAVDTERIQREYLDGRLPLAYQPPPEWRQLRRLVAWREGLVRRRTALRNWVDRYLAHETWHDRVGLWSAKGQARLRALAGQLPGTDGLVLGHKLDELARLEEQLGVAVAALTAAYRDCPDARRLDAILGLDVVGSISVVARIGPVGRFRTAEQLIAYAGLAPGVEQSDRTRRDGRIGGGGTDRHLRHYLIEASVWARKLPRYQPTYDRIKNRRGSKVGRLVVARMLVRSIFKVLKEGVAFDPGGVPPAAPGAAR

SEQ ID NO: 50298 - protein, 356 aa, unidentified
MTGQRKELNFEGQNIYIGLDVHKKSWSVTILSDVLVLKKYSQDPSPDVLYAHLVRNYPGATYYSVYEAGFCGFWIHYRLTELGIHNIVVNPADVPTTAGEKIRKTDAIDSNKLARSLRSGDLKAIYVPDNVSLEIRSLIRLKDSMTKDQIRQKNRIRSFLFLHGIEEPTFSTSHWSSRFITWLKEVSMKTTCGREALDIMINQLETLRKQRLELLARLRTLYKSDRFAEPLRLIMSVPGIGQLTGMALIAEIDDIKRFKSADNLASYIGMIPMCHASGDHEGIGDITIRKHSKLRPLLIEAAWTAARQDPAMQFAYAAYCKRMKPQMAIVKVARKLVNRIYYVMKHEQEYVNSIVA

SEQ ID NO: 50299 - protein, 337 aa, unidentified
MKYCGIDLHSNNSFVVVTDETDKVLTSRRCPNDLQRILALLSPHREDMAGVVVESTYNWYWLVDGLMAAGYEVKLANTVAMKRYDGLKHSDDESDAAHLAHMLRLGILPTGHIHPPEERALRDLARKRIQLVRTRTQHVISVENILARSTGSRLSSAAIKRLAVEDTDTLGLAPDVSLAVQTSLAVIHTLNLEICRLEERLLESVKLRPDYARLLSIPGIGKVLATVIMLETGDVSRFAKVGNFASYARCVDSVRLSNGKKKGEGNTKNGNAYLVWAFVEAANFARRFNEEARRFFDKKKARTNSVVATKALAHKLARASYHVLKEGQPFDVKRCFV

SEQ ID NO: 50300 - protein, 402 aa, unidentified
MTYDYVIGMDVGKYFHHACVLDIDGTQVLSKRINQNEKSLRALFSTFSAHDHKVLVVVDQPNNIGRLTVAVAQDLGIDVRYLPGLAMRQLSRIHAGNAKTDIRDAYIIAHAAKNLPESLRSVDRVEEAFLQLKVLNGIDEDLARSYTRLINQIRSALVGCYPQFEQALRGQIIHRKWVLHLLARYGGPTKIKRLGKAKAAAFARRYKARNPEPVLDAIFAAISEQTVDIAGAHYAEMGVAMSAKDALLKLEHRKQIEQEVIELINDIPHTQILLSMPGIGPKTAGQILMAAGDMSDFPTAGHLASYAGLSPRTNQSGTSIMSNALNRAGNKKLKNALWQSSFASIRFHERSRQFYERKRREGKRHNAAVVALARRRLNVLYAMMSNHEHYRDPDQSQEVKAA

SEQ ID NO: 50301 - protein, 337 aa, unidentified
MEQYVGLDVSQETTSISVRQDGRRVWRGKCPTDPKALSEVIRKHAPHAVRVVFETGALATWLYHVLQAENLPVVCIDARHAKAALDMAPNKTDANDADGLAQIAEIGFYREVRVKGYGPMLTRTLVGARSQLLRISVQLSNQIRGIMKTFGLIVPKGAGRIFERNARALLETNEAVARVVLPLLETWQVVRARAAEFDRQLIAAARTGPSYRLLMTIPGVGAITAVSFVAAIGGPENFKRSRAVGAWLGLTTRRYQSGETDYDGHISRRGDRYLRALVYEAAVAVLTRTRTDCALRSWGLKLKAKVGFKRAAIAVARKLSVIMHTMLKTGAAFAAAA

SEQ ID NO: 50302 - protein, 401 aa, unidentified
MTSVGIDVSKGKSTVCILKPYGEVVVSPYEIQHTEPELHSLVSHIQSIEGDVRIVMEATGAYHLPLLSMFKDAGFFVSVINPLAMKRYASTAIRKGKTDKLDSVRIANYGIDNWFKLVDYMLPDELYAQLRLLGRQYAHYITICIESKLALTNLLDRTMPGIKTLLSGKRSEEPTKDKLSDFVAEYWHFDNITKKSEAQFIRSYYAWAKKKGYHAREAKAKAIYALAYNGIPTLPSSAASTKMLTLEAVRVLKEVNKTLETILTQMQELAITLPEYDVVRAMNGVGDVLAPRLMAEIGDVRRFHSGSALIAYAGIDSPPFQSGSFTGTCRKISKRGSSLLRKTGYEAMKCLKTIKPTQDNAVYLYMLKKESEGKPKKVAKIAALNKFLRIYYARVSAVYAG

SEQ ID NO: 50303 - protein, 325 aa, unidentified
MSEITTIGLDLAKHVFQVHGIDAQGTTVLRKRLRRGQVLAFFSRIPRCVVGLEACATGHYWARELRALGHEVRLMPAQYVKAYIKRNKHDAADAEAICEAVGRPTMRFVPVKTAEQQATALLHRGREQLVRQRTMLVNALRAHLAEFGIVAARGLRNVSQLIAIVRDDADIRLPAVAQQVLQVLANQIEQIETAVAALERQLLTWHKTNPVSQRLTSIPGIGPIIATAIATTVADPRVFRSGREFAAWLGLVPRQNSTGGKTRLGGITKRGNRYLRRLLINGASANLLRSKATKADPWVIGLRRRRPPLVVAVALANKRRVSPGR

SEQ ID NO: 50304 - protein, 458 aa, unidentified
MAKKAQKIKKGKRSELLMVNLNAAGIDVSSTEYQVCVPEDRDDDCNRRFDAFTCDLHSIARWLKSCKIKTVAMEATGVYWIQLFMVLEGYGFDVVVCNAKHIKNLGEKKTDHVDAGWIQLLHTYGLLTESFQPENNIREIRGLNRHRDKLIERCNQSILRMQKSLDMMNIKVHKVISDIKGKSGLALLQAICQGEKRPEELIKLVNQRVKATKEELLKSLEGNWTESQIFILKQNLDSYFYTKKQIKELDSKIEDMLKVYVSFIKKNKKDTEDKELIRSKKKMDANNAFHFDAEKYSHEILGVNITRIAGISGLTAMKIVAELGVDFTKKFPTDDKFSSWLNVAPNNKISGGKLLSSKIPKRTNYVGQVLRVAANTLKSNKGYLGDLFRAKKARLGYNQAVVAVAHKLARIIYKMVKDQVEYDDQIEIEKNKLNMAKRVAYYQKKMEKSQKMLLAMPS

SEQ ID NO: 50305 - protein, 395 aa, unidentified
MKRQENKACGADIHKRFLMACILSRDGSKVLNRFDMTVEGVLGFASWLKDNNCKKVAVESTGNYWHLVYQVLDDEFEFILGNAFKTRRHSGAKTDKRDAEWLAELCLNNQIEPSMILPKEDRELRALTRARKGYVDFRSKLKARTIQELEACTIKLASELSDVFGKSGRHVLQGLVDGRSADVIVESIPSKKVKKNKEKIKQAIIAGLSPISIFLIKSHIQMIDEVDKKLVQLDAQISRLLKARKRDVEIAMSIPGIGFVSAAAILSEIGDYRNFASGKKLAAFSGLDPSVYESAGKRYNGKITKMGSKYLRRMIIECAHALSRTKAKTQLKRFFLRIMARRGKNIATVALARKMLVVLHHLLINQEMYKDDGLAKPKNVKVSFSEESKLDPSSL

SEQ ID NO: 50306 - protein, 360 aa, unidentified
MGKYSTEFFVGMDVSDKSVEIYILPKDGEDGKALKVKNDQRSLTGFAESFERPSSVKLALETGTHSSWQAELFRSKGIETIVANARDLRMIWGSNKKDDREDAKKLARLLRADPKLLHGVEVKAKERRNALAVVKARDCLTRCRTKLINTVRGLLKAEGVDSSEIKADGFGAKAGELIPVELRVALRPLVEQIAKLDVELKSYDKQLTRMMKAFDGCKEVSQIKGVGPVTSLAFVLTVGEPGRFQNGERLSSYAGLAPKRDQSGETDKQCHISKAGSKLLRRNLVQAAHYVMGAFGDKDCDLRKFGERIAARGGKNAKKRAVVAVARKLAVLMLKLWKSREKYEPQYSKRKEQPGKDKAA

SEQ ID NO: 50307 - protein, 413 aa, unidentified
METYKIAGIDVHKRMLAVVVSDAAVIGEFQFQRRKFGADAAELEQLRRWLAEQDVREVVMESTAQYWKPVWQSLEGHFRLQLAQAHSNRAPKGRKRDFSDAERLVRRHVAGELILSFVPDQEQRMWRMVTRTRRQLKGDRVRLQNQLEGYLEQIRIKLSSHVSDLLGLSARRMLEALAAGETEAEKLAGLASRGLRATAEQLQDALSAAATLTPLQRGILKLFLERLELLDKQIDSLEQSAAEALRQHENAVRRLAEVPGLGADSAHQIIAEVGPCAATFDSAEQMASWVGCCPGREESAEVSKSDSSPKGNRHMRHVLAQAANAAVKAKGSVFEILYRRLVARRGHFKAIWAVAHHICRIAWKILHDGVEYEERGCRTNPQAARQRANRLVRNLRRLGYQVQLTTLNPEIAL

SEQ ID NO: 50308 - protein, 441 aa, unidentified
MLTGQLINLLHGVFLMKKYTQNDKIEQVTEKTLVVGVDIGSVKQYARAFDYRGREIDHVYRFMDCRDGYELFLDWMQGLQSANGMDRIIVGAEPTGHYWFGLRDFLDAAGIQLVLVNPLHVCKSKELDDNNQTKNDQKDPKVIARLVMEGRYSIPYIPHGVYAELRGMWILRQRVVDEEVKLRNRIARWFKIYFPEYTQAYSSFAAKSSIALLKAACLPEDILQLGADGIVELWRAIKLRAVGKKKAESLLAAAARSTGQKDGADAARMEMEMLLEDWGVLQKRHEKIDAKLRELCEQIPESKNLLAIKGIGLTTVAGFLAEVGDIQRFDSPKQIVKLAGLALRENSSGKHKGKTTISKRGRARLRRLLFAGAMPLLATNDAFHSLHVYYTTRQQNPLKKKQSVIAICCKLVRIFYALLTKGTAFDSRKMLGDIHRPPLAA

SEQ ID NO: 50309 - protein, 312 aa, unidentified
MAMLSFCGIDVSKDRLDVVVLPEGWFFSVSNDTAGWAELVGRLRPLAVSAIGLEPSGGYERGIIRALLAAGLSVRRINPNKLRQFARARGVLAKNDRLDARLIAEYVAIMPTRVVQRDAAVERLAEIVTMRRQLCDEHVAAQNQAAHLEDAMLRRLSKRRQTRLEADIHLLDKRLAEMVAADVALAQRYELLTSMPGVGPVLAFTLIALLPELGKMTRKQIAALVGLAPYDFDSGKLKGHRSIYGGRMPVRNVLYMAALSASRYSPALKAFHNRLAHANKKFKVIIVAVMRKMIITLNAMLRDNAAWQPQSA

SEQ ID NO: 50310 - protein, 359 aa, unidentified
MDTIVAHTHPFVIGVDTHARTHTYAVLTAAGQHLGTETFPNAAAGRSRAINWAGRRSGGVTDALWVIEGAGSYGAQLARNVADTGYRVVEAARMGRTGRRGIGKSDPLDARRIAAAVLSLPVNQLRTPRQDEGVRAAAQILLTARDGLAAERTRAVNALTALLRIIDLGIDARRPLGARKIAEVARWRTREEALAATTARTEAIRLAKRILELDTELGQNMTRISDLVAASPAAELLEKTGIGPVTAARTLVAWSHPGRVTSEAAFAAIAGVNPIPASSGNTTRNRLNRGGDRQLNRALNIIAMVRMVHDPGTHDYVERRRAEGKTDREIRRILQRYLARSIYRHLNTASATKLGVDEI

SEQ ID NO: 50311 - protein, 399 aa, unidentified
MMYQQFCGIDISKDSFDITLLNSNGEIKLQDKLLMNRDGFNALLKHLSSYPKEKLLVAMEATGIYHLPLLSFLLENSFKSVVINPILIKSFIGSTTLRKTKNDKKDATSIALFSLKSYQSLHLATTDAIENIRPLIRERETLSKEIARLKTEIKAILTQLFPELSKNTNIFTRSILNLLLKAPSRKAIRNLKKQRIQKILDDTSGNKVRISADEILSLAKNSIAISDKYLEKVLTSKIRRLISIQDELSFLDEELQNSLEDTDINDDIEILQSIPGIGSVTSKNFMIEVSSVEKFKSVKQLCAFIGIDPSVKQSGTSINYRGKISKRGNANLRRTIWQMAIGVIRSCDKFNAYFSKKREEGKKFKQAVIAVANKLLRTIFVLLKNKTKFDENLASGVSK

SEQ ID NO: 50312 - protein, 339 aa, unidentified
MEVTTIGLDLAKNIFQVHGITKDEEVAFNRPLRRAQLLPFFSKLEPCLIGMEACSSAHHWGRKLTALGHDVRLIPPIYVKPYVKRGKSDAIDAEAICEAVTRPTMRFVAIKTVEQQALLSLHRARSLLVRQRTQLINGLRGMVAEFGVYIARGLARVIGFAEDILLGEVLDLPEIANEVIHNLCEHLMALHTRVRWYENRLKLVAKEDARVRLLRTIPGVGAVTASAIIASIGDGHQFSNGREFAAWLGLTPANKSSGGKEKLGRITKMGDQYLRSLLVVGMTSLVRQTKSHPERASKWLISLLERKPARLATVAMANKTARIVWAVLTRNEPYTPHTA

SEQ ID NO: 50313 - protein, 429 aa, unidentified
MEEVDELELLVERVAGLDVGKAELVACVRVPHPSKPGRRMQEVRAYATTTAELVVMAVWLRQHRVQRVVMESTGDYWKGIYYLLEAEGLNCWLVNARDVKNLPGRAKTDSLDSIWLAKVAERGMCSPSLVHPEPIRRLRDLTRYRRALVADRGREMQRAEKLLEDAQIKISSVLTEVHGVSGRAMMEALIAGKRDPHTLARLARGRAKVKTAQLEEALRGFFTDHHAVMLRMMLDNIDRMSAQISALDGRIEEAVARFSDRVDRLVDLPGVDRVAAAELIGEIGVDTSRFPTAAHLVSWAKFCPQTHQSAGKTKRKGRGKGNPWLGGTLGRIVFGLSRTDTFLGTRYRRLAKRRGKQKAIVALGNSVLTVVYHLLADPEARFDDLGPGFYESRINTNRRARNLATQLQAITGQKIVIRDGKAVIAESAA

SEQ ID NO: 50314 - protein, 412 aa, unidentified
MEVIYARCCGLDIHKQTVVACVIVPGPERQPRKEVRTFGTMTADLLALSDWLAAQGVTHVALESTGVYWKPVWNVLEGSFELLLANARHIKAVPGRKTDVRDCEWIADLLRHGLLKASFVPDRGARELRELTRYRTSLVRERTAAANRLQKTLEGANIKLAAVATDILGKSGREILAALVAGSTDAAALAQLAKGRLREKLPALERALVGRFGAHQRFLVAQQLAHLDFLDAAIAEVSAEVAERLRPFEDALTRLDTIPGIGRYVAETLVAEIGTDMSRFPSAAHLASWAGMCPGNNASGGKRRRGKTRKGSPWLRALLVQAAHAAARKKDTYLAAQYRRLAARRGASKAAIALGHTILVIAYYLLRRGTEYQELGPRYFDEHDRQAVERRLVRRLEALGNKVTLEPAHPAA

SEQ ID NO: 50315 - protein, 390 aa, unidentified
MWEVDEHQPNTEPKPRRQAMKDNSTFIGMDVHKNSIDIAIAKKGRSGQVVHYGKIDGTLSAVDKVVRKLVSKGNDLHFVYEAGPCGYQIYRHLTAQGLDCSVVAPSRVPKQKGDRIKNDRRDALMLARLHRAGELTCVFVPSAEDEAIRDLTRAREDAKGDEKKSKQRLLAFLLRSGHRYTGRSLWSRAHMRWLSDIKMPHRAQQIVLQEYIDTLNQRKERVQRLTDQIRQLLSSWRLFPVVQALQSLRGVSLIVAVTTVAEIGDLKRFQNPVDLMSYLGLVPSEHSSGPKTRRGSITKAGNGHVRRVLIEAAWAYRLRARVSRELLKRQENLPQNIRDIAWKAQLRLCSRYRRLWAKGKAKQVVVTAIARELCAFMWAIANETDLPDAI

SEQ ID NO: 50316 - protein, 357 aa, unidentified
MTNPTPAARLILALDLGKYKSVACLYEGDPATARFVTLTTDREHLARLFTQDRPAIVVIEACTLAGWVSDLCDELGRPCQVANTASEAWKFKHAQRKTDRDDALRLAQLQALGQLPTVAVPDVQTRQWRALIAYRQGQVGRRVALQNRVRAVLVGQGLPAPRGAKAWTVRGLQGIAQYARPLADCADEELWRGLLHAALAELAQVRVRIDDAEAKLDTLAKRRHAVHVLETIPGVGPRTAETVAAFLGDPHRFDNAKQVSAYGGLVPRPFPSGESDRRGRITRRGPALLRQLLVEGAWVMLRYNAWARSVYQRLTRGGTTRKKQAIVALARTLLVRCWAMLRDDTPWRETPAAAPAC

SEQ ID NO: 50317 - protein, 355 aa, unidentified
MQRNKISFKGQNIYVGIDVHLKTWHVTTLTESSCKYSFAQHADAKELFDRLNKKFPEAHFKSAYEAGFCGFSAHYALMEYGIENIVVHAADIPTTGKEKALKTDAVDSEKIAWALKRDELTGIYIKDKRYMDDTNLVRLRKRFIMDLSRQKNRTKHLLHTQGVTYPERFRNNRTHWSRNFMKWLREEVELLSEQKQSLILLCEQVENTRKAVLKVTREIRRLSTTDRYKENYDLLMTVPGLGLITSMSMLTELDNDIMRFPNERSFVSMLGLIPTCHDSGDKKVSGEKINRGNKHLGPLIVEASWVAIQRDIELSAYYSSCCQSMKPHKAIIKVARKLACRAYAVLKTKTRYVLP

SEQ ID NO: 50318 - protein, 403 aa, unidentified
MKSVLSVDVANGKSIVLLITEHGEILIEPYEIKHCLSDFNLLKKKIDTFKIDNLTIFMESTSTYHLPVQRFFTKNNYNVQVINPILGKNNTRNLRKTKTDIEDCYNLADLFFKNTIKIHTKNMNDIYSSMIELSRQEKHLTESLVRSKNRFKQIIANSFPEYIKCFTANDVFGKTSLNFIKEFPHADIIKERRIDALANNLYKSCKNGCSYNRCLIKAKKIKELANNSYPGIDKNSYEVNNLINIVEIISYSDFKLNEVKQDIVKLAKQTPYFDIINSIYGIGETSTAQIIAELGDINRFENIKQLNAFCGLDPTIIQSGKSINYHGPISKRGNRNARKILFITCCSIIRASVLHNVDSEILLYYRKKQAENKHFKECITACSTKLLRIIFAMCKNNSLYVQK

SEQ ID NO: 50319 - protein, 445 aa, unidentified
MDVVFPHCAGLDVHKKRITACRVSPDPTGQDADGVLEVQDFGTLTIELLALSDWLSQVGVTHVAIESTGEYWKPVYNLLEGTFTVFVVNAAHVKNVPGRKTDKADARWLAKLMRYGLLQASFIPPQGQRDLRALTRYRTKLVQERSREVNRVQGVLERANIKLASVATDIMGVSGRAMLEALIAGRADAATMAELARGRMRTKIPVLAQALTGVVRAHHRRLLAIQLAHIDFLDEHIATLSEEIQHVLSTLCPSAPPGSTTDDAGAPPTVPEASPSAPPMTFLRAITLLDSIPGVNQQGAELLVAEWGIDMERFGTAPRLAAWSGIAPGNNESAGIQRSGKTRKGNRALRTGLVQMAHAAAHTKDTYLSALYHRLAARRGKKRAIVAVAHSIVRSAFHMLSRHEPYHELGGNYFDAHRREHLVDRLTRRIERLGYRVALEPAVTP

SEQ ID NO: 50320 - protein, 450 aa, unidentified
MAKRKAVFELKFPNAAGIDIGSSSQFVAVPADRDDTPVREFPSFTVNLCGIADWLTACGIDTVAVESTGVYWIPLYELLESRGFTVYLVNARHVKNVPGRKSDVLDCQWLQQLMSYGLLTRAYRPTDDICALRAISRQREMLLSYQSRHVQHMQKALVQMNIQLGNVITDVVGDTGQKILRAIIAGERDGQVLARFRNSRIRASEDDIAKSLVGNWREEHLFALKQAMALYDAYAERLAECDQELGSMLARLGWYDADPGKPKRRSHAKNAPRVDVRTYLFRMCAVDLTRIDGIDTTTALKVVAEVGPDLSRFPTSKQFTSWLGLCPGTKITGGKRLSGKTKRTANRAARALKTAAASLLKSQSALGAYYRRMCARLDKSKAITAAAHKLARLIYAMLTKGSEYVDRGQDYFEERYRQRVLHHLKRRAESMGFKLEPVTVAENNFVHSVT

SEQ ID NO: 50321 - protein, 399 aa, unidentified
MLIVGIDWSKSKHDLALMEPDGTVLQYLVVKHSLEGFEALAVAIGRHESDPGEVHISVEQHDGALLAWLRAQGYIVHGINPKSSQRARDRYRPAGAKDDRSDAYILADMLRQDRGNIRPLGRESQTPAELRTLGRLRARRVQERTSPMQQLRALLDDWCPELGSLCNNFGNIAWQRDFLRRFPLLEDLATAHVRTVNAFIRRHRMRATTADRIRELRKCRGLPIPAGREPALRLDIAFLVDQVERLTEAIRTIELQLQQLIDQHPDAEIFQSLPVKGLVSISGLLGGFAGQDAPRHAELAARWGVAPVTIASGRSRFVKYRRACDGYMREVLMFFAFNTAFRPDCWAHDYYRRKRAAGATHYGALRCLAQRWLKIICRMWTDKTTYDEQFHRRRLSLVS

SEQ ID NO: 50322 - protein, 361 aa, unidentified
MSESMALVGLDVHRAQTVAAVLDPVNGELRVQRLRGEPDHVVPDFLEELDRPVRAVYEAGPTGFVLARVAEERGLDVRVVAPGSIPRASGDRVKTDRRDAKRLVRLFAAGELSFAFVPSETDERFRDLVRCVEDARKDLMRSRHRLSKFLLRRGVRFPCKAWTQPHEQWLLTLRFDDALSQATFVDYLSAVQALAQRRRALIWVLEEAVPNSSHARVVERLRCFRGIDTLTAAGLCAEVGDFRRFAKPALLSGFLGVVPSEYTSDDKRVQGQITKAGPANARRLLVEAAHHYCHRPAVGLGLAARQDGQDPRVVQIAWRAQRRLHERWIHLGQRRGKLAGTVAIACARELAAFCWEAATLD

SEQ ID NO: 50323 - protein, 344 aa, unidentified
MEHYAGIDVSLECSSICVTDASGRIVREAKVASEPEALVAWFEGLEIRPSRIGLEAGPLSQWLYAGMRKARFAVELLETRHVRDAFKAMPVKTDRNDARGIAQLMRLGWFRPVHCKSLPAQELRALLTARKLVQGKRHDVEMSLRGILRGFGLKIGQTTPRNFEGRVRELVEGHATLEAVADALLVARTTLAEQLNRLHKRLVSLARDDTRARLLMSTPGVGVLVALTYVAAIDDPGRFKSSKATGAHFGLTPKKYQSGETDVTGRISKIGDASVRTALYEAANVILTRPVKGSSLKSWAMRLALRAGMRKAKVALARKLAVILHRMLADGTAFLADKAATAAA

SEQ ID NO: 50324 - protein, 454 aa, unidentified
MAKKAKKVKTAKGAELRIVNPDAAGIDIADGIMQVCVPADRSKDNNRAFGAYTSDLHAISAWLRECGIKTVAMESTGVYWIPLFCRLQEDGLDVVLTNARDVKNITERKTDESDAEWLMLLHQYGLLKASFQPHNDAKRMRTLSREASSIVLRMQKAMQQMNIKLTLVLSDITGKSGIRIIEAILAGERDPKRLADLADIQCKTPKEEIAKALEGNWEEDLMFVLRQNYDTFKHYCTQLGECDAELEKLMENYRAEVAKVEDTSYSPAKKRRDYKKTRHTVGFDVERKAYEMWGVNVFEIPGISHLTALELMSELGHDFTRKFPSSKQFCCWCNISPNTKISGGKRISSHVPHRRNNVGLIFRSIASSLANAKNQLGNFYRRIRSRAGGKAAVIATAHKVAEIFFAMVANQTTYNPERVGIDEKVLLEKRITRYKHELERITGTHIEIGNACVP

SEQ ID NO: 50325 - protein, 342 aa, unidentified
MKLNTISIDLAKHVFQVMGFTNTGKTLFNKRLNRQQLIEFMQMQIKCRVVMEACYSSHYWGRTFESMGHNVGLIPAQHVTPFVRGNKNDSNDTLAIFEASSRPFIRFVPIKTTAQQEVLILHRLHEKLLGTRIATSNQLRGLLTDFGIIFPVGHKGFNEKLIDLCSDESLSETLRWLINDVYAEYTLLKKRIKAIEKKLKLEIEQHPLGKIVLSIPGIGYLNASAFIASIGNGQAFASAKDFSVWLGLTPKQFASGNKSIMTGISKRGDGYLRKMLIHGARAVVNTAGKKQDALNQWVCQLRERKSFNCTAVATAHKLARIMWTLLQKHSYYTPQIAKEITQ

SEQ ID NO: 50326 - protein, 349 aa, unidentified
MKIIGCDFHPSYQQIAMLDSVSGEIVEKALSHERKEEVRTFYAGLEGSVRVGIEASGQSQWFERMLAELGHEVWIGDAAKIRASCERKQKTDRRDAELLLRFLAEDRFPRIWVFTAVERDARQLLLHRHKLVRLRTQVKNQLQAQALNQGVQRKRKLWSEAGRKQLESLPLLPWASRRRAELLQLLDQLEASISELDRAVAEQASARPAARRLMTHPGVGPVTALAFALTMGPTERFQRGKQVASYLGLIPSEHSSGGHQQRLGHISKQGNPFLRGLLVEAAQSAVRYEPEMRRAYQRLAQRKCRALAKVAMARKLAVRLYWMLRLQVNYAQLIQGSHAGQSGTFCGRS

SEQ ID NO: 50327 - protein, 350 aa, unidentified
MTTIARRITGGVDTHLDVHVAAALDERGALLGVESFSTTPTGYRALVSWLETFGTLELVGVEGTGSYGAGLTRHLLSRKVSVVEVDRPNRQRRRRKGKSDPEDAVAAARAAQGGDATGSAKTRDGNVEAMRVLRVARSSARSSRTQAINQMRSLVSTAPDELRTELRDLSIYKVLQLASAFRHTGKTDVAAVTKLTLRTLARRALSLEEEVKEIDRLLKTLVAETAPELNAVDGVGTDVASALLVAVGDNPERLKNEATFAKLCGVSPLDASSGKQQRHRLNRGGERQANSALWHIVFTRMVNDPRTKHYIERRMKEGRTKKEAIRCLKRYVAREVFAQLPRSELALDNP

SEQ ID NO: 50328 - protein, 392 aa, unidentified
MDSPPPRHHSATVVFEEANGSEGETMKKHSSKHDSLSSTDVELCTTICVDLAKQVFQLAGEDATGRVIYEDRIKSRQAFHDFLLRLPTTVAVLMECGPGAQAWARLLQAKGNPVRILPAQRVAEHRSGAKNDRNDCYAILRAGRDTSIASIPIKSTTALAIQALHRIRRGNIKRHTALGNQIRGLLLEHGVSIPQGDAAINKHVPQALEDASLPLPDLLRELLDELLMDWLSLGERIAALSRRLEATAQEDKVAQRLITIRGVGPIIATAIVAKQTDPSRFASGRMYSAFFGIVPDQHSSGNKIRLGKMSKRGDGYIRSLMIQGAHAVLSQLRPDSDQPDDRRLLRWLSRLGRKEAAIRLANRNLRIIWALLQSDQVYQRKPNEKPEAAMSL

SEQ ID NO: 50329 - protein, 348 aa, unidentified
MLAEVVDAVVGGDTHRDTHALELTAPSGATIATLMIGNDERGFAEAIAWVAEHAPGPRVVVGLEGTRSYGIGLARVLQAAGLTVVEIERPRRGERRRGKSDPIDAHLAALHALRLDADRLPTPRADGDREALRILLGARRELTTAKTRTINRLRALLLTGSDTDRALSRGALTSDRLAAITRRRGGQHETREHAVRRAEARRLALAIGGIDRELADNKWHPADLVTHLTPQPLAKRGVGPVSAAQAIVSWSHPGRCRNDAAYAALAGASPIPASSGRIVRHRLNRGGDRHLNRALHDILLTRWRTCQRTRAYITRRRAEGKTDPEIRRCLKRYIARELYRCLNTAIAT

SEQ ID NO: 50330 - protein, 335 aa, unidentified
MVQENKENKIWCGIDVAKDKLSAALDVKPETHVREIAQKDFARTVSGVHDMLDWCSTLGVGQQDLCILMESTGQYSRELLQWFQNNFPGIHVSMGNPRRIKHFIDSCSLGNKTDRLDSMAIARMGTVQKPDKTPLPPAEYLQLQEMVRARDELVVKMRSLEVSCAAMPDQASFAASTLRHVVKVMAAELRKLEDETMNFVQRMPEIRAIVRRMCTMPGIGAISACTILSELGPFSPGHTRSMFSAYTGLQPVLKQSGTSVNSVKLSKSGSALLRKVLYLCSIHAIRKIPSLASLYSRILMKGRKPLTARCACMRKMLLILRSMVLNQRDFDPKYA

SEQ ID NO: 50331 - protein, 341 aa, unidentified
MDKELYFGVDVSKKTLDLAYYDGETIDWKNAHIKVSNDDAGFKKIGSWVAKVGKDFDTFLFCMEYTGLYNQNFRLWLESKEYIYGMVEPRKMHRFEPDLDDDQRSLDRIKTDELDAFRIAIYCEQNHKKILRNPSKLPSPVYFKLKRLLAERKQNTKQSTLYKQQLHDICAYDTDLSVERKKLQLKNMQENQKAIDREIDSYMNEDASISKNYDLLTSIPGIGRIIALETIVLTENFTAISNSRKYACYIGIAPFKKESGTSVRKRTSVSKKGFSEAKADLSIAVLSAIKNNPSIRDYWIRKRKEKCGGIVLNAVKFKLVLRMFAVIKRGTPYVETDAYKN

SEQ ID NO: 50332 - protein, 412 aa, unidentified
MKYYTSTTEFNCGIDLHARQMYVCVMDRQGKKLVHTNVLNNDFNFFLKLIEPYKHDLTVCCECMFGWYWLADACQGANLTFVLAHALYVKAIHGGKNKNDRIDSEKLTHLLRSNLIPPAYVYPADKRPLRALLRQRIFFVWRRSELLARIYSHQLAHNRTPAKQTRRVRDDWEQQLLAAEDNPLRQIALKNDLAMIKHFDQQIFQLEEELQRQTKKVASRDYALLQTVPGIGETLGLTILYEIGDIERFPTVKDFLSYSRLVKGTVASAGKIKGLRGAKLGNPYLRWAFGEAAVIAKRDHYVIKPLSQRLEQQMGGNKFKANTVVAIKLARAVYFMLKNKTVFDPERLVASMQKCFSPGRRQPARLTGCAKKTRPLPAADHSSCASSTPVCVGPASNPADSIGTCRQVLLSI

SEQ ID NO: 50333 - protein, 455 aa, unidentified
MPKRKTGDRPELKPVNVGAAGIDIGSKMHMAAVDPGCTDTPVRAFGTFTQDLHDLADWFKACGVTSVAMEPTGVYWIPADEILEQHGFEVILVNARYAKNVPGRKTDVSDAAWLRQLHSYGLLRGSFRPDAEIATLRAYLRQRERLVEYAAAHIQHMQKALMEMNLQLHHVVSDITGATGMRIIRAIVAGEPNPDVLATYRDVRCHSSIETIRAALVGNDRDEHVFALTQSLELYDTYQAKMLDCDRKLESLIAALSDKGAKPIGKLLRPRVKTKQVNTPSFDVRAALYRVLGVDLTEIHGLGPSLALKLIGECGTDLRAWPSAKHFTSWLCLAPGNKISGGKVLSSRTRRSSSRAAALLRLAATTIGRSDTALGAFYRRLSSRAGKAKAVTATARKIAVLFYNTLSHGMTYRDPGADHYEEQYRSRVLANLKRRAKSLGFVLQTVPCDIEVAVS

SEQ ID NO: 50334 - protein, 526 aa, unidentified
MASSNKHSKLRACDEGRYTSDGLKNVTLDDGTRVITSPSNDIKRPVCGAVDVHKSVLMAAACVTDGESLSAVFYVRQFTASNSDIRLMAEWFASYGVQDVCMESTGKYWIPVYDILEHNGIKPILTHPKYVKQAKGKKTDFRDAIHIANLFRMDLVAASFIPPADIRDLRELCRYRLKLTYIRTSEKNRFQNSMTISKVRLDSVFTDPFGKSASNIMSYLIQTDPDEVSDEKILSFVRRGVKASPEEILDSIHGYEFIGAQRDKLEVIQTHMDDLNKCINMIDEKLSYYRLKYSKVILHLVTMIGISEESALYILGEIGADMSVWRDSDSLASWAGLSPANNSSAGKKKTTKIGKGGHYLKPLMVQCALAAIKSTKKHPYFYYKYLTLKKRRGHKKAIIAIARKMLVAIYHMIRDDKDFAPIDYEQVVTRKQSQKELNLTNIIEFLGEHGVDPETIRTVETQCSQAGQAGEGTKTSKPKKSPQKKQPKSKTAATPTEQKPAKRRGRPPKSPQTKSQSSTQPAAVTA

SEQ ID NO: 50335 - protein, 316 aa, unidentified
MDNKSSVYGVDVSKATLVVGEYDSGSMFTLSNTPEQIARWVSSIAEGSIVAMEATGAYHQVLATLAHAARMRVYVLNPRALKHYAEAIGQRGKTDPVDTRMITRYAMHEHSKLFAWEPPAPGAEKLAQLLQRRDRLVTACQMVAQSLAGVSALKAQREQLLANIKRMIRNTELLMRAELARAPHLAEVHQRLTSIVGVGFVVAAQLVVALTRLRFPRLESFIAYTGLDPRPDDSGQRRGRRRLSKRGPQLLRCRLYNAGMAAAHSKLFKPLYLALRARGLRSTEAIVILARKLARIAFALYRSGETFDEAKHLQTA

SEQ ID NO: 50336 - protein, 364 aa, unidentified
MANLAVPVPRPHVRRPQGREPGRYYLGVDWADPTHAVWVVEADGSKIAAHTVPHTAEGLSEWGRELAQWRAQGVERWAAIERREGRVVDFLLDHGVAVYPVNPQALDRARDRFRQSGAKDDPVDARGLADFLRTDHAHLPALLPSSEAAQELKLLTEDYQRQIRQQTRLVNQLTNTLKAYYPRALEIAELTTTLAQEFLPAYPTPESLRSLPERTWQRWARTHRLNDARTRALWADLPPPQLPVPAHVVRAKARMMRSLVEQLTPVVAAVAEYRKAIEGFFANRPTAQWARTLPIGEHGITAPTLWARLGDAPGRWASFRHLQAQAGAVPVTKRSGKQQRVVQFRHACDKALRYVVEHVAFLSL

SEQ ID NO: 50337 - protein, 345 aa, unidentified
MVKRGPRHLCIHPEQLLGPESPHDKPGSARTLADLQFVGIDVSKERLDVRLHPSGKPLTVANTPAGFGSLKAKLQRLCIAAIGLEASGGYEKQAADFFATAGFVVYVLNPAQVRTFATSLKIAAKTDALDAAVIARYIATARDVLMAYQPDPARDRLSALAAQRRRLMGEAKEITSLLGTTTEPLLKRMHNRRLAVIARDVAELEAEIKTQINTDGILSQQAVRLLSLPGVGPVLTATLIADLRELGHIGAKQLASLVGIAPHARQSGKTTRSGKCARGRKSVRDVLYMATLSALKAKMPHLYPFYKRLREAGKPFKVALVAAMHKFLTILNAIMRDNSEFRHSH

SEQ ID NO: 50338 - protein, 358 aa, unidentified
MSHYRVGCDAHKHYSQFAVLDQDGQLRQQSRVDHEPGAIQAFLENLPEGTPVALETVGNWYWIADEIEAAGCLPLLTHAAKAKVMMGNINKTDKLDAKGLAKLLHLDSLPTVWLPPGEIRDERELHRTRMALSKLRTALKNRIHATLAKYGITSTEHSDIFVGTGRTWLQATLCRLPPETGRCVAQEIEALDGLQLQIAQLEERIRERIALTPSIQLLKTLPGVGDILDIVIDREVGSIDRFDTAGQFTSYAGLVPTVHASGGKTRFGHMRKPSSQYLKWAFIEAANVIVRHRHHPAWKTKYVCLVYDQVCQRRGHAVAVGAVARHLAEAAFWILKRQEPYRPPANRQASPKQVRGRA

SEQ ID NO: 50339 - protein, 372 aa, unidentified
MKNGNTLYVGLDVHKDSIAVAYAGTAGAPDPVHIGTIGTRQCDIDALIRKLQGKATALVFVYEAGPCGYWLYRYLTRKGLTCWVVAPSLIPRKPGDRVKTDKRDAVMLARLARSGDLTTVYVPGEADEAVRDLARAREDALQDLNAARCRLKAFLLRNDIRYVGRANWSAEHLRWLARHVFPTPAQQIVFQEYVRTVTERTELLRRLETELLAQATTWRFAPVVEALQALRGVQFTVAMTTVAELGDLTRFDTPRQLMKFLGLTPSEYSSSNRRRLGGITRAGNGHARRVLVEAAKAYRHRAKVSEAIQARQQALPKAVCDIAWKAQVRLCGRYRKLLARGKHPNTITAAIARELAAFMWAIAKTQPRPAAA

SEQ ID NO: 50340 - protein, 474 aa, unidentified
MRTRAKQRPDLQAIPLLKHEPLYIGIDVGKLKHVAGFVSTTLLERHQRFEACPVLAFENTREGFRALLERIQSLAPLEHVFVLLEKTGHYHFALQQFLQECDLSVYTVHVQTRPAGMLKTDKRDALGLANTLYNQLQLGVQVADKTQLVRRAEPPTAAAAQLKGLVRHRYELVRESTQRKNKLTAICDEIFPEFTRVLKDPNLSTALTLRERFPTPHAMATASLTALREARGYTRTLPESKLLELQQLAACSIGIKDLTRQRSLVLEQGQLIQELRLLQHHIEQLESEIKTIVDQAREGTILLSMGIGPIQAATIIATIGSILNFPNAGTFKAYCGWAPMREQTGTTFDRSHLTSRGSRPMRQMMFLIVASITRQDTEWAYLYKRLVQTRCPYDERTGERKGKLRIMGRVAGQMLETMYALLKKDAEVLGKVPSGQDPPPPILYDPALHRRHREGHYQPLKSSPHPSLIMLQPK

SEQ ID NO: 50341 - protein, 428 aa, unidentified
MAYRIAGIDVHKKMLAVVVCDVAVECEYTFEHRMFSSNPEQLRSLANWLSEQEAEEVVMESTAQYWKPVWEALERHWKPVWEKREGAKRKSGTLHLAQAQSNRGRQGRKRDFPDAERLVKRLVAGELTLSFVPAPEQRLWRTVTRKTNQLRRDRNRLQNQLEALLEEAHIKLSSFVSDLLGLSAQRMLKAIAEGETNPAKLAALADKRLRATKEQLCDALDACTELNVVYRRLLSMALEELRLIDEQIKRLDQEMALLLQAHQDAVERLAEVPGLGVDSAQQIIAEVGPTAAAFPSAKCLSSWVGVCPGSEETAGVNHNRRSPKGNRHMRRLLNQVANAGARAKGSIFEIVYRRMIPQLGHNQTIGAISHRQCRLIWLILHEGVRYEERGSGLSKRSKQLRTWKMIRELRNLGYQIEPPHSEPQASVQ

SEQ ID NO: 50342 - protein, 340 aa, unidentified
MKKQTGFFLGIDVSKLWFDISLMQVVNFQKQQMIIERFNNTIKGLALLKKWLKVQKVTFDNDTLLVIENTGIYHRLLWKFFSENNIPIHIGNAAHIKKSFGIARGKNDKIDSQRLCSYAYKNEGELKATPALNPVFISLKDLITSRTRLKTQLGANKAYLKELKNINDKATQKMMENIYKMAINGLQKSITEIEKQITFVIKSDSSINANYTFLLSVPGIGPVTATYILCCTNNFAGKITGKQLSCYVGVVPFSDRSGTSLKGRNKVHKMANKELKSLLHMCALSSLKNHKEFKEYYDRKVTEGKHPNSVLNAICNKILLRAVAVVNNQKYYVENYKKAA

SEQ ID NO: 50343 - protein, 345 aa, unidentified
MLIIGCDFHPGFEQVAIFDKSTAEISYRRLQHPGEARAFYASLAEPALVGMEACGYTQWLERMLAELGHELWLGDAAQIRASVVRRQKTDQRDAEHILNLLLEERFPRLWVPTAEQRDVRQLLLHRHHLVRSRTQVKNQLQAMALNQGVQKKRKLWTQAGREQLQKLALPAYTAARRDECLQRLDYLNQQIRQLNEKVEAEAEKRADARLLMTHRGVGPQTALAFVLTMGEVERFANAKRVASYVGLIPSEYSSGGKQRLGRITKQGSPLLRFLLVEAAQTAARYDPTLKRVYARLCLRCSRGQAKVAVARRLATRLYWMLRSGKNYAQLTASGAGKPVSSRGAA

SEQ ID NO: 50344 - protein, 362 aa, unidentified
MIKVNELSFEGETIYVGLDVHKTNWKVHVRFSGGRTLEFSQNPEASGLIRTLNNKFPKATFKVAYEAGFCGFGICRYLKAEGIDCIVANAADIPASDKDRKRKDDKRDARKISLELSKGSLEGIYIPETEIEKVRALVRLRATFVKDQTAAINRLKHYLHCYGIVIDEKVNRISNRILEKLESFEGESAVEKNTRKLLIRNYKEKRALVLEATKDIRKLSQSESLNKTQALLKSIDGVGPVTAMVIQTEIMDIKRFKNNDRLKGYLGFVPDISSSNDRTSILGMTRRANSFLRAVLIEASWTAIRKDPALLKLYQKYSLRMNKNKAIIRIASHLLARIRAVWLTGKPYERGVIAKNAALAAP

SEQ ID NO: 50345 - protein, 327 aa, unidentified
MTVYIGIDVSKRKFDCAWLRDPDRVKVKTKVFGNDTAGHAAVLDWLAQQTGTPADQIHIIMEATGIYHEALAQALYEAGLGVSVMNPAQVREFAKSLGVRGKNDRKDSVVLARYGAARRPRLWQPEPAAVRGLKARLARLEALDKDIQRERNRREKAEVVQAEEIIASIDTVLDALRAERDRLTRDIDDHFDRHPALKKDRALLESVPGIGPTVSRRLLATLRSRDFTSARQAAAFIGVIPVPWDSGSSVHGPPRLSKAGNPKLRQLLYMAAIVSTKHNPDIAAQYQRLTARGKSDMSALGGAMRKLVHLAYGVLKHQTPYQPQGAT

SEQ ID NO: 50346 - protein, 380 aa, unidentified
MLVQESWHLRERPYIMVWTLLLKRRGDILAVITLHQQEGFMNTITTIGLDLAKRVFQVHGLDQDGQPVLRKQLRRGQVLKFFATVSPCLVGMEACGSAHHWARELQAQGHDVRLIPPQYVRPFLKTNKHDAADAEAIAEALVRPSMRFVPIKSTAQQAVLMLHRSRELLVKQRTMFINAIRGHCSELGMVASQGASRVKDLITIIEDPEDPRLPAVAREALSVLIAQLAVVKEAIRTLESKLQAWHRSQQASQRLTTIPGVGVITATALVATIGDGTQFKSGRHLSAWLGLVPRQHSSGGKSRLGRISKRGDGYLRRLLVHGARAVLRWQKGAPKQPSPWIGELLTRRPTNVVLVAMANKTARTVWAMMRDQQVFAAVVR

SEQ ID NO: 50347 - protein, 374 aa, unidentified
MKFIGIDLHTNRFTCCYRNEQSSVENPTKDRVIKTFELNHLGFDAFFQTLTSETYVLVEATITTFSFIRLFKDRVKEAIIANTYELKQVSLARCNTDKLDADKLCRILKAQVLSGELLVSPVTMSSKEIQELRGLFTTYRLYQKQNVQLKNRIHSLLKEQLYGFTQEEIFGKRDREEIRAISPGSVLNFQINQLLDRLERDEADVETLKDQVLLHASPFMAQIEILTSMKGISVFTAVAIIADIIDVSRFRNSKAFTSYLRSAPRVANSNTSVSIRGTNKKGRKLSATLLTQSLNHVLNSSRKLNRWYNRLCEYKKPGLVRTGLRRRVLAEIFQMLKKGEYHYGREAEKHELKMSQYRRFLEKQKNNTVLKKTA

SEQ ID NO: 50348 - protein, 345 aa, unidentified
MDSIKYIGLDVHQSTISVAVVNADGKLVMQSVIATHATTIFDFLQGLRGTLYVTFEEGTHSAWLYDLLVRRVAKLVVCNPRKNALLKAGNKSDTVDARKLAELLRAGLLSPVYHGQNSAQTVKQLGCSYAALTEDTTRLMGRLKALYRGQAIACAGQKLYGSRQREQWLAKLSASGLRRRAERLYQQLDLVQELRRQACRDLTLECGKHNETKWLRTVPLLGPLRAAVLLGRVQTPYRFRSKRQFWAYCGLALETRSSADYRMVNGQLERRKKPVFIRGLNLNHNHDLKNLFKSAATSAAARPGVFRDFYQNLLGKGMKPELADDAPLEVCAPAKAVRLRQRIAV

SEQ ID NO: 50349 - protein, 411 aa, unidentified
MQVLHARCCGLDVHKKTVVACVLITAEDGTVQREVRTFGTMTADLLALSEWLRGHEVTQVALESTGVYWRPVYNLVEEGRTLTLVNPQHMKAVPGHKTDLLDAEWLADLLRHGLLRASFIPPAPIRALRELTRCYTTLVRERVDAVNRLQKVLEGANIKVASVASDIMGVSGRHMLAALVEGERDPAVLADLARGRLRAKLPALRQALEGRVQRHHQVVITCLLAHIDSIETELASLQDEITEQQTPFAEAITLLVALPGIGARAASGILAEIGADMSRFASADHLVSWAGMCPGNKQSGGKRLSSKTTKGNKWLRALLGEVAWAAARTKGSYFAALFHRLARRRGVQRAIVAVGHSLLRTIYYILRDKTPYVDLGPDHFDKLDTARIERHHIHRLEQLGYTVALTPKEAA

SEQ ID NO: 50350 - protein, 331 aa, unidentified
MQTVEQIFVGLDVSKEEFLSAHPDNSAGSKWSKAKIINELAMIKKWLMEVGVENKHFVLEHTGNYSQRLIHCLDELGASFSVVNPAQSRAMSKVLMKTSKTDDQDAQTLSRLGHLLTKPYQMPPKAKRMRKEAFNALCALQKQERQLQNQLHAVEYLVDPNPAVVEAFNSVLTVVKTQIKQLQVQLRPEVDQVQEKQLVERISSIKGVGKATAEAIVALFGDLSAFDSAKAFTKFIGLAPSEFSSGKSVRGRSSITKKGNSKIRALLFNCARSAMNYNTFCKALYQRIIAKGKNGKVALTAVMHKLARQIFGVVKSGIDFDPKFTIQKKCV

SEQ ID NO: 50351 - protein, 377 aa, unidentified
MGSQTFIPREYDVFAGLDVDKKSIAATFSSHQGFIRSLSIPYKLEALLNHVRNHFADQKVAFAYEAGPTGYGLYDGLAAQGYTCLIAAPSMIPRAPGQRVKTNRLDSKALSESLRGGQLKSIHVPSPIYRELRHLTQLRDTMMSEAVAMKQRIKSLLLFEGIAFPPAPAGSQWSFIVKAKLRKLPCSSTVRFKLDQLLDSLEFAEKQVFKSTKEIRRFCQTDPELSQCIEYMMTVSGVGWIVASQLLARIGDWRELENIRQLGGFLGLVPREHSTGDKTDRGPITHTGDGRLRSKLIQASWSAIRKDGELREFFRSVCQRHPRKVASRVAIVAVARKLSVRISVVLMQQRPYEVRKKVHSAPLTQEETSPQGTTRRL

SEQ ID NO: 50352 - protein, 441 aa, unidentified
MTEFFLGIDVSKGYADFVLIDSQKNIIEKNFQLDDTFQGHNLLFSFLQSFFLNNPQSNIIAAVESTGGYENNWVSFIAKLKDDFPICVARLNPFGVSHSSKAELKRVITDKISALTIAEYVINHRAKISFVGEDYFAPLRKQWIYIKLLVKQKVQLYNQLEALLYTANPELITYCKHGMPNWVLMLLKQYPSSKSLAKASPSVLSRIPYVTVQKAETIISNAKISVASQTDPVTGALLKSVVEQIIFLDKTIKAQEKKLTDSCAFPEVKLLSSFIGIGAYSAVGLLLEIRTIERFSSSKKLAAFFGLHPVYKASGDGMGSMRMSKKGRREPRLILFNIARTAINCNPLIKEVYKNNLKKGKSGLSAIGVVMHKILRIVYGMLKTNTPFNPDIDRRNTKHAAIKKPKVVVLKSRRFQEFDSLAPVSKKQNKKREEQKASQKE

SEQ ID NO: 50353 - protein, 344 aa, unidentified
MEHFAGIDVSLKDSSICVVDAAGRIVREAKVASEPEALVAWFRGLGFAVTRIGLEAGPLSQWLHAGLSGAGFEAVLLETRHVKAALSAMVVKTDRKDARGIAQLLRMGWFRPVHRKSADAQEVRALLVGRKLLQGKLRDVELSIRGILRGFGLKVGEISKGRFAARIRELVAGHEMLETVTGAMLAAREALLAEFMRLHRRMLVTVRADAVCRRLMTVPGVGALVAVTFKTAVDDPGRFSSSKAVGAHFGLTPKKYQSGETDVTGGVSKVGDAMVRTALYEAANVLLSRTTRFCALKAWALAVARRRGAKRAKVALARKLTTVLHRMWVEGSTFRWSKEAPAAA

SEQ ID NO: 50354 - protein, 341 aa, unidentified
MSNANSYIGVDLHKKMCFVTVMDKEGKIKKQTEISTDADKVAKFFSKHTNAAVAVESTMNWIPFYENLEGLGCKVVLSNPLATKAIAAARIKNDKVDSKILADLLRTNLLPLSYVQPREIRDLKELVRQRMSYVEMRTQIKNKIHSVLFKNNLKHDFTCLYGKAGMIWLRQLELRDIYRQEMDRYLTTLDLLDKQIEELSATIMETAKTDYDCQLLMTIPGISYFTALVIKSEIGNIERFPSAKKLCSYAGLIPSTYASADKVRHGRITKRGSKWLRKALVDAITSGSRHPSKLSCLYRKLKKNKGTGKAKVATARKLCTIVFAILTDKQPFREFVSVKQR

SEQ ID NO: 50355 - protein, 474 aa, unidentified
MKKHKQAEAKTKSEAIKPMGEQEPDSAGIDLGANEIWVAVPADREQKPVRQFGAFTRDLMAIVQWLVQLGVRSVAMESTGVYWIPLYQLLEEAGLKVCLVNARHVKNVPGRKSDVRDCQWLQYLHSVGLLLGSFRPAQAICASRSIYRYRQNLLSMAAQHVQHMQAALDQMNIKLHHVIDDLSGVTGQAIIAAILSGQRDPVQLAQLRDKRIKAPEAAIAKALEGDWRKEHLFVLAKAWAQYQEVQKQIQDCDQELWNYTRELEACTQVIKPLKVMRLKPELMGLEPHSNPPIRKRARRKTSKNQPEGPWQQELERFFGVDLTAIPGISVLTGLTLMTELGNDLGAFKTEHHFASWLCLCPDNETSAGKVLRRRTRRSQNRVRQALRMAASSLHHDKSCFGDKYRRLRARLGAPKAITAMAHQLARILWTLITRQLPFDPRVFACHEKAHQQRRLKHLALSARHMGYQLTPLTA

SEQ ID NO: 50356 - protein, 394 aa, unidentified
MRISIGLDVAKDVHWATALDDRGQVLLDRRVPNTPGDILQLITDLDEIEGERTVGVDVLGGIASLLCALLLAAGERVVHVPGLAVNRGRQGTVGGENKSDPRDARVIADQVRTRTDLRPVTHEEALDVELRLLVRRRRELVVDQTRRLARLRELLVTVHPGLERRLDVTTKGALCLLTRYVTPAEIRRAGPARITRFLRRCRHLRQPETLADRALEAAREQDIALPGEALTAQFCRELAADALQTRERIADIDRKLQEAVNTHPDGALVLSMPGMGATLTAEFLVETSPLSRFRSADALAAAAGLAPVLRQSGKVRFHRRAHGGNKALKRVFYQSAFCALGQPDSRAFYDRKRSEGKRHHQAVLALARRRVNVLWAMLRDRRPYELRPPKTMAA

SEQ ID NO: 50357 - protein, 345 aa, unidentified
MSMVRMIVGGVDTHADIHVAAVIDSNGGVLGIESFPADESGYVALLGWLSSHGEINRVGVEGTGSWGVGLSRFFHDHEILVVEVDRPNRQSRWKVGKSDSTDAVAAARAALSGSALVTPKTRNGPVEQIRLLLVARRSARSQRIETLNQLRHLVFTGPEEVRSRFKDRPKTGLVTDVAKLRPRKGSDPVLYTTHMTMRGLARRIQMLNGEIKGLDAMLTGLVNDTAPTLVGLYGVGTDTAATLLVAAGDNPDRLDNERSWARLCGVCPIPAGSGKTSGRHRLNRGGDRQANAAFYRIVLTRMSGDPTTKAYVARRRGEGKNTVEIMRCLKRYVARETFKHIQHVA

SEQ ID NO: 50358 - protein, 412 aa, unidentified
MEVVYAVCAGMDVHKDSVKACVRRSGPNKSRTSEVQTFGTTTRELLHMTEWFMTCGCTHVAMESTGVYWKPVYNLLEGSFEVILVNAAHIKQVPGRKTDVKDCEWIAQLLEHGLLRASFIPPKPIRELRDLTRHRKTLIQERARTANRVQKILEGANVKLASVASDVLGVSGRAILEALIGGERNSVALATLTRGRLRATRDKLEEALTGRFTEHHGFLLKQLLAQVDFLTARITECDERIEMLCRPFAEKIERLKQMAGVGQRAAEQMVSELGVDMGQFPSHRHAASWTGICPGNHESAGKRKSGKTRKGNRWLRCLLIECAWAASRTKKSYFGAQFRHLARRRGAKKAAVAVGHSLLVATYHILRDDVDYHDLGADHFDRLNRNRLMTYHVQRLQQLGYQVNLESQPDAA

SEQ ID NO: 50359 - protein, 344 aa, unidentified
MEYYAGLDVSLRSCAVCVVDGKGTVLYERDLPCEIEEIAGYLTALPVTIERIGFESGTLSQHLFYGLKAEGFDVVCMEARQVSAALSAMRNKTDRNDARGIAQILRTGWFSPVHMKSREAHGVRALLSTRKALLSKTIDLANEVRGLLKIFGIRLPKTVKHGSFDGVVRPMIEIDEVLAHAMLPLLDARLVLYQHFLELDRRVKRAASQDEVCMRMMTVPGVGPIAALTFKAAVDDPARFKRSRTVAAHFGLTPRRYQSGEHDNPGRISKAGDRDVRATLYAAANVLLMRTMAGSQIKSWGMRLMRTKGRRRAVVAVARKLAVLLHRMWADGTEFRSEKVEGTA

SEQ ID NO: 50360 - protein, 409 aa, unidentified
MEENRKRYIGLDVHKHYLVALGVDADLNVVLPMRRVELSNLESWMKKKLTKQDEVVLEMTTNTWQLYDELVEYVGLVIVVHPPHVALITRSQVMNDKIAASILARLLAKGLLVGIWIPPQEIREARGLVAQRRKMTTLATQAKNRLHAVIQRHHLVPPQGNPFGASNKEWWQVLPLGKLEKLNLQSDLETLQFAERQVKRMTEIMEGMAAEQEPIGRLLHLAGFGVVTAVTVWAAIGDIQRFAEPKYLVGYAGLGTWVHDSGMTSRSGKITKAGRRDLRMVLIEAANVAANHHPHWKAELARLEPRLGRNKAIVAIARKLLIAVWYVLQGQTDKYAQPEAIAQKMLKFAYTVGKSNRPKGQTAAQFARVRMDALGLGSELTSIPWGSKKPIPLPPSALKTERSDVPNTK

SEQ ID NO: 50361 - protein, 345 aa, unidentified
MPIVGGLDIHRKQITFDYLDTVTGEVRRGQIAPADRQHLRAWLARFAGRGDVAFAVEGCAGWRYVAQELAAAGIAAHLGEPADTAAARGRKRHAKTDKTDARHLRTLLAEGRLPECWIPPEHILEYRALLETYHDLRREHTAWVQRIHAVFFHQGAPPLNEDALRTEQGLAKLRAAAAAHLSPAGQLQVATALDMLAAAEARMHVLRKQLRETARHLTGAKVLAARLYGVGPVTGLALTCWLAGEGRFSSSRKAVRFTGLDITVHSSDRKGPPGRLSRQGPPVLRWAVYEAGKTHARSSAPDHGYYAAVKDRKNSKRAALSEARKIVRQACHILAELGDDALTAA

SEQ ID NO: 50362 - protein, 343 aa, unidentified
MQTITTIGLDIAKSVFQVHGVDAIGLVVIRRQLKRRSVMTFFQKLPSCLVGIEACASSHHWSRELQALGHTVRLMPPAYVKPYVKRQKNDMADAEAICEAVTRANMRFVPTKTPEQQSCLMLHRTRHLFIRQQTAVINSIRAHLAEFGIVAPVGRKGVTELLRIVADPSDKRVSEVARACLAALGSQLLSLKQQIVEFDRMILAWHRSNQTSKRLHYIPGVGPMLATALIASVADPSTFRSARNFSAWIGLVPKQHSSGGKDRLGSISKQGDRYLRSLFVAGALSVIRYAKIHGTGHRPWLTALLARKPTKVAAIALANKIARMAWAMMAKGERYKEPIALAR

SEQ ID NO: 50363 - protein, 404 aa, unidentified
MYNAVGIDVSKGKSTVAVLQPGSTVIRKPFDVSHTSQNLNELADYFSSLDGTTKIVMECTGRYHEPMVKALSEAGLFVSIVNPHLIKNFGNNSLRKVKSDPADARKIARYTLDNWTELRQYSGMDNTRTQLKTLNSQFSFFMKQKVAAKANLIALLDNTYPGVNKLFDSPTREDGSEKWVDYAYSFWHADCVRKIGLKAFTERYMSFCKKHHYIFQQDKPEKLFNASKELVAVFPKEKTYKLLIQQSIQQLNLASEHVERLRREMNELASTLPEYSTVMGIYGVGKTYGPQLIAEIGDVSRFTHREALTAFAGVDPGVDESGQHKSKSNRASKVGSARLRKTLFQIMTTLLQNAPEADPVYRFLDKKRSQGKPYYVYMTAGANKFLRIYYGKVKECLRNLEQTE

SEQ ID NO: 50364 - protein, 392 aa, unidentified
MCYWVGFDVGKVFHWVCVLDNEGKEVLSRRVEATEEDLEPSCSEIEQLGGERTVGIDLLGGPATLLEAVLLGRGERVFHVPGIAVNRARDAYPGEAKSDSKDAHVIADQLRLRSGLLHEVCPRDETTAEMRVLVAYRRDLLQEQTRRAARLREVLLGVFPGLEATLDLKREGALLAVTKVATPAIARKLGTARLFRWLKARGVRKAEDLAERIVKAAKAQRCELPAAEAKAALVAEIASEMLRTRERIAELDRRLEELLADDPAARIVQTMPGMGIVFTAEFLAEVGDLGRFASADSLAAAAGVAPVLRASGARSYQRRARRGNKVLKRVLYRSAFNCISHHERSEAFYRKKRAEGKGHHQAVIALARRRIDVLWAMLRDGQNYSERPSPAA

SEQ ID NO: 50365 - protein, 339 aa, unidentified
MMLGIDVSSCSLHSALCSQEAVAPKWRKQVPNSVAGIRELLAATPADIPMVVEPTGRYSLLLVEQARAAGRRVLLAPPRESHVYLRTFNPRGKTDALDGRGLAWYGLTHPLREYPVKSVIVDTLDQTLSARKGLAKALANLTLQAQSLPRAADAITPSIQHLRQRIKELDKQIAAQTKEHPEFAVARKLQKVHGVGAVTAAAVTSRLAAKRFAHPDQFVAYVGLDVTLNDSGKIKGRGRLSKMGDAELRRLLFICAKANLRCKDSPFKDQYQRERAKGLATTAALCAVARKIACVLWSMHRHNADYDAQRVSHAKNSNRDRQISTLFFTELLTPNHRIC

SEQ ID NO: 50366 - protein, 339 aa, unidentified
MKLYAAFDLHSSNSYLAVIDEEGKRHLEKKLGNDPEAIVRVLSPYRKKIAGIAVESTYNWYWLVDLLMAKGYEVHLANPAAIQKYKGLKHADDRHDANWLAEMLRLNILPEGYIYPKEERALRDLLRKRGHLVRLRTSLIISLQHIITRNCGIMVRVNDVKRLREDRISPLLDSNEDILMAGTVSKETIDYMTRKIKSIEKIVEGKVELSLPYQQLLSIPGVGKILALTIMLETGSISRFQKVGNYVSYCRKVGSTWMSNGKAKGKGNEKNSNRYLAWAYSEASELARRFDEQARAYFQRKAQRSNRMVAHQALAHKLARAAYYIMRDDVPFMTEKLFA

SEQ ID NO: 50367 - protein, 520 aa, unidentified
MATTRYRKRSSSSRPAPSLGKPRGVLHPRVQQVGPEHFGIVCFDCAKARSKFLLADFYGRVLIPPTIVEHNRPDLDAAVAQVRQAFDNYQLRDGLVAIERTGRYHRLVQRTFAAAGFETRILHPFVTKQYRQPVDPGYKTDDTDLAAMHRATVTGCALLEATRDEAWTTLLLLIRQRRDLVRKGAALNCQIRDHLQAALPGFADCFDKLWESPIPWHLLQHFPSAGQLRQAGVTTLCQSLRQAGIRFQQRTVQSVLDWADQAAPADVAAAQHHRIALAYYRDRQQKSQEIHALERDIAGRLVQTPYVLLLSFPGINVVSAADFAGEMGPIEHYANAKSITGRAGLRPSRYQSDQVDKANGPLVRNCNRSLRAAILGIADNLIVCNHHFQVLATQWAAQGKNPRHTRVKVALRFCRIAFHMVAGRQVFRHPSIQGRHYILDKLSAFHRDHDTGMAEVLRDLQAAVGQVPAHEHAAEARPLAEELQKIHDGHRRGPQLLGDILPIVLARLGVGAVKSEGSGE

SEQ ID NO: 50368 - protein, 310 aa, unidentified
MENCVGVDVSKHHLDWALGGEGSVARVPNTPAGVRQMVAKIRHREVALIIVESTGGYERVLTEALTEADLPVALVNPWRVRRFGEGLGVLAKTDSLDARILALYGERARPTRRPLPGPRQRQMADLVRRRRQLIAMIVAEKNRLDTASGGIRRDIQALVKLLERRVGKIDERIDAAIAADPEKAENYERLQSAPSVGPGVARALIVDLPELGALGRKQISSLVGLAPFAKDSGRKSGNRRIRAGRTGPRTALYLAAMNGARFNPVLKEMYDRLIAAGKPPKVAFIALARKLLTILNAMVRDGTTWQQAAR

SEQ ID NO: 50369 - protein, 398 aa, unidentified
MTESSDYESVQVFIGVDVGKDTHHAVAINRSGKRLFDKALPNDENKLRSLISDLKQHGQILLVVDQPATIGALPVAVARSEGVLVGYLPGLAMRRIADLHAGEAKTDARDAAIIAEAARTLPHALRTLKLADEQIAELSMLCGFDDDLSAQTTQASNRIRGLLTQIHPALERVLGPRLDHPAVLDLLQRYPSPEKLASLGEKKLAAQLCKLAPRLGKRLAADIAQALVEQTVVVPGTNAAAVVLPRLALQLITLRKQRDEVALEVEQRVLAHSLYPVLTSMPGVGVRTAARLLTEVACRAFASAAHLAAYAGLAPVTRRSGSSIRGEHPSRRGNKALKRALFLSAFAAFRDPLSRTYYTRKMSQGKRHNQALIALARRRCDVLFAMMRDGTFYTPQAS

SEQ ID NO: 50370 - protein, 386 aa, unidentified
MNCVGIDISKGKSTIAVMRPFGEVVVSPFEVLHTDSELSKLARLLKSLDGETRVVMESTGNYHAPVAWLLHDAGLYVSVVNAMLVHDYGNNSLRRAKTDKKDAVKLANYGLDHWLTLPRYVPEEDTRLMLKSCYRQYQQYSKVRTMLKNNLISLLDTAFPDANRLFTSPPRADGSEKWVDFVAAFWHCECVCGLSEKAFTAKYQKWCKKHGYNFGVMPKTDTTKLLVEQAISQLRATSAALAALKHEMQSLAASLPEYPVVMEMFGVGPALGPQLMAEIGDVRRFHSKKALVAFAGIDAPPYQSGQMDVRSRSISKRGSASLRRTLFLVMGVVLQCAPMDEPVYQFMNKKRSEGKPYRVYMMASANKFLRIYYASVKAYLDSLEHD

SEQ ID NO: 50371 - protein, 370 aa, unidentified
MIGACSLQANQNSKEVNETRYMGIDVGKRRCQACVMDEHGLIVDEFVFENSFEGISYLTGKVKPGPAKAVVESTGNLWLRIYEALESIGVEVKLANPFKTKAIASARIKTDKLSARILAHLLRADLVAECYVSSKENRKVNALLRQRASLTRIQTMVKNQVHSLLDKYGLKSDWSDMFGVHGLDWLRSLELDPVDRCILDTHLRHLECLRRETGMLDSRIAAKASESQEAKLLLMSFTGIDYHSAMLTTSEIGDIGRFPSSKHLVSWMGLCPSLHQSGNSTYMGRMKKDSNKRVRSILIQAAESAAINDPRMKSLYDRCAARHGHNKAVVRVANKMASITWHILTKKEPYQQAKDRLYASKLKNMARVAA

SEQ ID NO: 50372 - protein, 413 aa, unidentified
MLLFIGDDWAEDHHDLELEDETGRRLAKARLPEGLEGISRLHALVAEHAPADWADLPSEEVAARVFVGIETDRGPWVTALRAAGYQVFAINPLSSARYRERYSTSGAKSDAGDAHVLAEIVRLDRDHHRQIAGDTELVDSVKLVARAHQTAIWERTRQVLRLRSTLREYFPAAIEAFEDLAAKDTLLLLARAPSPARVAKLTRSQVVSALRAARRHHVEAKADAVLAVLRAPGLRQPPTTEAAYAAVVVGQIGIIGALNEQITQLQEVVAEHFGRHPDADIYLSQPGFGVVLAARALGEFGDDKKRFHDARDRKNYSGQSPITRASGKKTVVLARYATNRRLGAALHAQAFSALVASPGARAYYDALRARKIGHHAALRQLANRLVGILHGCLKTGTKYDENTAWQHQIVVTA

SEQ ID NO: 50373 - protein, 337 aa, unidentified
MKFCGIDLHSNNSVVVITDETDRVLLSRRCPNDLVKIVMLLEPHRAELAGVVVESTYNWYWLVDGLKGAGFEVKLANTVAMKRYDGLKHSDDQDDAAFLAHLLRLGILPTGYIHPPQERALRDLARKRIQLVRSRTQHILAVENIMARQLGCRLSSAAVKRLSAASVDRLSLPPDVALAMKANVAIIEAFNSQIGCLEARLLQGARLRPEFALLKSMPGIGEVLAIVIMLETGNIERFADVGNFASYARCVDSAHYSNGKKKSEGNTKNGNAYLIWAFIEAANFARRFSEDAKRFFEKKKAKTNNVVATKALAHKLARASYHILKEKQPFDAKRCFA

SEQ ID NO: 50374 - protein, 444 aa, unidentified
MMAAVMIGVDPHKGSHTAVAIGADEVPVGLVRVRACAAQAERLLTWAKSWPERIWAVEGAAGLGHLLAQQLVAAGERVLDVQPKLAARVRLLATGAVNKNDPNDARSVAVAALRSAACLPVRPDDHAAVLKIWAKRHRDLSRARTQVACRLHAVLCELVPGGLSKEICAAQAAAILDQAQPGGAVRQARLELAAEFTADLRRIDAQLRETRKKLAVAVRASGTSLTEVFGVGPVIAATVIGDVRDVSRFASRDRFAAYDGTAPIEVSSGNRKVHRLSRRGNRRLNHAIHMAAVTQIRYRHSDGRACYDKKIAEGKTPKEALRALKRQVSDAIYKHLTADAARAAAAAGARDPGGHAGNDSVASAAGAHPTRRLFGQATPGPVPTLRPEPAPAKTTPAPRGAPRVPRAAAGQALACPLFLPPGAVAAPGSRPARQSRRHRRCAAA

SEQ ID NO: 50375 - protein, 438 aa, unidentified
MTSNIIFNSDNLFISVGIDVGADFSWMSIALPNQQFVGKPYKIIHSCMESLESAVFKIKEAEKLYSLEIRIFLESTGIYHYPLFCYLRDKGFNCSVINPIITKNSTNINIRKVHNDRFDSKKAALVGLKPDLKVSIMPSELALNCRNLCREYYSLMDSRSAYVNKLQGELRMAFPQYIGIFSKVTINTSLTLLETYTSPKAFIEAEEQEVIGIIKSTARFGLIYAKDKYNAIIKAANDANKFGCISCSNIIRIRLYISLIRKYDEEISRLLETIKQLVKANEDTEFVRQLKLIETFKGAGFLSAISLMSEIGDFSAFKKPKQLFAYFGLDPAVKQSGKFEGTKVKMSKRGSAIARRVIHVLTLQSISPARNGNAKNPVLREYYLKKCESKPKLVAMGAVSHKICNMIFAILRDGKPFEIITPQEHIRQYNSSKGNTAA

SEQ ID NO: 50376 - protein, 341 aa, unidentified
MQHVAIDLGGRESQLCTRAMDGSIVKEARVATKSLPKLLEAMEPSRVILETSAEAFLIADVALERGHEVRVVPATLVKQLGVGARGVKTDRRDAQTLSEVSCRIDLPSVHIPSQLARELKSVCGSREILIKARTMLINNVRGWARTQLVRVRTGTTPTFQERMREYAKANQIPLPEHIGRQLAVLDALKVQVKAADQQLRKLAGEHPVCRKLMTVPGVGPVTAVRFVAAIDDVTRFRNAHAVQSYLGLVPGEHSSSDRKQHTGITKAGAMEVRRTLIQAAWSAFRTAPQEPMVSWATQIAARRGVFIAVVALARKMAGILFAMWRDGTTYRPSKSAEAALT

SEQ ID NO: 50377 - protein, 353 aa, unidentified
MNSLTDLREVVDVVIGVDTHVHTHSAAVVDAATGGVLDEITVEATAEGYAELVEFANNHAMLRAWAIEGTGGHGAGLSRHLLGMSEIVIELDRPKRAARRNGAKSDPLDAIRAAREAMARPRLGTPRTGGERQALSVLLAARRSAINASTEAQQQVFSLVIAAPEPIRLRFRGQKLAAMLNTAANLRVHASWDTETTSTVVALRTLARRAHAMLKEARELQKAIVAIIRSWRPDLLEEFGVGPIVAATVLCAWSHPGRIHSEAAFAMLAGVAPIPANSGQVTTRYRLNRYGDRQLNNALHTVVQSRIQYQPATRDYVARRTAEGKTGREIKRCLARYVARDLYRLLENTATTA

SEQ ID NO: 50378 - protein, 343 aa, unidentified
MEYYVGLDVSLKQTSICVVDQSGSVVREGVVDSDPEAIAAFLRAKAPGAVRIGLETGPTATWLWTELKRLGLPVICIDARHAKAVLKMQINKCDRNDAVGIARIMQTGWFKEVRVKDLDSHAVRALLASRALLVKIKRDLENQVRGLLKNLGLVIGRAKFNVFAVRAEELIEGRPELVAAVRPLLDARQAIEQQVDDLDRKVQKLARHNAQVRRFMSVPGVGPVTALCFKATIDDPARFKRSRSVGAYVGLTTRRHASGELDWSGRISKCGDAMLRMYLFEAAGVLLTRVPKWSALKAWGTRLIKRIGLRKAKVAVARKLAVILHRMWIDGTEFNWSKKELAA

SEQ ID NO: 50379 - protein, 323 aa, unidentified
MEEGRIQSTVAAVEKHFGGEPRMRIALETGTHSPWVSRLLKSYGHEVIVANPRKIPTLTRSESKNDRNDAEQLARMAAFDPKLLHPIEHRSLERQQDLNLIHTRSVLVRARTMLVNSARGLVKSAGGRLPSCSSEVFPEKVSVAVPRELKAACEPLLKQIAQMNRTLAAMDKQIEGLAKKYPEIALLRTAPGVGPVVAACYVLTLGNPETMETNRQAGAYLGLRPRQQQSGDCDPQCGITKTGNSYLRSLLVQSAQYILGRFGPDSELRCWGLKLAACGGKRGKKRAIVAVARKLAVLLLSMWRNGKKFEPFPQSATQLAKAV

SEQ ID NO: 50380 - protein, 337 aa, unidentified
MQHLAIDLGGRESQICLRDAKEKILEERKYPTKRLGEYLAKQPPSRVILETSAEAFAVADLARRAGHDMRVVPATLAPSLGVGARRIKTDQRDAQVLSQVSCRVDLRSVHIPSAQARAWRTLCNSRDGLVSSRTKLSNTVKSQLRSRLVLTHRRRSTATPDQIRALWTEVAGSVPDHVERMLTVITMLDVQITAADKEIRQLVKANETCRRLMTVPGIGPVTAMRFVATLDDVTRFETAHDVQAYLGLTPGENSSSSRKQRTHLTKAGSPQMRWLLVQAAWTVLRCAKKHPMSIWAMQVAERRGKRIAVVALARKLAGIAFAMWRDGTTYNHQRGAD

SEQ ID NO: 50381 - protein, 365 aa, unidentified
MEKIMTPIGTPVGIDVHKRSCQVVEFDHGGIKVRKSMTNTREGWLEMVAELPPDAEIGLEVSTAGYFAMSVLEEAGWRERAHWVHTAGIDSNRRQKNDRLDAERLARKLAAHHLDPLPEAWFPPPEIRALRLRARQRCWLALLRTQAKNHLQSLLGMHGLQAPGTDPFGAAGEKWLAEQTLPLPLGESIPQIQRLLQLLEEEIEVSEKYLQAVDGQFPQLPLLRTIPGIGPILAPVIWSEIGTIERFRSAKALANDTGLVASYYDSGDVKVSGPITRQGSRWLRWAFVTAANVALQHRNPFARRYHRLRRSKKPNVAKAAIAHSLARCVYGVLKHGCPYRDRWGRLVGVLEQEARAGARSTKTVV

SEQ ID NO: 50382 - protein, 405 aa, unidentified
MTDESLSWFAAVDWGSEKHQACILDAKGDVAGEREFPHSGTGLTELCDWLLSVACDTSAVAVAIETPHGPVVDALLDRGFAVYAINPKQLDRLRDRFCVSGAKDDRRDARVSADGLRADRHLYRLVQVSDPAVIELREWSRLLEELQQERVRLCNRVRHQLWRYYPHLLDLTDDVGADWFLELWALAPTADKAGRLRETTIARLLKQHRIRRLNAETACRILRQPAIKVAAGVTEAAVLHLRSLFARLRVVNRERHQAERKLDELCTELSERASEGQSGEPCDVAILKSLPGIGRVTLAALLAEASGPLSRRDYPALRTLSGVAPVTKRSGKSNIVVMRYAAHARLRNTVFHWARASRPERPQEQLSLRRFAQARSFPWPRPPWRRGQTPAGGMYPLAATDDVRS

SEQ ID NO: 50383 - protein, 415 aa, unidentified
MSTSYQLLVGIDWATEAHQVCVMTPAGAVILERSVKHNAPAIHALIDLLLSRVDGRAHQIAVAIEVPRGALVETLLERGLHVYSINPKQMDRFRDRHGVSGAKDDRRDAYVLADALRTDLHKFRQVDLDHPLVIQIRELSRADEDIRDEVNRLTNRLREQLYRWVPHVLSLSPSVDEPWFWDLVEYMLRSNSARINRSQAERLLRRHRIRRLTPDDVLATLGVERMKIAPGAAEAARTHIRLLLPRLRIVHEQRKACAKQLSQLLDEYAAEQDDDESECCASDVELLRSLPGVGPGVTATLLAEAASLVRNRDYAALRAFSGLAPVTKRSGKSWFVIMRYGCNTRLRNAFYHWARTSIQRDAAARAYYTTLRGRGHSHGRALRSVADRWLRILMAMLDSRTRYDPFHQRQPLAAA

SEQ ID NO: 50384 - protein, 421 aa, unidentified
MRGLRVKRVRTVKEGTLIATVDIGLANNTGYCTTLDGRSTKSFRFDNTKEGFEKFWYMIIASKNRFGCDEVLVGYESTGPYAEPLVHYLANKQVKIVQVNPMHTKKMKEVNDNSPLKTDDKDPRVIADIIRLGRALSIVVPEGDAASLRRLNNARERHVGEQTALLNQLQQLVFLIFPEFKTVLKNMKGKTAHYILKRYTLPERIGTLSKEALGEEMRKRSMGKFGIKDAESLIGLARETVGIKEGIAGIFMDLRHILMQLEAEGRFISEIEAEMGTTLERIPCSVRLLSIKGLGTVSVAGLIGEVGDFSKFSTQSEIMKLAGLDLYEISSGKRKGQRRISKRGRSLLRKILFYAAIQMIRKNGIMSEYYARLIGRGMERMRALIAVSRKLLRIIHAIVRDNRDYVGQYQAPERRVIKMAA

SEQ ID NO: 50385 - protein, 446 aa, unidentified
MSLDCCYEHAGLCPGRGPSGPAPGGDGRLLEERRDAMEVMFDRVAGLDVGKETVAVCLRTPGPKGRRRAETRTFKTTTGSLRVMRDWLVEAGVSIAAMESTSVYWKPPFYCLEEVMEVWLLNAAHMKAVPGRKSDVRDAEWIAQLLEHGLLAPSFVPPPEIRRLRMLTRYRVQLMGDRRRDIVRLELMLEDASIKLSSVASSLKTVSARAMLTAMINGETDPLRLADLAKGRMRRKIPDLAQALTGHFDANHARLARSMLRQLDLVDQALAELDAVIVDACQPWAHQIELLQTIPGVGEKVAQVIIAETGGDMARFPTAAHLAAWAGLAPAMNESAGRQTPAGKRHGNKWLTAMLVEAAGSVGRMHGKNYLAAQHARLLKRRGMGRAQVAVAHSMLVAAYWMLKRDEPYHDLGADWHSRRSDEAHTRRLIAQLEHLGHTVIIDPAA

SEQ ID NO: 50386 - protein, 410 aa, unidentified
MQTLVERACGLDVHQATVVACLLIVLQNGKVQKQIRTFGTTTRELQSLREWLLSEGCTHIAMESTGVYWKPVYAILEGALEIVVANAQHVKKVPGRKTDVKDAEWIADLLCHGLLRSSFVPPKPIRELRDLTRYRRKLVESQTAERNRLLKLLETANIKLASVATDVFGVSGRLMLEALVEGKATPQEMAELAKGRLRQKIDELGPALEGKLEEHHRFLLRLQLDRLEAAEKDLAVLEQRLQEKLKPYAEQLTLLDEIPGVDWTLAAVIIAELGVDMSVFGSVSQLASWAGVCPGNNESAGKRKSSRIPKGNVYLKTALVEAANSAAKAKGTYLRDKFYRLKARRGYKRAAVAVAHKILVAIYHMFSDRVCYNELGDVYLDKLNKHHLTRNLVHRLERLGYTVTLEQKAA

SEQ ID NO: 50387 - protein, 349 aa, unidentified
MEQNRQASGNEEPEFAAFVAIDWADQTHYWSLRVPGSKQIERGAVENTPEAVEVWAAQWSARFASRPIAVALEQRRGPLVAMLSKYQQLHLYPVHPLTLAKYREAWYPSRSKNDAKDADLLLELLCQHRDRLRRLDPDTPEMRLLQFQVENRRKLVDERTAHSNRLTDLLKMYFPQLVVWFEEVSSALVGALLEKWPTLADLQKAKPKRLEKFFQQHNCRDREKTQQRIELIRTAIPATHDEAVIVSARGMALVSVRLIAVLREAIVELEKEIDELARKQADWEIFDSLPGAGNALAPRLMAAMGSRRERFESASQVQCFVGIAPVKEASGNTQVVHWPEAKTIGVLIL

SEQ ID NO: 50388 - protein, 345 aa, unidentified
MLYLGLDVHSKWTTLKGFDPETGEVVERVRISNEPQVMAAVLSELPGPLQGVMETGTNAWAMYRALEPFFARLVIADPAQLWDRRRDRSAKTDRRDALRMAQKLHRGEIKGIYVPDEHTQDLRVLVRGKVRATRWVTKLVNEIGSLLRCWGDVQSKSLLSKRGKEHLDGAQLPGHSARVLELWREMLEKAQEIEAELEAAIEDEAEHDAVCAQLRTMPSVGPFTALAVRAEIGDIRRFPSSPALISYAGLAPRVFQSGEHCRYGSLGHSGNAWLRYALVLLANRMASHGKGSRLHQLYWRIRLREHRNGAKIAVARKATHLIYHLLRTGQPWRELAPEEQMKATA

SEQ ID NO: 50389 - protein, 458 aa, unidentified
MSPRQKSKKKIPSVAKTTPSLPVFHPHAAGIDIGAREIYVAVPPDRDPKPIRVFATFTEDLLALRDWLKARGITSVAMESTGVYWIPLFQILEAAGLEVCLVNARHCKNLPGRKTDVQDCQWLQYLHSVGLLRGSFRPPETVCAVRSLLRHRDGLVRAAATCVSRLHKALTQMNVQLQHVIADITGVTGLAILEAILAGERDPRTLAKLKDGRIRATSDVIAKSLRGDWRSEHLFTLRQCLDTWKHYQAQITACDAETARLIQGFAPKVDVAAQPLPPRTSTHKSPQRNEPRFEAREELYRTCGMDLTQVPGIQSGTALVLVAELGPDFAERFPTAKHFGSWLGLCPDNRITGGKIMSSSTRDVKSRAATALRLAAQSLNKAQNYFGDLYRRWKARLGTPKAITAMAHKLARILWHLFKYRQPFDPDVFKKEEEKMQRKKLARLHNTAAALGLKLVPN

SEQ ID NO: 50390 - protein, 409 aa, unidentified
MRIIGLDIHRAFAEAVAWDDGKLKRLGRVDMRRHVLEAFAKRLSKDDVVVVEATGNACSVAAVIAPHVKRVVIANPKQVRIIAHAKIKTDTIDASVLAQLYASGFLPEVWIPDEPTQALRRQVTRRNQIVRQRSRLKNIIQSILHSHLIPSCPHADLCGASGRAWLFHQVLPEDERLAVERHLREFDRLGDDLKVIERDLARSALGDEGVKRLMTIPGVDMVVALAIVAAIGDVGRFEQSQKLVSYLGLNPSVRQSGPGPAYHGRITKQGRGHARGMLVEAAWAAARAPGPLRAFFLRVRARRGQHVAAVATARKLAVLIWHLLSKGESYVWARPALHARKLRDLELKAGYKAARGQRGAAHAYNIKSHRDQERRWVEQAETAYARFVSGWNPRGPKPVRTGAATEVRR

SEQ ID NO: 50391 - protein, 408 aa, unidentified
MFVGIDWASEEHAVCVLDDAGRKVSSFTIEHTADGFEELVRKLRKLDDPDQLSVAIERPDGRLVDRLLEAGHPVVPVKPRAIKEWREAEVSSGAKSDPGDAEVIAEYLRVRFHKLSALTPFSEATKALRAVVRARANLVNQRTTANNQLEATLNAFWPGAKEIFDDVCSQTALAFLKRYPTPVSARNLGEKQMEAFCRKQGYTGRRSPAELIERLRKPPAGIAAGAESEARKAAVLAFVSVIGSLNLAIKSLDKQLSAQLSEHPDAEIFTSLPRSGSTSAARMLAEWGDCREVYDGAESVAALAGMSPVTKKSGKHNSVQFRWACNKRFRNAMATFADNSRHESEWAADIYQKAKARGAAHPHAVRILARAWIRVIYRCWLDRVPYDPAKHKAALRFESSKSTVEAAA

SEQ ID NO: 50392 - protein, 338 aa, unidentified
MTSYYAGLDVGDTETAVCVTDAAATVLFEGRLRSDAKTVASCLRPYKKMLQGVGIETGATASRLYKQLWRQRYPMICLDAFHAHSALRAQRNKTDRADAKGLALLLCRGMYREAHVKSDEALAVRFLLNARATLVRRSLDIRLTILSAAKLFGFTTDLKGKRVQRIQWSRRARSATASDAANALLRSEHMLAAEVKAIDAMLAKMARSDPVCRRLMTMPGVGVLTALTFKAAIDDPARFQSSRTVGAHFGLTTRRHQSGAIDIGGRISKRGDSRVRQALYLAAAAMLAKSKKESRLRNWGLALRERHGFRFAAVACARRMAVILHRMWVTETDFDPAR

SEQ ID NO: 50393 - protein, 353 aa, unidentified
MKTYYVGMDVHRASIVIVVLNGAGKVVMQSVIETGAERVRGYLKQLRGKVYVTFEEGTQANWLHEVVRPLVTEVVVCDPRHNKLLQSGNKNDRVDAQKLAELLRLGSLKAVYHGDHGVRALKELVRSYDCLVSDTTRVMNRLKAIYRGRAIGCAGHDIYRQDRREQWLEKLTERGAKQRASFLYRQLAALKPLRYEAKRMMVKEARRQPAYRWLMSVPQFGSVSVAQLLAIVSTPHRFRSKRQFWTYIGLAVVTRTTADHEVVNGVLRRRQRPVSTRGLNRNHNHLLKRVFKNAAKGACHSGPFKAAYELRVKQGMVPSLARLTIARQLAAITLAMWKRGEQFNPERMKQQAA

SEQ ID NO: 50394 - protein, 394 aa, unidentified
MKLVGIDVGKNSHHFCVMDKETGELNVTPSSFPNNKEGFDFLINSLKPYSKKSILLGMEDTGHYHVALLKFLLSNGYTVALINPKTTDLTRKMEGGITKNDKLDTITICDVLDTPERKKQYRITKVDRFDLYEQRQLTRHHHNLKEELNLYCNRLQKSIDLVFPEFNTLFSSKYGVVYMNLLKTFGSAEAIASTDIRTIRKCFEIKGRGGRISLTAEKLKECAKNSIGISSEVETIQIKHLVRQITLIKEQIAEIDKKIEEFSITNNSPILSIPGISHFSGTSILAELGDIGNYSKPSQIIKFAGVAPYHYESSQYNAQHTGITKKGSKYLRKTLYQIILPVINNNPVFKKYYRLKISQGKGHRCAQGHCIRKLLRIIYHLLETGQSFDPALLR

SEQ ID NO: 50395 - protein, 353 aa, unidentified
MELDKYIGIDAHSSTLVVNARDAFGKMILQSVVPTNAEAIVQCIGGLRGRLHVTFEEGTHAQWLYDVLRRRVDDVLVCDPRESRLMQDGSKGDRIDAGKMSHLLRIGALKAVYHGRHGTAVLKELVRSYDGLVEDSVRVMNRVKAIYRSRAIATPGGSVYRTTERESYMEYLKDPGAVKRVDLLYEQLDTLNALRRQAERAMVGEARRHPAYRLLRSIPQLGPIRIARLISIVDTPHRFPNKAAFWNYCGFAVVLHTSAERKFVDGQLVRSQKMVATRGLNKDHNPKMKEIFKSAATKARVCGPFAGYYAGLLARGMKQELATVTLARKISAITLAVWKKGEAFDPKKLMPMT

SEQ ID NO: 50396 - protein, 278 aa, unidentified
MDERGKAVLRKQLRRAQVAVFFGNLPPCVIGMEACASAHYWGRTLQRFGHTVRLMAPQFVKPYVKTNKNDVADAEAICEAVGRPNMRFVPTKSIEQQAILSVHRVRKGFVKARTAQANQIRGLLGEFGLIIPQGIINVTKRVPELLEDAANELPLAFRQLIERLAQHLKELDRQVKEFEKEIIAWHRSSELSRKLEKIPGIGPLAASALVASIADAHSFDNGRQVSAWLGLVPRQSSSGGKATLLGMSKRGDAYLRTLCHPGSKEQDRQHQRVVGQSA

SEQ ID NO: 50397 - protein, 368 aa, unidentified
MSDIIRIGVDTSKSVFQLHGVDAAERPVLRKKLRRRDFLSFFAQLPPTRVGLEACGGSHYWARELTALQHEPKLLPAQHVRPYVRRNKNDKQDADAICEAMSRPRMSFVRIKSAEEQAAQMLMTTRQRLIDYRTQLINTIRGHAAEFGLTAAKGPAHVEPLLARVAKDVKVPALAKELFAIHGQEYDRLKIELREIEAKLKVWHRGNEMSRRLAEVDAIGPIGGCLLAIKAADPQAFRCARDFAAWIGLTPKDHSTAGKMRLGVITRAGDEALRRTLVVGATSVIKQVRNGKADPSPWLRDLVARKPPKLAAVALANKVARIAWKLMVSGERYDAARAGIVSPTARIAPCSPRQGRCAPPAAVACGQP

SEQ ID NO: 50398 - protein, 381 aa, unidentified
MQPTLVKDFTRDEAILAVSLELAKGSWKVALYDGRREQPAVHTVAHPQAAGRLAEAMRVVEERKHAWGLGPATRVVVIYEAGQDGFWVARALTGQGYEVQVVDPASIPVARRARRAKTDRLDALRLVLSLWAWLGGERDRLRVVRVPKLEDEARRHWVRERGELQKEIGQHRDRMRKLLRTVGCWDEVDGEFERRLRQGAVVCYDDGALPAELRVRLARECERLALAQRQLAALEAELHQALPAPVQQRIARLMQLKGVGRVGATRLQLELFWREFDNRRQVGACVGLVPQPYNTGESRVDQGISKQGNRRVRALLVEMSWLWLRYQPDSALTRWFMRRTQGGQKRGKRIAIVAVARKLVIALWRYLKDGVLPEGAVLKAV

SEQ ID NO: 50399 - protein, 390 aa, unidentified
MRYFIGIDVAKFKHTACVIDTDGTVLVESFDFTNDIIGFQSLLKNIKPFLKKKHLVGMEDTGHYGDNLRNFLLEKQYTVVMLNPIVTSHIRKASNKAKNDRIDCFVIANTMMNPNFYRDQQAQSIDYATVRQLTRMHHTHMEEINRYKCQLQKSIDIVFPEFNSLLNTKYSKTYLEILDTYHSAYTIANTDIRLLRNTLKNVGVGRSVSISAEQLKKAAKESIGQHNLAIEMDIPFLISLIRRLTSILGEIDKKIEEFSHQLNSPILDISGISHFSAMSIISELGDITYFSNEKKLIKFAGVNPYVYESGTYSMTHTRLEKKGSKYLRKTLYQIIDVVIRFNPVFQAFYQKKISQGKSYRCAQGHCIRKLLRVIYKILSTGERFNPVKLK

SEQ ID NO: 50400 - protein, 340 aa, unidentified
MEIDRVVSQSVGIDVSKKKLVATMCMFSQAEQAVYSRAAEFDNDKTGFNQLVKWSRKEAVKELPLRYVMEATGVYHEHLANHLVRIGCTAVVMMPTKAREFAYWEGMISKNDTIDSRVLALVGCVKRSMRPWNPTNPLYRELRTMSRFSQDAKKLRTEMKNHLEALEHSHEAERSVIKHYESLVASLDRRIEKNLENMKKKVASDEELSKKVENIMTAPSVGFLSAITVIAETDGFALIQNRRQLTSYAGLDVRDSQSGTVNGVSRISKRGNSRIRAILYMPAVQCRLHNKHLRKAYDRIIAKHPDKKMIAVTAMERRLLLLIYALWKGDRPYSEDYDKE

SEQ ID NO: 50401 - protein, 403 aa, unidentified
MNSVGIDISKGRSTIAVMRPFGEVVISPFEVRHTGSELSKLAKQLKSLDGETRVVMEATGNYHASVAKLLHDAGLYVSVVNAKLVHDYGNNELRRVKTDRKDAVKLANYGLDRWLTLPRYIPEEDTRLLLKNCYRQYRQYSKVQTVLKNNLISLLDTVFPNANRLFSSPIRGDGSEKWVDFVAEFWHCRCVSEKSERAFTSKYLRWCRKHGYNFREAKAHTIYAEASGHIGVMPKSETTKLLVKQAVSQLRATSTALAALKHEMQSLASQLPEYPVVMDLFGVGPTLGPQLIAEIGDVRRFYSKKALVAYAGLDAPPNDSGDVTGRHKSMSKIGASSLRRTLFLVMSVYLQTAPLDEPVYQFMDRKRAEGKPYRVYMMASANKFLRIYYATVKAYLESLEHTA

SEQ ID NO: 50402 - protein, 413 aa, unidentified
MAVMVGLDWGGTAHAVCVIDASGRVLDQFAVGHDRAGLAILGARLQQHGAAAEIAVAIERPSGLLVDALVDVGFRVIPIHPNLLKACRPRYRAVAAKSDPGDALILADILRTDGHRLRPPAPQSDAIKALRALVRGRDDLVRARGALANRLSAVLESFWPGAARIFSALASPIALTFLERYPTPEAAARLGPKRLAGFLAQHQHCGRRSPEALLERLRGAPDRRAGEAGAEAKGELVRALARALQALIAERAQLTSRIEHLVADLPDGRVVMSFPRAGRVGACPPATLRVDRGAAQILAELGDVRARFPTGDPFAAEAGGVPVTYQSGKSRGGGWRWACNKRLRAALTRMADNSRHQSPWAADLYRRARARGCAHPHAIRILARAWARVLWRAWTDRVPYDPARHKGAQALAA

SEQ ID NO: 50403 - protein, 392 aa, unidentified
MIYVGIDVASQKHDCFLLRDTGEVFSKNSFTIKNNFEGYKKLHNSIQSFVESTKDSNVRIGLESTGHYSKNILLYLIKQGYQTTLINPILTNMDRKASTVRKTKTDKIDAEAICKFLDKNRFEFKPYTLLSYHIDALKSLTRQRFSLVKQMTQQKLIFQRLVNVIFPEFLSHFSNDYGESVLNILYSYPTPKKLAKAHKESITKLLHGRCKITSSEILELAKNSIGQSEDYLGFELKHTIDMIRFYQSQVEIYNKQIEIELNETEYGKIITSIPGVGIITGAMIISEIGNINNFSNSDQLLAYAGLDPSVYESGQFESIHNKPSKRGSKYLRWAFHQASSIIWQHDNTFNEYYQKKIREGKHHYVAIGHIDKKLVRVIFSLLKNKSLFIPQN

SEQ ID NO: 50404 - protein, 348 aa, unidentified
MAHFVGLDVSVKETSVCVVDDTGKVILEQKVPTEPADIITLLSSLGVSYGRIGIEAGPLSQWLVNALTVAELPVICVETRHMKALLTAQQINKTDRNDARGIAQMMRVGLFKPVHVKTLIAQEQRMLLTSRKLLQRKLLDLESDLRGTLRNFGLKVGVVSGGRYEARVRELIAGFPRLAAIAEPLLKVRQVMRQQLAVLHKMLLDTVRDDPVCRRLMTAPGVGAVVALTYRATVDQPQRFVHSRAVGAHVGLTPKRYQSGEIDYDGGVSKCGDALLRTMLYEAAQVLLTHGSKWSWLKAWGVRVVQRRGMRRAIVAVARRLAVVLHRMWVDGSEFRWSKDSAAVPTAA

SEQ ID NO: 50405 - protein, 376 aa, unidentified
MSEGISFAGLDVHKKSISVALLKPGAREPIEWQQANDAQSVKRLVRKLKREGGETVRCCYEAGPCGFGLQRTLCSAGIECEVIAPALIPRKPGERIKTDRRDARKLAELHRADLLTAVRAPTPEEESVRDLCRCRDDVREELMSARHRLGKFLLRRDLRYGEGRAWTQKHRRWLKSVQFEHRAAKATFDSYLHAIEVLEERMRAVDKELAAVAAEEPYREPVAWLRCFHGIDTVTAMTIVAELHNFRRFETPRALMAYLGLVPGEHSSGAKTSRGSITKAGNKHVRRILIETAWHYRHKPTVGANLRRRREGQPAAVIAIADRAQHRLHRRYWRLLLHNNKVPNKAVVAVARELVGFLWAALYDGDWSASGGCPTS

SEQ ID NO: 50406 - protein, 404 aa, unidentified
MWYAGIDWADEKHDIMVIDDAGHQVGKRQVKHTVEGLKELTAFLQSISGPQRKAELACIVETNHGLLITALLEAGFAVYPVNPNTIDRRRSASGAKTDSIDAYLLAKVGRADFAELRRLTPDSPIIAELKALIRDQDSLIQMQTRLVNQITACLKAYYPVALHLSSKLQQPSTLTFLQTYPTPGSAMAASIQQIEMTLRKGRHSNPRHAASTIYETLHQPHLQADEITTRTKSRRLLTLVKQLLPVVESIAEYDKAIAALFLTHEDLELFRRLPRAGKRLAPRLLAEIGDDRTRYSHTASLQALAGTAPVLFQSGTYAKAHRRYACIKPRLFAMQQFAWQSTLSEPWALEYYQRKRLEGKSHTVAVRALANVWIRVIYAMWLKGECYQAAIFEAARREHAKPAA

SEQ ID NO: 50407 - protein, 341 aa, unidentified
MDIAVLGIDLGKNSCSIVGLDSSGKVVLRRRMQRKTLVTMAAKLSPCIIAMEACCGAHHLGRILAAQGHTVRLMSPEYVRPYVKAQKNDDRDAEAIAEAATRPTMRFVTLKSEEQLDMQSLHRARDRVVVERTSLMNQLRALLLERGIIVPQGRAKLRYRVNELLVQTCNELSPRIRVLIEDMMARWQAVDNRIAAFDTEFAAEVKQNEAARRLISIPGIGALNATALVAAVGDARTFARGRDLAAWLGLVPRQATTGGKPRLLGITKRGSKYLRKMLIQGARAALPTLSRGNTRLGQWLRSLLARAHSNTVVVALAAKMARMVWALLRHGRTFEHRAITV

SEQ ID NO: 50408 - protein, 372 aa, unidentified
MQQSSTLYVGLDVHKESIAVAYIAQEYHAEVVSLGTIGTRQCDIDKLIRRLQSKTSHLVFVYEAGSCGYWLYRYLTAKGHRCWVVAPSLIPKKAGDRVKTDRRDAMQLARLMRSGDLTPVYVPAVEDEAIRDLSRAREDTLRDLKAAKLRLKAFLLRHDIRYTGRANWSPAHLRWLSEVVCPTPAQQIVFQEYVQTVTEQTERLGRLELELHEQVHTWRLAPVVEALQALRGVQFTVAVTMVAELGDLTRFENPRQLMNYLGLTPSEHSSGARRQQGSITKTGNTHARRALVEGAWAYRYPAKVSRHLQLRLEKLPTAIQAISWKAQVRLCKRYRHLMAKGKNANQVVVAIARELSAFMWAIAKHIAVTPKA

SEQ ID NO: 50409 - protein, 342 aa, unidentified
MDHFAGLDVSVKETSVCIVDDTGRIVREVKVASEPEALLAVLKNPAYRFKRIGLEAGPLSQWLFSALAEAGLPVICVETRHMRAVLKAQINKTDRNDARGMAQMMRVGLYRPVHVKTLRSQKLRMLLTHRQLLLSKAIALENDLRGTLRNFGLKVGMVGKVKFEARIRKLVENLPDMAVLVEPMLIVRRVLREQIVILHRRLLAIVRDDEVCQRLMTTPGVGPVVSLTYRATVDIPARFRKSKSVGAVFGLTCAKYQSGEVDWDGRISRCGDEMMRTMLYEAAQAMMRSKKWSWLKAWAMQIARRRGMKKAIVALARRLAVIMHRIWVDGTEFRWTREAAVA

SEQ ID NO: 50410 - protein, 282 aa, unidentified
MNFYTQHHKHYCGIDLHAKAMYVCILDQHGTKLVHKNLPTTPEAFLRVIAPYKEDVVVGVECMFTWYWVADLCSQEGIAFVLGHALYMKAIHGGKAKNDKIDAQKIAVLLRGGMMPQAYVYPAEMRATRDLLRRRCHLARKRAELLAHIHNTNSQYNLPEIGKRLANKSNREDVADHFPNPSVHKAIEIDVSLIDHYDQLLGEVELYLTRSAKAHDVQTFARLQSVPGIGQILALVLLYEIHDIRRFPRVQDFVSYCRWVKCAKESNGKRLGTSGKKIGNVH

SEQ ID NO: 50411 - protein, 368 aa, unidentified
MDEFISSFVGLDVHKDSIAIAVAEDGRESPRFVGTVGHEIKQLLKALHSVGKPESQLVVYEAGPCGYGLVRHLRSRGYRCEVVAASKLSRRPGDRIKTDRRDALTLARLARSGDLVRVTVPDERDEAIRDLSRAREDALRARLKSRQQLKALLLRHGRRYTGRSSWNPTHERFLSTISFSQPAQDIAFAEYRLDVREGHDRVERLTQALRTQTEQWRMKGLVAALSSLRGIDFIAAVTLVAEIGDFRRFSHPSELMGFLGLVPSEYSTGEKQRQGDITKTGNSHARRVLVEAAWNYRFQARLSRLMHVRQEGQPKVIRDIAWRAQLRLCHRFRRLRSRQLHQNKICVAIARELAGFIWAIAQQVTVAA

SEQ ID NO: 50412 - protein, 351 aa, unidentified
MKHCKLLSIDLAKNIFQICCLDRNNQEILNRKVKRNKLLETVLQKNPKTIVMESCYSATYWGRRFQKHGFEVKLIPPQHVKPFVKGNKNDKHDALAIAEASLRPHVHFVPVKNEAQQEIQIMHRIRERYKQERTKLSNQLRGLLSDYGIIIKKGIRHLLATVPTILEDCENGLTLYSRIYFEKQLEEIREKTKQLKTIEKDIKELSKTQEGYDEAVSVPSIGDITASAIIARVGDGKQFAKARGMTAWLGIVPKHASSGEKLKMQNISKRGDTYLRTLLIHCGRVIVNRYKDESDPLKQFANRIAAKRGKNVAAVAVAHKLARIIWAVLTTKTKYDPKHAQKYVQNLGAKK

SEQ ID NO: 50413 - protein, 370 aa, unidentified
MKEYIIVGCDLHDKTMLLKVARGRSAADRVTWANNVAGRRAMLKDLKGRSAEAGGAAVVFAYEASGLGFRLHDLLAENGIVCYVLAPTKMPKSLKHRRSKCDEKDADQILEMLRAHVLAGNSLPKVWVPDVETRDDREVVRSRLDARAKATKVKTQVQTLLKRNGIDRPKDTGTGWTLPFRAWLRGLAGPSSRLSHGRRLGLATLLQQLTFLEDQAEMLNVAVWKLSEKERYAETVKHMTGSAGVGILTAMVYLTEMGDLTRFDSRKEIGAYIGLVPSSDDTADSDRKGHITRQGPWRVRWMLCQAVWTIVRTNEEEAGYYERIVRKNPKHKKIAVVACMRRLAIRLWHIGSEVQREQGIFGRALAGVSV

SEQ ID NO: 50414 - protein, 343 aa, unidentified
MTNITTIGLDLAKSVFQVHVADRDGRPVLRRKLRRSQVLGFFAKLPPCVIGIEACVSAHYWARELQELGHSVRLIPPQYVKPFVKTNKNDASDAEAICEALSRPTMRYAAVKSAEQQSVLTLHRARELLVRQRTMLINAIRGHCAEFGIVVAQGASKVTALIGIIEDHQDDRLPALVRQALGSLIRQYEMVQEQILGLERQLTSWHRATEASRRLATIPGVGVITATALVATIGDASQFRSGRQLAAWLGLVPKQHSSAGKDRLGRISKRGDGYLRKLLVHGARTVLLWSRRKKEERSRWQEALLARRPTNVVLVAMANKTARIVWALLSRREVFCAKAHVTT

SEQ ID NO: 50415 - protein, 317 aa, unidentified
MSLPTASFVGIDVSKQQLEVAVRPSGETWSVAHDEAGLSALVAQLRALAPALIVLEATGGWEVALASALAAGPLPVVVINPRQVRDFARSTGTLAKTDRLDAQILAQFAEVIRPQPRALPDAQAQELAALLQRRRQLVEMLTAEKNRLTLASRRIRPQLQAHIEWLHKQIAQFDEDLRQLIRASPLWREKDDLLRSAPGVGPVLATTLVAALPELGTLTRRQIAALVGVAPLNRDSGPLRGRRSIWGGRAQVRAVLYMSTVVAMRHNPVVAAFYQRLRAAGKAPKLALTACMRKLLTILNAMLKHHTRWAPGLAQHA

SEQ ID NO: 50416 - protein, 383 aa, unidentified
MSDHSEAFVAFDTAKLRNAVAIADGGRGDEVRFLGEFDNTPAATAKLVRKLAAKYERLTFCYEAGPTGYGLYRQIKSLGHECIVGAPSLIPKKAGDRVKTNRRDAISLAKLLRSGDLSAVWVPDRQHEAMRELTRARETAMNDLRAKRQQISAFLLRRGVHYPPDKKTWGKMHINWLMSQKLEFTEERIVFEELMEAMRQAQGRLDRLEAAIRAAVPNWSLCRLVTALMAMRGLDMISAATIVAEVGDLSRFRTPRELMAYVGIVPSEDSTGDKVKRGPITKTGNRRVRRMLVECAWSYQFPPRLSKDKQVKVEAVPQAVGEIAWKAQSRLNQRYRALLRKGKLKNVAITAVAREFVGFIWAVAQAVGAAPAVATTKAPAVAS

SEQ ID NO: 50417 - protein, 410 aa, unidentified
MTLYCGIDWATAHHDVAVVDDNGNVVARGRVSNDAAGFAQLLTLLAQAGDTAEHPIPVGIETDHGLWVAALRATGRVIYPINPLAASRYRARYAVSGAKSDATDAVLLANIVRTDAAAHRPLPADTELAQAIRVLARAQQDAVWARQQIGNQIRDLLKDFYPAALAAFDQQPAGGLARADARTILAAAPTPTQAARLTPARLRRLLTKAGRRRHLDRDIDRLREVFTDTYLHQPLQVETAMGIQLGALLRQFDAACTAADDLAEAAIAHFERHPDAEIITSFPGLGMLAGARVLAEIGDDRSRFADARGLKAFAGSAPITRASGKKTVVLHRHIKNKRLAAVGPIWALGSLRASPGARRHYDTRRAAGDWNHQAQRHLFNKFLGQLHHCLQTGQPYNEHRAFPPPLLLAA

SEQ ID NO: 50418 - protein, 474 aa, unidentified
MKKHKQAEAKTKSEALKPLREQEPDAAGIDLGANEIWVAVRAERDQKAVRQFGAFTRDLMAIVQWLVQCGVRSVAMESTGVYWIPLFQLLEEAGLKVCLVNARHVKNVPGRKSDVRDCQWLQYLHSVGLLLGSFRPVQSICAVRSIYRYRQNLLSMASQHVQHMQAALDQMNIKLHHVIDDLTGVTGQAIVGAILSGQRDPVQLAKLRDKRIQAPEATIAKALEGDWRKEHLFVLAKAWAQYQQVQKQIQDCDQELWNYTRELEACTKVIKPAKVMRLKPELVGAELLSTPPTKKRARKKTSKNQPEGPWKEELERFFGVDLTAIPGISVLTGLTLMSELGHDLSTFRTEHHFASWLCLCPDNETSAGKVLRRRTRRSQNRVRQALRMAASSLHHDKSYFGDKYRRLRARLGAPKAVTAMAHQLARIIWTLITRQLPFDLSVFAYHEKVHQQRRLKHLAASARHMGYQLTPIAA

SEQ ID NO: 50419 - protein, 321 aa, unidentified
MQGKVTTEETASVYVGVDVCKDHLDVCLHPLGERFRVGNDRDGRRALVRRLGRHKVALVAMEPTSKYHRSAHRQLATAGFAVALVNPLRARLFAEACGRLAKTDAIDAAMLALMAERLAPAPTAPPTLAEEQLEELASARSSAIAERVALDNRRSMASAPFLRRELAARLRSLDRHIARLEREIDIAIAADPATARRAEILRSIPGVGPVTTIAFLAWMREIGQLNAKQAAALAGLAPVAHDSGPARGKRRIRGGRGALRTTLYMAALVASQRNPDLKRFYQQLKSRGKPPKLALTAVARKLVILANRLVSENRTWMPLAS

SEQ ID NO: 50420 - protein, 351 aa, unidentified
MKKVIKQVLGIDVAQKELVVCLARMFGDLQSELYAHKTFANTAKGFGLLLLWVKKLTEATVDVSYVMEATGVYHESFAYFLSDHGLAVSIVLPNKISNYAKSLTVKTVTDKTASEAIARFGLERQLDKWEKPSPIFKCMKQLTRERGQVIEERSMIKNQLHAENAEAQPNKSSLGRIRQRIGLLDKQEKEIAKEIAALIKTDETVSETVGLLCSLTGVGILTAAIVLGETNGFDLIRNKRQLTSYAGLDVKEKQSGTSVKGKPKISKKGNRFLRKGLHLPALTAIRHDERFKTMFVRLVGKHGIKMKAVVAVQRKLLEMMYTIYKTNTKYDKEYLQKKEAEAIENQKKEAA

SEQ ID NO: 50421 - protein, 374 aa, unidentified
MSTTHRPECTAGALYVALELASKEWLLTMSIDAGATRQRKRVRPGDREALVEALAEAKRRYSLAPDAAVRSCYEAGRDGFWPHRLLTVLSVANLVVDSSSIEVSRRARRAKTDRLDGEKLLRLLLRHWRGERDMWHVVHVPSREAEDARHASRALTTLQGERTRYRNRIHSLLALHGVPRLRIDARLPERLAAVRAWDGEPLPPGIQTRVRATWRLLQSVDGERQQARRTERQQVCVTAAPSMAQQLARLRGVAARSATILAQELFSRDLRNRRQVGALTGLVSAPYDSGAKRIDQGLARSGLPAVRRVAVEIAWAWLRYQPTSALTQWYHVRFGGGGAVMRRIGIVALARRVIIALWRYVTQGIVPEGALLKA

SEQ ID NO: 50422 - protein, 376 aa, unidentified
MDRATTAPADRLFCAVELSKNSWLLGIQFPDHQKASVYPIKGGDSEGLMAKLVAARDRWAKVSGKKPSIILCYEAGYDAFWLARFLKGHGIDCLVVDSASMQVNRRSRRAKTDRIDLGKLLRALIAWCGGERHVWSVVRIPSVDEEDLRRSHRERSRLITERTAHINRIKGLLFAQGIRGINVKARYKTLQIDKLVTGEGRPLPPRLAQEITREIERLGLVQQQIAAIEHERDESPTTCKQTEKKRAQLLLLKGIGPTGSAVMAREVYYRQFSNRRQVAGFLGLATSPYDSGQTERSQGISRAGSGPVRATMIQMAWLWIKHQPKSAIAQWFVQRTEGQNGRIKRIMIVAVARKLAIALWRYLEQGLVPQGATLTR

SEQ ID NO: 50423 - protein, 344 aa, unidentified
MGEVSTIGLDIAKSVFQVHGVDVAGAVVIRKRISRAKMVEYFSELPPCLVGIEACPSAHHWGRELQALGHTVRLIPPSYVKAYLKRSKNDANDAAAICEAVTRPSMRFVPIKTTEQQTALMLHRTRQLLVRQRTMLSNALRGHLAELGIVSAKGRNGTAELLRIIADCEDSRVSPAVRGILEVLARQYGSIGAEIASIDKSIMALHRACEASRRLAEIPGIGPVGATALVAEIGDWKAFSSGRSLAAWIGLVPKQHTTGGKDRLGSITKQGNRYLRWLLVVGAMAVIRYARKHGAQKRPWLGRLRERRPTKVAAVALANKIARMAWAIMVRGEKYREPKLSLAA

SEQ ID NO: 50424 - protein, 395 aa, unidentified
MKDPYTKVACGGMDVHYKFSNVTFRDEHGGVVRRERLRHIQRDSLREHLGRWPRGIPLVLEASFGWGWLSDELSEAGLDPHLSNCYKLEQMRKARGWVKTNKKDADMLSLLPFEATDWWAVWRAPREVRDQREQMRFRGDLVMQQTAVKSRIHAIFHRHGLFHEFSDLFGVQGRRYLGDLCIGGSPHLSAQALQALRGQVKLLDHLRGQLADITRILHRQLATTPLIGRLKTIPGFGLILSHVVAAEIGRIDRFGHHKALASYSLLAPRSNDTGEADPDHCPRGRHLGRRGNRTLKWAFIEAAHGAVRSGGRWRAMFDRVTHNGQKDRNRGYIKVARELVKVVYVVWSSGQNYQPNPPRRPGGDRRQQNTRNLHKKISRSGTGQLSHPMVHASMA

SEQ ID NO: 50425 - protein, 368 aa, unidentified
MLEQSHYKVGCDAHKHYSLFAVLDHQGRPVEQTRVNHEPGAIRAFLSRFPEGTPVALETVGNWYWIVDEIEQAGCVPLLAHAQMAKKMMGHVHKTDKLDAEGLAILQHLGSLPTVWIAPGEIRDERELPRTRMALSKMRTALKNRMHSTLAKYALSLDTQSDIYAAKWRPQLLELICSLPDETRRCMRQELELLDQVQEQIRRLEARILERVEITPTIQLIKSVPGPAEILSIVIDREVGSIDRFPSPHHFASYSGLVPKVKASGGKTHYGKMIKAANNYLKWAFIEAANVVVRQQHHPSWRQKYVVALFERTRQRKGHAVAVGTVARYLAEATYWVLKKAEPYREPVPRRPAGRTSPASPKQGQPRA

SEQ ID NO: 50426 - protein, 347 aa, unidentified
MRFYTKQHQFYCGIDLHARSMYVCVLSHDGEIVLHRNMKAAPEAFLKAVAPDREGLVVAVECIFTWYWLADLCAEQGIPFVLGHALYMKAIHGGKAKNDKIDSQKIAALLRGGMLPKAYVYPAQMRATRDLLRRRTHLMRKRSELLSHVQNTNSQYNLPEIGKKIAYKANREGVAERFSDPAVQKTIGVDLALITHYDELLKDLELYILKTAKHHDANTLYLLHTVPGIGKILSLVWLYEIHQIDRFPSVQDFASYARLVKCSKESGGKRLGTSGKKIGNAHLKWAFSEAATLFLRNNPQGQKLLSRLENKHHKGKALSILAHQLGRAVYYMRKRKTAFDMDLFLRS

SEQ ID NO: 50427 - protein, 356 aa, unidentified
MKQFSKEPVATIGIDLAKNSVHAFGVDAQGEVVFSRKLSRHALSAFIAQQPPCRVAMEACGSAHHWARTFQGFGYEVVLIAPQHVKPFVKTNKNDAADAEAICEAAQRPRQRFVPIKSVEQQDIQAIHRLRSQVIGQRTALVNQARGLLAEYGIVMPQGRAAAMRRLPEILEDAENGLSERFRAELQGLLEELRHLDARVLHYDAQIKTTADTSESAQLLMSIPGIGPLVATALLATLGDQWGLFHNGRALAAWLGLVPRQHSTGGKARLLGISKRGDVYLRQLLIHGARAMMRWVENKEDALSHWARHLKQRRHANVASVAMANKLARIAWAVMTTGKPFDPARGALAKPTTVAA

SEQ ID NO: 50428 - protein, 407 aa, unidentified
MEVLYPRCAGLDVHAGSVTACARIATGATVTYEHRTVSTTTRGLLELVEWLMAHGCTHVAMEATGVYWKPVWHVLEEHVTLVLANAMHIRNVPGRKSDMTDATWIADLLAHGLIRSSFVPPAPIQELRDLTRTRRQLVHEVARHVLRIQKTLEDANLKLTQVMSDIVGVSGRAILTALIAGETDPDRLADLTRGRLKATRADLLDALHGRVTDHHRFMIKLHLTQIDALETAVATIEARIGDALGPFRAAVSLLTTMPGLSETTARVLIAEIGTDMTRFPAVGHLISWAGFCPRLDQSAGKRRSTRTRQTSPWLKPTLINAAWAATRKKDCYLRAQFLRIKSRRGAKKAILAVASSMLTAAYFMLRDGIEYHDLGPHHFEQRDKEQLAKRLIQRLRDLGVAVEVKAA

SEQ ID NO: 50429 - protein, 364 aa, unidentified
MPSMSHAAEDSQDRRSDEEIILGVDTHRDTHVAAVITILGVLVATATFPTTAAGYRELLGWARSFGVLCRAGVEGTGSYGAALARYLHRQDIAVIEVNRPDRAARRRHGKTDTVDATAAAHAVLSTRATSIAKTGDGPVEILRLLHLARASAVKSRTQAINQLKAVIVGADPALRDTLTGLSNTALTRHCADLPTVFPTDVATATVYTLRRLAQRIQALTAEERELQRHITAVLEAHVPQLLHRHGIGPDSAAALLITAGDNPDRMHTEASFAALCGVSPIEASSGKTRRRRLNRGGDRRANAALYRIALTRSRGEGRTRDYLERRATQGLTRREAVRCLKRYIAREIYQLLQQINTAQTPRTA

SEQ ID NO: 50430 - protein, 423 aa, unidentified
MEVMHRRVAGLDVHKETVVACVRLMKGRKATRECRSFAATTTGLLELLAWLTASRVTDVAMEATGVYWTPVWKILNEGDFELIVANAAHIKRVPGRKTDINDAMWIADLVACGLIKASFVPPESIQELRSLMRTRKQLVREQTRHVQRLEKTLEEANIKLGAVISDLMGVSGRRMIEAMIAGEDDPHRLAALARRSLKAAPHTLAEALHGRLRAQHRFLLQLHLQQWDAIDAAIRQIDREVAAQVARLDAEAEDAQAPFCELIDRLSGIPGVSGLSATTILAEIGRDMSRFPTAGHLVAWAGLCPAQNESAGKRKSARLRRGAPWLKTMLVQCAWAAKRAKNSYYSAQFHRLRSRRGPQKAICAVAASLLTAIYHMLKAGAPHRDLGADYFDRRSPEAQAKRLVTQLAKLGFTVQLQPLAEAA

SEQ ID NO: 50431 - protein, 414 aa, unidentified
MLKIVYRVCCGMDVHKSFVVACIASTNEYGVTTYKSKRFSTFTGDLRRCAVWLAENNCKDVCMESTGKYWIPIYNILESTCNIVLAHPKYVKAIRGKKTDKRDAKWIADIFKHDLVAGSFIPPADIRQLRDLFRYRWKLTSFTTGEKNRAQNCLTVSNFKLDDVFSDVFGKAASAITVRILDNPAKKITDVSGFRTKHMKATDEEILAAVDGVMCEEQAEKLRIIRSHMDSLELCKLNLESLILATAEKYLPQLNLVMTAPGIQSFAAIGSISEIGVDMSVFPTSKHLCSWAGLTPQNNESAGKKKTTRISRAGAYIKPLLVQCALCAIRAKQFPEVRNRYLALKKRRGHKKAIIAIARMLLTVIYNMLKKNEPYNPELYRKDDRPPAHREVSVEEAIFILQRQGYLVTAPSTT

SEQ ID NO: 50432 - protein, 352 aa, unidentified
MEEISVIGIDLAKRVFQLCATTGSGAIAWEKRLRRAAFIKFLEDEAPRCLVGMEACGSAHHWARWLAARGFTVKLMAPSAVRAYRAGVHKSDRRDARAVAEATSRSQVAAVRVKSAAAQATQALMRVRERRIRQRVQTTNQLRGLLNEFGIVLPKGQAVLLARLGEVMAGAPFAALPALVQELVERLREEIIEQADKVKAAEAMLIQAVKADAGCRLLMSIPNIGPINAAALSVALEALGVFARGRAFAAYLRLVPRQQASAESSALHGIGQMRACEMRSYLVLAAQSLLIRASRLKQPPQDRLLIWAGRLLRRKTRNVAVVAVAAKLARIAWAVMAHNQPYRLRSVGAQPV

SEQ ID NO: 50433 - protein, 377 aa, unidentified
MKKNIRFIGLDVHGETIAVGVAEPSGEVRSLGVIPNRPESVRKLVKKLGPASSLRACYEAGPCGYVLYWQLTQMGVHCDVIAPTLVPTKSGERVKTDRRDAQKLARSYRSGDLTPVWVPDPEHEALRDLVRAREAAKKDQLRARHRLQKLLLRRGLRPPEQMKPWTTGYLAWIKSLRLQPPALEATLLDYLSEVDHAGERIKRLERAIDQAIEAAPAAIRAVIDGLQALRGIARISAATIVAEVGMLSRFSRPKQLMGYTGVVSREHSSGDRIRRGAITKTGNAHLRRILVEAAWSYRYRPTVGPQLRARQARQSAEVKEISWKAQHRLHYRYARLVGRGKPKQQVVTAVARELAGFIWAVGVQVEKQLPIGNVRAA

SEQ ID NO: 50434 - protein, 351 aa, unidentified
MPRASTVHAVIAIGIDLGKNTLHMIGLDSSGAIVLREKVSRGRIASRLANLPPCLIGIEAGMATHYVARELTALGHDVKQVPATYAKPFRQGHKNDFRDAHAVAEAVQRPTTRFVPAKTDEQLDLQALHRVRSRLVSERTAVINQIRGFLLERGVIVRQGLRFLRQLLPDILAKRADVLSPRMVRIVTELAGDWRRLDERIETVTDEIEALAKSDDSCRRVMTVPGIGPIISSAMVAAIGNGVAFARGRDFSAWLGLVPKQMSTGDRTILGRISKRGNGYLRMLFMQAARVILLRPANWPKHSFGPWLARAAQRLHPNVLAAALANKLARIAWTVLAQERSYESRVKKAAA

SEQ ID NO: 50435 - protein, 451 aa, unidentified
MEDEVIKMEVVNPQAAGIDVGSRSHWVAVGQREEDVREFGVFNDDLFSLCDWLKECKLRTIAMESTGTYWQNLYAVLISRGFHVILCNGKFTKNIKGKKTDIKDCQGIQRLHSLGLLSSSFLPDGKTEELRTYCRHRQNLLHESASTSKKMQKYLRLLNLRLDVVVKDTCGLSGLRIIRAICNGEKNPEKLAELRHANCHTSKADIARALQSNGREDYLFALKYELDMYDYLHKKIEECDQKIEEKLNSIINDDENKKQHHLEPKTYKKVNKNTPKNIDLNLKSYQMFEGTDLLAIEGMSYSTVLALMSEIGVEGIRKFPTAKHFASWLRLAPNNKVSGGKVLSSKVPKGSNNLKISLRNAANAIGNLKDSTPLHDFFMRISFRKGRVSAISATARKLAVIIWNMVVKGVPYQNPEGYLFRDQKKKLGLLKRIQKQITKFELECTDFQFAN

SEQ ID NO: 50436 - protein, 347 aa, unidentified
MKVLIGVDPHKTSVALAAVDEATGELLERASFPQDRAGLRSLEHWASRFPKRRWAMENARGLGKHLAGRLAATGESVVDVPPKLSARVRVLSSGNARKNDGLDALATALAASRNERLAAVDPEAASEVLRLLSERREDLVAERTRALNRLHGLLRDLVPGGVAGKLSADRAARILRGMRSQGCASDRLRRRLASEILRDVRTLERKIADLNRRVEAEVEASGTTLPEIFGVGPILAATILGKVGSVGRFPTKAHFASYAGTAPVEASSGQVVRHRLSLAGNRHLNYALHMVAVCQARSDARGGTYYRKKIDEGKSRKEALRCLKRRISDAVFASLVADSQVLSRSAA

SEQ ID NO: 50437 - protein, 405 aa, unidentified
MEVVYERCCGIDVHKKSVVACLLTGKQKESRTFGTMTADISSLSEWLTENECEAVAMESTGVYWKPVYNVLEVFGWELIVANAHHIKNVPGRKTDVKDAEWIANLLRHGLLTPSFIPDRDQRETRELARYRKSLVEERSREINRLEKILEGGNIKLSSVVSDLTGLSSRNILQRLVNETLNKDSIADLLHGQLKGKEDDVLKACEGVLSKTQKVLVKAILSHVDDMTRRIEEMDDFLNGKLKEHDDALKKLQEIPGIGERSAQVIIAELGMDMSKFPSAKHISSWVGLCPGNNESAGRKKSGKTGKGNKILKSTLIQSAQVASRRKDSFFKAQYDRLVVRRGANRAKVAVAHSMLVAIYHMLKNNKPFLDLGESYYNQFNPEKKINYHLRKLNQLGWSLPVDAQA

SEQ ID NO: 50438 - protein, 409 aa, unidentified
MDRQLERCCGLDVHKETIAACVRIGGRGGRAAQHVQTFRTTAADLVVLRDWLAAHGVTHVVMESTGVYWKPVYYALESDFTCLLVNAAHIKQVPGRKTDVHDCVWIAQLLEHGLLRGSFVPPVPIRELRDLTRYRKALIQDRTRVANRLHKALEDAGIKLATVASDILGVSGRAMLEALATGTTDPMMLAELARGRLRGKLPALRAALAGRFRTHHAFLVGQLLTHLDYLDEAIGTLSTEIEDHLAPFADQLNRLDSIPGVNRRTAEVIIAEVGVDMSAFPTAAHLASWAALCPGNNESAGKHKSGKTRKGNRWLRTALIEAAAGASRAKDSALQARFRRVLRHRGPKKAVVALAHALLRIAYHVLAHGTTYRELGGDYYDRGHTQRLTRRAIRLLEGQGYRVTLEPAA

SEQ ID NO: 50439 - protein, 335 aa, unidentified
MEFEFFVGIDVSKNELDFAVQQGKTFLFHREIGNEPESIKAFIKELERQAGFRLDKAIFCMEHTGIYSNHLLSCLHKRKAHVCLESATHIKKSLGNIRGKNDKIDAMRIAEYAYDKREKLRLWAPKREVIQQLASLAAGRSRLIEAKKLLKTPLGEHQAFSTKKIARRSMQLCGHTLKAIDADLDRTEKAIQAIIAADDELRRLFSLTTSVTGIGMVTATQIIIATNEFKDISDPKKFACYSGVAPFTEDSGKIIKKARVSHMANKKVKTLLHLSALVAIQYNTDLKLFYDRKVNIERKNKMSVINAVRNKLILRIFACVNQNRHYEKNYVKLVA

SEQ ID NO: 50440 - protein, 315 aa, unidentified
METFFSSVAGIDVHKDQITVSVIIGEHGENLLKETWESNTFTEDLENCGRKLISLGIKHVAMESSGIYWRPIYNVWEKMGIIITLGNATHIRNVPGRKTDVKDSQWIAELHSNGLIRPSYIPKEEFRELRSLTRHRRSLVEDIGRTKKRVQKILEDGNIKLSSVISDVFGVTGFKIVSALAKGITDPYVLAKEISTNIKASEKEVIRSLKNTLKGYQIVLLRELLTQYLYLSQLRDNIEKEIDIKMTPYNELVKRLDGIPGVDKISAEEIIAEATTKMGNFKSGKHFAAWAGVAPGNHESAGKKKRQNVDTGTQH

SEQ ID NO: 50441 - protein, 348 aa, unidentified
MHYIGMDCHITTLDFAVVNDAGRIIKANRVATSVKSFMGFVKEVTPPRIVYMEEGTLAAWALETCVRYGEKLVITDPKENHWIGSSGQKDDSIDALKLAQLARGGYIKEIHHPVGQRRRFRELMTAYHDTVRSEIRIKNKIKAKFRQNGIHCTGDTVYSKTHKEEWKIKLPPDSTLLLILDGLWLQLEQLEQTEKKILAAAKAHAKQYPEIKLFSALPGIGFINAATVSAILETPHRFADKRKVWMYAGLGLMRHSSGGKLYSERLTTEYNRLLKYTIKQAAEAAIRAKDNLFRQKYLDMTLLRGVAPHRAKLTVARDMLAIMWAMWKKGEKYNPELGEKTIHKQGWA

SEQ ID NO: 50442 - protein, 402 aa, unidentified
MNAVGIDVSKGKSMVAIMRPFGEIVSTPFEIKHTASDIRSLVELINSVEGESRIVMEHTGRYYEVLAHQLSEANLFVSAINPKLIKDFDNDSLRKVKSDKADSVKIARYALDKWQNLKQYSVMDELRNQLKTMNRQFGFYMKHKTAMKNNLIGILDQTYPGVNTYFDSPARSDGSQKWVDFASTYWHVDCVRKMSLNAFIDHYQNWCKRKKYNFSKSKAEEIYGKAKELVPVLPKDDITKLIIKQAVDQLNSASITVESLRTLMNETASKLPEYPVVMAMKGVGTSLGPQLMAEIGDVSRFTHKGAITAFAGVDPGVNESGSYEQKSVPTSKRGSSDLRKTLFQVMDVLIKTHPQDDPVYQFLDKKRAQKKPYYVYMTAGANKFLRIYYGRVKEYLASLPES

SEQ ID NO: 50443 - protein, 479 aa, unidentified
MRIIAPLRLRAIVLLFASKEKALSKRTKKSKFQKFNVQSLPEHLRHINLNAAGIDIGSERHMVAVPEGRDEVSVREFGAFTADLQALADWLQQCGVTTVAMESTGVYWIPLFELLERRGFEVKLVDARHVKNVSGRKSDVLDCQWIQQLHTYGLLAGAFRPTDELCVLRSYLRQREMLTQSSSMHIQHMQKALQQMNLLLHNVVSDITGVTGMKIIKAILAGERDPRMLARNRDRRCQNSSATIAKSLVGNYREEHLFALKQAVDLYETYQAKIADCDQAIIKQVEKQPDITDDTLPPSEKLIQARERIRSGVDVRELLFKKSGVDLFATPGLAADTLLTLSSEVGFDMSPWKTIKHFTSWLGVCPGTKISGGKVLNKKTKRHPNRATQAFRMAAATQARSKTALGAFYRRIKSRSGGKQAITATAHKIARIYYTLLTKGTAYVEIGQQAYEDKYKERRIHHLMAQAKSLGLQLVPCAT

SEQ ID NO: 50444 - protein, 365 aa, unidentified
MWIIGCDFHPSGQQVYTVNEQTGEIVERWLSHGSEEVDEFYSSVPAGSEVGVESSGNMLWFERKLAQYGHKLRLGDAAKIAAQDPRKQKHDRRSAEHIYRLMRKDDFPDLQWVPTLEQRDLRQLLLHRHKLVRMRAQVKNQLQHIALNQGQQKKWQLWTQKGQELLRKLELEPWTARRRDDLLKLLEALNGHCEGLDAAVEQAAKERAETRLLMTHPGIGPVISLAAVLTLGAVERFENSRQLVSYLGLNPSEDSSGVRRRLGSISKQGSSFMRMLLIQGAQTAVRGDAELARQYRRLAMKKNKGIAKVMVARKLAVRVFWMLKTNKGYPELVRMRGSSSHPVVAVTETDRLSERPASRSGRKQI

SEQ ID NO: 50445 - protein, 337 aa, unidentified
MQITTIGLDLAKHVFQVHGCDAAGNCGVKRRLRRNQVLEFFAGLAPCLVGIEACGTAHHWARELRALGHDVRLMPAHYVKAYVKRGKNDAADAAAICEAVSRPSMRFVPIKTREQQAVLTMHRTRDLLMRQRTQLINAVRGHLAEFGIVEPQGVWHRGRVLRHLEVDDEVIEPARQVIGLLASQLNDLEGRIKEVDKQIALWHKASPTSQRLATIPGIGPVIASAIAATVPDAGVFRSGREFAAWLGLVPRQRSTGGKQRLGRITRDGDRYIRRLLIMGAQAVLQSSKAARANPWIQNLLARCPRLKVAVALANKTARIAWAVMTKGEIYRQAAASA

SEQ ID NO: 50446 - protein, 499 aa, unidentified
MLSERVQKVAPQHFGIVSIDCAKGCSDWMLVDFYGNVKVPAEKVVHTRTGFDLMLVQLREAIDKHSIRDLVIAIERTGNYHLPIKRALQHAGFEVRIVHPFATKQFRQPADPDVKTDDNDLAAIARSAINGFGLSEPQRDELYEQLHLLVRHRRDLVRKRAALQCQIREHLDAVLPGFASQFEGLWQSQILLKLAARYRSAKAMLSAGEKGLCAYLREESLRFHQSTVASVLVWAANAAATCESADTHHRIWQALEEDRVAKTLKIQALERDLAGLLARTPYVLLLSHPGINVVSAAELAGEMGPITNYANAKAINGRAGLYPSRYQSNQTDRKHGKMVRCCNRALRATLLMVADNLLKCNDYYRALAKTWKAAGKDPRHTHVRIAARETRMVFQIVAGGKVFKHPSQLQRDYVLDKLLDFLRERDTNPEIILQNLNATRQQIPASEYAAEATPLQTRYGKTRRRRGEPQPIAEVLLAVLARLGVGTLQSPTSEDQGSS

SEQ ID NO: 50447 - protein, 354 aa, unidentified
MSEITTIGLDLAKHVFQVHGIDAQGTTVLRKRLRRGQVLAFFSRIPRCVVGLEACATAHYWARELGALGHEVRLMPAQYVKAYIKRNKHDAADAEAICEAVVRPTMRFVPVKTADQQAAVLLHRGRERLVRQRTGLVNALRGHLAEFGVIAPQGLRNVGKLIAIVRDEGDARLPELARQVLQVLAAQIEQLEAAVAAIEKQLMAWHKSNPVSQRLASVPGIGPIIATAIAATVVEPSGFRSGREFAAWLGLVPRQNSTGGKHRLGGISKRGNQYLRRLLINGASANLLRSKATKADAWVIGLRRRRPPLVVAVALANKTARIAWAVMLRQREYQPRAVAAWSLTALGLELAREQ

SEQ ID NO: 50448 - protein, 369 aa, unidentified
MADRITYVGLDVHKESIVVAVASGGLRGEVREYGRIANTATALDRLLRKLGDAGMVLRFCYEAGPCGYGIQRHVSARGHECVVVAPSLIPKRAGDRVKTDRRDAASLAKLHRAGELTAVWVPDPQHEAMRDLVRARLDAVHSLRRARQQLSGFLLRQGCHYGRPAWTKLHRRWLAGLIFEQAIHHIVLEDYIAAVEAAEARRDRLTAQIGTMLPDWTLAPVVAALQTMRGMAMVNAATLIAELGDLSRFADPRQLMAYLGLTPSEYSSGSSVRRGGITKAGNGAARRLLIEAAWSYRFPARLSRELLLRQESQPKPIRDIAWKGQVRLCARYRRLARTGKPANVVTTAIARELTSFVWAIARQVTVTPG

SEQ ID NO: 50449 - protein, 341 aa, unidentified
MQITTIGLDIAKNVFQIHGIDAAEKVIVRKQLRRGQVMAFFEALAPCLVGMEACATSHHWARELTKLGHEVRLMPAKDVKAYVKRNKNDAADAEAICEAVRRPTMRFVRIKSAEQQGQLMLHRARDLLMRQRTQVINALRAHLAEFGITAAQGREGIKELLAIVAQEEGSGLPSDAHASLTILAAQLQAVQTMIGSLEKRIVAQHRSNEASKRLETIPGIGVIGATTIAAVVPDPRVFRSGRDFAAWIGIVPRQDSTGGKQKLGPISKQGDQYLRRILIVGAHAVLRRARQQPEKYPWLTQLLARRPFKVVAVALANKMARIAWALLAKGGTYRAPQLVAA

SEQ ID NO: 50450 - protein, 372 aa, unidentified
MTQRMVSVGLDVHKETITVAVAHHDPPAQVEELGTLPNHPEPIRRLMQKLSARYAVRSCYEAGPCGYAIYRQLRSLGVDCTVVAPSLVPLRPGDRVKTDRRDAVKLARLFRSGELTPVWVPDPAHEALRNLTRLRAAAHHDLTRARHRLSKFLLRSGCVPPSEAKPWTQRFLAWTRAVPLAQPLDTRVRDDYFNQVEHLGQRIVALDQVIADAAATSPMARRIAALCTMRGVSTITATTLVAEWGEIGRFTGPKQLMGYAGLVPSENSSGATTQRGRITKTGSGYLRRVLVEAAFAYRHRPLLGGALRRRQLGQPETVKRIAWKAQQRLHRLYSRLLARDKRHQKIVVAVAREMVGFLWAIDREMANSVRPA

SEQ ID NO: 50451 - protein, 431 aa, unidentified
MDIVHPRVAGIDVHKKVVWVAVRLPGQRPGERAVTVRRFKTFWRPLRQMAAWLSGLGVTDAAMESTGVYWWPVYHALAGAGIEVCVCNAAHMRNVPGRKRDITDCQWIAELHEHGLLRPSFIPAGAVAELRARTRYRKKLIEQRASEGQRLSKVLEDAGIKIDSVASRLLGKSGRAMIEALIAGERDPGRLAGLAKGVLRRKIEDLQMACDGRFTAAHAQMCRLHLDARDHLTGTIAELDALVAEAAAPFAALIARLVTIPGIGQRTAEVIVAETGGDMARFTTAARLAAWAGLAPGDNESAGKRKHAAARKGDRQLRAAMVEAAWATARTRTRPGARFRRLARRFGRGHEKKAAVAVAHTLICIAWAVLSRGEDYAEAGEDYYEQRDRRNREHLIRHHQQALARLGCQVTLTPPGDGSPPGADPDRQPAA

SEQ ID NO: 50452 - protein, 403 aa, unidentified
MPIAAHPAQASSAVRVDLSAIFVSLELSQSKWLITSLLPGNGEKLSKFTTVGGDVAGLLARFADLRRKAQARTGQHFPLIVIQEAGLDGFWIHRVLEAEGVESHVVDPASIAVSRRKRRVKTDRVDGEMLMRALLAYKRGEPRVCAMVRVPTPDEEDRRRVSRERKSLTNERIRHVNRVKGLLFGQGIKGYEPVRRDRRQRLDELLTGDGRPLPAHLKAQISRELDRLELVMDQITACEQTRDSLLVQPVFTSATDDRAHAVEPVPSSPSVPNLLLKLRGIGPEIASVLWLEGLSRQFDNRRQVAAYAGLAPSHWQSGKIDHDQGVSKAGNPRLRTSLIELAWLWVRHQPHSALTIWFNKRVADSGGRQKKTAIVALARKLLVSLWKYVNAGVVIEGAIVQET

SEQ ID NO: 50453 - protein, 371 aa, unidentified
MSELPAETRPARLRVEASPRPPGARKPETELGAVSTTAVPHPDSRSGPSPHLQGRVMDEQRTVFVGIDVSKDRLDVHLRPSGEAFFVPREGKGMDDLVIRLQGLSVALVVLEATGGFEATVAAALAGVGLPLCVVNPRQIRDFARAMGRLAKTDTLDAEVIALFAERVRPQARPLREPERVHLAELVGRRRQIIEMIGMETHRGRQAIDKPLARRRARHVAYLQKELDAIDHDIGDAIKHSPAWREAEALLKSVPCIGDVTARTLLAELPELGTVSRHQVAALVGVAPINRDSGLMRGRRAIAGGRTSVRAVLYMAALTAIRRRSPFRAFYDQLTARGRPKKVALVAVMRKLLTILNAILRDHTPWRPLNA

SEQ ID NO: 50454 - protein, 416 aa, unidentified
MEVLYRRCAGLDVHKDTVVAGLRLAEAGSVITEIRSFATTTPGLLALSAWLGEHGCTHVAMEATGIYWKPVWHILSDGDFTLILANAAHVKNVPGRKTDVADAIWLADLLAHGLIRASFVPPPATQELRALLRTRKQLVREQASHVQRLQKTLEDANLKLASVLTDILGVSGRAILEALIGGECDPDALLGLVRRGVKASPDTLRAALTGRVSERHRFLLRLHLRQIEALDGAIAEIDREVDRDLAPFHDAVRLLCSIPGVSDLTARVIVSEIGTDMTRFPTAGHLISWAGLCPRNDESAGKRRSTRLRKGAPWLKTTLVQCAWAASRKKDSYLQAQFRRLRHRRGPKKAICAVAASILTAVYHMLRDGTFYHDLGAGHFHRISPEAQANRLTKLITKLGFTCTLAPIQLNSAVSV

SEQ ID NO: 50455 - protein, 420 aa, unidentified
MDRDTVNWNERTVFVGFDWASDHHDVIVVDAPGEIVEDFRFEDTAEGWKQFTQKLRRYTPVVVAIETSSGATVERLLEAGYAVYPVNPHAAKRYRERKAPSGTKTDRLDAWSLADALRLEGNTWRPLKPNDPLTAELRLLCRDEIALIEQRTAFICQLRAALGEYYPAALEAFDDWTLPSAWAFVEAFPTPEALLKAGKRRWEKFLHVHKLYRPETYEKRLSLFAQAQTFCGSPATTQAKSLLALALTAQLRVLQIHLDRFRDRIQQLFTQHPDHDLFGSLPGTGEKLAPRLLAELGDDRERFDSPEALQCYAGTAPVSYQSGRVKKARVRRACQKGLRQTVHLWANLSRAKCPWAEAYYQKKREEGQGHASALRCLGQRWLKILWKMWQARKSYDAELHQRNQVRHGSWVIALMPAPNA

SEQ ID NO: 50456 - protein, 403 aa, unidentified
MRLTASQKDSEEAPFSICECVDLRVAPSARAANSLLLLPPYGWPAPPAELGGGDSVTGRDSSMDIAVLGIDLGKNSCSLVGLDGSGKVILRRRMQRKTILTLAAKLSPCIVAMEACCGAHHLGRLLAAQGHTIRLMSPEYVRPYVKAQKNDDRDAEAIAEAATRPTMRFVVLKSEEQLDMQTLHRVRDRTVCERTSLMNQLRAMLLERGVIVRQGRAKLRLRVTELLQQGAGELSSRIQLLIEDMLTRWMALDERIAAFDAEFAAEVKRDEAARRLTSIPGIGALNATALVAAVGNAETFARGRNLAAWLGLVPRQATTGGKPRLLGITKRGSKYLRKMLIQGARSALPTLSRSNTRLGRWLRSLLARTHSNTVVVALAAKMARIVWALLRYGTTFEPRAIAI

SEQ ID NO: 50457 - protein, 449 aa, unidentified
MHGAHIGGQRAGAFLELVGGVDPKRVLLVGVDVAKATWFVVASNLLGEVVVDGVRLVADRAGLAELERVLGAASARVNAAMVVVGIEAAGHHHQTLTAHLADRDELVVRVLNPAQVAAVRKQQGNRRRKTDWLDAAAICELLARGEGALVHLDGSAAAALRPLWSGRKDLVDTRSRLRQQAGALVDCLWPGCSATDTGAGVRPVLCDLFATKAGRVLLELLAQGWTPARVAATSVAALRGLFAVRGCRLTRPLATRLIGRAQAALPAHPAATAGKAATLAALLGTIDTLDREIACLEAAMAPLLARTQGAKLTQLRGVGVVAAAGFVAFVGSTDRWAEWSKVWRAAGLDPARSQSGPADARLGISREGSAWGRRAILDLAAAVCQQPGPWRDRLRTRTTQQHKPAKVALAATANAIGRTLFALMASGADFDPRFEAKRAAARKAGGQAA

SEQ ID NO: 50458 - protein, 309 aa, unidentified
MTLWIGIDVAKDSLAVCLWPQAQHLIFTNTPDGHAQLLARLHGQPVGNVLLEATGGYERALLRALLAAGHPATRINPRRARAFAEAMGKTAKTDPIDAALLARMAELVQVPSVAVEPEREALRDLVQRREQLVQQRDDERRRLHQAHLSQVRDDLIEHIHHLRQRIRRIDRAIVQTQRQLDDDLSRRLLAIDGIGEVTTASVLAYLPELGRLDRRQIAALAGLAPYNVDSGQHAGKRRIRGGRAAIRRVLYMASWSVIRTQPDFHARYAQLRQRGKCAKVAITACMRVLLTRLNAMARDRAEWRTPMAE

SEQ ID NO: 50459 - protein, 353 aa, unidentified
MQHFIGCDVHTRNQVVAWIEEETGEIKKRRLEHAGEEVRKFYAQFPRRTVVGIEATFPAYWFERLMGELGHELWVGDAARIRASEVRYQKNDYFDAELILDLLRTGRFPRLWVPSLEERDLRQLLVHRMKQVRARAQVKNQLHALAISQGVCRGRRLWSVKGRKELESLALLPWAARRRKELLESLDRLDEQVRELDQAVEEAGRARPEVALLRTHPGVGMVAGLAFVLSVGPIARFPHSRKLVSYWGLNPREDSTGGRQRLGSISKQGNTMMRWLLIEAAQTAARLDPQLRRTYQRLKHQRNNSGVAKVAVARRLVVRLFWMLRTRHNYAQLVHLSGSPSSAVVPPQGGPTV

SEQ ID NO: 50460 - protein, 450 aa, unidentified
MRMQPEEIPDDDHELVIERVCAIDVAKASGKVCVRTPHPNRPDRRTSRVWDVSATSRAVTELAEHLIGEGIERVTVESTSDYWRIWFYVLEAAGLDVQLVNAREVKNVPGRPKTDKLDAVWLAKLTEKGMLRPSFVPPVEVRQLRDYTRLRVDVTRERTRYWQRMEKLLEDALIKVSSVVSRLDSMSVRDMLEALIAGERDPRRLAELARGKMRPKRAALIEALTGRFDDHHAELARLLLSQIDALSTHIDTLTRRIDELLAILTDPTRGPDGGYRIGDDGAAPFVNGLQAAKRLAEITGIGPVSAPVILAEIGMDMTRFPTAAHLVSWAKLSPRTIQSGATQRGGKTGKGNPYLKGVLGEAAAVAARTDTFLGERYRRIVKRRGKLKALVAVARSILVVVWNLLADPTAHFHDLGADYHTRRADTDRRLRNHLAQLAALGYRVTVEPAA

SEQ ID NO: 50461 - protein, 456 aa, unidentified
MKIPQSTIRLLTGRLVKILLNREVSTMKSNTQNAKIEAITEKTLVLGIDVGSETHYARAFDYRGVEYSKKPFKFSNTEAGFVTFKAWVLDIKEKHGKDKVIPGMEPTGHYWFNLGKFLQDNEMKPVLVNPHHVKKSKELDDNNPTKNDRKDPKVIAGLVREGRYMIPYLPDGVYADLRTASNIRFQLQAELTRIQNRISRWFNIYFPEYKTVYGKPDAKSGMLILKAAPLPEDILTLGIDGVNQIWRDAKLRAVGKARAKTLIEAAEHSVGSKEGAVSARMEIRMLLEDYESRNIRLQEVMALIEGLVKQIPMAEKLLEIKGVGIRTVSGFLAEVGDISRFNNPKELQKLAGLALVENSSGKHKGETTISRRGRKRLRYLLFEVAMSLVAKNPEFRELHNYYTTRRLNPLKKMQSLMAIAAKLIRVFYAMLTKGVDYDPKKMVSDIKRPAVYLQAA

SEQ ID NO: 50462 - protein, 344 aa, unidentified
MEYSAIDLHLRRSQFRIVGEDGAVVREGKIDTSRADLSRVFGDRPRMRILVESSTESEWVARHLEALGHEVIVADPNYAPLYGSRSRKVKTDGRDTAALTEACRTGIYRRAHRVSAARRAQRQELRVRRHLVQMRSRSIGLLRALLRQDGWRLPRGSAEAVDARLERLRLPTGLATILTPLRTWLKELNALLDAADRAVEAQAAADPVAAHLMTAPGVGPVVALTFEAVLDDPARFGGEAARASAFLGLVPSEDSSAERRHKGHITKTGPSELRALLVQASWVIWRGRSAAGAALRAWAQALAARRGRRIAIVGLARRLSRILFALWRDRSNFHVEGGRPLVVA

SEQ ID NO: 50463 - protein, 321 aa, unidentified
MDILHTHCAGLDVHQKEIVVCMLIGSSDKELVKEIRTFPTMTKNLYEMLRWFENLQITHIAMESTGIYWKPVFNILEDYFDITLANAQRIKNVLGRKKDVADAEWIAKLLRYGLIEKSFVPPADIRELRDLTRLRKKWIGNMTAEKNRIQKTLECSNIKLGSVISDVFGVSGRKLLTCLVEQGFVSPQEVEETIHAKIMPKASMISDSLFGTLNEHQIFLIRQSWNHILYLEEAIQQIEARIQELLLPYQEQVELLLTIPGVKENTVASIIAEIGMDMTQFPSATHLASWAGLSPENHESAGKKVPKQQKEIRTSSLRFAK

SEQ ID NO: 50464 - protein, 483 aa, unidentified
MREVYPRCAGMDVHKASINVCVRIGKGRKIEIRRGMFGTFTQDLERLAEFLREHKVRRVVMESTGVYWMPVWNVLERSQWQFDLVLVNPQHVRALKGEKTDDKDCRRLAELGQYDLVRGSFIPDQEFRELRDLTRQRSHMQGDRNRIINRVGRLLETRNFKLGSVASNIVGKTGWLILNAIAQGQTDPDALADFAQGSLQLKKVELAEALRGYSSEHFRWLLRQLIDELARLDAKLNELDERIRSRIKPHEDLVRRLSTIPGVKEIAAWTIIAELGTNMEQFADAAHAASWAGLCPGNCESAGKRQSGHTRKGDRYLRRMLIQNSWAVSHKKDCFLTALFYRIAAHRGTKRAAMAVAHRVLIIAYHIIRDGTEYRELGGNHFDGTNPQETARRLTRRLERIGYQVTLTKPAESSSSEPVKPILNGTTRWDTRAIRFAPLIRDPNAAIATPDVCRKCAKWNIPCIHKGKQFRKTQNENAERSTT

SEQ ID NO: 50465 - protein, 392 aa, unidentified
MVAVVIGIDPHKRSNTALVLDGRETILARRRFANDSAGYRDLKAFARGWKQRTWAVEGARGVGLSLAQRLAMEGEHVLDVPAVLSARVRALGGGSGRKTDEADAYAVAVAGLRGHGLQVVKPEDDVAVLKMLSDRRQQLVEQRIAAVNRLHDVLQDLLPGGASTRLTATKAHEILAALSLSDPVGQARKQLALEHADDVAELDVKIKTMAKRIATAVAQRPSAVTDIKGVGAIGTALILGEVGDLRRFRSKHHFASYTGTAPIDVSSGDQNRHRLNRGGNRRLNYALHIAALVQIRFPGPGQDYYARKRAEGKKPLEAMRCLKRRLSDVVFHALQQDLQRRLEAAGPEGHSGATLQSSASDPTPMVSPSDQSLTGPATKNATPRRTRVKVAG

SEQ ID NO: 50466 - protein, 408 aa, unidentified
MKVMRERCAGLDVHKKTVVACAITPVGKEIRTFGTMTEDLLGLVEWLAELGIRDVGMESTGVYWKPVYNLLEAAGMVPTVSNARQIKSVPGRKTDVKDAQWIAELHRHGLLPTSFIPSRDQRELRELVRYRKSLVRERSAEANRLQKVLEGANIKLASVATDVLGRSGREMLAGLAAGNEDIEQLAGLARGRLVEKRQELLRALRGVMGAHQRFMLGEQLAHIAEIEARIARLDEEIGHRLHPFAEALANLQTIPGVGRRVAESLVAEIGVDMSRFPTAKHLASWAKLCPGNNESAGKRKSGRTGHGNNWLKTSLTEAAWAASRSKGNYLRAQYSHLARRIGARRATVAVAHSILTAAYYVLRDNVPYRDLGDDFLDQRRRDNIRRQAERRLRALDFDVHITDLREAA

SEQ ID NO: 50467 - protein, 405 aa, unidentified
MLNVGIDWAQATALQYVILSDDGDKIKDGSFERTLDGIDRFAETLETAESNPKEVRVGIDRKHDIVCEVLFSKGFKVYPLTPHSTDAARKAYHPAGNKDDKTDAMLHANMVRKDGKHLKPYRPQKETDVLLRELLSARNSLVDKKKMLKQELNSFLSSYAPVLGNLTGDLCLVWQKQLLKKWPLDQDFLGAHGNELNAFINKHKLGSSTVAKIRRQKRGRSVQHSRSVVQCHRMLIRQKVELIEACEKEISKLEQKISDQCEKHRDREIFSSLPTESDQTQAALCIAFDENEKEHRSWRNYASYFGTAPVTKSSGKNKRVKMRRAYDRIINKALMDLADSTSRLENCWACHYYRRKRAAGKGHYETLRQLALKWVKITHAMWRNRSKYDENYISTRFGQGQPQAA

SEQ ID NO: 50468 - protein, 330 aa, unidentified
MPSFTYIHGIDVSKDTLDILTIDSTTLSKDKAQIKNVSICIETWLRLITTDNCLCVVEATGNYSSTLIYLLNQYNIQVAVVSPFKSKSFMEAMGVSNKTDEQAAFCLAMMGLHLELKPYQMPSIDRQKRRQLQTAHNAMLKQRQMLKNQLHALDQLPFVAQQARQAYQQTLQTVDEQIQQLEKQLADLDEDEAYRNTRQLACSVVGIGPATAHAMMLTANCFDFFETADQLSKFFGLTPNSHYSGSSVRKKGRISKMGAPYVRNLLYMCTRSAIRHNLACKELYQRLRAKGKSHKVAAVAVMHKLVKQVFACVKKQVPFDNQYYLKFKVD

SEQ ID NO: 50469 - protein, 345 aa, unidentified
MKIVGCDLHTRYQQIAMLDAKTGELVERRLEHESGEARAFYAGLDGPVRVGIEATGHTRWFERMLGELGQELWIGDAAQIRASVVRKQKTDARDAAHLLDLLLSDRFPRIWRPSLEERDLRQLVWHRQKLVWMRNAVGNQLHALAMGEGVCRKKKLFTKKGRVELEGLKLGPWASYRRQELLTMMDQLDASLKELDQGVAKQAEQNQAALLLMTHPGVGPVTSLAFVLTLGPVERFGRSKQVVSYLGLNPREHSSGGRQRLGAISKQGNPMMRSLLVEAGHTAARLDSELRQDYQRLKLRRGSGVAKVAIARKLAVRMYWMLRSPASYAQLVRMQGSPRGTLVGQ

SEQ ID NO: 50470 - protein, 347 aa, unidentified
MDVHATSTVWCLLDGTGAVVARGRVATTTAGLAALLRELGGGADLVAGHEVGTMAYFVHDTLTAAGVRCLAFNAQHLRMIAASRKKTDRRDAYWIAKALQSGMYPPPVYIPTGEVRELRVLLHRRRQLQVEYGRWRARARAALRAAGSPAPRQAVGLRAALAQGMAAAAGSVPLLGETLALCQRQMAGLQLELQRVDQTLRARATEIEVVQRLRTVPAIGVLVALTIYAAVADVRRFPTAKALAAYAGLVATVRQSGETLVYGAITKQGAPALRRVLVQAAHVLLTRCARPSAQPLRAIGLRILTGRGRRKIAVVALARHLLRIAYYILRDGTTYDPTRLASMRPAA

SEQ ID NO: 50471 - protein, 438 aa, unidentified
MKVLHERVAGVDVHKKMIKVAVRSPGDKPWARKTEILTFGTFYGVLRAMARELRRRGVTHVAMEASGIYTEPVYYALCEEEGFAEVLVVNPAHAKALRGHKTDARDCARIAELLECGLLQGSYIPAVELKEVRDLVRYKIKTVQARTSEVQRLQKALESAGIKLGSVASDITGKSATAMIEALIDGERRGAVMADLAVGHMRTAGKLADLSMALEGRFTGHHALMCRLILDRIKGLDAAAGDLGKRIAAGAVPWQREIGLLKTIPGIGDIVAQAWIAEIGPAPHRWFPSHDKLASWVSLAPGNYISAGKRRHGRTGDAGTYIKPMLVQAAWSAIRVKGRLQARFNRLVRRFGGPKNPAARKKAIVAIAHTLLKIAYTVLTTGTAYQDLGADFYTRRQSREHRQAWLEHQIQKLHPGCTITITINPPDDAPRTALTHSA

SEQ ID NO: 50472 - protein, 367 aa, unidentified
MRSIVYVGMDVHKETIAIAVFRDNARNVEFERTIKNEPGKIKKFFNKLKEKGESILSCYEAGPTGFALYRILEEMDITCYVAAPSLLPRKPGDRIKTDKRDAVMLAKVLRNGEIVSVHVPTRSDEAVRNYLRMCNNTRNDLKKQKQRMLMFLLSIGKKYDTGKGYWTGVHRKWLKALEFEDELNKNVFDEYYVAICELEEKIAKLKEKIEEIATEARYTEKVSKLRCFKGIDTLTALSFVSEIGDFRRFRKAAEFMAYMGLVPSEYSSGDKRKQGSITKAGNSRLRKLLIESSWHYKYYLPSKRLTMRRKGQATETIAYADKAGRRLSRKYNKLLLRGKVSQKIVTAVARELSGFIWGMMAGETSLV

SEQ ID NO: 50473 - protein, 317 aa, unidentified
MTAPEIFVGIDISKKRLDVAIIPGDQTLAYSNNEDGIQKLVKRLRTLNPLIILLEATGGYEFFLVAALREAKLPACFINPKLVRNFARSAGIAAKTDHLDAQVLALFACRMRPQPRPLPQAQHQELQHLMTRRRQLLGMVQMEKNRLAPAPFPRVQQSIQRTIASLEAQLADLNRDIDDFFRQNSLWVDLEKTLSNQKGVGHVTLLGVVAYLPELGRLNRREVASLAGLAPFNRDSGQWRGQRHIEGGRNPLRQALYMATLSACRFDPVISAFYQRLLQKGKPFKVAMVACMRKLLTILNAMAKELLLGRSFAPLNP

SEQ ID NO: 50474 - protein, 402 aa, unidentified
MNSVGIDISKGRSTVAVMRPFGEVVTSPFEVRHTDSELSELAKQLKSLNGETRVVMEATGNYHAPVAKLLHDAGLYVSVVNAKLVHGYGNNDLRRVKTDRKDAVKLANYGLDRWLTLPRYVPEEDTRLLLKNCYRQYRQYSKVQTVLKNNLISLLDTVFPNANRLFSSPIRGDGSEKWVDFVAEFWHCRCVSEKSKKVFTNKYQRWCRKHGYNFSEEKAHTIHAEASGHIGIMPKSETTKLLVEQAVAQIRATSAALTALKRGMLALAAQLPEYPVVMGMFGVGPTLGPQLIAEIGDVRRFYSKKALVAFAGLDAPPNDSGDVTGKHKSMSKIGASSLRRTLFLVMSVYLQNAPLDEPVYQFMDKKRAEGKPYRVYMMASANKFLRIYYATVKAYLESLEQV

SEQ ID NO: 50475 - protein, 381 aa, unidentified
MVAIRTLIEHHKRTESDGVDGPLTASMCQSWVVKDTNGREPSMREVSTIGLDLAKKVFQVHGVDAAGETVVRRVLRRARVLAYFAQLPPCLIGMEACATAHYWARELGKLGHRVKLIPPAYAKAYVRRNKNDAADAAAICEAVSRPSMRFVEIKSEAQQAAAGIHKVRDMLMKQRTMLINALRGLMAEFGIVVGAGTRHVGELTAILVDPEEHRIPALLQDGLRRMAEMLRGLERQLEGIDKQIVNWGRGNATCRHLITAPGYGPILSSAMAAIVVNPAVFRSGRDFSASLGLVPRQDGTGGKVKLGPISKRGNGYLRRLLVNGAMSVLNSKRAKQDPWLVKLLASKERKVAAVALANKMARIGWALMTRQEDFRATSAAA

SEQ ID NO: 50476 - protein, 365 aa, unidentified
MTPESVPSSTWTFVAIDVAKQKNDVLMEYPDGTRQRWRMTNTHHYRLLRDRLQALVAPPLVGFEATGNYHRPLAYFLGQAGFELRLISSLAMARTRDALYNSWDKNAPKDAQVLLHLLKGGVTQHDHDPLRHAVNDLRELAQTHFQVSLRKTRVQHSILTHYLPLYFPEAERYYTQSRSQWFSRLLHRFPCPVAITRYSKAAFAQEAWTIVGRKVNKRGFLDDLSTMAQDSIGLPVAEDSEAIQTFRLTLQHHQELCAAQAALEERADQKLTGDPDYHRLRTLPGVGPILALTILAETGDLRRFPHHRQFLKFCGLDLSTQQSGQFREHSQLSKHGNARLRCALWLAAQGAIRMREHTFRQKYDR

SEQ ID NO: 50477 - protein, 367 aa, unidentified
MKKVSTVAVRASRKISQPKLTVGLDLGDRSSWYCVLDECGAILREQRLSTTAKALQEIFGRMPHSRIALETGMHSPWVSRLLSELGHEVIVAHARNVRLIGESRKKDDRLDAQTLARLARIDPELLCPVKHRSAQAQADLTVIRARAGLVRARTALVNTARGLAKSYGERLRGCNVRNLNPEKAAGLSPELQRALEPLLAGIEVLSQPIGEYNERIEKLAQESYPQATLLKQIKGVGTLIALTFLRTLEDPHRFAKSRDVGCYLGLQPGRRNSGQSEPQMHISKQGDPYLRTLLVQGAQHILGPFGVDSDLRRWGLKLAERGGKSGKKRAIIATARKLAVLLHHLWVSGEVYEPLHHSGAVTMPAAA

SEQ ID NO: 50478 - protein, 358 aa, unidentified
MSNLKYSIGIDVSKKDFHCCLSIIDSNQKVTVKSTRKLSNSPSGFRDLLAWTKQHRKEDLPLRIVMEATGVYHEQLAWFLHSKGLSLSILLPNKAKKYLQADGANSKNDSIDARGLAKIGAEKNLEAWTPGSEKLFELRHYTRQHQSLKEMTNVISNQLEALSNGQFQNREVIKQLNKTIKFLKQQVVEMEGAMGKLVKADPVLNLHYQNITTIKGISLLSFCVIVAETNGFALFKSAASLVRYSGYDVIENQSGNHIGKTKISKRGNSRIRRILFLPAFCAVRDDQPQFKNLYQRVFERTGFKMKGYVAVQKKLLVMMYHLWKNGQPYNPKFNCSEKIIAPDSSEATHDKIPEEIFH

SEQ ID NO: 50479 - protein, 384 aa, unidentified
MAKVVIGVDPHKRMNAVVVVNAKGKVLARQQFSNTARGFRELRTFSRQWRPRTWAVEGCNGVGKHLAQRLVAQHETVVDVSTRRAALVRVYAGGNGRKTDDTDAHSIAMVGLQTPGLPVVRPDDRTVTLRLLANRRHELVGLRTQAVCRLHRDLATLIPGGAPRALTAKKAKELLATIRPRDEVGRLRRQLAVDQLAGLVALDRRLAELERQINMVVAATPTGLVRIFGVGPVSTARILGEVGDVARFRSRHHFASYNGTAPAEEGSGGAPIQRVNLKGNRKINHAIHMVAITQVRNDTPGRAYYLRKQAQGKTQKEALRALKRKISDAIYRQLVEDALAERGPGGQTGTTLRSSVAGPTPTAGSSDKPQPGPKPQATPLPASA

SEQ ID NO: 50480 - protein, 408 aa, unidentified
MQVLYPRCAGLDVHKDLLVARVRCVSDPPHDEVRSFATTTSALLELSDWLSEHSVTHVAMEATGVYWKPVWYLLEDHFELVLANAQHIKNVPGRKTDVNDATWIADLLAHGLIRSSFVPPTPIQELRDLTRTRKQLVREVSQHSLRIQKTLEDANLKLGSVLSDILGKSGRAILAALIGGETDPQKLADLAQGTARKKRVELIEALRGRIRSHHRELLRIHLNLIDALYQALADVDARVGKTLAPIKECARLLTSLPGVSELTAQVLVAEIGVDMARFPTASHLISWAGMCPRNEESAGKRRSVRVRKGAPWLKTTLVTAAWAAVRVKDCYLQAQFLRLKSRRGAKKAILAVAASMLTAAYHMLKKGVEYKDLGPDHFTRRDRSKAIQRLVRRLNDLGCQVQLSPQTS

SEQ ID NO: 50481 - protein, 402 aa, unidentified
MNAVGIDVSKGKSMVAIMRPFGEIVSAPFEIKHTASDINSLVELINSVEGESRIVMEHTGRYYEVLAHQLSEANLFVSAINPKLIKDFDNDSLRKVKSDKADAVKIARYALDKWQNLKQYNVMDELRNQLKTMNRQFGFYMKHKTAMKNNLIGILDQTYPGVNTYFDSPARSDGSQKWVDFASTYWHVDCVRKMSLNAFIDHYQNWCKRKKYNFSQSKAEEIYGKAKELVPVLPKDAITKLIIKQAVDQLNSASTTVESLRTLMNETASKLPEYPVVMAMKGVGTSLGPQLMAEIGDVSRFTHKSAITAFAGVDPGVNESGTYEQKSVPTSKRGSADLRKTLFQVMDVLIKTHPQDDPVYQFLDKKRAQGKPYYVYMTAGANKFLRIYYGRVKEYLSSLPES

SEQ ID NO: 50482 - protein, 348 aa, unidentified
MDYATITSDYCCGIDLHAKSMYVCLMDRAGQIQYHRNLKNDFALLTQAIEPYRKSLSIGVESTYNWYWLADGCQQAGIPFYLGHALYMKAIHGGKKKNDRIDSQTLADLIRSNFFPLAYAYPEKMRATRDLLRRRHRFVSLRAESYSHIQNTFSQQANFDICRDDVRKKTTRRVIPQRLDHPDLSLSVDCDLDLIDQLDETIRKIENQVLVQAKHHDRTALSILLTVPGIGRILALTILYEIHTITRFKSAGHLSSYSRLVKVQRESAGKKIKGSHAKIGNPHLKWAFSEIILIAQRSSAPIKKHYEKLQSKHGTGKAKTLIAHQFGIAIYHMLKNGQAFDEKRFVSG

SEQ ID NO: 50483 - protein, 424 aa, unidentified
MRCQVKTVNDLIARRCVVKRLYIGLDIGSATHEAVMLNENHGVVKKLVVKQTILEISRFIEIIQKCKDEGNFEEVLIGLEGSNGYASPMDRMLVEVGFSLIAINSATLDKYRKLVGQPRKDDPYDAELVCKYLIDVYQLKGMKQNAQRIGNPDQASKGKLRIVTRHHRTTKRDLTRITNRLRKHILGYFPDFLTVFPNLHTKTARVLLKYYGTVGKVKKSRESTVAKAFINKRRRVGPKSAAKLKALVKDIRYVDPLEDEMGKTTQSLVEQIDLLLSQIEILQEQIAEMANEMPEVQLIAKMIPGAGINNSSELIAEFGNISRFLNRDKLSIYCGVGCLNHSSGKKVSARKPTHFNHYAKGALCMMAQAAIVNDSESRKYYDKKRKEGKGHWHAIKCLAKYLLRHIFQLLSEMQVNATQEKMAA

SEQ ID NO: 50484 - protein, 346 aa, unidentified
MHNPKDIILVVDYHAKNIEIRQLNCVTGEERRLRIPTTKPGILRLVDQAVAEATLTGGQVVWIMESTTGWARVKQLIGHKVRFVVANVLRMPLPPKAYRRKSDKIDTGRLLREYLNGSLPQSYQPTMWWREIRRIVDSRQDIVERQTAVKNWISHFLHHETWKKRTGLWTQKGMRYLRRIKLSDSDRMLMNIKLTELEQLAGLRKQLEAAMQATYDQWQQAQWVDEVRGIGMVTAVSILAHIGDVHRFPSAGDLVSYAGLAPGHRQSDETCHHGRIGGGGTDSHLRYLVIESMQWVCQIPRYRAAFERAEARRGTNIARIVVARMLLRSIYKMLRDGVRFNQTPAA

SEQ ID NO: 50485 - protein, 409 aa, unidentified
MDVAYERCCGLDVHKKTVVACRITPGRDGKPQKEVRTFETMTDDLLALGRWLAEAGVSHVAMESTGVYWKPVWNLLEGDFELVLANARHIKAVSGRKTDVHDCEWIADLLRHGLIRPSFVPSREQRELRELTRYRTSLVQERSAEVNRLQKTLEGANVKLASVASDVNGKSAREMLEGLVAGATDTAALAELARGKMRTKIPELKRALAGQFAPHQRFLLAQQLAHIDALDLSIEAVTAEIEQRMRPFAAEAERLDGIPGIGRITAHALIAEIGVDMAQFPTPQHLASWAKMCPGLNESAGKRHSGKTGKGNRALRSLLVEAGHAAGRGKTYLASQYHRLAARRGKRKAAVAVGHSILLIAYHILRQPGMVYKDLGPNYYDERNQQRLKQRLIQRLQGLGVYVTLQPAS

SEQ ID NO: 50486 - protein, 343 aa, unidentified
MKLSYVGVDLAKNVFQLHGVDRHGKSVWKRRLRRGQWLQALIDKVEPGCEIGMEACTGAHHWARELQSRGYAVRLIAPQFVKPYVKSNKNDANDAEAICEAMSRPHMRFVTVKSIEQQDIQATHRVRTELKDHRNAKANQIRGLVAEYGLVAPKTLLALRRAIPDWLEDAENGLTGYFRSLLHGLWDDLLTLEERLKELDKEIEKLARSNEVTKRLQQLRGVGPIVSTALVATVGNGEQYSKGRQMAAALGLTPRQNSSGDKHRLFGISKRGDVYLRTQMIHGARSVVSQAKHRDDPLSRWVTDIAKRLHPNVAAVALANKTARMAWAMLRNDTDYDPGLGAC

SEQ ID NO: 50487 - protein, 392 aa, unidentified
MIYAGVDIAKFDHVIGAVDETGAEAAKPMRFKNGEDGFERCVAWLESVAESEDDVFIGMEATGHYWMACFAYLSAAGYKVCVVNPMQVRAMRKLKGLAGVKNDRIDSWLIAETLRQGDYNETRLATDDVQALKRLTRYHQGLKQELATVKTQALCVLDAYFPEYAALFSDAFGAASLRVLAECPTPAEVGRRRASTIARLLSDGSRGRLGDGKAAQIKAAARSSVGIRLGERAASFQIKTMVTQVEFLNATIAKVEAEVAALLARVEPNITTIPGVSTATGAQIAAEIGDVGRFKNAAAVVKYAGLNSGVSESGTFSAQGVPITKHGSPYLRRALWLAANRARQYDPKLRAFYEKKRREGKPHRVAVTAVARKLCHVVYAVMRDREPYDPGK

SEQ ID NO: 50488 - protein, 341 aa, unidentified
MKQPRYFAGIDIASASFMVSIATKPEQVLLGPCSFDNTPEGFKALVDWFEQNHLSSQQLVICMEATGVYGELLCYFLHQHQYTLAVESPLKVKRAFKIDHHKTDAVDSIQLAEYAFRFLDELSIWAPRAERVEKITSLISSRELLVREKTQTMNNLHALRRKVIKSAVAVQSLEKVIQVIEEEIKALEKQMEYLVEQDPEINARVDLLKSTPGVGLLLAANLLVLTNGFTSQRSYRETASYLKIAPLQYESGTSVYRNPQSPHYGPSVMRKLLSLAAQSVVTHKADFKKYYLRKQAEGKPKRLILNNVENKLLKIIWAIIRDEKPYIPNYQSVHPKYWKTA

SEQ ID NO: 50489 - protein, 355 aa, unidentified
MKRTTKYVGLDVHQATIVAVVRDETGRVIARTILPTEAAALTAFVGPWRGRVEVAYEEGTQAQWLHDLLRPLVARVVVCDRRAVRRQGNKSDWRDAEELAAMLQRGAIRSVYHGGGPQQAELKELTRTYVTLVQDATRVMTRVKALYRARAIPTRGRGVYHAGERATWLAKLPAGGVGFRATTLYRELEVLLALRASAKAALLGAARRDPAWALLQTIPFLGPVRVALLLGIVQTPWRFRTKRHLWAYAGLAVMTRTTAEYTLEGRTPVHRRRAPLTRGLNRNHHRLVKALFKGAATAARARPGALQDWYQQRLARGMRDELARLTLARKLAALTLHVWKTGEAYDPAKLTRPAG

SEQ ID NO: 50490 - protein, 434 aa, unidentified
MTKRYSTPADAVLVAIDMSKHRQEVLIERLEGGRRRRMTVMATKADYDRLAADLADIGRPVVVGFEATGNYHRTLAHRLLLAGFDLRLISSVALARTREALHNGWDKNDSKDAQVILHMLRIGTTQRYVDPLAAGINDLQEMSKTHEAISKAKTQTWHRILTHYLPLYFPEIERFAGNSRSDWFLALLERFPTPASMTAIGREGFTREAWALVGRKVSKARLINDIYETACASAALPVDEDSVAITMFRMVIAQARSLIRQRDEIERTAHALLGENRDYQLLRMIPGIGPINALTILAEAGDLRRFAHHRQFLKFCGLDLATCQSGTFRGRSKLSKYGNARLRRTFWMATQVAIRQRDNSFRDKLGRYVAGHADDPDRRRKAMTALTAKMARVAHAVIKTGTEYRPFLERADTRWKDPSLLCREGVSGVLGATL

SEQ ID NO: 50491 - protein, 321 aa, unidentified
MTGIICGVDIGSSSLAARIGQDGAAATFANTPEGIAELAAFCKTHQVALIAMEATGGYEQRAFAQLCGHGLPVAVVNPRAVRQFAQSMGWLEKTDAIDAGMIAWYAETKKSQPLCLAPPTQLELRARVTRLRQLTEVRTAQLNQQRLVTNEAVQKSFGAMLTFLAGQIRELEQAIAALIQADPLWRELNQAFRTIKGVADRTVARIMAEMPEIGTLSNKTVSKLAGLAPLANDSGKHQGKRAVRGGRAAVRDILFLVGSVVARYEPDFLCFQQRLRAAGKPPKVVRIAVAHKLLVRLNAKAREVRQQSAHTQLSCSASQQP

SEQ ID NO: 50492 - protein, 390 aa, unidentified
MPQISAGIDIAKEVHWITAIDDAGTVLIDHALDNDPAAIAALIDELAALDGAVRVGFDVIGGIAGLAEAMLAASGCTLLHVPGLAVNRARQGTVGGENKSDPRDARTIADQVRSRRDLRVIEPAAEIDIELRLLVGRRRDLVQAQTQRIARMRDLLTGIFPAFERALDLTTKGPLHLLTRYVTPAELRRAGAKRIARHLQASRGGAAICAQALACARAQTIVVPGEAMTATLIRELAQEALATRTRLGELDRDLKERLARHPDAALIQSLPGMGAILTAELIAEAGNLSRFRSPDALAAAAGIAPVLRQSGKTRFLRRPTGGNKSLKRVFYQAAFCSLASPDSRAFYDRKRREGKRHHQAVIALARRRVNVLWAMLQTHQPFQTGFKNAA

SEQ ID NO: 50493 - protein, 400 aa, unidentified
MPHHTIVLETEWEIGTHYRLDFPQKNQTEVIMTFFIGVDLHKTQFTVHVRTEEKIESLEQIKQYPTTVAGYAEFLTRIETYKASGAAVKIGVESTGNTRFFKNQVEKAGAEVTVINTLKFKVINESTKKTDKHDASTISEFLSKDMLPESYLCGKETENIRRLLKSRERLVRSVVGQKNEVHALLVSMGLPDELRSLQSKKGRRKVLDTLLSHSDLVLEAQSVKLMFQIIDRMTESVKVIEKQLAELTKEDEMVNRLMTIRGCGKITAWTIRAYTEDIGRFASAKKYAAFCGLVPWVQDSNETIHHGKITKRGPQELRTCFVQLVLGIRRCKDTSEWRMMQRYEYMKKNKGSGKSIVAAARKMAEIVWAMLSEKQDFNADKMKGIYKPMTLADEALSAMN

SEQ ID NO: 50494 - protein, 326 aa, unidentified
MPHDSSSSDPSLPTVVGIDVAKATLDCYLDPSGQRLTLANDDNGIAQLLTHLRGLAVQLVLIEATGRLHRQVAAELLQAEIPVALVNPQRSREYARSTGRLEKTDRVDAKVLAEFARGVKHQLLQKRSEKQVELDDLIARRRALVQMRVAEKNRLAEQQPKLAKAQSKQLLRLIDQQIQDLDRAVAKLIDGDDDWKRKSDIITSIPGVSTGSANQILADLPELGEMNRQRIAKLAGVAPLANDSGPRRGQRTIQGGRQSVRNALYMAAFNAMRYCERFKRFAKRLTDAGKPFKVVVTAAMRKLLITLNQMVKTDRVYQPLLLGSFS

SEQ ID NO: 50495 - protein, 414 aa, unidentified
MKPCLFVGVDIHKNSHTAAVLDGYFEVLATIDFANNQEGFCHLDLKLKKLAGGRSLTFGLEDSHGLGSFLAQYLVNKDYPVLEINPVSTDRARRHTVARDKSDTMDAIAIAKTLIRERANLNPVRINKNSIALKEMAGYRQMLVRESTRIKNRLHVALFNQYNGILGQFGSLFGKCALAFFARYPNPVMLKGVTLGTLTNFLKANSKGRYKSEEARAILSNPDNSIATTLASTRAHIIESHAERLIQIQQELKKIEGILEDLIEASSYSCLTSIPGIDTATAAKIISGVMDIARFSSSSKLAKFCGIAPTEKSSGRKEKYQKSKYGNKSLYSTIYFMALAHISRTRNGRDKNPISRAYYLKKISEGKTKKEAITCLARRLVDLIYAVMRDRSIYNFSKSRFTKQQGSTLNTAVA

SEQ ID NO: 50496 - protein, 369 aa, unidentified
MGEYSEAFVAFDVAKIKHAVAVAEGGRTGEVRFLGEIENRAGPIERTVKKLAGRYDRLHFCFEAGPTGYGLYRQLQALGHDCMVVAPALIPKRPGERVKTNRWDAVTLARLHRAGELTGVWVPDAVHEAVRDLVRAREAAADDLRRKRQQLLSFLLRHSRIYSGSGHWTLAHRRWLANQAFEHAAQQIVFQDGIDAIEDAIARRRRLGEQLIAIMPSWSMAPVVEAYQAMRGASFLVAVTFAAEIGDVRRFDNPRRLMSFLGLVPAESSTGDTVRRKGLTLAGNRRARRALVEAAWTYRYPARVSETLRARLEGLPKAVRDIAWKAQIRLCARYRRLSATGKKLPVVVAAIAREMAAFLWAIGREVAPG

SEQ ID NO: 50497 - protein, 366 aa, unidentified
MKKNSTVTTNGKKIFKGQKLTIGMDLGDQSTYYCVLDEAGEVMVEQKLATTKQAMKQVFSRIPCSRVALETGAHSPWVSRQLTQLGHEVIVAHARNVRLIGESSRKDDRLDARMLARLARLDPRLLSPVQHRSAEAQAHLTVIRARAALVGARTALVNAARGLAKSYGERLRKCGTQQVNQNLAAGFSAELRVALEPLLAEVESLNQRIAEYDRRIEQIATEVHPEVALLKQVKGVGTLIALTYVLTVADPHRFRRSRDVGCYLGLRPGRRNSGSSQPQLHISKEGDRYLRTLMVQGAQYILGPFGQDSDLRRWGLKLSERGGNNAKKRAIVAVARKLSVLLHKLWVSGEVYEPLRNHSAVVGAVA

SEQ ID NO: 50498 - protein, 388 aa, unidentified
MRQSTSVQLNRLFVGMDIHKDNHAAVAVNCFGLPLLEQELGNEIRDFNNLIARVQTIAKERQLNPVFGLEDTAGSGELLARYLFNQGYEVKTINPVLVKRERDYETHPEKSDLADALGVAKVLIQRIDNVPDYNISETTEVSRDIRALTKDRETIVLEQTRLKNQLHALLHHSFGSMYKSLFRDVFAKKALLFWHNFPSAQILKSSRKRNTAKPDWITRRSADELPHASETQANQIRRKVKRLLAIREELNEIEKELDGLLGQTGQKLDTLPGCGPTLSAVVLAEIKDINRFSSPAKLAKYAGCAPRKLESGKRRRHVKTRSGNRRLNKALYQIALTQISNQGILKAKAYFQKKVNEGKSKKHALTCLKRQIVDIIWSMLKEKRAYYS

SEQ ID NO: 50499 - protein, 325 aa, unidentified
MTTTILGIDIAKSSFHVVLVADEGTADRNFSNSAKGFATLATWLKAHRVQNLHACMEATGRYGDKLAHWLFDQGHIISVVNPAAMHYYAKARLHNNKTDKVDAATIAEYCQREKPQAWMPPPPEVAELQDLWRLRCKTVKTRDADRNRLASGLRSKAVHDLLKEAIAFANAQIKHIETLIRDHIKAHPNLEHEYVRVRSIKSIGPITAAMFVTLQLKRFPNERAAVAFTGLNPRIVESGSSVRRKTKISKRGDSRIRKALYFPAINACIWNPIVKRQATRLAKAGKTNMAIIVAAMRKLVCLAYGVIKSDRPFDPNFRKLAHATP

SEQ ID NO: 50500 - protein, 462 aa, unidentified
MPGREERETSDRSTRPIEGLPVIRASVAGIDLGSERHWVCAATRDRSAREVASFGATTAELRRMAEWLKIRQVESVAMESTGVYWIAPHEVLEGQGLQVLLVDTRQLARVPGRDKKTDPTDCEWIQRLHSCRLLRGSFRPKEAVCMLRTLVRDKANLVAESGDWLRRMQKSLDQMNVRVHRAVSDIDGVTGMAILRAIAGGERDAQKLAKFRNARCSKTEQEIAEQLNGHWREDHVFSLQQGLKMYDAVQERIVAYEQEILRRLGEMEADEPPQPTAPPLQNTNKAKAIKKRGQEAKRQALYRMSGVDMTQIDAVGVETVEVVLSEYGPDLSRFPTEKQFVSHVTLAPRVPQSGAKPVKKKKRNSASTRVAAALRMAALSLRHSQTALGSYYRRIAQRCGGDIAVFATARKLATLVYRLLRWGQPYVDEGAAAYENRYRQHRIARLAATAKQLGYQLTPVTA

SEQ ID NO: 50501 - protein, 356 aa, unidentified
MHGLKHQKEKRSMEYFAGLDVSVNETSVCIVDDAGRIVREVKVASEPDALLAALKTGAYHFKRIGLEAGPLSQWLYNALGEANLPVICVETRHMRAVLKAQINKTDRNDARGIAQMMRAGLYRPVHVKTLRSQKLRMLLTHRKLLQSKAIAIENDLRGTLRNFGLKVGMVGTARFEARIRELVENLPDLAVLVEPLLIVRRILREQIAVLHRRLLAIVRDDAVCRRLMTIPGVGPVVALTYRATVDVPARFRNSRAVGAVFGLTPCKYQSGESDYTGGISRCGDEMMRVMLYEAAQIMLVRSTRWSWLKVWAMQIARRRGVKKAIVALARRLAVIMHRIWIDGTKFRWTREEVAAA

SEQ ID NO: 50502 - protein, 343 aa, unidentified
MTHYAGLDVSVRTTSVCIVDEAGKVIRETRIPTEPAAIIAVLTEAGVSFHRIGLEAGPLSQWLFGALIEAGLPAICVETRHMKAALAAQVNKTDRNDARGIAQMMRVGLYRPVHVKTRSSQEKRTLLTSRRLLQDQIRVLENHIRGSLRTFGLKVGLTSAGGFEGRVRELIETHSSLSPVMVPLLAARDTLRAQFAVLHRKLLTHVRSDPICTRLMSVPGVGPIVALTFQATIDQPQRFARSRAVGAHLGLTPRHYSSGETDYVGRISKCGDAMLRSTLYEAAHTLLTHTRRWSSLKAWGVRIAARRGLAKATVAIARKLAIILHRMWVDGTEFRWSAAPDLV

SEQ ID NO: 50503 - protein, 404 aa, unidentified
MWYTGIDWADEHHDALTIDEKGHQMGSIRVDHTPQGFAKLDTFLMQIIGSASKEQMACIIETTHGLLIVHLLEAGWPVYPVNPRTVDRRRAASGAKTDTIDAYLLAKTGRADFADLHRLTPDSDKVAELKQLTRDQDSLIRTQTRLVNQLTACLKAYYPVALDLFSKLQQKSTLGFLQAYPTLEIARAASLQELQQQLKHTRHPHPADTAASIVELLHHPQLQADVVLTRTKSRLMLALVSQLLPLMEQIATYDKEIHTLFLTHEDHAIFESLPRAGQHLAPRLLAEIGDDRQRYQDASSLQALAGTSPVLYQSGMYSKAHRRLGCIKPLRNALYQFAWQSTQSEAWAQDYYQRKRTEGKSHTVAIRGLANVWVRIIFAMWTHRECYQTATFELAQQHHARRAA

SEQ ID NO: 50504 - protein, 346 aa, unidentified
MRFYNRPHTHYCGIDLHVKTMYVCILDGAGQVLVHRNVPSTPEAFLEIVAPYRDGLVVAVECMFTWYWVADVCAAEGITFVLGHALAMKAIHGGKAKNDRIDSYKIAVLLRGGMLPQAYAYPAAMRSTRDLIRRRLHLVRKRGQLLAHIQNTRAQYNLPIFGRKLAYRTNRAGVVEHFPDPSVQKSIAVDLALIDQYDGLIIDLDLTIVREAKRHNADAFHRLRSVPGIGKVLALTILYEIHDITRFDRVQEFASYARLVKCKKQSGGKTLGTGGAKMGNVHLKWAFSEAAVLFLRHTEGKKLIARIEKQHGKGKALSILAHKIGRAVFYMLSRETVFSMEKFLAA

SEQ ID NO: 50505 - protein, 366 aa, unidentified
MAKFLFVGCDLHEKEMLLVYAGDDGDVKRCRFRSERRWRKGLVRWLQHEAERVGAREVVFAYEASSAGFILYDDLIAAGVKCHVVAPTKLDRSPHHRRRKSDANDARVILDVLRAAYLAGAQLPGVWVPDRMTREAREVVRGRLRTAQKVAATKNEITSLLKRFGVERPRGVGCPWTKSFRQWVEGLVDCQGPLGPWVGATLGSLLSQLKMLEAEIEHFDSLIKALSHTERYEATSKALDEVKGVGLLVAMTFLVELGDLARFSNRRQVASYLGLVPSCYESGEADDRKGHITRQGPGRVRGVLSQAAWAWVRWDERARRKYDRLVARNPKKRKIALVAMMRQLAVVLWRRGLKAQRRAAARSKNT

SEQ ID NO: 50506 - protein, 388 aa, unidentified
MNVGTDKSEPLTAIHTDLGAIFVSLELSRSSWLITSLSPGGGEKMSKHSVRGGDFAGLMERFAQLQEKARLRTGQSFRIIVVQEAGLDGFWIHRALQNEGIESHVVDAASIATSRRRRRAKTDKIDGETLVRALLAYKRGEPRVCAMVKVPTPGEEDRRHLCRERKALTAERVRHVNRIKGLLFSQGISGYQPLRRDRRQRLEELQTGDGRPFPQHLKALVNRELDRLELLLKQIKTVEAARDALLAVGQTAKPAPAAMLLDIRGIGPEFAAILWSEGLFRHFENRRQIAAYAGLAPTPWQSGAVDREQGVSKAGNPRLRTTLIQLAWLWLRNQPRSALSLWFHERVSRNGGRLRKTTIVALARKLLVALWKYVTAGVVIEGVTMKVA

SEQ ID NO: 50507 - protein, 363 aa, unidentified
MFKLDRRRYRVGEPEPAYCREADLDKPDVCGIDVSAKELVVMVERCGRREGARNFSNTAGGHQQLRDYLAAPGRPVRVCLEATGLYGLDVALWLERDARFQVMVANPRAVKNFAQALFQRSKNDRLDAGVLLEYAARMPFQAWQPPSRAALQLTAVTRRLQTLTEQATAEKNRGHALAATAASSTVVVADVKRSLRAIEKAQARLARAAEKIIADDEPLQRRYQLLRTVPGVGETSALQLLGELVLVPANADVRQWVAYAGLDPREYSSGSSLKKRTRISKVGNRHVRRVLYMPALTAAHHSPVFRAYYQHLLAAGKCKMVALIAVMRKLLHAVFGMFKHNAAFDETKVYPGFAPELAASFAS

SEQ ID NO: 50508 - protein, 341 aa, unidentified
MGQASTIGLDLAKHIFQAHGADASGRVVFRKRLTRAKVVQFFAAQAPCVVALEACAGAHHWARELGKLGHTVRLIPPAYVKPYVKRQKNDMADAEAICEAAQRPSMRFVPVKSEEQQANGVVFRARDLLVRQRTQCLNALRGHLAEYGYVVAQGSTHADAVIAHVEDPNTSVPESARSILAVLVGTYKALEVQIEALDAEITRRAKADPVARRLMTIPGVGPIAATAVATLVPAPEGFRAGRDFAAWLGLTPLQGSSGGKQKLGAVSKQGERTIRRLLILGASAVVRWASQRGAPEGSWLARMLARKPQMLVTVALANKMARIVWALLVKGGVYRAPAVAA

SEQ ID NO: 50509 - protein, 338 aa, unidentified
MYYTGIDLHKKTSFITTIDESGKVVFRRNFANQEDLILEYFVNLDGPVKIVIESMCSWYWLHDLLTAHNFNVVISNPLKTKAIASAKIKNDKVDSHMLAQLLRADLIATVHVCSLKTRKLKELLRHRQRLVRDATRMKNRIHMLLMKNNTAIPVSDLFGVKGMKYLKDIDLPDYHRHQLKSYLTLYECLNEQIQPLTKRIRELARKDRMAKLLMSIPGIGPLTAMFIIAEIEDVSRFPSYRNLSSYAGLVPCLDASADKSRTGRITKQGSPYLRSALVEAAQVIPRMKKTRLNVFFRKRIVRAGYQKAIVATAHKILQYVYYVLRDQTPYQEEYPVSA

SEQ ID NO: 50510 - protein, 343 aa, unidentified
MKITRVGVDLAKHIFQVHGVDRTERAVWGKRLRRDRWIREVQNTVEPGAEIGMEACAGAHHWARVLQSKGYVVKLIAPQFVKPYVKSNKTDANDAQAVCEAMSRPSMRFVAVKTVEQQDIQAVHRVRAGLITERVAKANQLRGLVYEYGLQAPQRIDCLRRAIPGWLEDASNGLTERFRKLLAGLYADLQALDARVRELNQEIRLLGQQNEAIGRVQQIRGIGPLVASALVAMIGDARQFRNGRDVAVSLGLTPRQHSSGNKERILGISKRGDSYVRMLLVHGARSALRTAPGKDDRMSRWAVELAKRSHANVATTALANKMARVAWALLRHGTDYEPNRQAA

SEQ ID NO: 50511 - protein, 452 aa, unidentified
MRASKLPKSKKMKLPKHLQHINPYAAGIDIGGRSHFVAVPEGSCEKPVREFSSFTDDLHQMADWLLDCGVTSVVMESTGVYWIPVFEILESRGLEVRLVNARHVKNVPGRKSDVLDCQWLQRLHSYGLLEGAFRPAEHVCTLRAYVRQRMNLVRYAASHIQHMQKALAQMNLQLANVVSDITGATGMRIIRAILDGQRDPLVLAGLRDRRCKNSESTIARSLHGNFRPEHLFSLKQAVDLYEFYQGQIAECDRQILHQLASFDTAEASGNGPGATLPAGLEEALQRMSGVDLTRIDGIDCNNALKIIAEVGIDMSRWKSSKHFASWLGLCPGTKVSGGKVLSAKSKPVANRAAAALRMAAFALFKSKSALGAYLRRQRSRLGAPKAITATAHKLARLVYTMLKHGTAYVDAGQEYYEERYRTRVVQNLKRKAQKFGFSLVEITGLQTQNATS

SEQ ID NO: 50512 - protein, 453 aa, unidentified
MVNGGMLEIDAEAGEEQLVERVAAIDVAKASAVVCVRVGHASIAGRRVTRVWEVRSTTNAIIALAEQLAGERIERVVVESTSDYWRPFVYLLEARGLTVWLVNASQVKQVPGRPKTDKLDAVWLAKLNERGMLRPSFVPPAEIRRLRDYTRLRVDLIADRTRQVQRLEKLLEDALIKLSTVASDILGVSARAMLDALIAGERDPEALAELARGRMRGKRAALVEALTGRFDDHHAELAQMLLDEIDALTLKAETLTVRIDQLIAEIPAAHPPAPTADPGGHPRDPGTRPLPVVARLDEITGIGPNAAHVIVAEVGLDMTQFPTPGHLVSWTKLCPRTIQSGPKSRSGKAGKGNPYLRRVLGEAAIAASKTDTFLGERYRRLVRRRGKLKALVAVARSILVIVWHLLADPSSRYRDLGADFYTNHIDRQRKTRQLIRQLEALGHTVTLDTAIAA

SEQ ID NO: 50513 - protein, 393 aa, unidentified
MIVIGADTHKGSHALAAVDDGTGKVRGHREIAAEDAGHLAAVRWARGLDDDRVWAIEDCRHVSQRFEQALIAAGERVVRVPPQRMGASRKGERERGKSDAIDALAVARAVVKDGVEAFPAAYLDRQAMEVRLISDHRNDLVADRTRVVNRLRWHLLVLCPELESSLKRGAFNHPRVLDRVDRRLRKLPAGARERVAREQVVQLRALNRQIDQLHHELAELVAAHRPNLLTEQGCGALTAAILIGHTSGNQQFRKEASFAMKTGTPPVPCSSGQRTQHRLNRGGDRQLNHALHIIAITRAQRDPATKDYLARKEAEGKTGKGALRSLKRHLARRFHRLLAEPPADQQQATNSEPTVEPQPAGSDDKPREIPPPPPRQREVQPIDAAPALMVCIT

SEQ ID NO: 50514 - protein, 422 aa, unidentified
MLAKTQDNEEIIERVAALDIGKAELMCCVRVPDEDRPGMRLQEVASHSTMTRPLLSMADRLACLGVTRVVMEATSDYWKPVFYLLEAAGFEAWLVNAKDVKHLPGRPKTDKLDCIWLCKVAERQMIRPSFVPPPPIRRLRDLTRYRADLVAARTAEKNRVEKLLEDAQIKLSVVVSDIFGASGRDMLAALVAGERNPTVLAQLARHTMRKKITVLEEAFTGYFTDHHAFLLGAMLARVDAITADIAALDTRIEEQIAPFAAAVAKLDEVTGISLAAAHAIIAEIGLDMARFPTAGHLVSWAKYAPGVKESAGKKKGKNSTGHGNSYLARILGNAAAAAGRTDTFLGERYRRIARRRGAKKANVAIGRSILVIIWHLLSDPDARFHDLGPGFYATRTDPERRRRNHVRQLEALGYTVILERSA

SEQ ID NO: 50515 - protein, 438 aa, unidentified
MTPLPILDPRAAFVDVGSEQMHVSIAGGEPKVFGTVTLQLHALRDWLTSQHVTSVAMEATGVYWLPLYGVLEAAGFEVLMVNGRQIRNLPGRKTDMKDCQWGATLHAHGLLQAGFVPPAEIRRLQDYLRLRADHLSLAATHVQHLQKALERMNVKLHDVISDITGTSGLAVIRAILAGEREPLTLLRLCDVQIQRKKAERVIESLRGTWKEEHLFALQQALDSWEHYQRQIADCDRRIDEALTRFSGPDDPAGPVPRRHKRPGINAPDIADLHAMLVRLCDGKDLTVLPAHTEYSVLQLIGEVGTDLTQWHTEKHFTAWLGLAPGSHQSGKRHGKAKRKRNRAGRLFCLMARSLARSKNIALGGFYRRLAARRGGLIANIALARKLATLFWRVMVKGIDYVEYGLQHYEAKVIEHKHRALKRLARQLGQQVVPIAVAQ

SEQ ID NO: 50516 - protein, 427 aa, unidentified
MGRLKIVYPVCCGMDVHRDFVIACIATTNSQGVTDYLSKRFSTYSGGLRDLAAWLLANNCKDVCMESTGKYWFPVQNILEKSCNVVVSHPKFVKAIKGKKTDKKDAMWIADLFKHDLVRGSFIPPEEIRQLRDLCRYWVKLTAYNTGEKNRAQNCLTVSNLKLDSVFSNVFCKSASAIISHMLEHPGEQFPVAPFVHPRCKSPIEDIQAAVDGAFSPWQAEKLMVIRTHMDDLASLKQSLEALIFKLAQPFTRQIELLLTVPGISEPMTAIRIIAEIGADMSQFESSKHLCSWAGLTPQNNESAGKKKTTRIGKAGQYIKPLLLQCAIAACNPRSKRYPQILAKYQQLYKRRGKKKARNAISRRLLTAIFHMLLNDEPYAPFEASARHTIPDSRVLTPDQALALLRANGYIIQEPPVVAPAGIASSG

SEQ ID NO: 50517 - protein, 373 aa, unidentified
MLYLGIDLHSKQLTISLRGEDGEVLLRRQVSTRGEEPRRFLEDVALRAGEGGYVAVVEVCGFHDWLAELLAASSGCREVVLIQAEKQHTRKTDRRDAHTLSEILWVNRDRLLSGRKVQGVRRVVPPTPQDRDDRRLTQLRRNVGADLTRVLNGVRHILRRLNFEQHCPTKGIQTVAARQWLEKVVKLPELDRLEMDHLLARWKLLEEQQQQLDRRIRERTAVHEQAVILRTVPGASGYTALALASRIGDIDRFPTPRSLAHYWGRTPSCKTSGEATTRLGSITKEGSLLARFLLGQLVLHVLRRDAGMRAWYQRIKKRRGSKIARVAVMRRLAVIFWHMLKQRQPYALSVSAAQKPPPRRRRKMSPEPAAASP

SEQ ID NO: 50518 - protein, 416 aa, unidentified
MKKGQDTRGYERYMALDIHRENILVGAWNAEKAWVLTPRRVSTERFPEWAKKNIRAGDIVVLETTTNVWATYDIVAPLAGRVLVANAAEVEEIAKARVKTDKEDIKKLLKILIGGIVPEVWVPPMEVRELRAFISYRGRLVKTSAMIRNRLQSLLHKHNLKLSETGLLDQVWWEAQKDISSLEKMQIRQELALLQEVEKLKTAVDEELQRQSTGAQWGKPALQLMQLPGVGYVVAMTVLSAIGDVSRFESAKQLVGYAGIGAGVHDSGKTHKDKKITKKGRRELRWAMVEAAWRAVGMSPFWKAEYEKYLSRLRKKNQAIVVIARKLLVAIWHVLSKEETDVHASEEDLAYKMLLLSWSLKEDTRMGLTYKQFAKYALMQLGVESDITRFVRRDVPRRLAPKEEVLARMTELGLTV

SEQ ID NO: 50519 - protein, 372 aa, unidentified
MDERIKFFIGLDAHKESTSVAVCEATREPARFAGTIGPDMRVLLKLLAKAGDPAQVSVVYEAGPTGYGLYRELRQRGYRCEVVAPSLIPRRPGDRVKNDRRDCARLAELSRAGELKAIWVPDEAHEALRNLWRAREDAVNMRLKTRQQLKAFLLRQDRRYPGRTSWTKSHERWIAEQRFDHEADRIVLAEYQLAVDSAEQRVQRLTIALAEAVQGWRFEPVVAALRALRGIDTVSAIGLVCEIGDINRFASARQLMGYLGLVPSEHSSGNSVRRGSITKTGNAHARRLLTEAAWNYRFPARLSRDLRARSQALPEAVRAQAWKAQLRLCSRFARLSSRGVQVNKVCVAVARELSGFIWAIARQASPAVQTIH

SEQ ID NO: 50520 - protein, 327 aa, unidentified
MYVCILDAAGNLLVHRNLHSEPKAFLELIAPYRDDLVVAAECTFTWYWLADLCAKESIPFVLGHALAMKAIHGGKAKSDKIDSEKIAVLLRGGMLPQAYVYPAEMRATRDLLRRRLHLVRKRGQLLAHIQNTIHQYNLPAFEKRIACPANREGLVEHFPDPAVQESIAVNVALLERYDELLGKLELSIVRQAKRHDADAFHRLRSVPGIGKILALTILYEIHDVNRFSRVQEFASYARLVKCAHESAGKKLGTGGAKQGNVHLKWAFSEAAVLFLRHGGEHQKLLARLQRKHGKGKALSILAHKIGRAVYYLLARKTGYSAEKFLKA

SEQ ID NO: 50521 - protein, 342 aa, unidentified
MDRLSPVTRIRKVGFTMENELHFIGIDVAKAKLDVDILRPDGRHRCKKFDNTPSGHEALVRWLRGHDVNRAHVCMESTSTYMEDAAAHLSDAGYTVSVINPALSKAFAQSEGLRSKTDKVDARMLAHFCREKRPPAWEAPHPTERALKALVLRHQALTEMQTQEKNRRETAPEVQLTSIDILLGCLSAELARIEKQIKDLTDNDPDMKQRRKLLNSIPGIGEKTAAVLLAYTGLKLKFGTGRQFAAYAGLTPVQHESGSSVMRASRMSKAGPVHLRKALYMPALSALYHTAWGKAFRKRLEGNGKRAKVIIGAMMRKLAQVAYGVLKSGKAFDASQHELLIA

SEQ ID NO: 50522 - protein, 324 aa, unidentified
MTRGIFVGIDVSKDRLDVAFRPSGEKLIVPNDRRGIARLVRTISRFTPECVVLEASGGYERRLLERLAEEELPVALVNPRNIREFARASGRLAKTDAIDAAVLAHFAEVMKPELRRLPDPETRKLRALITRRNQLVRMRTAEQNRRLQALESLRAGLSAIIRCLKKQIAVLDKQLAALVRATPAFRQKAELLRSAPGVGPVVSATLIAHLSELGTLNRKKIAALVGVAPFNRDSGRLKGKRAIWGGRGDVRAMLYMSTLAAVRLNPSLHAFHSRLRSAGKSPKMALTACMRKLVVMLNAMLKVGSRCSEERTRSVKLIAAPAPT

SEQ ID NO: 50523 - protein, 434 aa, unidentified
MTLINIVAANQKYYAFNLLSVFIMVFWSVQYLLQHLLVQTQLSDQLLQPLILILQLPQTPQFRHARPGKFFLPVNGMDYLLPLRLTVRNVLTGRITMNIVFLGIDLAKNVFQLCGVNQAGKPVYTKRTGRKELLQTLANIPACLIGIEASTGAFYWQREFEKLGHKVKIISPQYVKPFVRGQKNDGNDAQAIAVALMQPTMQFVPPKSPEQQDIQALHRARQRIVNHRTATVCQIRGLLLDRGIPIGSAVSRARRAIPLILEDAENGLSSRMRRTIAELYDLFNDLGRRIHFFDKEIETVFRQSEACQRIAKVKGIGPKTATAVVAAIGKGTEFKNGRHFAAWLGLVPRQHSSGDRQVLMNMTKKGDKHLRTLFIHGARAVVRVATNNNDGHMNQWVNQLKERRGFNKTTVAVANKNARIIWSMLRNETEYQVV

SEQ ID NO: 50524 - protein, 379 aa, unidentified
MRALGIDCGQLEHRFCLLGEGGQVLAEGAFAESRRGLEALRRQVEAQGEPALVVMEASGSCWQNLQAEVASWGWPAQAVDPQQAAQFARLLHPRHKTDKADARSLARLGLQAPRSSFASGPEATLAHGLARGIGQRAVLMNQLHGLLVIANPALILCRWALDAPRTLAVLRRYPTTRELRRARALAQVSFGQRARVGEEAAQALREAAQEALCGALNEAHAAQIRFLVEQIATWSEEIARLREALRARLPQAQRLTSIPGVGEQTALLVTACVPFDRLASAKQAAAYVGLHPHLVQSGQSCYSRLSRRGNSIARTALYRAALPASRHNPRLAAFYQRLVARGKTHKQALCAVAHKLVRICFALMKFQTSYSPTYQPERT

SEQ ID NO: 50525 - protein, 423 aa, unidentified
MVLGVGIDWAEEFHDIALGTPEKGVIEQFRIDHGPDGVARLVSRCLALEPDPAEVRVVLETRHGLLVEALIDAGFAVVPVNPDLVARRRGPARKKDDAEDARICCLLALDRHTALKTLIPHGELGGELRAIARDDERATRDQRRLLNRLRADLQTTYPAALLIAADDLGAVTVLRLLERWPTQAELAAATRDELTGFARAGKHGWPDRFADRVTGALAAPALPTRDYLVRAKAAGIRLAAVQLLALHEARRGWAARMTELLLGGRRTGRDHTVKDPDPGNAFPGGAIYLSFPGLGDLLAARVAGEIGEHIDQFDSPNGLQCYAGQAPVTRRSGRSDFVVARRLAHNRYLGAAVHQWAFCSLTKSGWAREFYDEKITAGKSHHAALRALGNRWLEILWHCLTRGVLYDETVHVANRNRALGRAA

SEQ ID NO: 50526 - protein, 343 aa, unidentified
MVHYVGLDVSLKQTSICVVNQAGSVVREDVVDSDPEAIAAFVRSKAPGAVRIGLETGPTSTWLWTELKRLGLPVICIDARHAKAVLKMQINKSDRNDAAGIARIMQTGWFKEVRVKDLDSHSVRALLSSRALLVKIKRDLENQIRGLLKNLGLVIGRAKFNVFATRAEELIADRPELVAAVRPLLDARKAIEQQIGDLDRKVLKLARYDVQVRRFMTAPGVGPITALCFKATIDDPTRFKRSRSVGAYVGLTTRRHASGEVDWSGRISKCGDAMLRTYLFEAANVLLTRVPKWSALKAWGIRLAKRNGLRKAKVAVARKLAVILHRMWIDGTEFSWSTKKAAA

SEQ ID NO: 50527 - protein, 351 aa, unidentified
MVIIGCDYHPGFQQIAALKTETGEVRDLRLAHKEEAGRFYASLQGQEVLVGIEACGYTQWFEQMLEEMGHRYQIGDAAAIRASYVRRQKTDRRDAGHILRLLVEGRFPALWVPSASERDARQLIVHRHKRVQMRTRVKNQLHALALNQGLRLRWQLWTEKGLEQLRALPLLPYAAARRTDLLKQLEEMNAEIERLDRMVRKEAELCPAAVRLMTHPGVGPVTALAFVLTIGDVSRFNKSRQVASYLGLIPSERSSGGKQRLGHISKQGNPLLRFLLVEAGHTAVRGDGELRRCYQRLQHRHSTGVAKVAVARKLALRLYWMLRNQIDYAQLHGPYAGKPVSFCGRKTRPTA

SEQ ID NO: 50528 - protein, 355 aa, unidentified
MNSEKYIGLDVHQATISIAVMDSTGKVVMESILETKGATILEFFEGLRGTLSVTFEEGTWAAWLYDLLKPHVAKLVVCNPRKNALLKDGNKSDRIDARKLAELLYLNKLSPVYHGETGMRMLRELARSYLTIVKDTARVMSRLKAVYRSWAIPCAGRDVYYRRHRDEWLGKITEAGVRRRTEQLYLQLDMLQHLRQQARRELLTESRRHPITATLRQIPSLGPIRSALAVALIQTPNRFRTKRQLWAYSGLALETRTSGEYRYVKGQLQRSKKQISIRGLNKDHNHDLKGLFKGAATTASVRPGPFQDFYERSLAKGIKPTMVRLTLARKIAAITLTLWKKGENFDADKLKSQAA

SEQ ID NO: 50529 - protein, 344 aa, unidentified
MKIKLLGIDLAKNVFQLCALNQANKVLFNRTVRRAQLRSTIVKLEPTTIAMEACSSAHYWGRTFEAMGHKVLLVPAQHVTPFVRGGKSDARDALAICEAAERPGLHPVPIKSIEQQDIQLLHRLRQRQVQHSTALANQIRSLGREYGVIFPAGIKSLIKRLPEALEDGSNELSPVARYALADQHRCLIEVRQAMKAFLLQIEQLAGQHPAYVNLLPLPGIGPMVASAYIAAIGNGNQFKCGRQVSAWLGLVPRQYGTGGQIQLMGISKSGDRYLRTLMIHGARAAITCGLKNNPELALWVQPIIDRQGFNKAVVAMANKMTRISWVIVTTGEAFDMKQAFKPVA

SEQ ID NO: 50530 - protein, 342 aa, unidentified
MPKLKQYVGLDVSLKETSIAVIDENDRLVWRGSVPSTPEAIAEALRKHAPCAERIGLEAGQLSSWLYHGLKAGGWPVICVDARHAKAALSLKVNKTDANDALGLAQIMRVGWYREVTVKGHGCQAVRALLVARAQIVSQVTTLKNCVRGILKTFGHVLPKKLRATYITSVGQIIEGDTTLEPILTPMLRTLAATMEQLQVYDRAIHRFARGSETARHLMTAPGVGTVVVLTYMTGIEAPARFPRSSAVGAYFGMTPRRYQSGEVDQAGRVSKCGDGMVRSLLYEAATVLLSRSAKPSDLQTWGHSLTKRIGKRKATMAVARKLAVILHRMWTTGEPFRWTAA

SEQ ID NO: 50531 - protein, 400 aa, unidentified
MKKHSNEARVKTAVEAAVQPAVKPAGKPQRSGARLKSGTTTRTGQPNTGEALTIGIDVGDRASRLCALNAQGQVEEEGSVATTEAALRKRFANQPRARIAMEAGTHSAWMKRVLEALGHEVIVANARQLRLISHSSRKDDRADAETLARLARADVELLRPIRHRGQQAQQDLSRIRVRAALVEARTGLVNAARGLVKVFGHRLPSCDADQMNPHRLAGLPESLREVLRPLLEQVEALTARIQASHQELEQLARQQYPETKLLRQVSGVGPLIALTYVLTIEDPWRFARSRDVGCYVGLRPRRSQSGESQPQLRITKEGDRYLRAMLVQGAHYILGWRGPDSDLRRWGQQLAARGGKNARKRAVVAVARKLAVLLHKLWTTGEVYEPLRNNRCGPQAATAA

SEQ ID NO: 50532 - protein, 456 aa, unidentified
MNPKRSKPKNDRTMPMIHPNAAAIDIGATMHMAAVRADRTPEPIRSFGTFTTDLHRLVDWFTECGVETVVMESTSVYWIPIFELLDARGFAVFVVNARDAKHVPGRKTDVSDAQWLQRLHSYGLLRASFRPKGQIAELRAYVRQRERLLEYAASHIQHMQKALTEMNLQLHHVVADVTGATGLRIIRAILAGERDSKVLACLRDYRCHSSAEAIEKALTGNYRAEHLFALEQALALYNVYQDKASACDARIEAVLKELSISRGRDAGPLPSPRRRLHGKANGPDFDVRAALFKLLGKDLTQIDGLGSYLSLRLIAECGDDLSAWPSAKHFTSWLCLAPSNKISGGKVLSSRTRSGSRASALLRLAAVTVGRTDTALGAFYRRLSARIGKAKAITATARKIAVLFYNAVRHGMEYVDPGSSYYETRYRTRVVENLHRRAKAFGFVLLPLESKAGAVS

SEQ ID NO: 50533 - protein, 401 aa, unidentified
MNSVGIDISKNRSTVAVMRPFGDVVISPFEAGHTVSELSELAKRLKSLDGETRVVMEATGNYHTPVANLLTNAGLYVSVVNAKRVHGYGNDDLRRVKTDRKDAVKLANYGLDRWLKLPRYIPEEKTRLLLKSCYRQYQQHAKVQTMLKNNLIALLDMTFPNVNRLFSSPARADGHEKWVDFAEDFWHCGCVSKHSEKAFTKKYQSWCKKRKYYFREAKAHEIYTKASTCVDVMPMADTTKMLVEQAVAQLRATSSALAALRQEMQALASTLPEYPVVMEMFGVGPTLGPQLIAEIGDVRRFYSKKALVAYAGIDAPPNDSGDVTGRHRGMSKVGASSLRRTLFLVMSIYLQNAPQNEPVYQFMDKKRAEGKPYRVYMMASANKFLRIYYATVKHHLDNPKA

SEQ ID NO: 50534 - protein, 400 aa, unidentified
MSTASNRVVIGMDPHKRSVTIEMMTLDEIVVGGGRFDTNEAGFAAMMRYVSTPRPGREDRVWAVEGCNGIGHHVAMRLLAVGEEVVDVPPKFSARVRMFATGQGRKTDVTDAHSVALVGTRMAGLRPVVNDEQLAVLRVLVDRRRSLGEDHTRMVSQLHAHLLELIPGGAKKDLSAAQAKTLLAKVGPRDIAGKTRRRVAAELIGDLERIYTRKKAADKELRELVAATGTSLLGLNGIGPTGAARLLVEVGDITRFPDRGHFASWNGTAPIDASSGDHVRHRLSRAGNRQINRTLHIMATVQLRNPTEGRAYYDRRKADGKSSMEAMRCLKRRLSDIVYRTMLNDSVVHAIADGKTGPGGQRGNDSDSSAAGSHPHTGSSDKSLPGPAKHDPRTRLPDAS

SEQ ID NO: 50535 - protein, 430 aa, unidentified
MKSNTQNSKIEAVTEKTLVVGIDVGSEFHYARAFDWRGIEYSKKPFKFSNTEPGFTEFKAWILHIQTEHDKDAVVPGMEPTGHYWFNLGKFLQDNGMKPVLVNPHHVKKSKELDDNNPTKNDRKDPKVIAGLIKDGRYSYPYLPDGVYADLRTASNLRFQMQSELTRIQNRISRWFSIYFPEYKDVYGNPDAKSGMMILKVAPLPEDIVTLGAEGVNRIWREAKLKGVGLKRAKTLYEAAEHSIGRREGATAARLEIRMLLEDYDSRAIRLQEIMTLIESLVKQIPMAEKLMEIKGVGIKTVSGFLAEVGDISRFDNPKQLQKLAGLAIKENSSGKHKGETTITKRGRKRLRYLLFEVAMSLVSKNEEFAQLHQYYTTRRINPLKKMQSLMAVACKLIRVFYVMLTKQVDYDPQKMISDIRRPEIYLQTA

SEQ ID NO: 50536 - protein, 334 aa, unidentified
MENIALIGIDLGKNSFHIHCQDRRGKAVYRKKFTRPKLIEFLATCPATTIAMEACGGSHFMARKLEELGHSPKLISPQFVRPFVKSNKNDFVDAEAICEAASRPSMRFVQPRTESQQAMRALHRVRESLVQDKVKTTNQMHAFLLEFGISVPRGAAVISRLSTILEDNSLPLYLSQLLLKLQQHYHYLVEQIKDLESQLKRKLDEDEVGQRLLSIPCVGTLTASTISTEIGDGKQYASSRDFAAATGLVPRQYSTGGRTTLLGISKRGNKKIRTLLVQCARVFIQKLEHQSGKLADWVRDLLCRKSNFVVTCALENKLARIAWALTARQQTYVA

SEQ ID NO: 50537 - protein, 352 aa, unidentified
MKRQGKGLDPGEVLFVGVDLHKMRWHVTIRTADLELWSGSIPGKWESLRLQLDHYRGCAIQLVYEAGCFGFWLHDRLMEYGVECMVTPPSLVPQEYGNRVKTDRRDSRKLAHLLAKGLLKRIFVPGKKECYHRQVVRRRRQLIGDRTRVQNRIKAELRFYGINLSEPVGKWTKGYVENLNRLSFEDRFMQESFNRLLEQYTFLTGQIEKQNALVRELSEMEMYRERVGILKSVPGIGTLAAMELLLELQDVSRFRQADQLAAYVGLTPSQYSSAEKVRMGRITKIGKHSVRALLVQAAWQLIRKDQAMREKYERIKIRSGAKRSIVAIARTLLLRLRRIWLDATPYRLALNA

SEQ ID NO: 50538 - protein, 350 aa, unidentified
MLIIGCDYHPGFEQIAYVDSETGEFQERRLKHPEEAEKFYRALWEQSVKVRVGMEASGHARWFERLLEELSFELWTGDAAKIRAKRVRKKKTDREDARHILELLVENRFPKIWVPTWQNRDVRQLLWHRHRMVQTRTRIMNQLQAVAINEGVRYKKRLWREAGRKQLESLSLAPWASRRRKDLLEVLDRINPTIAELTQAIEEEAEKCPQTRRLMTHPGVGALTAVAFVLIIGEANRFDCGKQIAAYLGLVPEEDSSGERRRLGHISKQGNSLLRFLLVEAAQATARCDGRWRNQFFHLAQRRGRKIAKVAMARRLAVRLYWMWRREWNYEQLQSFGSHVGQPGNPHGVQ

SEQ ID NO: 50539 - protein, 403 aa, unidentified
MFYAGIDWADDHHDVVVIDETAKTRGSLRVDHTVSGLSQLNSFLKEITPNPAQLACIIETSQGLLIAALLEAGWAVYPVNPKTVDRKRGAAGAKTDKIDAYLLAKTGRSDLADLRELKPDSALVQELKELTRDQDNLIEMQTRLVNQLTACLKAYYPSALELFTKLHQRSTLLFLQSYPTPDQAQTASLEEITLVLKTAGHKRAAEYTPRIYQCLHQPHLHSNAVSVRTKSRLMLALVAQLLPLVEQIAAYDKEVESLFFSHGDREVWASLPGAGKRLAPRLLAEIGDDRSRYEQPTNLQAVAGTSPVLFESGNYSKARRRLACIKPLRNALYQFAWQSTRQEEWAEEYYRRKRAEGKTHSVALRALSNNWLRIIHALWRKKESYVSTIFQTAQQTHLRRAAS

SEQ ID NO: 50540 - protein, 494 aa, unidentified
MKKKLPQESIPGRRVCAPAKTSRAKGTCRQKVKGAKRGAQRRTVTHPDAAGIDIGSKEHYVAVPAGRDEINVRHFSAYTEGLTAMIQWLRRCRVNTVAMESTGVYWLPVYQQLEAAGFEVLLVDTRGVKYVPGRKSDVQDCQWLQELHTYGLLRGAFRPEDLICQLRSFLRHRKNLVEESSRHVLRLQKMLQEMNVLLHHVLSDVTGESGLRILDAILVGERDPQKLAQMVDRRVKKTPREIAAALRGDYRQPQLFVLGQELQSYRHVQQQIEQCDQEILRQAQQLPERATAATTAESKAGEAARAAAVPSKSKESSKRFTASFERCLHEQLQRVLGVDLTQVPGLGALAVLTLLSEIGTNMKKWRNAKAFASWLGLSPGNKISGGKVLSARTRKVVSRAASILRMAAHTAGKTDTPLGHFYRRKKAKLGAPKAITATARKLACLVYELIDTRHDYAPPSVIAYNTQCRHHQIAALRKRAAHLGCQLIELPAAA

SEQ ID NO: 50541 - protein, 417 aa, unidentified
MKKHSNSLKQSEAPAKRRKLGVVVERKPQEVMAELVAKLAEQLDVEIVPAVEGKKDGRDAVRPNLDRLTVGVDLGDQWSNYCILGLGGETLAEGQFRTRKQETAEFFQGLATSRVVVEVGTHSAWVREIIAGFGHEVLVANPRLMEGSKRRRRKNDRIDAEKLARLGRIDPKSLHPIQHRSTEVREDLLVLRARDALVKSRTELINSVRGLVKSMGGRVTGCSSVAFSQKAAAEIPEEVHETLQPLLRLIATLSEEIKTFDQRIEKLAAEKYMHTQLLRQVSGVGPVTALAYVLTLETPLRFARSRDVGPYLGLVPKQEDSGDIQPQLGISKAGDRMLRKLLVGSAHYILGPFGPDTDLRRFGMRLCERGGKNAKKRAVVAVARKLAVLLHRLWASGEVYEPLGHGAPTRPAQAAAA

SEQ ID NO: 50542 - protein, 423 aa, unidentified
MTKLTSTPAGAVLVAIDMSKSRQEVLIERPEGGRRRRMTVMATRQDYDGFAEQLAAIGRPIIVGFEATGNYHRTLAHRLLTAGFELRLISSVALARTREALHNGWDKNDSKDAQVILHMLRIGATQRYVDPLVAGINDLQELSKTHETISRMKTQTWHRILTHYLPLYFPEIARFAGNSRSDWFLALIERFPTPATITALDREAFSAAAWPLIGRKVSKARLINDIYETASASTALPVPENSAAITMFRMVIAQGRSLIHQRDEIERLAHARLADDVDYQLLRNIPGIGPINALTILAEAGDLRRFNHHRQFLKFCGLDLATCQSGTFRGRTKLSKYGNARLRRTFWMAAQVAARQRDNSFRDKLGRYVAGHADDADRRRKAMTALTAKMARVAHAVIKTGTEYRPFLERSDARWKDPSLQVP

SEQ ID NO: 50543 - protein, 348 aa, unidentified
MRFYTKKHRHYCGIDLHARSMYICILGDQEKPLLHRNCKASPEAFLKAIELYRDDVVVGVECMFVWYWLADVCAKEKISFVLGHALYMKAIHGGKSKNDRIDSQKIAALLRGGTFPVAYVYPRKMRSTRDLLRRRNHLMRKRSELLAHIQNTNSQYNLPELEKKIAYRANREGVTDHFPDPSVRKSVEVDLQLLDFYDQLLTELELYIVKKVKAHDVRSWYLLRSIPGVGKILSLVLLYEIHDIRRFPRVQDFVSYCRLVKCPRESGGKKFGAKNSKIGNVHLKWAFSEAACLFLRGNEQAQHYHSRLVSKHGKGKALSILAHKIGRAVYFMLKRKEPFNMETFFARA

SEQ ID NO: 50544 - protein, 311 aa, unidentified
MSQFIGVDVSKDHLDVSIRPMVQRMRFTNDDEGIDMLIKSFQPLSPTLIVMEATGAYHRLLLGRLLGAGLPAIAINPRQARDFARATGRLAKTDAIDGDVLAEFGEKIRPELRAVADEATQVLEAICTRRRQMVSMLAAEKNRLHTAPTSIRPVIKKHIQWLEKHIEQLDKDLDKQIRSTPAWREKDDLLRSCKGIGPVTSHTMLACLPELGTLSRGQIAALVGVAPFNDDTGRHRGRRHIQGGRVDVRCVLYMATLGAIRSNPAIRAFHQRLILAGKAKKVAITACMRKLLTILNAIIRSSKSWSVDFAA

SEQ ID NO: 50545 - protein, 315 aa, unidentified
MNLGIDVSKNTLDCCLILDGIFFERQFKNNKAGFEQLKSWLKKSGATSALHCCCEATGKYYEAVADYLAESYVMSVENPRKIKGYGNAKLQRSKTDRLDARLIAQYCRDMKPRAWQKPSEAQTKLKELNQYRQRLKAQKAAEQTKLHTAPDYLVPLIEDTIRHLQKQIKAVQEKIGQFHQDYPDYKANRNRLKTITGVGDNAADTLLTVLAEQDRFENQRQFTAYLGLDPKQFKSGTSVKGRERISKVGSSRLRTALYMPAMHAYRSRTFAPFVSRLKANGKRPKQIIVALMRKLAVIAYNLIKTGKDFETERYK

SEQ ID NO: 50546 - protein, 339 aa, unidentified
MGFYTGFDLHASNAYLGIIDENGKRVFSRKLQNDEALIVKVLNPFKSDIEGVVVESTFNWYWAVDLLMEEGYKVHLANPSKIQKYKGLKYADDEDDAFWLAEMLRLGILPEGYIYPKADRPIRDLLRKRGHLVKLRTSLIVSLQNIISRSLGGKMKTNDIKVLTEDRVTPLLADNEDLALAGKVSKDAIDSLTRQIKAIEGAVEKKVDLRRPYDHLLSMPGVGRILALTIMLETGPIGRFEKVGNYASYCRKVPTIWTSNYKRKGKGNRKNGNKYLAWAYSEASQFARRLDDNARKYFDRKRRRTNAPIAHSALAHKLSRAAYYIMRDGVPFMAEKTFG

SEQ ID NO: 50547 - protein, 479 aa, unidentified
MTPSKDAFPEPCPPVPTVPEPLVLRPSSSLPLYNPHAAGIDIGEAEHWVAVPPDRSPEPVRRFGTFTADLDVLADWLLDCGVTTVAMESTGVYWIPLFELLEARGVQVFLIDPRQAKRAPGRPKTDRLDCQWLQRLHAYGLLAAAFRPADQVCVLRSYLRHRQMLLTYGAHHIQHMHKALQQMNLKLSQVVSDLTGVTGMAILRAIIAGERDPLTLAKLRNPHCQHSEDEIAKALQGTWRAEHLFALQQAVELYHFYHQQLTVCDQQLQAHLGTFADNSDGQPLPPKPRRHKKANAPRFDARTPLYRLAGVDLTTIEGIEEGTALVILSEIGTDMSRWPSVKHFCSWLGLSPPHKISGGKVLSRHVRPGAHRVAVAMRLAARTVQQARTALGAFYRRMRSRLGAPKAITATAHKLARLVYSLLKHGSAYVKQGLEAYESQYRERTVKAVARQAKALGYTLVELAVPATPGNDAVAPATP

SEQ ID NO: 50548 - protein, 343 aa, unidentified
MDYFAGLDVSVKDTSVCIVDDTGRIRREVKVASEPEALLTVLRNPAYRFKRIGLEAGPLSQWLFSALAEADLPVICVETRHMRAVLKAQINKTDRNDARGIAQMMRVGLYRPVHVKTLRSQKLRMLLTHRKLLQAKVIAVDNDLRATLRNFGLKVGMVGTIKFEARVKELVENFPDLMASVEPLLVVRRVLREQISILHRRVLAAARNDEVCHRLMTVPGVGPVVALTYRATVDVPARFRKSKSVGAVFGLTPARDQSGERDRPGAISRCGDEMMRTALYEAAQVMLLRSAKWSWLKAWAMKIARHRGMKKAIVALARRLAVIMHRIWTDGTEFRWTREAAAV

SEQ ID NO: 50549 - protein, 346 aa, unidentified
MPIVGGLDIHRRQITFDYLDTVTGQVCRGQVSPADREHLRAWLARFAGREDVAFAVEGCTGWRYVVEELAAAGVAAHLAEPADTAFARGRKRHAKTDKTDGRHLRQLLAEGRLPECWIPPARILECRALLELYHDLRAEHTAWVQRIHAVLFHHGAPALGAGTLRTGPGVAALRAVTAEWLSPAGQLQVATALEVLEALEGRMHEVRHQLTDAARHLAGAKVLAERLYGVGPVTALAITCWLAGKDRFSSSRQAVRFAGLDVTVWSSDRKGPPGRLSRQGPPVLRWAVYEAGKTHARSPAPDHAYYAQVKDRCNGKRAALSEARKILRQAHHILAELGDDALAPAA

SEQ ID NO: 50550 - protein, 348 aa, unidentified
MRFYNGQHRHYCGIDLHVKTMYVCILDAAGQVLVHRNVKSTPEAFLEAVAPYRDDLVVAVECMFTWYWLADLCAAEGIAFVLGHALAMKAIHGGKAKNDKIDSHKIASLLRGGLLPQAYVYPAAMRSTRDLLRRRLHLVRKRGELLGHIQNTRAQYNLPEFKRRLAYPANRDGVSEHFTDPSVRKSVEVDLALIEQYDGLINDLEMTLVRDAKRHDADVFHRLRSVPGIGKILAMTILYEIHDVTRFARVQEFASYARLVKCQKESGGKKLGTSGAKMGNVHLKWAFSEAAVLFLCHNAEGKKLLAQIQKKHGKGKALSILAHKIGRAVYYMLARGTVFSMEKFLHAS

SEQ ID NO: 50551 - protein, 327 aa, unidentified
MKNIKYYIGLDVHKEHTTYVVRDKIGNILLENETATLYSELYPRLKPYLATSLIGLEASTSYYTLYQTFLKNNYNIKVANTIQLRQLITKNDKLDAKRLSEMLRLGTFPCSYIPNEKIQHLRSLIQVRHSLMEEKVRCNARIQAFIDKNGVMMPPQEAFSKHWRQTLTKHLITGTVSGELQYEYDHFLFLEKKQRQVEQEMKHYTHINWKKEYMLIQSVTGFGPVLACYIIANVCPIERFPSNRKLRRYAGVIPVTKQSGETISKGHIPKGSSRKQLRWALVQAANTAGRTDTPLGRYYRKKKKQKKITEQIRHLADTTERKRNRKK

SEQ ID NO: 50552 - protein, 394 aa, unidentified
MRFVGIDIASEGHVVAVVDEGGNVVAGPTPFREDAAGYRTLLEAVGTAADTFVTLEATGHYWKNVFAFLAGQGYAVALVNPLRTRRFAEEELERTKTDSIDALGIARFAAQKRPPATRLAEEVTLELREMVQLRDRLQQDLGDRVRQLHRVVDLGFPEFTRYVTDLSSELATSILKDRQTAKSFLGLRPRALSNLKYDGRHFVGLELATKLIEAAKVSVGAHHGEAYRVQVRYFCEDIEVLRERIHDIDRDIESKLDAHEVGKLLTTIPGIGPTTAARLIAVLGNPADFQDAAALAAYAGVVPGLRQSGKKAPSSARLTPIGNASLRAKLYMPTLTAVRLNPWLKAFYERLRARGKPAKVALLAAMRKLLAAVYSVAKHRQPFVPRLLPAEVQP

SEQ ID NO: 50553 - protein, 343 aa, unidentified
MEHYVGLDVSLKQTAICIVDKTGAIKREAMVRSDPEAIAEYINTNATNVIRIGFESGATSTWLWTELNRMRLPVICIDARHAKAALKMQINKNDRNDAAGIARIMQTGWYRQVRIKDLDSHAIKALLVSRALLVKIKRDLENQIRGLLKNLGLVIGRAKMNTFVTRTKELIEDKPSLIAVIGPLLKARECIAQQIADLDRKVMRLARNDAQVRRFMTTPGIGPITALCYLATIDDPTRFNKSRNVGAYLGLTTRRFASGEIDRTGRISKCGDTLLRSYLYEAASVLLTRVAKWSALKAWGMWFAKRSGLRKAKVAVARKLAVILHRMWIDGTGFKWTLREVAV

SEQ ID NO: 50554 - protein, 431 aa, unidentified
MSERKSLEIRVSVDVGSRSHQVAIGLSSGEVLEEFEIAHRVEGFEDLFSRIERHRKGNSYRVAVAMEGFNGWARPLDSMVRGRGYRLYNINNLKLARFKEIFPGAAKSDRIDARKGLELFQLRDHLPLAKEVLQEVVGTPHENEVLKRLSRRRRRLVDERVRVVNNLQADLQAVCPGLLEITKEAGNQWFLNFLISADTLPQLARLRRTTLLKIPSVGVKYARLIQDWQERAHFSEEVEWVSAMIQEDARRILELDETIKALEVKTAEVAETSTIAKLLRSIPGYGAICTSELAGEIGTIERFNKEGSLALYLGMATLDNSSGKYQGTKRPKHINTRAKAAMMTALDRHRKYVPQSQKYYEKKRAQGKSHNQAIRALGRHLCRIIYKMLKEKREYEVRPLKRDTQAKVTSRSSRIGQIGKKKSRRKDKITI

SEQ ID NO: 50555 - protein, 313 aa, unidentified
MSQTNTNIVFTGLDIAKSSLQLHLADQFHALTNDAKGWRRLVKLLGIHPTAQIICEATGGYEQPVLQALQAAAIAVSLVEAGRVRHFAKAKGLRAKTDPIDAAVLTAYGRAFQPPLTPATHPTQRQLSQLTSRRRQLVDLKIIEHNRAEHYADAFSQKQSRQLTALLEKQIAQCDEQITQLIEENATLKNKSQRLDAIPGVGPATAAVVLAEMPELGHLSAAAAAALAGVAPYNDDSGNQASPRHIAGGRKAVRCALYMAALSAVRYDRILKDFYLRLRAAGKKPKVALTACMRKLIVLMNHLLKNPDFQLAN

SEQ ID NO: 50556 - protein, 338 aa, unidentified
MEYGAIDLHKQRSVIRIVDGDGTVVLDRTVPTSRAGFASVFRGRARLRVLIETGTESEWAAQTIEADGHAVVVVDPNYALMYGVRQRVVKTDRRDVAALAEANRLGIFRAAHRVSAAQRERRRQLRVREQLVRVRTQAINLLRAQLRQEGYRLGSGSAETVVARYGRLQLPPTLQTSLQPVIALLTHLRPALAALDTTTAAQALADPITRQLMTAPGVGPVTALTYRAVLDDVGRFADAGRVTAFLGLVPKEDSSGARRRKGGITKAGPARVRALLVQAAWTIWRQRHAGDPLQRWVHAVADRRGRGIAIVGLARRLARVLFAMWRDGLPYRVMPLTA

SEQ ID NO: 50557 - protein, 387 aa, unidentified
MQKPHDNSKASPAAFMQDNTLIAVIELSLSNWLVAGLIPGVSREPLKKLEPNPEDLLKLLHGWRDEAIKAGRPITRIAVAYETGRDSFWLARWLRERGIDAHVIHATSVAVSREHRRAKTDRLDTAMLKRGFLGWLRGERGHCTVAIVPTMEEEDAKRPHREREGLVHEQTRVVNRMKSALIQFGVRNFNPKLRKATVKLETVRTPEGKSLPPNTIAALRRDMERLKIIKEQIKAIEQARLQQFEQKPEALANRMVYLLVRIYGLGWETADLLVHELLSRTLRDRKAVARYAGLTGSPDESGSKRREKGLSRSGNARVRKIMIQLAWRMVKFQPDSALVQWFKQRTENAKGSRKPMIVALARKLIIALWRYANDGVIPEGFRLHSAA

SEQ ID NO: 50558 - protein, 423 aa, unidentified
MEVLHTRVAGLDLHKATVVACVRRIEGGRTMRECRTFETTTAGLLALLDWLTEAGCTHVAMEATGVYWRPVWNLLDGGDFTLLLANAAHVKNVPGRKTDLNDAMWIADLAACGLVKASYVPDRPQHELRSLLRTRKQFQRERTSHVQRMQKTLEEANIKLDSVICEIVGVNGRRILEAMIAGERDPARLAALTDRRLKASRTALQEALHGRLTDHHRFLLRLHLGQYDALGEAIRQIDDEVAAAVERIDAEAPPAQASFPALIALLCTIPGVSRLAALTILAEVGWDMSRFPTDGHLLAWAGLCPGHDESAGKRRSSRLRKGAPWLKTLMVQCAWAAQRKKGSYYQAQFQHLRRQRGPQKAICAVAASLLRAVYHMLKNGIPHQDLGGDHFQRRPPEVRAKRLVTQLNRLGYDVNLKAMPNAA

SEQ ID NO: 50559 - protein, 335 aa, unidentified
MDRQYVGIDFHRRRSVIVRKNAAGEQLSSVRVANDPLVIAAAVAEAGPSPEVVIEATYGWYWIVDWLQEQGATVHLANPSGLNWGTRRVKNDERDAIDLIDMLRLGRLPEAWIAPPATRELRELVRYRAKLVALRSGLKAQVHAVMAKEGVLPAATDMFCAAGNVQLNEMQLGEAYTIRVESLRDLIEIYDREVAMLETNIRDRLRGDRGYRAIQAINGIGPTMAAILVAEIGDVTRFRSAAALCSWAGLTPKHKESDLTVHRGQLTKQGSRLVRWAVIEGTVRYHGGGKLAADYHQIAERRGKNKATVAIARKVLTLVYYGLRDGEIRCLTKTA

SEQ ID NO: 50560 - protein, 311 aa, unidentified
MQLTIGIDVSKDRLDAYRLSDRRHIQVTNDKAGHKALIGWIGKAEQPLVVFEATGAYHRHLEAALGAGGIPFAKVNPRQARRFAEATGRLAKTDRVDAAMLARMGAVLELEGRMPPDKALHELRELLAARRALIKDRTAARTRLATATLPLVKRQLAARIRQIETQLRRIDATMTGTVAQDEAMAHKLAILVSIPGIAETTALSMLIEMPELGTLEGKQAASLAGLAPISRQSGKWQGRERIQGGRTALRRAIYMPALVAARFNPDLKAKYDQLIRAGKPAKLAITAVMRKLIVMANALLRDDRKWSETCP

SEQ ID NO: 50561 - protein, 348 aa, unidentified
MNILAMDLGKSKTVFCLYNSENGEHRFGKVATRPKQIHDLIVEESPDRVVFEICSSAGWIYDIARTLGFETQVANPNTEAWRWKNVKRKNDREDALKLAKLSAMNQLPTVHMPEPEVRQKRLLIQYRQRQVKRVVQIKNSIRSILDKAGCSMPAGKNGWSKRSVGRLEEMALGFSECDMNNSWRGQLRVELEMLEAAQECLAEVTSKLDTQAGNDEQIRLLQTIPGVGARLAEAIVAFLDKPERFATGKQVGCYVGLTPKQYQSGSMDRQGRISGQGNSLLRALLVEVSWLGLRNNSWMRETYHRLLRGSPSRKKIAITGVARKLLVRCWAMLRDGQPWRNEVSGEAA

SEQ ID NO: 50562 - protein, 343 aa, unidentified
MQTMTTIGLDIAKSVFQVHGVDAGGQVIVRRQLKRRYVLTFFQKLSPCLVGIEACGSAHHWSRELQALGHTVRLMPPAYVKPYVKRQKNDATDAEAICEAVTRVNMRFVPTKTAEQQSGLVLHRARHLFVRQQTSVINAIRAHLAEFGIVAPVGRHGVEELLDVVTDPNDKRVPDIARACLSALGDQLQSIKKHVLEFDRLIRAWHRSNEMSMRLEAAPGVGPVLATALVAAVADPKSFRSGRNFSAWIGMVPKQHSSGGKNRLGNISKQGDRYLRGLFVAGALSVIRYAKIHGTKHRPWLTALLARRPTKVAAIALANKIARMVWAMMARGERYKEPVALAR

SEQ ID NO: 50563 - protein, 401 aa, unidentified
MPFFAGLDWGGTAHAVCAIDATGAVRARIEVQHDAAGLADLLARLKRIAPPADLPVAIERPSGLIVDALIEAGHPVVPIHPNIVKACRPRYRAAGGKSDPADAFMLADILRTDGHRFRPLMPAADDIKALRALVRGRDDLVAQRVALANTLRSNLESFWPGAAAIFADIDSPIALAFLHRYPTPDSAARLGPKRLAGFLASHAYCGRRSPAELLARLRAAPTGRAGEAEAEARGELVRALAATLETLVAEIVRLSSRIAHDVAALPDGQIVMSFPRSGRICAAAILAELGDVRERFPTADQLAAEAGVAPVTNASGKSRGVTFRWACNHRLRQAITTFADNSRHASAWAASLYNQARQRGCKHQHATRILARAWCRVLWKAWQDRTAYDPARHAAAAKLAA

SEQ ID NO: 50564 - protein, 316 aa, unidentified
MAKRKSYIGIDVSKQLLEVAVYESDFHYRCPNQASAFVALLAELIALGPARIVLEATGGLEKPLLTFLQAAGLPVVVINPRQVRAFAKAIGQLAKTDRLDAGVLAHFAAAVKPPLRPFKSKDDQELKDLMSRRGQLIDMLVAEKNRRHTATSDVVRKAIKEHIDWLEERIAELDEQLQTRLVSSPEWQSKDTILQSVPGIGPVVSFCLLADLPELGTLNRQRISKLVGVAPLNADSGQHRGVRHIFGGRARVRCMLYMAALTAVRFNPILKQFYQRLLAKAKPRKVALTACMRKLLSIINLMVRNQTPWRDDPVSA

SEQ ID NO: 50565 - protein, 341 aa, unidentified
MTIYSIGLDIHKKTIAYCIKRIDGQLIAQGEVAANRKALLAWLNEIPGPWMGAMEATIFTGWVYDFLKPHAVELKVAHPEMLKAITAAKKKNDRDDAERICDLLRVDLLPECYMLSAEIRELRRVLRYRNMVVRNASQMKNKVAGLLMEVGESYDKRRLHGKRYFHDLLDRVEDVPESVKELLLLTRGGLEMFSAMQKKLLRALQENELIRERVRRLRTIRGVGEVLALTWVLETGEPGRFKSSRDAISYCGLCSAQQQSAGKERRGPISKKRNKHLQTMLVEAANIAPQWNEQLAAIHARELARGNRNRATLAVARKLVEYMLAVERSGADFVPLAAKAA

SEQ ID NO: 50566 - protein, 349 aa, unidentified
MLIIGCDFHTRYQQIAMAKEETGELLLERRLHHQSGEAHAFYRSLQAPVRVGIEATGPIHWFERLLAELGHELWIGDSARIRASDVRKQKTDQRDAALILDLLLAKRFPKIWVPTPTERDFRQLLVHRHKLVCLRTTLGNQLHALAMSQGLCRKKKLFTRKGRVELAGLTLGLWASRRRAELLKLLDQLESQIAELDHAVLEEAERREDAVLLMTHPGVGSVTSLAFVLTIGSVTRFCCSRKLVSYLGLNPSEESSGGRRRTGAISKQGNTMLRWLLVEAAQKAAQCDPALRQDYQRLKFRRGHAVAKVAIARKLAVRMYWILRSGAGYAPLVRMQGSPRGTLVHASTP

SEQ ID NO: 50567 - protein, 339 aa, unidentified
MEQEYDHYIAADWSIKNMAIARMTSKHNKIHVIDVPSDVTELQVYLKSLRGSKIMTIEETTTSQWLYTELKDHVTRLLICDPVRNHLLSEGAKTDKIDASKLVQLLKANLLKEVFHSSDRFLNLRRVVSGYEDVIRAGVRLKNQRYSLLRACGLSGAEEKEVRLKSKEDQMVFDGIERQIESCEKERAVYGKEFGKFAKQYPEIRHQDSLPGIGLIGAVKIVSRVVSPQRFADAGRFLSYAGLIKLERTSGMVTYGRKNSRYCRELKSVYKTGAITAIGGNNPINDYYEYLIREKKYPDYQARHKAARRLAILSWGVFKSGEKYKPFRRNHVNEKSQET

SEQ ID NO: 50568 - protein, 422 aa, unidentified
MNAQEADVYSIYVGIDWADKKHDVCICPRDSDTREFDVIRHCAEAIDAWVKDLYQRYGGRIAIAVELSKGPIVSALQKYDFIDLFPVNPSTLAKYREAFQPSKAKDDPTDAELAVDLLLRHPEHFKVLKPQSTEMRTLATMVEQRRRLVNDQGRITNRLRSALKQYYPQVLEWFEHIDTPLFCAFVKRWPTLTQARRARANTLKQFFHEHHMYREDVVERRRRSIKAASPLTLDEAVIVPYRMQALVLVEQLELMFKAIDQFDDEIAKLASQHPDYALFQPLPGAGPSLTPRLMVAFGEQRERFSSAGDVQKLSGIAPVTERSGQKHWVHWRLQCPTFMRQTFVEWAAQTINKSYWAGAYYRQQRAKGSTYQAAVRSLAFKWIRILYRCWQTGVVYDESRYLKALERRGSSLVKRQEMLESA

SEQ ID NO: 50569 - protein, 319 aa, unidentified
MAQNDQIVVGIDVAKDKVDACIRSLSQRHTFPNTVQGHRKMIAWLHKHKVNKAVMEASGGYERNWARVLRMAGTEVRIVDPKRVRSFALSAGRLAKNDTIDAEMIAWFAETFSAAPGQPHDAAREELRALVKARRHLLDLQTRLKSQNEHAAPGPVQKAHVRVLKSLTTEIDKLEAAISAKVKATPDFAERADIIESVPGFAETTSAILIAGMPELGQVSDEIAAALIGLAPYDDDSGKRRGERHIKGGRRWVRNAIYMPCLGAATQNNPVLKAFYQRLIAKGKEPKVALVACMRKLIIILNTMIARRQKWDPRRCALN

SEQ ID NO: 50570 - protein, 347 aa, unidentified
MDVHKESISIAVRNSAGKVVMECVIETKASMILQFIDGLRGDLQVTFEEGTSAAWLYDLLKPHVTKLVVCDPRKNKSMREGNQSDKIDARRLAELLRLDHLTPVYHGEHGLRTLKELVRSYLTVTKDLARVMSRVKAIYRSWAIPCTGKQVYAPRHRAEWLGKINEPGVRQRAEFYYQQLDALRVLRREVRRGLLAESKKHQAWKQLCEIPAIGPIRAAVLLGILQTPHRFRTKRPLWNYGGLAIEMHSSADHRSVDGQLQRSRKNVLVRGLNRNCNHDLKNLFKGAAVMASSKPGPFQEFFAALLATGMRPEMARLTLARKIATIVLMVWKKGVRFDAQHLKPQTA

SEQ ID NO: 50571 - protein, 408 aa, unidentified
MIFVGVDWAEVHHDVCIVDEGGGVLARKRIPDALAGVQQLHAMIAEHLGEENDAESVIVGIETERGLLVTALVAAGYQVFAVNPLAASRYRERHHVSGAKSDPGDAKVLADLVRTDRHNHRAIAGDSVLSDAIKLLARNHQNTIWECQRQVNTLRSALKDYYPGALEAFGTELSGPDAVAILSIAATPTKGRALTKARIETALRKAGRRRLLDERATRIHEILRREQLAQPALLEDAYGVATEATIANIAQLNASIAKLEASLSTHFEQHPSAKVILSLPGMGTVLGARVLGEFGDDPNRYADAKSRKNYAGTSPVTKASGKSRVVLARHSRNKRLASALDQWAFSSLLPSPGARSYYNELKSRDKHHRKAIRQLANRWVGILHGCLENDTPYEEAIAWSHHRSDVAI

SEQ ID NO: 50572 - protein, 331 aa, unidentified
MWHIGIDLHRKTVVIAGVNDSGEAFDPVTISCREEQKIIKTFKKFTPFRAVVEASATYRWFYNLLSPLGTVLLAHPLKLRAMIQRRSKTDKIDAMLLAQLLRIDQVPLSYIPSERYQYIREVTRYRVRMGRDRSQLKVAVQSLLARNNRYAPYRDTCGVRGRKWLSGQDFGLSDNYVRDDLIERLHFIDMQIDALDERIEELKEEYPELSSILDIHGMGVYTGLLIVGELGDVERFRSARQVGAYAGLTARVNQSGGHCYHGHITKQGSSWLRWALVKVAMKVIRRDQKLANFHKRIRKRSSAKIARVAVARKLAGICWKRLRSWHRRNAG

SEQ ID NO: 50573 - protein, 319 aa, unidentified
MGDIMESIHNAVAGVDVHQSKLTITTLVGTDPRKLSKTTWECATFTEDLVEAAKKIKSLGVTEVAMESSGVYWRPVFNVWSQMGLVITLGNAYHIKNVPGRKTDAKDSEWLANLHRNGLIKPSYIPEEEFRVLRDLTRHRGNLNGNIIDVKNRVQRVLEDGNIKLKSVISDVFGVAGRKVLSAIIEGKDDPIELTKLVDTNVKAKKEVIKKSLTHTLNATNRFLLKQLYSQLLYLEHLLGELELELSQKMKPYNQYIQKLDEIPGIDKRTAEVIIAEATTHMKNFKDAKSFAAWSGVASGNHESAGKKKELNVEKEIQN

SEQ ID NO: 50574 - protein, 347 aa, unidentified
MKFYTNTHLYYCGIDLHARSLYVCIIDQAGEVCVHKEIGADPDKLLKLLTPYQGQVVVGVECMHCWYWVADFCEQHAIDFILGHALYMRAIHGGKAKNDRIDSYKIANLIRGGNFPRAYVYPKPMRATRDLLRRRMKIVRHGADLKAHVANTTSQYNLPPNKVNLKNKSAREQIRHAFPDPVVQRNMDLNMVILDCYAKELSKIEWFIETQAREHNPKHLHILKSMRGIGQILALTILYEIGDIHRFDTVQDFASYSRLVKCKAESAGKSYGTQGNKIGNAHLKWAFSELAVLFLRGNDDAQRYLQRLQKRMSKAKALTALAHKLGRCVYFMLKNETVFDEKKFLSG

SEQ ID NO: 50575 - protein, 294 aa, unidentified
MFFFWGRPSCKTLRLLVSTSASILSTFTVSDKSGKALLCTKFTRTKLIEFLAGCTPATVVMEACGGARFMARRIADLGHEPKLIYPQFVRPFVKSNKNDFVDAEAICEAASRPSMRFVQPRTEVQQAMRALHRVRESLVRDKVKTTNQMHAFLLEFGISMPIGVTVIKRLSTVLAENELPPYMAQLLMRLHAHYLYLVEQITELETALEQELSRDETGQRLQTIPGVGPITANVLSSQLGDGKQYSCSRDFAASTGLVPRQYSMGGKNTLLGISKRGDKNLRRRLLTNLDDSIL

SEQ ID NO: 50576 - protein, 337 aa, unidentified
MKRYLGVDLHRTQFTVCTRLENGRTYLRQWPLRELKLFAAQLRKEDEVAVESTGNTRLFHDAVVEHVAHVAVVNPSQFKVISQSVKKTDKNDAELLALYLAKGLLPEVRMKERKQREMSHLAQTRDLLVKQRSALKAKINNLLSAEGINLKRESLSSNKALERVLAMPLSPLMLAEARVLTGQIRSLSQSIAELEGLIEEEGPKLAGHRNLMSIKGIGPVSAAVLLSVIGDIRDFSDPGKLAAYLGLVPRVQNSNETEHSGHITKQGNKLARTALVQCALIAKRYSSFLQNFYQRIQRRRGGGKANIALARKFLGVIYHTLKNDWVFEDFPNFVLAS

SEQ ID NO: 50577 - protein, 317 aa, unidentified
MAEVTFPQLIQRACGIDVHLKVVVATIDGAGIQRETRSFKTFTSSLNELKEWLLSNGVTHVGMESTGVYWKPVYKVLENSIPNVWIVNARHIKNVPGHKTDKMDSEWICKLLLAGLLKPSYIPPKEQRQLRDLTRYRNKLIQQIASEKNRMMRILEDCNIKLSSVVSNTSGTTATSLIDMLCEGKVLTLDDINSVYHGKLSASPEELLEACTGFVEEHHIYLLQMIRKDIDQTQTLVDDLSERIKRLLSKYENVLELLREIPGFSTKVVGDLVSEIGLDMSHFPSEKHLSSWAGLSPGNNESAGKKKAHESLTETNR

SEQ ID NO: 50578 - protein, 371 aa, unidentified
MKSDSTIKFIGLDVHSKTISVAIADEGLKGEVRHYGTIENTFEAIDKVIKSLTATGIELRFIYEAGPCGFALYRYLSGNGFTCIVTSPAMIPRPKNVRIKNDRRDALTLARLYRAGELTGIYVPEPEDEAIRDLGRARDDARMAERKAKQRLNSFLIRNNLIYPGKTKWNRTYFNWLGSVGMKYPAQKVALQEYIEAVNECTGRVARLREQIGLAVEEWRMAPMVKALQALRGVSLICATITVAELGDLSRFQNPKELMAYLGLVPSEHSSGESIRRGSITKTGNGHARRVLVEGAWTYKHHARVTYPLIKRQRELPKSICQISWKAQLRLCARYRKMVARKKPNNVVVIAIARELAAFMWAIAQEVRAAA

SEQ ID NO: 50579 - protein, 320 aa, unidentified
MRNAVGLDISKLTFNASAMVGNAEYSAKFDNDSKGLDQFSDRLKSLGCQNLHICMEATGNYYEEVADYFAQYYSVYVVNPLKISKYAESRFKRTKTDKQDAKLIAQYCRSAQESELVKRQKPTDEQYRLSRMTAAYAQIKSECAAMKNRHHAAKDEEAAKAYAEIIKAMNEQLEVLKEKIKEQTEKPNCKEGVKRLETIPAIGRMTAAVLFHHLTSSKFETSNKFAAFAGLSPQQKESGTSVRGKGKLTKFGNRKLRAVLFMPAMVAYRIRAFPDFIKRLEEKKKPKKVIIAALMRKLAVIAYHVHKKGGDYDPSRYKSA

SEQ ID NO: 50580 - protein, 336 aa, unidentified
MNIKHFIGVDISKSTLDWAVCTAEGGIIYQSQSANSEEDIKATIKIIKALPNFEYLKSVCCMEHTGIYNAHLLSYLNKFHFPIWLENSLQIKRSGGVQRGKNDAIDAVRIAQYAFRFKDRIRVWQPPRQVIQQLAALSAVRHRLLIVRQQLQQPLNEQESFIESSLQKQLCKTCQASLKAINTDLEKIEKQVKEIRDKDDRLKELFEFITSVPGIGVVTASEVIVATNEFNNIAEPIKLACHAGVAPFEHQSGTSVRGKTSVTHHARKRLKSLFHLAAMSAVRVKGEIQDYYLRKVAEGKNKMLVLNAVRNKLIHRVCAVVHKKEKYDKNYVLTLV

SEQ ID NO: 50581 - protein, 356 aa, unidentified
MTAPYDYHIGVDYHKSYSHLVVQDSVGKTLRSGRVKNDRRSLGSFLERYRENSHAVVEATRNWTVMYDWLDDICDDVVLAHPLKVKAIADAKIKTDKIDATVLAHLLRADLVPEAWAPSDKARELRVALRERMFYVRLRTMTKNRIVTVFDRYPEQTAQLKKLGDLFGKAGRVQLAQVKVSEIDRIQIDRGLDFIGDIDGRIKQSEATIRAMTKVNGNVKLLKTIPGIGEFFARLIDAEIDDISRFRNPKKLAAYAGLVPSTYSSGGKTFHGKIIKQGNKWLRWAFVEAVTSAIASDAQLRAQYEHLKIRGVNKARVAIARKLLTIAFQILRDQRAYEPRGANSEEGMSSTISRLS

SEQ ID NO: 50582 - protein, 456 aa, unidentified
MSRKRKSSKKIGAPVLHCLNPNAAGVDVGATEIYIAVPPDRDEQPVRHFATFTEDLQAAAAWLKSCHIETVAMESTGVYWIPLFQILEEQGFTVFLVNARYVKNVPGRKSDVSDCQWLQYLHSVGLLRGSFRPEQAVCTVRSILRHRDSLVQMASSHVQHMQKALDQMNLQLHHVISDITGVTGLTIIEAVLRGERNPHTLAALRDGRIKASEGTIAKSLIGDYRREHLFTLRQSLEAFRHYQKLISGCDTEIEQYLEAFESKVDPPEGSTPTSREEQKPKGGESTFNLQSHLHRIFAVDLTKVPGIHVLTTQTLLAEIGPDLSRFANGPAFTSWLGLCPDNRVSGGKVLSVKTRKVKNRAATALRMAAQSLHHSQSYLGHFYRRMRAKLGAPKAITATAHKLARIIYHMVTTGQAYDETICAQNEKHNRWRLELKLRKQARELGFEVVAAKPVEL

SEQ ID NO: 50583 - protein, 333 aa, unidentified
MTSKGQEKMSHQIAHASDEITIGIDISKERLDAYLHPAGIARQFPNDRKGHAQRIAWATPHQPTRLVFEATGRYHRALEMTLGKAELPAVKINPLQARRFAEATGKRVKTDPIDAAMLARFGATMRPEVPPAKDETIDMLAELLAARRGLVKDRTAASNRGKSLTLALLKRQSEQHRKQIDSQIEAIDREWMSVLAGNQTLKARLDILLSIPGIGAATAIALLVDMPELGTMDAKQAASLAGLAPVTRQSGTWKGKSFIQGGRASIRRAIYMPALVAIQHNPQLKEKYEALCRAGKLKKVAIVAIMRKIVIIANALIRDNRKWTLDMASVGAK

SEQ ID NO: 50584 - protein, 323 aa, unidentified
METPQVSFKQVVSRGCGLDVHKKVVVATIDGEGLKKQSREFSTVTSSLKELRDWLLENGITHVAMESTGVFWKPVYNILEPAGITVWVVNAAHVKYVPGHKTDKKDSAWLCKLLLAGLLKPSFIPAKEQRELRDLTRYRAKLVQSNASNKNRIIRILEDANIKLSSVLSSTNGAVGTKLIDKICDGEEITMQDVDEVYHKKLAATKEEIFEACQGFITEHHVYMLQIIRQEIAGTQQTIESLTQRIKEVLSPYENALELLQKVPGISSKSVEDLVAEIGLDMGVFPTEKHLASWAGMSPGNNESAGKKKADGQPGETNKLKLC

SEQ ID NO: 50585 - protein, 325 aa, unidentified
MNVIGIDISKATFDAYLITEDQTYFGDFNNDKKGFRTFRNWLKKRNTSTGWACMEATGRYGDELAEYLFEANYKVSVVNPARTRRYFESKLIRTTTDRIAAQLIADFCLTQKPDLWQPTSPEVKTLQQLVRRVHALKQTRTQELNRKQGAAIDPLVAKSINKMIKALDKEILSLEKEIKDHVEQHPELKRQRELLVSIPGFADISAFELMSEIGDISRFESADQVIAYAGLSPKSHDSGTSVKRKPRLSKIGNSRLRSALFFPALSALQHNPIIIALKLRLEERNKTRMIIVGAAMRKMLRLAYGVLKTGKTFDPNFVINMQNTA

SEQ ID NO: 50586 - protein, 465 aa, unidentified
MKRHSRRPSPTPRTSPAALERLHPDAAGIDCGSAEHFVAVPPDRDPMPVRSFATFTGDLNRLADWLTACRVTHVAMEATGVYWIPVFEILEARGFAVILVNARHVKNLPGRKSDVSDCEWLRDLHILGLLRGSFRPAEGIVALRGYCRHRATLIESMGALVQRMQKALVQMNIQLPLVVSDITGVTGLRILRDIVAGQRDPQQLAQHRDYRCRASAAEIVAALTGHYRAEHLFVLQQNLELFDTYQQQLTACDAAVEGHLAQLAVLAPPATSPLPPARRRAKPRENEPRFDLRTPLHQLTGVDLSQIDGIGPYNALRLIAEIGIDMTRWPTEQHFTSWLTVAPHNRVSGGRLLSSRTPPSANRAAVILRLAAMNLSRTQTALGAFYRRLAFRVGKAKAITATARKLAILVYRTLKHGLRYADPGAAAYDAQQRTRLLRRLRQRAKTLGLGLIDLSTGEVVDGTVS

SEQ ID NO: 50587 - protein, 359 aa, unidentified
MKIIGCDLHARQQTLAMLDSPTGEVVNVTLKHEGDNVREFYSKLARPVRVGIEATGSMQWFVNLMEELGIECLVGHPAEIRAAEPRKQKHDRRDADLILTLLVENRFPAIWLPTKELLDLRALLRHRHQWVCLRVKIQNALQAIALANGLRRGSSLWTQAGQHAIASLPLSPHAAYRRNELQAMYEKFEREIENLSQRVQQQARERVGARLLMTHPGVGPITALATEVFLGDPARFADSKELASYVGMIPGEHSSGKRQRLGGLTKQGNPLLRFLWSEAAIHAVRRDPQLKQFYSRKLIQKGLGKARAAVARKLGIRMWIMLRDGIEYNEFCRRGQMQQRVVPVRGCQVRVMVRKSPAD

SEQ ID NO: 50588 - protein, 343 aa, unidentified
MESIYYIGLDVHKKSIAYCIKTVTGKIVCQGMVKAERRALHQWLVDLPGSWVGAMEATMFTGWVYDFLKPYAVELKVAHPAMLKAITAAKKKSDRADAEKLADLLRVNLLPECTMMSEELRELRRILRYRNMVVRTSSKMKNKISGLLMEVGATYDKRKLHGKKYFGQLLEQVEDVPESVKDLLKLSRSSMELFEAVQKKLLKILREDSLISRRVELLRSISGVGEVTALTWVLEVGDPERFSNSRQAISYCGLCSAQHESAGKEHRGPISKKRNKYLQTMLIEAANLAPYWNPQLAMLYEKELTRGNRNRATLAVARKLVIYMLAVDRRGEPFITEKESLVA

SEQ ID NO: 50589 - protein, 405 aa, unidentified
MNEHLLVGIDVGCHSHQVAIAKSNGTYLKEFGISHNASGFNSLFSEITYYESTLKCPVVIGMEGFNGYARPLDQLIQQKGYTLYNINNLKLARFKELFSGPAKTDAIDARKIVEFMRIAPSFQEQRRAITEIKPGNGVNQTLKRLTRRRRQLVNEKICIQNRMQADLQSVAPGLVDLVKNVDSRWYLHFLTCRPSLRQLATMRKESLLKIKGVGKKYAAVIASWQKEAHFSTDVDLVSSMIIEDAKRILELMEAIATIEQELEPLGEQSDLAVTIGSIPGFGLISSAELAGEIDNLSRFPSEKSLALYLGMAPLDNSSGKKEGCKIAKSVNTRAKAAMMVAVAHHSWQVEESKRYYEKKRAEGKKHNQAIRSLGRHLVRVIWSLIKEKRFYEIREENERNILKMA

SEQ ID NO: 50590 - protein, 372 aa, unidentified
MNHSTVYVGMDVHKESFSLCAYTIEAEKASHYQRTEADYKKVLNYLEFLRTIYGDDANFICGYEAGCFGYTLYHQLTANNVKCIILAPTTMLEQRSKKRIKTDRRDAEIIAKCLAQHNYSPVHIPTAKDEETKEFLRMRDDHKLALKKVKQQILAFCLRHNYRYDGKSHWTAAHLKWLKALTPEALYKEILDEYLLTYQTLSDKIERLDKRIEELATQDEYKEAVKKLCCFIGVKTHTALSVLVEVGDFKRFASAQHFASYLGLVPGEDSSGDDQNRLGITKAGNRHVRLLLTEASQCYARGQVGFKSKELKSRQSGNTPAVIAYADKANERLRRRYYKMVLNKYKKHNVAKTAIARELACFMWGMMTDNIV

SEQ ID NO: 50591 - protein, 343 aa, unidentified
MNKLNAIGVDLAKNVIQVSVLSPSNRELRNSSLTRRKFAEFLGRQRPSLVAFEACATAHYWARTAQRHGHQVKIIPAKVVAPFRQGHKTDENDALAVAEAASRPNVKLAPLKTVEQQGMQAIQRSRELLVHERVALSNHIRGLLMEFGIVIPQGFASLYRHVTEVLEDGENELPDLYRPTLSLSYGRLCDLREDLERLNCEIETLVQQNPVCRRLMALEGVGPISAVLLYATLGTGEAFVSGRQFAAYLGLTPKQFSSGGKVKLVGISKRVANRRLRAVLIQGARAYVYHMKEPKTTKDQWLWAIVERSGKCKAAVALANKNVRTAWAMLMQNTEYQRYPLAA

SEQ ID NO: 50592 - protein, 372 aa, unidentified
MNHNTIYVGMDVHKENFSLCAYTLEAEKASYHQRTEADYKEILKYLEFLRSIYGNDANFICGYEAGCLGYTLYHQLSANNVNCVILAPTTMLEQRSKRRIKTDKRDAEIIAKCLAQHNYSSVHIPTAKDEETKEFLRMRDDHKLALKKIKQQILAFCLRHSYRYDGKSHWTAAHLKWLRSLTPEALYKEILDEYLLTYQNLSDKLERMDKRIEELASLEEYREAVKKLCCFIGVRTHTALSVLVEVGDFKRFASAKNFASYLGLVPGENSSGENQTRLGITKAGNRHIRLLLTEASQCYARGKIGFKSKELKSRQSGNTPEIIAYADKANERLRRRYYKMVLGSCKKHNVAKTAIARELACFMWGMMTDCIA

SEQ ID NO: 50593 - protein, 352 aa, unidentified
MKILALDLGKSKTVACIFDSESGEHRFTTIRTQRPDVLKLLSESAWDRVVMEIGPSAGWIDDLAVGLGLTVEVANVNHEAWRWRNVKCKTDRLDALKLARLCSMNQVPGVYMPSPVVRQRRSLIEYRAKLVSRQTAIKNSIRAILMQQGLSLAAGKSGWTDKSLKSLVELARPMEQVTAEDLWRGQLSVELEALAAAVKLIRQVSEKLNQLAESNVPIAAVQSIPGIGPRTAEAIVAVIDDPHRFKNKKQVGSYVGLTPRKYQSGNSDRQGRISGQGNRLLRSLLVQSAWMALRRSPWARRVFQQVTRGAPGRRKVAIIAVARRLLIAAWAMLRDGTAWQEPTSSPAAPAQA

SEQ ID NO: 50594 - protein, 357 aa, unidentified
MGKSIRNLSTVTRVGLDLAKRVFQVHAVEAKGEIVVARKLARSQLIPFFAELPPCVVGMEACSSAHHWGRALIELGHEVRLIPPAHVKPYVRRNKSDQVDAAAIYEAMSRPGQRFVPVRSIDNQAELMRHRARELLAGQRTAALNALRGHLAEIGLIAPQGAHHAYGLKRMAADGFNENGEIVVPDCVRGALRSLVGQIDALDEAIGAIDRELAASVKADETAKRLMTIPGVGPVTASAIMATIQDASAFASGREFAAFLGLTPRQNSTGGKTRLGRITKMGDRYLRKLLVVGACATLRHRRGHSDALRLWASGMLERKTIKYKFNLTAVALANKVARIVFVLMTRGGQYDDRPVAA

SEQ ID NO: 50595 - protein, 351 aa, unidentified
MSIVGGLDIHRKQLTFDYVEVETGRLERGRIAPADREHLAGWLTRFDGRTPVAFALEAGTGWRYVVEEMRGAGVAPHLAEPAETSTLRGPKRRAKTDKADAKLLRELLAAGRVPECYIPPSQVLEWRALLELCHDLRVEHTGWAKRVHATCFHQGTTALGEAGVVRGSRQRLESIVAEQLSPVGRLQVNTALSMMDTLAEYLDPLRRRLVATARHVRGARVLIEAIYGVGPQTALALCSWLGGADRFSSFRKAVRLVGLDITVHSSDTKPSPAGSRGRARRCCGGCCSRRPRPRPAAALPVTATTPTSGTATTPTGPRYPKPGVSSARPSTCSRQIASPPGAPAPRTAQRD

SEQ ID NO: 50596 - protein, 419 aa, unidentified
MGTLNTTSFTAFIGIDWADAKHDICIQSADADEREFDVIPHKVELIDEWACTMRQRFGSPIAVAVELSKGPIVYALQKHDCFVIFPVNPSTLARYREAFQPSRAKDDPTDVELAVDLIIRHHERFKPLQPQSVEIRMLVSLVEQRRNLVADKIRITNRLRVALKQYYPQMLEWFDHIDTHLFCDFLTRWPTLLQVKRARQSTLRKFFHEHSMRFEHVLEQRLIAIKAATPLTLDEAVVVPHRLQALVYVEQLRVLLDAIKRFDIQIESVAKQHDDYALFTALPGAGPSLAPRLLVALGEQRERYKSAAEVQKYSGVAPVTERSGKKHWVHWRWQCPTFMRQTFVEWAAQTINKSYWAGEYYRQQREKGSTYQAAVRALAFKWIRILYRCWQTRTPYDEVTYLKALERRGSPLLAARKLT

SEQ ID NO: 50597 - protein, 429 aa, unidentified
MNYNTQNAKIASITEKTLIVGIDVGSETHYARAFDWRNYEYSKKPFAFNNDEAGFAAFKAWMEDIADKHGKEAVIPGMEPTGHYWLNLGAYLQEQGMKPVHVNPHHVKKSKELDDNNPNKNDRKDPKTIAALVNEGRFSYPYIPTGIYAEIRNLSNLRIQTQEELTRIKNRIARWFSIYFPEMKDVYKKPDAVSGMMVIKKAPLPCDIKKLGVDGVNQVWRDVKLKGAGIKRARTLVSAAEHSIGSTEAPGSARIEIRNLLNDYEVYKNRMDDLMQEIEAKLSEIPYIDKLMEINGIGLKTVSCFIAEVGDIRRFDNPKQLQKLAGYAIVADSSGKHNGESRISHRGRKRLRYALYEAAISVIGKNKEFKEIHDYYRTRKQNPLKKMQSVIAIACKLIRIFYTILTKGVDYDGQKMLSDIVRPETIMAA

SEQ ID NO: 50598 - protein, 400 aa, unidentified
MRAVFGIDVSKTSSEVAILVNGEKVHGYTILNDAIGFNRLLGDLKTVHNPEIIFEATGVYSRRLQAFLEEYSYPYTRLNPLEAKKQLDSLRVRKTDKIDAEKLAKSQLVHNRKPTYVQEEVYQHLRDLSRFYQNMTEDLVRTKNRLHKVLQVTFPELETLLSTPTGEQYWNLVMAFPCKEFVLSLSQSNLCEIVRQSTSKRISEKRIAYLTDKLIKLAKQSFCAVKKTSPMLEEVRYYAQELLRLSERRQVVLNDMVALAQPLPEYDILRSIPGIAETTATSIIGELGDIRRFQSSNQINAFIGIDLRHYESGNFLAKEHITKRGNPYARKILFKCIHNIASASHTNPCHIADFYEKRKRQSTIASTKPHTIASIHRLIRTMYYLITHNKLYDYSLTQNR

SEQ ID NO: 50599 - protein, 350 aa, unidentified
MTISHYIGFDVHKKSISYCVKTKDGTIVEEGKLRATHDVLRQWAGKRREAWHGAMEATLFSAWIYDTLKPFAAELQIGHPALMKAIGASKKKNDKLDARKIADLVRADLLPACYVAPVEMRELRRLLRYRNLVVGQAVRLKNKMSGLLMEVGAEYSKQQLRGKKYFSELLDTVAEVPESVKDLLRVSRGAMEMFETTQQQLLIRLRQDPLLAKRVALLRSIAGVGEVTALTWILEVSEPRRFSSVARAVSYCGLTSALVSSADKQQRGPLSKQRNAHLQTVLIEAAKLAPRWNPQLAALHEPELGRGKRNRATLAVARKLVAYLLAVDKSGQPFQVRVTPVSASEAAGEA

SEQ ID NO: 50600 - protein, 341 aa, unidentified
MKQYVGLDVSQKETAVCVVDEYGRVIFEGRARSDPGALAAILAKKAPLAERVGFETGAMSSWLWHELKRIGLPVVCIGARHAHAVLSGRMNKSDENDARGLAELVRIGWYREVAVKSEASQLVRALLVARSRLVAIRRDLENQVRSMLKEYGLIIPRAIAGQFRRRVIELTGDEHILWAVLLPLLLVHDHVCSELEGLDRQIREMARTDETTRRLMTIPCIGVVTALTFRHTIDDPSRFRSAASVGAYLGLTPRRRQSGEMDTTGHVSRWGDRLLRAYLFEAASVLLHRTKRWCALKAWGLRLDKRNGMKKAQVAVARKLTVILHCIWVDGTSFEWGKEPT

SEQ ID NO: 50601 - protein, 422 aa, unidentified
MNALNTNTFSAYIGIDWADSKHDVCLQVANEHQRTFDVIEHQVEKIDEWVKSLRQQFNSPIAVAVELSTGPIIYALQKYDCFVIFPINPLTLAKYRQAFQPSRAKNDPSDAEIALDMLIRYPERFKPLSPQSIEMRMLASLVEKRRHMVDDKTRLTNRLRSTLKQYFPQTLEWFDHIDTHLFCDFITRWPTLLQVKRARKNTLTTFFHEHNMHFKHVLEKRLVAIKAASPLTLDEAVIVPHRLQALIFVEQLRLMLDGIETFDLEIERVAKQHDDYALFNALPGAGPSLTPRLMVAFDEQRERYKSAADLQQYSGIAPVTEHSGKKHWVHWRWQCPTFLRQTFVEWAAQTINKSIWAETFYRQQRAKGCTYQAAVRALAFKWIRIVYRCWKTKTPYDELVYLKALKERGSKLFDTSLLAGST

SEQ ID NO: 50602 - protein, 361 aa, unidentified
MSGTMTWVGFDVHARSTHGAAIDTMTGELSRVRFGPGIDGPLAWLAELPGPVRACYEAGPTGFGLYRAATAAGVAMQVIAPGKTPRGSSDRVKTDRKDAELLARLLLAGSLTRVVVPAPEVEAAREMTRAHDACRRELMNARHRVSKMLLRHGRVYPKSTTWTAEHRRWLAAQQFDEPASSMVFADLVAAVDGLTSRKTAIALRLSELATDERWWATVARLRAFRGVDTLTAFSIHLELGADWKRFETAPALSAWLGLTPSLHQSGESSRQGAITKTGSMLARRLLVESAWHYSRQPRLGATLANRQAGQPDHILAISNRAQQRLHRVHRRMRARGKPHNLTIVACARELACFLWAAATAD

SEQ ID NO: 50603 - protein, 342 aa, unidentified
MEITTLGIDLSKTIFHVIGLNARGEIVLRKKFSRKQLLVFTANRQQMLIGAEACGGAHYLARALREQGHDVRLMPAQYVKPYVKTNKNDYLDAEAIAEAVQRPTMRFVPIKTDEQLDLQALHRVRDRWVARRTAVMNQMRGFLLERGITMRKGPSHLAAQLQIIFGEGNCSFSGRTQCLLLELKHEWDELERRIEEANAELQRIAKQDDACSRLMEIPGIGPLVSTALVASVGNAITFRKGRDLAAWLGLVPRQHSTGGRPKLLGISKRGNEYLRRMLLHGARSVMMQVERNPSALGVWITNLSKRKHHNVTAVALANKMARIAWAMLTRGSHYSASQLAVA

SEQ ID NO: 50604 - protein, 361 aa, unidentified
MNTSSLKTIGVDLHKSSLTATVLDPSGAVLERREIPTKCRHQIANYFAAHGPEVQVAVESVGFYHWFWDTVKPRVRKLHLADPAGVRACAGRRTKTDRNDSLLLAELLREDRLPMAYVPEEPIRALRELCRHRHRLARQLALARRHLRWIGLKNNLPGPDTFTSDRAQKWLLSQDAKLNPAHRLSGRQFVDQITSLERQLADVETVLKDTIATHADLAPTLALMQSVPGIGFITALTLLCECGDITRFDSIDQLSSYAGLCPRVTQSGESAHHGHISKQGPPQLRWVLQQAAWVAIRCDPQARKIYARIAKRAGSKKAATALARKLLSYSWSVCRRGQPFVWPNTETKAGTGPVPVWSYDI

SEQ ID NO: 50605 - protein, 470 aa, unidentified
MTRGDRRRNARRERLRELLPRDGAVIGIDLGDEKQAIAVIDHDVRVLARKTARVKAFRLGEALDWAVAQARAKRFTVVAVACEPTGPRWLQVQRLCVERGLPLVCIQPLVSHIARQQQDYTRHKTDEADCVMIARLAIELHCYVPEELDEAWAQLRHLGRRRAQLITAATASVQRVRDFLSVAWPVAPEACKHPFESLTWLAAMQVVTSRCGGQPEKLAAIGLVEFTALVREAVAGWGGQRPASPVCRAVFAALASTEGVVVSHRRGLLRRCADELGDLQRTRAQLRAVEADMEAVLGELGLSRLAGIPGLTAVGAAAILAETGDPRRYDSSSSLVKHAGLSPSDNASGAFEGQAHISRRGRPGLRLTVWRAIWPLLIHNPVMAAKYAAMIAAADTAAAEAAQAPSGTGSRQASAAAAARARRAKARVACAASLLRWIYSMVVHGTGWDPDVASGAASAQHAPRNQAEAA

SEQ ID NO: 50606 - protein, 412 aa, unidentified
MRVLYPTCAGMDVHKKDIKVCLVTRDNQEQRQEDVRSFRTMTRDILAMRAWLQAHGCTVIAMESTGVYWKPIFNLLEGDFTVLLVNPAHIKQVPGRKTDVKDCRWIAELLEHGLLRGSFIPPIEIRDLRDLTRYRRQLVNTHSAEVNRLQKVLEDANIKLASVATDVMGVSGRAILRALLAGVVSPEALAELAKGRLRKKKPDLQAALQGRFRPHHTQLLTHILAHIEFLEESIAECEAQIEGLCRPFAEVITLLDTIPGVSQRTAQDLIAEIGVEMAWFPSAKHLCSWAKVSPGNNESAGKRKSGRTGKGNKWLRALLVECAHAAGHTKETYLGTKFRRFASRKGKKRAAIMVAHRILEAAYFILRDKVPYRELGDQYLDAHHREHIIRHHVRRLESLGLHIDIRELPLTA

SEQ ID NO: 50607 - protein, 420 aa, unidentified
MKSASITPHNTLPEFPPNDLTAGIDWAVDDHAVAIADGRGREIHRCAIEHTAAGLRQLINVLGKHGVAEVAIERPDGPVVEALLAADLTVVVISPNQVKNLRGRYGSAGNKDDRFDAYVLADTLRTDRARLRPLVPDRDDTVALRSACRARKDLVKHRVAAANQLRAHLRLVLPAVVGLFKELDSAISLAFLARFDTQDKIDWLSPKRLGDWLAKQGYSGKVDPAVLHQRIIDATRGATGVHGTAQAHITASYVTLLRALVEQIKTLEKRIDHQLDAHADAHIFTSLPRSGRVRAARLLGEIGDCRARFPTPESLTCLAGAAPSTRQSGKLRAVGFRWSCDKQLRDAVTDFAADSRHANPWAADLYDRARNRGHDHAHAVRILARAWLHVIWHCWQDRLAYNPETHRALKRVLAQQNEAA

SEQ ID NO: 50608 - protein, 436 aa, unidentified
MSDANDRGGGGGGGGIIGFDQLTHFGGFDWASAEHLFVVVDPQGKIVLSWRFPDDAEGWAQFHRRVADFPRLGVAIETSCGPAVERLLDAGLAVYPLNPKAATRYRDRKAPAGAKDDALDAWSFADALRTDGHGWRPLLPQDPLTTELRLLCRDEVKLIAQRTALVNQLRAALCEYYAAALDAFDDWVCESSWRFVIAFPDPQALVAAGRRKWERFLHAHKLYRPETAQRRLAGFADATKFASPNPAVTRAKTLLAVALAKQLCLLQSQLDAYRARIVELFHDHPDHDCFGSLPGAGPKIAPRLLSELGGNREVFATAEALQNYAGTSPVTRQSGRSRIVTVRRACNKTLRATVHLWADLSRRSCAWAEAYYRKKREDGMAHAAAIRCLGQRWVKILWRMWRDHAPYSEALHMKNQTEHGSWVIRLLPGTPAATGG

SEQ ID NO: 50609 - protein, 413 aa, unidentified
MKLWKEFTHFAALDWAKDHHDVVVVDRQGVIVADFRIAHSCAGWKSLNEKLRGFKAMAIAIETSEGPAVEQLLGSGFAVYPINPKSARRYRERKIPSGSKTDRIDAWSLADALRVDGHGWKQLHPLDPLLAERRQLCRDEMALIEERTALINQLQHALGYYYPTALEAFDDWALSSAWAFVEAFPTPDALLSAGRRKWEKWLHANKLFHSKSNQKRLELFARATEFTASSATTLAKSLLAVSRAKMLRLIERQLAVYRERIEALFARHPDHELFASLPGAGPKLAPRLLSEIGEDRERFEDAQSVQCYAGTAPVSFQSGQISRVTVRRSCNLHLRQAVHLWVDLSRKYCVWAQTYYRTHRAKGQSHACALRCLGQRWLKILWKMWLTKTPYDANLHQQNQVKHGSWVLQLKAA

SEQ ID NO: 50610 - protein, 382 aa, unidentified
MQTIDPVNPTILLAIELSTSTWLVAARVPGLDKPRLSRIDGGDTAALLALISSLQARAACGLGATMGIVCCFEAGRDGFWLHRLLTAHGVVSYVLEPTSILVNRRARRAKTDRLDAEGMLRVLAAYLRGDHQACSMVRVPTPDQEDAKRTHREREHLVQERLRIENRIEALLVTQGIRKRPSLRSWERDLTVLRTGDGRKIPHHLRAELDRLRRRLVLTLELIREVEAERDQVTKTKSQDQAHHKITALCRIRGIGENFAAVLTREVFYRSFDNRRQIASYVGITPMPYQSGGMDRDRRISRAGNPRARTTMIQLAWLWLRYQPDSELAEWFRERVGTLAGRTRRIAIVAMARKLLIALWRYVETGVIPTGAEIRAETTVAA

SEQ ID NO: 50611 - protein, 323 aa, unidentified
MNKYKETFGVDISKDVFDVHGSNKGHSQYKNDETGFKKYLKELPQGSLVVMEATGYYHYRLAQFLYKNGVIVSVVNPLSIKRFIQMKLAKVKTDKSDAKAICEYAMINEVPIYNALTDVQSECLQLFRLLDTYLKQRTATKNKIHGEAVLGVPSKFVHRSLIRNKKQLNKEVTAIESKILSLVKEDQQEQLTLLRSIPGIGQKTALFLIVVTDGFSKFETASQLCSYVGITPTIRESGSSVRGRARISKVGNRKLRNLLFLCSFNACIHNKACKEVYERIVNKGKSKKLALIAVSNKLLKQSFAIAKSGRPYDETHVSILRVK

SEQ ID NO: 50612 - protein, 361 aa, unidentified
MKRILKIGMDVHTANYTLCAMELIIGEDDRVFATIKVTPDYKNILLFIENLKTKLGLNDEYDIQCGYEAGCLGYSLYNQLTAAGVKCVILAPTTMLTPQGVRIKTDMRDAYMIAQCLSYGGYHAVYIPTEDDDSVKEYLRMRNDHKLALKKIKQQINAFCIRHGFCYDGTKWTQAHLKWLKKLEITNQLYRETLDEYMASYEEQEAKIERYDKRIEEIAEQTRYHDKVKKLECFLGIKTHTALSLIVETGDFERFAKGNQYASYLGLAPGENSSSDSIHRLGITKAGNSHLRQLLIEASGGICKGAVGHKSKDLRARQNGNTAEVIAYADKSHFITGRRVHHEITQITKKLKMVDFFWKIA

SEQ ID NO: 50613 - protein, 322 aa, unidentified
MRYIGIDVSKATFVVAYSSDKGGEIRTFNNTTTGIKQFIGALPKDGSIHCVMEATGNYSALLLYMLNVAGITVSMENPLKVKNFAKAMLSTIKTDKSDARLITLYGEKMNPRPFKVQGEAILRLRQKRTVIRQLTKQITAMSNLRGSLACLPVPDKGATHTVDETIKFLEKKRDRLQSELTDLVEVEFSRQLALLTTIKGIGITLATALIITTGGFTYFQNAKQVSRYLGICPTYEQSGTSVNIRGHINRNGDAYTRGLLYVAAWTASRFNTKCGETYTRLRQNGKPGKLAMIAVANKLVRQAFAVVTHDKEYVDGFVSNRP

SEQ ID NO: 50614 - protein, 355 aa, unidentified
MKYYTSTTQYNCGIDLHARQMYVCVMDRQGKKLVHTNVKNNDFGFFLKLVEPYKHDLTVCCECMFGWYWLADACQAAGLTFVLAHALYVKAIHGGKNKNDRIDSEKLTHLLRSNLIPPSYVYPSEKRPLRALLRQRLFYVWRRAELLARIYSHQLAHNRTPAKQTRRVRDSWEEQLLAAEDNPLRQLALKNDLAMIKHFDHQISQLEEELQRQTKKVASREYALLQTVPGIGESLGLTILHEVGDINRFPTVKDFLSYCRLVKGTVASAGKIKGLRGAKLGNPYLRWAFGEAAVIAKRDHFLIRPLAQRLEQQMGGNKFKANTVVAIKMARAVYFMLKNKTVFDPERLVAALAKK

SEQ ID NO: 50615 - protein, 371 aa, unidentified
MMGWMAPLRHLSAKLLSDRISSEWEPSMSEVATIGLDLAKHVFQVHGVDAEGATVLRKQLRRAQVLTFFSRLPRCLVGLEACATAHYWGRELRALGHEVRLMPAQYVKAYVKRNKNDAADAAAICEAVMRPTMRFVPVKTADQQAAVLLHRGRERLVRQRTGLVNALRGHLAEFGVIAPQGLRNVGKLIAIVRDEGDGRLPDLARQVLAVLAAQIEQLEAAVAALEKQLIAWHKSNPVSQRLASVPGIGPIIATAIAATVTEPSGFRSGREFAAWLGLVPRQNSTGGKTVLGPITKKGDRYLRSLLVLGATSLLRRRDTLSPRQRAWLEGLLAKKSARHASVALANKIARVVWAVLAKDTTYRSDDAGAPA

SEQ ID NO: 50616 - protein, 406 aa, unidentified
MAAVMIGVDPHKGSHTAVAIGSAEEPLGELRVRASAAQAGQLVAWAADWPERTWAVEGAGGLGHLLAQQLVAAGERVLDVQPKLGARVRLLTAGDTNKNDPNDARSVAVAALRSAARREVSADDHAAVLKVWSKRHRDLGRTRTQIACRLHAVLCELTPGGFSKEITAGQATRVLAAIQPADAVGAARCELAAEFLGDLRRIDAQMRDTRKRLNAAVKASGTTVTEIFGVGPVIAAIVIGCVVDASRFASRDHFASYNGTAPIEVSSGNRKIHRLSRRGNRRLNHAIHMAAVTQIRHRHSDGRAYYDRKLAEGKTSKEALRSLKRRVSDAIFGRLQADARQPAAASPEGPGGQPGNDSAASAAGLHPEHRLFGQATPGPGSTLRPATARKCTVTPERTPKNTQKTP

SEQ ID NO: 50617 - protein, 346 aa, unidentified
MKINRVGVDLAKNVFQLHGADHRGKAVWKRRLSRGKWLAVLCDTVEPGTEIGMEACAGAHYWARQLLERGYEVKIIPPQFVKPFIKSNKNDANDAQAICEAMGRPNMHPVKVKTVVQQDLQAMHRIREEIKSHRIAKANQIRGLVTEYGLVAPQQLPALRRAIPEWLEDADNGLTFLFRQLLQGLWGDLYALDQRMAELDKQIAEIAQEDPTARRLQQLRGVGPLIATALVATVGDARQYRKGRDMAAALGLTPRQHSSGGKDRLLGISKRGDAYLRCLLVHGARSAVRTAKDKEDRLSRWVTNLQSRRHANVVAIAMANKMARMAWAMMTKGVDYDPNFNPVSAS

SEQ ID NO: 50618 - protein, 339 aa, unidentified
MKLYAAIDLHSNNSVLVVLDGEDKIVYEKRLPNELPVILAELEPYRERIHAIAVESTFNWYWLVDGLMDAGYEVKLVNTAAVKVYEGLKYSADEHDARHLAHLSRLGLLPVGHIYPKEDRAVRDLLRKRSQLVRYRTMQILSIQNLIGRNSGRRINTDGVRKLTDEAIADYCGGDEVLELAIKSNLKTLRCLDGQTTELEEAVLKRAKLKPQFKQLLTVDGIWHILGMTIMYEAGDMSRFKKVGHFASYARCVGSSRWSNHKKKGEGNRKNGNKYLAWAFIEAAHYAVRYNDRIRRFYQRKRDKTNKIVAAKAVAHKLARACYHVLKEQTPFEEARAFS

SEQ ID NO: 50619 - protein, 334 aa, unidentified
MGLIPTPTPTVAALDQVGRRLGCAVFPAHRAGYRALADWLAGHGEISAVGVEGTGSYGAGLTRWLSAHQITVVEVNRPNRAERRRRGKSDPVDAEHAAAAVLANTATAVPKARTGLVESIRLIHATRAGAVKARTAARNTFTNTLRTSPDAVREQLQPLTRARQLTAATGYRATGDDPDSTVKRCLRRLAVRISQLSEEINAADHELDRLTRELAPTMRSRPGFGPETTAQLLITAGDNPDRIGSEAALAGLCGVSPVSASSGRTRYHRLNRGGDRQANRALHMIILNRLRHHPPTGAYLASHSLQGQATPHLRRVLKRYLVREVYQLLSQLQR

SEQ ID NO: 50620 - protein, 484 aa, unidentified
MAKRKMSTFERLSTGQMNRAQRRELGRRVAASDPGLTIVHPNAGGIDVGNESHFVAVPADRDANPVREFGCWTAALNEMAEWLKSCRIDTVAMQATGVYWIALYDVLEQHGIRVVLVNARHTKNVPGRKTDVQECQWLMKLHTYGLMRDSFRLQQDMEYLRTIWRVRDRHVKEAGQEVQHMQKALTKMNIQLANVISDISGVSGQAIVTAVLKGERDPYKLADLADYRVKASREEVARSLEGNWRADVLFELKQAVDSYHFARRQMEECDEKLSLYLVSLPTRMLAIPAESNDAPQTAAQKRKKAKKPRGNEPRTDMKEELKRICGVDLTSIDGINVMTAFTVISEIGTDMSRFQDEDHLTSWMGLAPSNDISSGKIVGRGKKKVKNRVAVVLRTAATTLLESDTHLGARYRHLRRQLPTFKAAVKAMARYLAVLIYHLLTKGEQWVDRGAAQFERRRTERELANLSSRARANGFKLIPIAEAS

SEQ ID NO: 50621 - protein, 368 aa, unidentified
MGMATMVEQAEAGVTVGVDTHADVHVAAAIDQHGRLLGTTSVPSTAAGHAQLTAWAHGFGVVDQVGVEGTGSYGIGLTRHLLDQGVSVVEVVRPNRQTRRRRGKTDAIDAETAARSVLAGTALGTPKAADGAVEMIRTLRLVRRSAMKARTQAANQLRAVLVTAPQALRDRLRALSLPQLVDAAARCRPGPITGIEAASKLALKSLATRYQQLTTEITTLDGEIERLAHQAAPQLMAIKGVGADTAGALLAAAGDNPERLRSESAFAHLCGVAPIPASSGKTNRHRLNRAGNRDANRALYVLALGRLGYDERTRAYVARRTTEGKTKREIIRCLKRYLAREVFTALLSSPSIAAMTTATPVVGPGLDA

SEQ ID NO: 50622 - protein, 392 aa, unidentified
MNATVRYVGLDVHANSIVMAVADAGQAPAQVLKSIPYEEPRLLTELKRLGSLSSLRVCYEAGPTGFGLQRFLQSHGVDCVVVAPSMVPVQCGSRVKTDRRDACKLAHFLRSGDLTPIWIPDEQTEALRDLERAREDARLAERRARQQLLKFLLRHGRRFTQGKHNWTQTHWRWIRQQQFPLEALNRVLADYIQAAQQASDRVRRLTADIAELVAGWALAPLVKNLQAFHGVQLVTAVGLCAEIGNFERFQTAGQLMAFVGLVPSEYSSGGTRKQGGITKTGNRHVRRLLVEAAWHYYDVRPGVGAALAQRREDVPPEVVAIAEKARLRLRRKSARLRAAKKAPNKVATALARELAGFLWAAARASTPPAARGTMEASGSPRRGRGGRRLRDI

SEQ ID NO: 50623 - protein, 356 aa, unidentified
MLKYSVGLDVSAKEIYACISTIDAAQKVTVKSSCKIDNTASGFKQLDQWIKRHYKQRELPLNTIMEATGVYYENCALYLFKGGYAVSVLLPNKSKKWLQSEGLKSKNDKIDARGLSKMGAEKALDLWQPAAEYYYQLRTMTRQHQCLQEHKTSINNQLHAETHGMYQNKQVIKQHKQLIALIDKQLAELAIAIGQHIAKDRAVAKKVEGICKIKGVGILTIAVILAETNGFYLFKNAPQLVSYAGYDVIENQSGTRKGKTKISKKGNSRIRRALHMPAFSVVKYKEKPFVGLFERTFEKHFIKMKSYVAVQKKLLVLIFALWKNNAEYDINHKNKYTKEQEQELPLGSASIEADIV

SEQ ID NO: 50624 - protein, 395 aa, unidentified
MDVMHPICCGIDVHQKSIVCCILDGPLTSNEPKKYQTTFGTTTKELKAALDWILEHQVTHVFFESTGQYWIPLFNIFSDSDLELVLANPQHIKNVPGRKTDVKDAEWIAQLGRCGLINQSYIPSQEVLQLRYLTRYRLSVKQRLTQIKNHIHVILQRANIKITSYLSDIFSKTGQALLTLFIDGEVINEDNVESCIHGRIKASTRQLIEAMEGKLSTVDRFLIKECMEEYKLQKKISDELNKEINEYILEHFPEEYQLLLTIPGISDNCCATILAEIGPNVDAFKTDKKLASWAGMCPGSNESAGVKKSSHTTQGNKYLKQALVMSVLSVQRAKEETFSLFYQRISSRGSKMKAIIACGHKMLRIIYKILQSHQPYNSQKALGLRQQTNALSLTI

SEQ ID NO: 50625 - protein, 387 aa, unidentified
MRPISQITTQKLSYCRQDDATLYASLELSQATWLVTSLSPGSERMSKYSTLGGDSAALLGLLRRLQARAERLAGGPVDIVVIQEAGLDGFWVHRLLSANGIQSHVVDPASIAVPRRRRRAKTDAIDGETLLRTLLAWQRGEPRVCAMVVPPTPEQEDRRRTSRERAILLQERVRHVNRIKGLLASQGITDYEPLHKDRRARLVALKTGDGQPLPLRLKAELLREIELIELLIRQIAEVEVERDAVELDAEGNQSPVAQLARLKAIGPQIAAVLYFEGLYRSFANRREVAAYAGLVPTPWRSGTIDREQGISKAGNRRLRHIMIELAWLWVRHQPDSALSRWFRARVGTERGRIRRIAIVALARKLLIALWRYVTHGEVPEGAVLKAA

SEQ ID NO: 50626 - protein, 385 aa, unidentified
MFVGYRVGSGPARSIRQWWEAPVFTERTSIGLDVHARSVVAAAIDGVTGQVSQTRLTPSYEHIQEWIKQLPGPVAVADEAGPTGFGLYRALTGAGIRCEVLAPSKLQKPAGDRVKTDARDALHLARLLRLDEVTSVSIPSVNREACRDLVRAREDCRGDLMRARHRLSKLLLRHGIVYHGGAAWTDAHDRWLRARAVPQLLMPATRMAFDSDYEHVLMLQARRQCLDSAIEDIAADSEFTAVVRRLSCLRGVGTLTAFALAVEIGDWDRFTGNTIGSFVGLVPSESSSGSTRAQGPITKTGNTHVRRLLVEAAWHHRPKYQVRAVMRSRWELAPAAARARGHEGNRRLHNRWLGFLARRKRSTVANVAIARELAGWCWSLAVMDD

SEQ ID NO: 50627 - protein, 346 aa, unidentified
MREELKQVCGIDMASKKFDVCFKQRDIEGNVAIKGTRTFKNTPGGFMEYLSWIDKRKKEDYLLHVVEATGVYHENLCYFLNDRSERISVQLAQKAKYFIKSLNIKTKTDKVDAAALADMGMSRKLDPWKPLSKNFRDIRDLTRTLVRLKEHVVVASSQIHALKASHSVREESLSLMTDLVKRQKELIDSCERCIFELIEEDPGLNERIAKITEIKGINKVTVVKLLAETDGFRNVKSIRSLVSYAGLDVVQDQSGMHRGRSRISKKGNAHIRTALYMPAMSAVRHDPKSRKIYERLNGKLPKKKQALIAVMRKLLITIYTLWKNNDTYDPEHDWTKKRRDLSLVTG

SEQ ID NO: 50628 - protein, 342 aa, unidentified
MQITTIGLDIAKNVFQVHGIDAGEKVIVRKQLRRSQVLAFFEALPRCLVGMEACASSHCWARELTKLGHQVRLMPAKDVKAYVKRNKNDAADAEAICEAVRRPTMRFVQIKSVEQQGRLMLHRARDLLMRQRTQLINALRAHMAELGIVAAQGREGVKELLRIIASEQDGRLPVDAHASLVVLAAGLQALQTMIGSIERRIIAQHRSDEASKRLRSIPGIGIVGATAIAATVPDPKVFRSGRDFAAWIGIVPRQDSTGGKQKLGPISKQGDQYLRRILVVGAHAVLKRARHQPEKYPWITQLLARKPYRVVAVAVANKMARVAWALLAKGGTYRAPALAAAA

SEQ ID NO: 50629 - protein, 457 aa, unidentified
MTRRKHSRPARDIAPVHPHAAAVDIGATLHVAAVRPGSDPEPVRTFGTFTTDLHRLADWFEQCGVETVAMESTGVYWIPLYEILDQRGFEVVIVNARDAKNVPGRKTDVSDAAWLQRLHEYGLLRASFRPKGEIATLRSYLRQRERLLDQAAAHIQHMQKALTEMNLQLHHVVADVTGVTGLRILRALVAGERDPDTLAAYSDPRCKAPAETLRAALVGNDREEHVFALAQALELYEIYQAKVAACDQQIEAVLERLKAANPPPAATLPPARPRRRQANEPGFAVREALHAILGADPTQIDGIGPSLALTLVGECGTDLSAWPSAKHFTSWLSLAPHNKISGGKVLSARTRRSGSRAAALLRLAAVAVGRTATALGAFYRRLAARVGKAKAVTATARKIGVLFYNMLRHGMDYADPGASAYEARYRQRVLSNLRRRAKSLGYVLQKADPASAAIAVS

SEQ ID NO: 50630 - protein, 427 aa, unidentified
MKKVDYLSTLFVGIDIGARQNVVSAINFEQEFSIKMKPVPNTQSGADQLEAMLVDILSNSTFRTVIIGLESTSFYGVHIANFLSASERLMPYKPYVYCLNPKEVANYKDSFNSLDKNDGIDSFVIADFARVGRIHTEPWRGSQYLALQRLTRHRLHIVECLTREKTYMLSNVFLKFSEFALLQGEEHPFSDKYGATASSILTEFLSSEDIANASVEYLVDFVNRKSRKRISDPKMTVEVLQQAARNSYRLDKCLYEPLTTSIACSFNCIQAFEKELKAINKAIEKTVNGMNPVEYQILMSIPGFGPVYSSGILAELGSVHAFPKNDAIAKYAGIVWKENQSGDFKAENTPMNKAGNHYLRYYLIEAAGSVIRHIPEYEKFYQKKFAEVSTHQHKRALALTSRKLIRLIFGLLAKNQLYSSNRVDKLI

SEQ ID NO: 50631 - protein, 380 aa, unidentified
MEKACGLDVHKDSVFACILDEQGEKIFEKRYGTLTPDLTALRDTLVEHGCGRVAMESTSIYWMPIWRVFESDFSQSLANPYFIKQMPGRKGDAEDAAWIAECLQKKLIKSSFVVDGVLQQMRQYSRQHRRLTKSRSRLEQQMDNQLQRCNIRFSNYVSNQGKNVSMRKIIKAIIGGERDPVRLCSLVHGRTLNKHGKQVITDSLSGVIGQADVEMLKMCMEQIDLLEKQQANCLNHLEELVNQHFAKEISLLCTIPGVQRFSAMCILAEIGNDMSVFQKASHLVGWAGLRPRNDETAEKIKSRKILHGNKYLRQMLVEISWAAARSNKTFLGRKFNVLSKRMKSQKALIAITRKILVIIYNVLKTKQPFDPNRNLQANIA

SEQ ID NO: 50632 - protein, 350 aa, unidentified
MLIIGCDFHSRFQQIAMLDPQTGEVIEHRLEHENGEARKFYAGLATPARVGMEATGYAQWFERMLAEQGHQLWVGDAAEIRAAMVRKQKTDSRDACHILDLLLKDKFPRIWIPSTEERDVRQLLRHRYKLVCWRTSLKNQLHAMAMGHGICRKKKLWTAVGRKELQGLSLGPWASRRRQHLLGMLDQLEPVLEELDRAVIQEVERRPAAMRLMTQPGVGPVTALAYVLTIGPVSRFQRSKQVVSYLGFNPSEESSGGRQRLGSISKQGNSMLRFLLVEAAQTASIYDPELRRDYRRLKFRRGSGVAKVAIARKLAVRLYWKLREQPSPVPPAPMQGSPAVSVVGESLSSS

SEQ ID NO: 50633 - protein, 427 aa, unidentified
MSGIETGGQEPAFAAFVGIDWADQKHVWCLQGQDSTKRESGELEHTPEAVEAWVAQLCQRFGNRPIAVALEQSRGSLVFMLAKYEPLHLFPVPSTMSASMRKALYPSGSKDDPRDADVLLDLLLQHRNKLRRLSPDTEATRRIQNLVEERRKLVDEKTEHTNRLASHLKIYFPQMLKWFEHLDTELVCALLERWPTLEDLQKVPPSKLRKFLGKHHCRNQELTEWRILAIRQSIRAIRDRAVIEAKSAAVKVIVQLIRILLEGIADLDERIGEAAAAHPDFFIFKSLPGAGPALAPRLLAAFGSQRERYRNAGEVQTYSGIAPVMEKSGKKQWIHFRWACPKFLRQSFHEWAGHSIGYSVWARAYYRQQRGKGVDHHGAVRALAFKWIRIVFRCWKQRVAYDESKYLAALTRRGSPLVAVVAIAKAL

SEQ ID NO: 50634 - protein, 341 aa, unidentified
MLSIGIDVSKGKSTVCGMKPGGEIVYAPFEVQHTREGMSELVSLLRSSGEEVRAVLESTGSYHCPVVAALLENGIFVSVVNSLRMKRFCSQSIRKVKTDRIDAMQIALYGLAYWQELQPTKLPEDTYRELQLLARQYYQMTSILIKAKVDFNALCDQVLPGMQELMSDHAGRHKLSDFVLRYRHTTHILEMGETRFRKDYCKWAEKKGYRNCERMAVLIFATAQNGIPVLPNAPSTQIVITEAIRVLHTVEASRDAILTQMQALAKTLPEYSLVREMPCIGDTLAPRLIAEIGDVRRFHSKRALIAYAGIDAPPYQSGKFCANNRHISFAEWTMPNSLSCW

SEQ ID NO: 50635 - protein, 415 aa, unidentified
MMEVLHARCAGLDLSKRDAKVCVRIVPEGKARAVQQVTTWSSMANEILALREHLLQAGVTCVVMEATSDYWKPFYYVLEDGPWELLLVNARDAKNLPGRKTDVGDAAWLAQLGAHGLLRASFVPPEPIRALRDLTRARTAITRERTRQAQRLEKVLEDAGIKLSVVAADITGTSGRAMLRALVAGERDPNVLAGLAVGHLRKKTPALVQALHGRFTDHHAFLVGLHLDLIDQHTAAIRALTARIETAMAPFQAARTLIATIPGIGIPTAEVIIAETGADMSVFPTPGQLASWAGVCPGHHESAGRVRSSKTRPGNRHLKGALGAAALSIARHPGTFLNAKYRRLAARRGQAKAIVAIEHTLLTLVWSMLTTGALYDEPGPDYYTRHHPERAKNRALQQLADLGYDVTLQPHAGAA

SEQ ID NO: 50636 - protein, 344 aa, unidentified
MAYHTALDVSLRSVSICIVDDEGAIQYEGKTSSDVEAIVACLKRFNPGVRSVGFEAGALTQYLTYGLQAAGYEVICLEARQVNAALSAMRNKTDKNDARGIAQILRTGWYSRVHVKSMESHLIRALLSSRKAVLKKCVDLENEIRGLVRLLGIRLPGPLKHGAFDTYVRDAIEAHTTLARTLIPLLDARLVLYQTYLQLDNQARALARDDGICQRLMTVPGVGPVTALTFKAGVDDPTRFKRSRTVAAHFGLTPRRYQSGEVDNPGRISKAGDPDVRSALYVAAHALVVRSAQWSSLKVWGRRLAKTKGHRRAVIAVARKLAVILHKMWIDGTDFRYGSTEATT

SEQ ID NO: 50637 - protein, 377 aa, unidentified
MKENNSKKHLKKESKYHTQIAPKVGAKEKFPFYIGIDLGDKNSEICVFDEDGEVSKRLRLRMKEAEFQSYFASIPRSAVAIEAGAQSRWVADTVERCGHKIYVSNTRKVPYISQSDDKDDPGDAYKLGELAYLKPRLLHPIQHRSQAVQTDLSWIRAREALVESRTQLINTIRGISKAFGGRLQKCSVESFTAKRAEQIPEAIRGPVAPLLEMVDQLNERIRNYDEMEEHIARTRYPQYWLLDQVDGVGVHTALSYMLTIGDPGRFERSRLVGCFLGMRPKRQESGEQQPQLGITKGGDAYLRKTLVNCAQYILGPHGADSDLRRFGLRICERGGKNAKKRAVVAVARKLAVLLHRLWVTGEVYEPLRNDPEATAAA

SEQ ID NO: 50638 - protein, 392 aa, unidentified
MVVSVGVDVSKDKHDCFILSSEGEVLADVFTIPNNLDGFRFLLRRIRDCTHAQDKIKVGLEATGHYSYNLLGFLLDNGLPTYVLNPLRTNLYRKSLSLRKTKTDRVDARTIAAMLLSDVGLKPYTNTAYHNEELKSLTRYRFDKVKERAKLKSSIARLVCILFPELEKLVPSLHIASVYALLEEFPGAKQIAAAHLTRLKALLETASKGRYKRDMALEIRDAARNSIGSWMPAKSLELQHTIRLIRELDVEIAEIEEQIQSIMDELHSPITTIPGVGFRMAAMILAEVGDFTRFDSSDKLLAYAGMSPSTYQSGQLKNCYPHMEKRGSRYLRYALYNAAKYVCHWDPTFAAYLAKKRAEGKHYNVALSHAAKKLVRLIFAMEKSRQPYCSAA

SEQ ID NO: 50639 - protein, 443 aa, unidentified
MEQLQRNGEPEFAAFVAIDWADTEHVWCIQPGPGQRRETGRIHHSPESVEEWITSLVVRFDNQPIAVALEQSRGALVFMLSKYAQLHLYPIHPRAAAQFRSALFPSGAKDDPKDADLLLEMLLQHRGYLRRLDPDTEETRTLQMLVEDRRRFVNENTRQSNRLTSKLKLYFPQILTWFDEVDSPLVGAFLQRWPTLETAQRARPETLRKFFHNHNCRSDERIELRLQQVRNAVPATRDPAVIRSGTAAVAVLVQLIQTLRNGITSLDKEIEIVSRAHPDFAVFESLPGAGKVMVPRIIAAIGSRRDRFVSAAELQSYSGIAPVMQRSGKSQWVHFRWACPKFVRQTFHEWAGHSVASSDWARSCYQQQRERGKGHHAAVRTLAFKWLRILFRCWQDQRPYDAARYEGARGRRAEVHPAPAAGDNLQIQWKSCAGFSKPTFFAT

SEQ ID NO: 50640 - protein, 429 aa, unidentified
MNCTQNKKIEQVKETTMIVGIDVGSEKHYFRAFNWRGIELTRKPVAFSNSMEGFNSFYNTIVELMQKSELEEALVGIEPTGHYWFDLGQFMGEKDIKFVMVNPHHVHKTKELDDNSPSKNDRKDPRVIAGLVKNGRYFYSYMPTGVYAKLRNASNRRFVLVEEQTRAKNRLQKWIAVYFPEYKGIYTHIDAKGGMLVLKKAPTPEEIVRLGVEGIIKIWKDAKLRGNGHKKAMLILAAAMRSIGLKAGLTEARMEIQDLIEDYELQTKRLERVNDLIKGLCQQVRYADKLLEIKGIGITTVAGFIAEVGDITRFDSTKELQKLAGLELVADSSGKHNGKTKISKRGRKRLRYLLFEAAISVVGKNEEFKEIHRYYTSREKNPLKKMQSMIAVAYKLIRVFHVILTKGVSNDASKMLKDIRHPGEQLKAA

SEQ ID NO: 50641 - protein, 405 aa, unidentified
MARVFVGHDWAEDHHDVFVEDGQGRRLGGGRVPDGVEGVARFHELVGGLVEDPAEVVVATETDRGLFVGSLVAAGYTVLAVNPLSVSRYRERHSTSGAKSDPGDARVLAELARTDHHNHRPIAGDSDLVESIKVLTRAHQGLIWTRQRQLNQLRSTLREFYPAAIAAFPELGHSDALAVLALAPTPSLGRLLSISKIAAALRRGGRQRRIDERAAEIQIALRSDQLGAPDPLSESMGTVVGALVAVAGEITTQIAGLETTLADRFDQHPDAKIIRSLPGLGMILGARVLAEFGDDPNRYANAKSRKNYAGTSPITRASGRSHVVLARYARNRRLADASYRWAFAAITASPGARTFYDTRRATGDTHNRALRALANRLLGILHGCLRHRTLYDEHIAWAHRTQLAA

SEQ ID NO: 50642 - protein, 349 aa, unidentified
MAFNHEMKEHWMSVIIGIDPHKSTHTAVAVDRDEQPVARLTLPARAGQTDRLLAWAEPLDADRVWAIESAAGLGRLLAQQLIAAGERVIDVPPTLSARVRLLSSSRAGKNDTNDALSTAIAGMRHCGLRVVRPDDQLVVLRLLADRHHDLTGLRTQAACRLHVMFRELIPGGARLRISAAHARRLLDEIEPVDAVSIERHRLAYEHLGDIERIDAEIDAVKQRIASRVAATGTAITELHGVGPVIAAIVLGQVGDISRFRTRAQFASYNGTAPIEASSANKNRHRVSTRGNRALNHAIHMIAVTQVAHDTPGRAYYLRKQAEGKSRKEALRSLKRRVSDAVWRQLQLDR

SEQ ID NO: 50643 - protein, 425 aa, unidentified
MKKTDYLSTLFVGIDIGSRTNVVSAIDFNREYFIRMKPVPNAKEGAEILESLLVDVLSAHHEFKHVIIGMESTGFYGVHIANYLSASDLLSPFGTEVYCLNPKEVAKYKESFNSINKNDGIDSFVIADFARVGRITIKPWRGAQYLALQRLTRHRLHIAECIAREKTYVLNNIFLKFSEFAMLKSEDHPFSNKYGATAEAIIEQYVTNDDLIRASIDELVELIESKSHGRITDPEETAKLLQSAARGSYRLDKVVAKPITLSISSSFNCIRAFEKELKAIEKAIEQTVQGINPLEDQVLKSIPGIGPTYAAGILAEIGTIKAFPNNDALAKYCGIIWKENQSGNFRAEDTKMSKAGNRYLRYYIIEATGSVINHCPEYKAFYGKKFAETTTHQHKRALALTSRKFLRMLFGLLDKTQLYSLEKSR

SEQ ID NO: 50644 - protein, 337 aa, unidentified
MDFKFFVGVDVSKDTLDFAVYGENKLLLERNVANTTVEIKAFVKELKKVFSSEPTAFVFCMEHTGIYCNYLVNYLGKEKLAAWIENPLAIKSFIGIDRGKSDRVDARRIAEYAYYKRSKIRLWQAPREVVKKLKNLLSIRERLVKTRKALTVAVNTAEGFVDKDLVNTNKKITEPIIDRLNVQLKIVEKEIQELINKDPDLKKFNTVLSSVTGIGSIISANMIVATNEFKSIDDPRKMACHSGLAPFRYESGTSIRGRSKVSHRANKKLKTLFHLAARAAISAKGELRDYYLRKVQEGKNKMAVLNAVGNKLIHRAFACIKQNRRYEKNYAAVLAKA

SEQ ID NO: 50645 - protein, 315 aa, unidentified
MEQSIQQNVGVDISKDFLDVALVPAGEDFRFANDANGHRALIKRLAGLPIARIVFEATGAYHRVFERTLAEAGLPMVKINPRQARRFAEASGKLAKTDRCDAAMLARMGLALALEPRPVVSQALEELRELLNARDALIKDRVAALNRQKNAFSPLLKRQLAARLRQIEAQIEAIDQEQKKLRSADSGLKDRFDILTSIPGVGAITANALIAELPELGGLDQGQAASLTGLAPIAKDSGKSSGKRSIRGGRARARQALYMPALCAMKFYPACKAKYEALIKLGKPKKVALVAIMRKLVIIANALLRDRRKWSPAAP

SEQ ID NO: 50646 - protein, 411 aa, unidentified
MDRFVERCAGLDVHKDSVAATVHVPGPEGARLQETRTFATTTHGLVTLADWLASYGVTLVGMESTGCYWKPVYYVLEERFECWLLNPRHLRNVPGRKTDVADSAWICQLLEHGLVRASFVPPRPIRELRDLTRYRKTQVEERSREVQRLDKVLQDAGIKLSSVASKTLGVSVRRMLDALVAGTHDPELLAELACGRLRRKLPALQEALSGRFRSEHHGLLVAQILAHVDYLDETIATLSERIEQLIAPFSRECELLQTIPGVGPTGAEVLIAEIGVDMSVFPTDAHLASWAGQCPGNHQSAGKRRSGRPRHGSRWLQATLTESAKAASRSKGTYLSAQYTRLRGRRGPGKATGALRHSILIAAYHILDQKIAYRELGADYFDRRTTEQRTKRLVRQLEKLGHTVTLEPLAA

SEQ ID NO: 50647 - protein, 348 aa, unidentified
MSQSKQYVGLDVSLKETSICVIDDVGKIVWRGRTESTPEAIASAVKQHAPYAVRIGLESGQLSSWLFHGLKVAGLPVICIDARHAKAALSLKVNKTDANDAFGLAQIMRVGWYREVTVKGLDCQAVRALLVARAQIVSQITTTKNCVRGILKTFGRVLPKGLRSQFSGRVRAAIDGDPILGAIIEPTLRVLEAMRAQLLVYNKAVIQRARGNDTARQLMSAPGVGTVVALAYMTGVEDPARFKRSSSVAAYFGMTPRRYQSGEVDHAGRISKCGDGMVRGLLFESAKVLLSRSARPSALKTWGEALGKRIGPKKATMAVARKLAVILHRMWTTGTTFQWNTEAASPAA

SEQ ID NO: 50648 - protein, 309 aa, unidentified
MEHFVGIDVAKDRLDVHLRPCGESFAVARDGEALAALVERLRALAPALVVMEATGGYETVVASALGAAHLPLAVVNPRQIRAFARATGKLAKTDRLDAAAIAHFAEAIRPPVRPIADAEAQALGELVARRRQVIEMIVAETNRRRRASQRRVITAIERHLAVLQAELSELDGDIDGAIRESPAWQADADLLISVPGVGKATLRTLIAELPELGHLTRRKIAALVGLAPINRDSGTLRGRRAIAGGRSAVRAALFMPAMVASKTNPVIAPYYDKLRAAGKTAKQALTACMRKLLVILNAILRDRKPWQHA

SEQ ID NO: 50649 - protein, 424 aa, unidentified
MKVTYQTCCGVDVHKSFLVATIIKTTAGIEPSYQKKRFSTFNNSILDFKSWLLENECHDVCMESTGKYWVPVFNLLEDQINVTIANPKWVKAVKGNKDDTKDSKWIGDLFRLGLVKSSYIPCRLIRILREYTRYRYKLVSCRSSEKNRYQNALTVCNIALDSVVSDIFGKSSSSIIDYLLEQSGTTINHEEIASKLLKSLKSKEDAVIESIEGYQMTDAQKYRMRLIRAHMDYITAEINDIDKQIESLISSDPDYDKAIRLLTTIPGVKCDSAITVISEIGIDMSQFCNSKRLCCWAGLTPSNNESAGKKKSVRITRAGVYLKPALVQCAHAAVKSDKSPYYKTKYESLVKRRGKKRAVIAIARMILIAIYRMLSTGEVWNPSDLYKIDMPAPLAEKQKAKAIKQAKKLLQKEGLLPPDEPLAS

SEQ ID NO: 50650 - protein, 352 aa, unidentified
MAMTIVENHLLSVTGGIDTHRDFHVAAAVDPNGGLLGVETFDTTTGGYRRLVAWLAAFGDIDLIGVEGTGSYGAGIARHLAGKGIRVVEVDRPNRQARHRAGKTDAVDAIAAARAALSGTATGVPKTRTGPIEAIRVLTVARRSAASEWTAILNQMRHICFTAPDELRTRFQDLTPITLVKTCAALKPRRSDDDIVRFTTLSTLRELGRRALFLREQKKRLDADMKPLIDDIAPGLIAVFGVGYHVAATLLIAAGDNPHRIRSEAAWAHLCGVAPIPASSGKVQRHRLNRGGNRQANSALHKIMVTRMAYDDRTRAYMTKRTKDGKTLGETSRMLKRYIAREVYHHLPTTMT

SEQ ID NO: 50651 - protein, 368 aa, unidentified
MHEGITAFVGLDVHKDSIAIAVAGNDREAPHFVGTVRPDFKQVCKALRHYGSPSSLQVVYEAGPCGYTLARQLQTGGFGCQVIAASRITRSPTERIKTDRRDAITLARLARSGDLVAVRIPDERDEALRDLSRTRQDAVRACLKARQQLKAFLLRHGRPLRGSKPWSATGELYLSKISFVHPAQNIAFADYRQAVLDTHARVERVTEALRAQCEQWRMRPLVSALACLRGVDFLTAVILVAEIGDFTRFSHPKELMGYLGLVPSEYSTGERHHRGDITKTGNANARRVLVEAAWNYRFPARLSHTITRRQEGQSKPVRDIAWKAQLRLGYRYRKLQSRKLHQNKIIVAIARELTGFLWDIARHVPIAA

SEQ ID NO: 50652 - protein, 369 aa, unidentified
MPHVTSIGLDVHARSVAAAAFNPFTGEVVHRDFGTDAAEIAEWALGFEEPRACYESGPTGFHMARELRALGLDCAVAAVSKMQRPAADARRKNDRRDAEFIARMLATHNIVEVPLPDAAVEAARDLDRALDDATAEYRRARQRLNMFLIRLGHVWDERNADGTRKGSWTRAHWRWISGIRLEGPQRDVLEYYVTAARCAESDRRQLEKKVLALARTDRWRPAVEALSCIKGIDTLTAFRLAAEAGSFTRFRTAPAFASWCGLVPSERSSGETERRGGITKTGNRLARTALVESAWHYLTCTPRPKAPAPGADVPAAIRARADDCTARLCRRREALAAAGKSSCKANAAVARELACWVWEIGCRAEGTLG

SEQ ID NO: 50653 - protein, 301 aa, unidentified
MWTPKKIESKLRPFLEELGVDKSNVLIIMESTSNYHLPLAEYLAKKEYNVGLANPFSMKRFMDANMSRAKTDKVDSFFIAEYGMQVFKGPLFKPKTEAQKEIEARVKTLERFNKQLTMLKNQREALSLIPMKGLKKILAHYDRIIESIEKEIEVLEKEIRELCKKHFPEEYRLLKSIPGIGDRAIAIVVSILRKFEGFKRAKDVGSFVGLCPSPVESGSSVRGKGSIKKRGNPYVRQVFYMCALSAERSNPYCKDLYERLLERGKFKTEALVAVAHKLLRQCYGVLKSRTPFRVKEKEVTP

SEQ ID NO: 50654 - protein, 315 aa, unidentified
MDKTTSEPGFVGIDVGKAHVDVYCHPLGEAFRVTREPGGLEELTKRLCQSKPALVVLEATGGFERVVVATLGSAGLPVVVVNPRQIRDFARATGRLAKTDRLDAQIIARFAAAIRPEVRALPDQAARAFAELTTRRRQLVEMISTENMRAQQAVHATVRTRLAAHVEWLNQELSQLDADLDTAVRASPLWLERQALLTSAPCVGPTVARTLIADVPELGTLDRRQIAALIGLAPMAHDSGQHRGARHIRGGRASVRAVLYMAAWVGTRCNPVLKALYNKLIEAGKPRKVALVACMRKLLTILNAMVRSNTPWQDA

SEQ ID NO: 50655 - protein, 406 aa, unidentified
MNAVGIDVSKGKSTVAILQPFGVVVAAPFEVSHTDSELDQLAKNIKKLSGETRVVMEATGVYYEPVARRLHEHGIFVSVVNPMLISDYGGNTLRKAKTDKKDAIKIASYALNSWLDLTEYKPEEDIRRSLKTLNRQVKKVIKVTNMLKNNLISLTDTAFPGINKLFSSPARDSDGHLKWVDFVAKFPHRDTVARLSLNAFKKKYKSWCEKNKYHYQDSKAEEVHAHARKCVAGVSAEETFCLMIAKAAEFVNAACENENALKKEMNRLSSTLPEYEVVMGMYGVGESTGPQLMAEIGDTRRFHNRRAITAFFGYDTEPDDSGQHISKSRPITKKGSSSLRRTLFIIIRAISTQKPIDNPVYVFLDRKRSEGKHYYSYMTAAAAKFLLIYYAKVNEVLNEKGTSVCT

SEQ ID NO: 50656 - protein, 407 aa, unidentified
MQYQDRPVLARGRAVVGIDIGKQKHSAFAIGPQGEKRASLASFDNDRAGVDRLEAVVLRAAGPPTEILFAMEATGHYWMPLYHELLRRGYEGVALNPIQTHGEARARIRKTKTDHKDAEGIARFILTGKAHATRIPDEDTEELRIMTRRLHQMTQMKGDVERAAHSLIDRAFPEYSGCFSKPFLPSARKLILEVGLTPDRIAREPEEVRALLRRAGRGRLTDTTINNLITRAQTSIGIARAATVINEELATTVEVINDLETQIALLDERLRGIMEERESPLMSLGIGPALAAAIHAESDPASDFPSARKYAAYAGLEPDTFQSGAMKGTRAHISKRGSPHLRNALYQTAFVIYRRHDCFHRLYKRFRKEGRRHKDALVIVARHVAMVIWRMLVDNRPFSKRPPQRAK

SEQ ID NO: 50657 - protein, 424 aa, unidentified
MKVTFQTCCGVDVHKSFLVATIIKTSSGIEPSYQKRRFSTFNNSILEFKKWLLENECLYVCMESTGKYWIPVFNLLEDEINVTIANPKWVKAVKGNKDDTKDSKWIGDLFRLGLVRGSYIPCKKIRILREFTRYRYKLVSCRSSEKNRYQNALTVCNVALDSVVSDIFGKSSTSIIDYLLEQSGTSIDHEVIASKLLKRLKAKEDAVIESIEGYQMTDSQKYRMHLVRAHMDYITAVINDVDSEIESLIASDPDYENAVELLCTIPGVKYDSAITIISEIGIDMSQFCSSKRLCCWAGLTPGSNESAGKKKSVRITRAGVYLKPALVQCAHAAVKSDKSPYYKKKYESLVKRRGKKRAIIAIARMILTAIFQMLTTGETWNPCDLYKIDMPEALLEKQKQKAIKQAQKLLIREGLLPPTEPIAS

SEQ ID NO: 50658 - protein, 408 aa, unidentified
MEAIIERSCGLDVHKDVVVACVLVGPPEGRARKEIRTFGTTTTQLEEMCGWLLEVGCTHVGMESTGVYWVPVYSVLEGSFELIVGNAAHIKNVPGRKTDVKDAQWIAELIRCGLIRKSFVPPKWQRALRDLTRYRRKLVEAQASERNRLQRLLETCNVKLSSVASDVFGKSGREILRAIIKGEASPGQMASLARGRLRKKIDGLIPALRGKVEAHHRFMLEMQLDRVEDIEANIAVVDHKIDDAIAPHRAVFDHLTTIPGVDRAAAVTVIAELGVDMSVFPTAAHAAAWAGVCPGNNESAGKRMGQQKRRGNVHLATALVQAAFAASKTKQTYLKARFWKIAGRAGKKRAAVAVAHSILKAVYEMLKAGIDYKDLGSDYLDRFLNHRAEQRLVNRLRSLGYDVSPKTA

SEQ ID NO: 50659 - protein, 346 aa, unidentified
MVHVGLDLSRTRLDVHVMDEAGAPLAVTTAAPDAGGLAVLVERIGGFGGPVYAAIESMNGARFVHDQLELAGWQVEIADALKVKGLAPLACKTDKIDSWVLAELSRRDLVPAIWLPTPAVRGERERARWRLHLVRHRSALKNRIHASLLAFGHPCPVSDLFGVGGRELLHRLELPEPWAADTAAALYLIDELDHQVVECERTLRQLGADHRYVPLLMTTPGIGWVLGYTIAAEIGDISRFASPTKLAGYTGLCPRVYQSGGKDHRGPLAKNGPKYLRWALIEAATHAARHPVYAERYRRTKTRLGRQRGPKIAQVDLARRLAEAIWHMLSTNRPFAPVGATSALAS

SEQ ID NO: 50660 - protein, 351 aa, unidentified
MPCKTEVAVARTIGIDTGKNTLHMVGLDQEGAIVLREKVSRTRIAARLVNVPRCLVGIEAGMASHHVARELLALGHEVKQVPPAYAKPFRQGHKNDFRDAYAVAEAVQRPSTRCVPVKTADQLDLQALHRVRSRLIGNRTAVINQVRGFLLEHGIPVRQGLRFLRQQLPQILGTRTDVLSPRMVRIIGELIGDWTYLDERIERVTDEIETLARADENCRRLMTVPGIGPIIASAMVAAIGNGAAFAKGRDFAAWLGLVPKQMSTGDRTILGRITKRGNRYLRMLFIQGARAILFRPAGWAKHSFGPWLAAAARRLHRNVLATAFANKLARIALTVLVEARSYAARIEPRAT

SEQ ID NO: 50661 - protein, 412 aa, unidentified
MDVYCGIDWAEDHHDIALVNRDGQLLARRRISDDAAGLAQLLDLLAEHGDTAEDLIPVAIETPRGLLVACLRATGRTVYPINPMAVARYRDRHTVSGGKSDHGDSVVLASILRTDIGFHRPLPADSELAQAIAVLARAQQDAVWDRTTAHNKLRSHLREYFPGFLAAFAEAKHGILRPEARTILAAAATPGDAAKLTAAQLRALLKKAGRSRGIDAEAARLRDAFRAPQMRQLPLVEQAMGRQTLALLGQLNAACAAADDLEHAATESFNQHPDAGIITSFPGLGALTGARVLAEIGDDRSRFQHAKGLKAYAGAAPITRASGKTKSVTHRKVKNNRLAAAGYNWAFSALTASPGARAHYDRRRDDGDRHAAAQRNLFGRLLGCLWHCLTTGQHYDETIAFPVIGNKVRQAA

SEQ ID NO: 50662 - protein, 411 aa, unidentified
MQVIYERCCGLDVHKRTITACGLKWLGSDWQKEIRQFGTMTKDLLALSDWLMREGCTHVAMESTGVYWKPVYNILEGQLELLVVNAQHLKAVPGRKTDVRDAEWIAELLAHGLLRGSFVPPPSVRELRDLTRYRTSLVRDRARTINRLQKVLEAANIKLASVVSDIDGVSARLMLEALVAGERDTEQLARLAKGRLKVKHAQLVEALSCRLQPHQSFLIAEHLAQIDYLEGAIERLSGEIEERLRPFEPEIGWLDTIPGVNRRTAEVLWAETGGDMSRFASARHLASWAGMCPGNNESAGKRRTGRTRKGSPWLRHCLVEAAHGAAHTKNKYLSSQYHRLAARRGKKKAQVAVGHSILVIAYHLLTRKQAYSDLGANYFDERDRQAVTKRCLNRLQKLGYQVTLEKLPMAA

SEQ ID NO: 50663 - protein, 353 aa, unidentified
MPMLADLIDAVVGGDTHRDTHALEIATPAGAVIATRSISNDEDGFADAVAWIVEHAPGPRIVIGLEGTRSYGIGLARALAAAGLHVVEVVRPRRGERRRGKSDPIDAHLAVLAVLRMDPDRLPVPRADGNREALRILLGARRELTLTKTRQTNRLRALLLAGDDTDRGLARGRLSDTRLAAISRRRARADESTEQAIRRGEARRLAEGIRHATRDLAANKKQLADLVAVHAPHLLDKTGVGPVSAAQALVSWSHHGRCRNDAAFAALAGVCPIPASSGRTTRHRLNRGGDRQLNRALHDIILTRSRICPRTQAYIAQRRRQGKTDREIRRCLKRHIARELFRTLQTTTPTTTT

SEQ ID NO: 50664 - protein, 400 aa, unidentified
MTEKVWAGIDVGKEHHHCVVINSEGQRLLSRRVFNNEPELAALIDEVIELAGSQVLWAIDLNHGAAALVIGLLVSREQPLTYLTGLAIHRASASYRSEGKTDARDAFIIADQARLRRDISVLRPGDEIAVDLRILTTRRVDVVFDRTRQINRLRAQLVEISPALERALTLTNKGPLVLLTGYQTPAAIRRTGIARLEAWLRKHGVRNAAALARTAVEAARTQSIVLPGERLAAQMVARLAKGVIALDDEIAELDELIEARFRDHRHAEVIISLPGIGPRLGAEFLAATGGDMTAFTGADQLAGFAGLAPQPRDSGRIRGNLRRPKRYHRRLLRSMYLSAQISIATSPASRSFYQRKRAEGKSHKQAVLALARRRINVLWAMLRDHTTYHDSPPIPVTTAA

SEQ ID NO: 50665 - protein, 306 aa, unidentified
MEHYVGLDVGLEETNLCIVDHEGKTVREVKVSTEPAAIRSALEGYADRLSRVGVEASSLGLWLHRELHAGGLPIIVVEARHMRVSLSTMRNKTDRNDARGIAQLMRLGWFRAVHVKNIEMQKMRTLLTNRKLLKRKLVDIENHIRGALRTYGLFVGFVGRGHYEARVRELIKRTDFVFSTMIETMLDVRRAIFDGYSRLHRAVLQVVQHDPICRRLMTVPVVGPVASLSFKVGVDDPLRFTRSRTVGAHFGLTPRRHQSGTSIDYEGRITKQGDVSVREALCEAAASLLLRVRKWSALRALGSSGC

SEQ ID NO: 50666 - protein, 384 aa, unidentified
MRHIEQTEAARDGAVVFIALELSKSTWLLAAQGSPSGKASLHRLDRGDIAGLLALLCRLQAREQRASGNQVQVVLGYEAGYDGFWIQRRLSAEGITCCVMDPGSLQVDRRARRAKTDRLDAARLLRALMAWWRGDRAACHMVQAPSVEREDARRTHRERQRLITERVQHVNRIKGLLATQGIYDYRPLRRDRWERLEELRTGDGHELPPRLRREIEREFKRLELVLEQIEASEAERDATLAAPGAEDVDAPMVARLSKLGGIGPELATVLVREALYRSFTNRKEVAAYAGLTPSPHASGDRHRDQGISKAGNPLLRKAMVELAWLWLRYQPDSALTRWFTERVGAVRGRMRKITAVALARKLLVALWRYVRTGLVPEGARLKAV

SEQ ID NO: 50667 - protein, 343 aa, unidentified
MEHYVGLDVSLKHTAICVVDQTGKIVCEGVVVSDPEAIEMFVKSKAPFVVRIGLETGATSTWLWSELKGKGLPIICIDARHAKAALKMQINKSDRNDAIGIARIMQCGWFKEVHVKGLDSHAIKALLASRALLVKVKRDLENHIRGLLKNLGRVIGRAKFNVFAERANELIEDKPELAVTVGPLLKAREIIERQIADFDRKVMKLARGDQQVRRFMTAPGVGPITALCFRATIDDPTRFKRSRSVGAFVGLTPRRHASGEIDWTGRISKCGDPMLRSYLFEAAGVLLTRVPKWSALKAWGMRLAKRNGLKKAKVAVARKLAVILHRMWVDGTEFSWSAKEAVA

SEQ ID NO: 50668 - protein, 466 aa, unidentified
MKDNRQRRRQPPRRSSGVLERLNANVAGIDCGSAAHYVAVPPERSASPVQSFKTFTSDLRRLADWLVACGVTSVAMEATGVYWIPIYDLLEARGLAVVLVNARHIKHVPGRKSDVSDCEWLRDLHRVGLLRGSFRPTAGIVALRAYLRHRQSLVESAGMYVQRMQKALVQMNVQLPLVVSDITGVTGLKILRDIVAGHHDPGQLARHRDYRCRATEPEIIAALTGAYRPEHLFVLQQNLALFDACQTQLAACDRAIEAHVQALTATCDVAPTPLPAPRVHRRRVDNDPAFEIRTPLHQLTGGVDLTQIDGIGPYTALKLIAEIGTDMARWASEKHFTSWLTLAPKNRVSGGRLLSSRTEPSANRAAAVLRMAAMTLGRGSTALGAFYRRLAGRIGKPQAITATARKLAILVYRALKGDLIYRDPGAEAYDRQQRSRVLRRLRRTATTLGFDLVNRDTGEVLHAVSS

SEQ ID NO: 50669 - protein, 390 aa, unidentified
MQALCPRPDEHTAVRTDLNAIFVSLELSRSTWVITSLAPGGGEKMSKHSVRSGDIAALLARLSQLTEKARARTGRVFPIIVIQEAGLDGFWIHRVLQQEGIESHVVDPASIATSRRRRRAKTDRIDGEALVRALLAYKRGEPRVCAMVKAPTPHEEDRRRISRERETLTAERVRHVNRIKGLLFAQGISDYEPLHRNRRERLEELITGDGRSLPECLKAQIRRELDRLELLIKQVKAVEAERDAVLAQAQASPGVPAPAALLLALRGIGPAAAATLWSEGLFRTFSNRKQVAAYAGLAPTPWQSGSVHRDQGVSKTGNPRLRTIMIQIAWLWLRHQPQSALAVWFRERIKRTGGRLGKTMIVALARKLLVALWKYATAGVLIEGAILKQA

SEQ ID NO: 50670 - protein, 358 aa, unidentified
MDVIHDRAAGIDISKRDAKVCLRLPSARKGQFRPAVSTWGATATEIVELRSFLEQQDVPVVVMEATADYWKPFYYVLEETLPVLVNARDARNIPGRKTDVSVASWLAQLAACGLLRASFIPPPRIRELRDLTRARAITVRDRTREIQRLEKFLESSGIKLSAVVSSLTGVSSRLMLDDLITGQRDPLVLAAHAKGKLRSKLPELTAALNGRFGEHHALMTKLYLDQIDTYTRKIRTLTESIELLMVPFRQTREVLSTIPGVSELVADVIIAETGAGMSVFATAAHLASWAGVCPGSNESAGRVKSSHIRPGNKYLKSALGIAALAASRTKGTYLAAKFRRIAARRGPMKLSSRFSTRF

SEQ ID NO: 50671 - protein, 422 aa, unidentified
MNINTDSKRRQVPDDYLVAGIDPHKKSHTMVLMTREEKVLTSLKFDNSKTGFEHAVKRVDDQISKSGSKGVVFAMEAGGHYWRNLAYFLNKRGMWFCLVNPFTAKRLREGKDINRAKSDMRDARVMAELVISNGVPQTNLPQGIYAELRAVYNAYQRLIKERSRIKSRMKSLLDQLFPEFCMVFSNVCSKTAMQVLGCCLAPTDIARMQEAQFIARIREGFTGRALKIHSLQKLYQLGKTSIGAEAGARGLALELNLMTQQLLLLSEQIEKTKHILQGLLLSIPESRCILSIQGVGHIAAAGILAETGPLQAYRNSGQLIKLAGANPISWESAGKRHSITHMSKKGRPKLRSCLWIAAIALLRSNPDFKEWARVRRERELHMHPLKPRETVGAVANRLLRIVYALVKNGSMYCLPKANEVLV

SEQ ID NO: 50672 - protein, 345 aa, unidentified
MEITTVGLDIAKRVFQLHGVDAAGKVVLRRKLQRSEVLAFFKALPPCLVGIEACGTGHHWAREIRELGHEVRLMPPSYVAPYVKRGKTDAADAAAICEAVTRPTMRFVPIKTAEQQAVLMLHRTRDLLVRQRTMLVNALRGHMAELGIIAPQGIARVADLMAVLLGEGTTNVPALAREALRGLAAELEALDRRVKEIEVAIVRWHKDNQASRRLATIPGVGPITASAIVATITDPFQFHSARHLAAWIGLVPRQHSSGGKQRQSGISKQGDRYLRRLLVLGATAVIRHSRSKSTAEAGWLKSLLERRPARLVSVAQANKTARIVWALLVRGGAYRMPAALPSGVA

SEQ ID NO: 50673 - protein, 387 aa, unidentified
MTVRTVSNLPAAMHVETARCLFAIELSKQSWVIGFITPLSAKISRRILSGGDWKGLLDLIEEVRARVSRETGRAVDVISCYEAGYDGFWLHRLLEAHGIRNYVIDPASLQVDRRARRVKTDRIDTERLLRSLMAYLRGEPKVWSVVRVPSVAEEDARRLHRERDRLVSERVQHVNRIKGLCALHGIYDYQPLRPQAMARLEQLRTAQGISLPPRLKSEIKRELQRLELVVEMIATLEAERDAIVEDEASTHVNAKKIQNLHQLKAIGPEFAAVLVGEIFHRDFNNRRQLASYVGYAPSPFQSGNVAHDQGISKAGNRKGRTTGIELAWLWLRYQPDSDLSVWFRARVGALKGRVRRIAIVALARKLLVALWRYLETGLVPRGAVLKG

SEQ ID NO: 50674 - protein, 340 aa, unidentified
MTIVVGFDVHRAQITFDALDGATGEVTTGRISPADRQGLRRFLCRWNGREVEAAVEATTGWRFVVEELQRAGATVLLAEPAETSARRGPKRRAKTDRRDARHLRDLLLERRLPVAWIPPQHILELRAQVRLRKTLVDQRTEWLQRIHAVLFHHGAKLAVSRLDGRDARRQLVALKLAPSACQQIEVALAIVEQVNAQLAPLNRELKAFARRQPGCRALMRHYGIGPQVACAILAELGDARRFSSSRQAVRFAGLDVTVHESDAKRRPGHLSRQGPPVLRWAAFEAAESACKPSSPDHAYYLQLKQRVGQNRAVLSVARKLLRRAHHTLRELGDEALQPVA

SEQ ID NO: 50675 - protein, 347 aa, unidentified
MGQIIRIGMDTSKYIFQVHGVDGSEQPVLRKRLARKQMLDFFAKLPPTVIGMEACGTSHHWARELKKLGHEVKLIAPQHVKPYVKRNKNDGRDAEGLCEAMSRPTMRFVAVKTAEQQAALMLAGLREQMIARRTQISNTIRGYAAELGITVAQGLNQIEPLLARLAQDDSVPELARDLFALQGRDYAQLQMELKTIEARLMAWHRANADSRRLAKIPGIGPIGGATAVMKMPDPHAYASGRHFAAWIGLTPKDHSTAGKTRHGKITRAGDERLRSILVAGATAVIQQAKHGHGHPSPWLIALLKRKPPKLAAVALANKNARIIWKLMVTGESYDGARMPKASVAAAA

SEQ ID NO: 50676 - protein, 347 aa, unidentified
MRFYTETHKHYCGIDLHTKNLYVCLIDHEGEILVHKNIKARPEALMKLIKPYLDELVIGVECMFSWYWIADFCEDNGIDFVLGHALYMKAIHGGKAKNDRIDSLKIATLLRGGMFPMAYVYPRAMRPTRDLMRRRMHMMRKRAELLAHIQNTNSQYNLPGIGKNLRYTFNREGIAERFEHPSTQKSIDLDLNLIGFYDEQLSKVEWHINRCAKEVDYPSLMILQSVPGIGQILSLVMLYEIHDIERFPRVQEFLSYCRLVKCKKESAGKSYGTSGAKIGNAYLKWAFSEAAVLFLRQNPHAQAWLEKRANRHNKAKALSILAQKLARAIYFMLKRNTVFNPQRFLNA

SEQ ID NO: 50677 - protein, 405 aa, unidentified
MGQVFVGHDWAEEHHDVELMDAGGRRLARARLPEGAKGVSQFHELVGRHSEEPSEVVVATETERGLFVGALIAAGYKVHAVNPMSVARYRERHSTSGAKSDPGDAHVLAELARTDSHNHRPVAGDSELAEAIKVLARAHQAMVWSRQRQLNQLRSTLREFYPAALAAFEDLGHTDALAVLAIAPTPELGRGLSRSKIAAALRRGGRQRRLDERAGEVQAALRSEQLAAPALISKAMGASAKAYIAVIAELGTQVAALEAELSGHFEVHPDAKVVLSLPGLGTVLGARVLAEFGDAPGRYADGKSRRNYAGTSPVTKASGKSKVVLARFARNGRLADACYRWAFCALTASPGAKAFYDQRRAAGDTHNRALRALSNRLVGVLHGCLRYGELYDEKRAWGHRSQLVA

SEQ ID NO: 50678 - protein, 509 aa, unidentified
MSKGQRASEQPGRWEGLKIIHPHAAGLDLASDEIWAAVPPDSTAEPVRRCGNTTPDLIALADWLADCGVDTVAMEATGVYWIPVYEVLEARGFKVFVVNARHLKNVPGRKSDRLDCQWLQELHSVGLLQASFRPEAEIVALRAYLRHRSELIEHRAAHIQHMQKALAQMNVQLTQAVKDITGVTGLDIIRAIVGGERDPQKLAALRQPGVKKSEAQIAKALTGNYRPEHVFALKQALALYDFYTQQVLECDAEIERQFSNLKPSVPPDDLPPLDTSDKRGSHSKNAPHYDARMLLYQWAGVDLVAISGLNEITVQTILSEIGTDLSAFPTDKHFCSWLGLAPHNDVSGGKVLRSRTLKTQNRAGQAFRMAGQSVSRSPHSAFGAFYRRMVSRLGKQQAIVATAHKIARAFYHILKHRTPFHDMGGEEYERRARQRELRNLEKRAAKYGMTLTPVAAMPAITDAIAMAIPARNENSTARRRGSSSRGPSIAGGLSKATAGVDTIDSPAMD

SEQ ID NO: 50679 - protein, 450 aa, unidentified
MAQGSGLTRGDRNRNRRIAGLREAVARDRAVLAVDLGEDKQVAVVMDHEGRVLARKVVRVKAHQLAGLLEWAAERAVKAGFAGLTVACEPTGHRWKALMGLADAAGQGFVCVQSLAVARAREGDDYTRDKTDHRDAYLIGKLVVRLDCYLPERADEAWARLRHLGARRFALVADVTSCMLQAGDLLGCAWPAPLSAAARPLESVSWLAGMTVITGRCCGDPRRLRAMGYEKFLAAVRRELPRWGGKIVRYSIVAGLWDALADTGGVAAQRPGALERLHLLLGDWCELRLRLAGTEQRMVAVLGELGLAELVASIDGMSALSGAVILAETGDPNRFASGRAVVKHAGLNPSERTSATINGQTRISRRGRPGLRAAAWRAVWGALRHNTVLAAKYAHLTSRDHGRLADGQARVACAAALLRWVWAVVTSGRAWDARIAAGEITAVPVTAAAA

SEQ ID NO: 50680 - protein, 431 aa, unidentified
MKYKQSKKQNQRITRISDKTLVVGADIAKETHVARAIDFRGIELGKDCVFSNTRTGLEQLVQWMKELQQEHAKSDVLFGIEPTGHYWFNLAEYLGLQGIPLVIVNPHHVHKSKELEDNSPTKNDYKDAKVIADLVRNGRYSEPKLPTNLYADLRILMNLREKIIVNLGQVQRRMQNWQDRFFPEYTEVFKDWEGKASLITLSEFPTPEEIVALGTEAIVKRWKKDVKRAVGTKRAEQLVETARSSIGLTEGLPAAKIEIKTLLEQYEMFARQLEEILVEVERLLAQIPGTKEMLTVPGVAVVTLAGFLAEVGDLSGYEHGQQIIRLAGLNLKENSSGKKKGKSSITKRGRARLRALLFRAVMPMVAKNAEFKAMHHYFTTRSQNPLKKKQSLVALCGKLIRVLHTLGTKQRPYDANDVLGPVRQAQIQMAA

SEQ ID NO: 50681 - protein, 396 aa, unidentified
MNPQLQVAVDVGSARHRVAIGLSEGRLLEEFAISHDGPGLAEFFVRVERQERQWGRPVAVAMEGYNGYARPLDQRVLQHGYRLFNVNNLKLARYKEIFPAPAKSDAIDTRKMLELFALNEQLPAARGVLQEVAPVPAAHAELKILTRRRRQLVNDRKRLSTRLQVDLQAVCPGLLALTGHVTNDWFLNLLTCRAELSQLQRLRAKSLLAVVGIGPVYAAKVAQWQRTATFADTVNMIGPMVVEDAQRLQALGAQIRALEDAMAPVSRTAPIARRVDSIPGFGPITAGEMAGEIGTLARFRDEGSLALYAGMAPLDDSSGKRLRSRPPRHVNARIKAAMMIAIVRHMACVPQSRAFYDKKRAQGKTHQQAVRALGRHLIRVLWSMLTHDRDYYLPTS

SEQ ID NO: 50682 - protein, 327 aa, unidentified
MNSICLSTDSLPVLGLDVAKKSVQAELRRAGGKTVRFGFENNAKGFAQLARVLKEHNVPKVWAGLEATGPYSHALALWLHGAGHRVSLLNPRRVKQYARSAGNRHKTDLLDAAFIADFVCAHRPAPWQPPTLEVAQLRALVRRREELSLMLQAEKNRLEGVAPNVSCSLRRIIATLSAERARLEKLITQQIRSHQQLSCDHQLLCSIKGIGSLTAAILLAEMARPGQVERARQAAAHAGLVPRREESGTSVRRNRGLGKEGNRYLRKALYMPALVAIKYNAPLRHFASRLRAAGKPKMSIVCAVMRKLVHIAFGVLKHQKPFNPSLA

SEQ ID NO: 50683 - protein, 343 aa, unidentified
MQTIATIGLDIAKSVFQLHGVDGAGQVVVRRQLKRRQVSAFSAKLAPCLIGIEACASSHYWARELQALGHTVRLIPPAYVKPYVKRQKNDAADAEAICEAVTRPNMRFVPIKTIEQQGCLVLHRTRHLLVRQQTATINSIRAYLAEFVLVAPVGRRGVEQLLEVIADANDARVPEVARACVAILGVQLRQLKAQILELDRRILVWHRSSETSRRLDQIPGVGPVLATALVASIADPKVFRSGRDFSAWIGLVPKQNSSGGKDKLGNISKRGDRYLRSLFTAGALAVIRYAKIHGTKHRPWLVALLARRPTKVAAIALANKLARIAWALMTKGSRYKQPAALAV

SEQ ID NO: 50684 - protein, 410 aa, unidentified
MRTLVERACGLDVHQAVIVACLLVGKAGGKVRKEVRSFATTTAGLLTLRDWLKDAGCSHVGMESTGVYWRPVHAILEDDFVVVVGNAQRIKNVPGRKTDVKDAEWIADLMRHGLIPPSFVPERPLRILRDLIRFRRSLIEARSNCRNRILKVLESANIKLANVASDVFGVSGTAMLEALVEGTKTPPEIANLARGRLRKKLVQLELALRGSLSDDHRFMLDQLLRSLEEENRRITATEDRITTKLDPYRQEQRLLMTIPGVDWAVAATMIAEHGVDMARFGTPARLSAWSGVAPGNNESAGKHRRTGARKGNPHLKTALYIAAVSAGRTKDTYLCDKYHRIRARGGSGRAAGAVAHKIVIAAFHILTTGKPYHDLGGDYLDKRTERRTKQRLVCRLQRMGYHVTLQPLAA

SEQ ID NO: 50685 - protein, 348 aa, unidentified
MTHFVGLDVSVKETSVCVVDAAGRVILEQKVPTEPADIITLLTSLGVGFCRIGIEAGPLSQWLVNALTEADLPVICVETRHMKALLTAQQINKTDRNDARGIAQMMRVGLFKPVHVKTLVAQEQRMLLTSRKLLQRKLLDLECDLRGTLRNFGLKVGIVSGGRYEARVHELVTDSPRLAAIVGPLLNVRRVMRQQLAVLHKMLLDTVRDDPVCQRLMTAPGVGAVVALTYRATVDQPQRFVHSRAVGAHVGLTPKRYQSGEVDYDGGVSKCGDALLRTMLYEAAHSLLIHSGKWSWLKAWGIRVAQRRGMRRAVVAVARRLAVVLHRMWVDGSEFRWSKNSAAVLAPA

SEQ ID NO: 50686 - protein, 307 aa, unidentified
MFVGIDVAKDRLDVHVRPAGEAFTVARDGEGIEELVGRLSKIGPTLVVLEATGGFETIVAAGLGAAGLPVAVVNPRQIRDFARATARLAKTDALDAAVIAHFAEAVNPPARPLADEQSRLLGELMARRRQLIEMIGAESNRRRMLTVRRTLKSVDRVLATLKAQLEQIDDDIDTAVRGTPAWREAEDLLISVPGIGPRIARTLIAELPELGRLGRREIASLTGVAPFNRDSGTLRGRRTIAGGRPVVRAALYMSVLVSIRRKLPLALTYHRLRAAGKPAKVAIVACMRKLVTILNAILRDKKPWLTA

SEQ ID NO: 50687 - protein, 408 aa, unidentified
MRIIGLGVHRTFAEVAIREHGRVRPAGRISTTTAGLQLFARSLTHRDEVVLEATCNTHAIARLLRAHAGRVVVSNPLRTRAIAEAKIKTDKIDAAVLTQLHASGFLPEVWMPDATTEALRRQVSRRAQIVRHRTRLKNQIHAILHRNLLPRCPASDLFGRKGRAWLTTQSLPADERAAVTSLLRALDHADEDLTELDRDLASSILEDAGVRRLMTIPGVDFAVAVGLVAAIGDVTRFRSPQKLVSYFGLNPRVRQSGLQPAHHGRITKQGRAHARGMLVEAAWVAAKTPGPLRAFFVRVRGRRGHQIAAVATARKLAVLTWHLLTKQQDYAWARPSLTEQKRRALELRAGQPAERGRRGRAHAYNLTTLRTRERAIGEQAERAYQTLVTHWRPQRSKRGTGATNAARR

SEQ ID NO: 50688 - protein, 345 aa, unidentified
MSELYEGRQFVGMDLHRRRSVLVRMSETGELLETVRILNDRDVLAEVMSRAGESPEVVLEATYGWYWAADALAELGATVHLAHPLGVKGFSFRRVKNDQRDAADLADLLRMGRLPHAWIAPPQTRELRELVRHRAKLVAMRSQCKAHVHAVLAKGGVWVPMTDLFGVEGNLLLDKVTMPAPYKQRIASLRRFIEAFDAEIDLFTTLAQRRLGHDAGYTAIQQIPGIGPVLAAVFVAEIGDVHRFPGPAQLTCWAGLTPAHRESDTTVHRGAITKQGSRLVRWAAIESVKVLPDSSRIGAIREQVASRRGNRNIGAVAAARRQLELVFYGLRDHHIRALHQRPRAA

SEQ ID NO: 50689 - protein, 343 aa, unidentified
MDHFAGLDVSVKETSVCIVDDTGKIVREAKVTSEPDALLAVLTSPAHHFKRIGLEAGPLSQWLFSALAEADLPVVCVETRHMQAVLKAQINKTDRNDARGIAQMMRVGLYRPVHVKTLRSQKLRMLLTHRKLLQSKAIAIENDLRATLRNFGLKVGMVGTVKFEARIKELVENLPDLAALVEPLLIVRRVLREQIIILHRRLLAIVRDDDVCRRLMTTPGVGPVVALTYRATVDVPARFRKSKAVGAVFGLTCSKYQSGEIDRSGRISRCGDQMMRVMLYEAAQSMLRSKKWSWLKAWAMQIARRRGMKKAIVALARRLAVIMHRIWVDGTEFRWTREQAAAA

SEQ ID NO: 50690 - protein, 371 aa, unidentified
MKQQTKSSNITVGLDLGDRRHRFCALDERGEVVEQDSICNDRVSLRKLAGRYHGALGVMEAGAHSPWISRFLEALGWRVVVSNPRKVRAIYQHERKSDQRDALMLARIGRMDLALLYPVRHGTAEAQQDLLRIKLRDSLVRARVAVINSVRFTLKSLGYTVRNPSSERFHKVVMEEVPESVREMITPSVQALAELTARIKMLELEINTLAQMKYPQSAQLQQIPGVGPITALYFVLKIEDPNRFAHVRDVGAYAGLCPRRDQSGESDPQLRISKCGDAYLRRLLVSAAHYILGPFGPQSALRAYGLMLAADGTARAKKRATVAVARKLAVLLLSLWKSQQPYQPFPGACLNGEQEDRRSGTIALHRMEATD

SEQ ID NO: 50691 - protein, 316 aa, unidentified
MANQSKSKLGINVGVDVGKSKLDFCIHEHELHWQEDNNPEGIKHALKRLAYYRIERLVVEATGRYELELAEAASSKGIPVVIAKPLSIRRFAGAVEQLAKTDKIDAKVIAQFAAVIKPEPSKLVGKQLRAIKDSLTRRRQLIEMRTQELNRLQMMKSLKTSVERMIRYLDQEIERIEQKLGKAVEAHAEWSERKAILETTPGVGNTLCYTLLADLPELGTLNNKEIAALAGVAPMNRDSGKMRGKRKIQGGRANVRTILYMATLSATRCNPVIKSFYQSLVKQGKHKKVAIVACMRKLLCILNAMVRDGKCWDFES

SEQ ID NO: 50692 - protein, 334 aa, unidentified
MDTETGEFGERRLAHGDGEAEKFYRDLQQAEISVRVGMEATGHARWFERLLEELHFELWIGDPLEIRATRVRKQKTDRHDAQLLLKLLLEDRFPRIWVASWENRDLRQLLWHRHRLVQMRTRIMNQLQAVALNEGVRQKKRLWGQAGRAQLESFVLAPWASRRRKELLELLDRLNPSIRELNAAVEQEATRRPEVRRLMTHPGVGSLTALAFVLIVGTPQRFACGKQIASYVGLVPTEEPSGSRRRLGHISKQRNSLLRFLLVEAAQATVRSDPDWRRRFLHLAMRRERGIAKVAMARKLAVRLYWMWRKEWDYEQVKRFGSHAGQPENPLGVK

SEQ ID NO: 50693 - protein, 346 aa, unidentified
MMIIGCDFHPNWQQVCWVDKATGETGEQKLVHASGEAEKFYRQIAAPALIGMESTGNCQWFVEMAAAAGHQVWIGDAAKIRASEVRQQKHDKRDAALLLQLLLEGRFPRIWTPSREQRDMRQLLIHRNKLVRLRAQAKNGLQHLALNQGVQKKRRLWSAAGQQLLRELPLQPWASRRREDLLQVLAMLDQQVQSLDLAVRAAAEQDAHARLLMTQPGVGPVTSLAFVLTMGDVSRFPRGKQVASYLGLIPREYSSGGHQRLGSISKQGNRFMRMLLVEAAQVAVRCDPGFRNEYRHRCHRKPKGVAKVAAARKLAIRLYWMLRTQKRYPEIVRIESSSRVPLAGAS

SEQ ID NO: 50694 - protein, 345 aa, unidentified
MSEVSTIGLDIGKTVFHAHGADASGRMIFSRRLTRARLLAFFADQPRCLVALEACGGAHHWARELASLGHDVRLIPPAYVKPFVKRSKNDAADAEAICEAAQRPSMRYAAIKTEAQQAAGMVFRTRDLLVRQRTQLINAIRGHLTEFGWVAPKGPSHISVLAGLLDESEELGASLPEAARTMFVVMTEQLEQLNKQIALLDKEIARRAREDASARQLMTIPGIGPITAIAILALAPPPESFAKGRDFAAWLGLTPRQHSSGGKEKLGSISKMGERTLRRLLIIGSSAVVLHASKRGAPAGSWLEQMMARKPRMLVTVALANKTARIVWAVLTKNEEYKAPVAAAA

SEQ ID NO: 50695 - protein, 461 aa, unidentified
MRSRPRPDSIGFGHASSGAGVTTPRQYDLQPGPANPKHIMNTTDYAAYIALDWGDTQHAFALQMAATSEVETGQFDAGAEATHEWLKQLGARCAHRPIALAVEAGCDALIAALLEHKWIVIYPVHSSMSARFRKALVPSGAKDDVPDAMVLLTLLLRHGEQLKPLQLDSAPTRELSALVLARRGAVDRRSQVSNQLRSVLKGYFPQALKLVGDEMAGTLALDFLDRWPDLATLQKARAATVRSFYFQHSVRRPELVEARLRQIAQAQPLTQDTATIVPAVLQIRMLVAVLRTLQRHIAQFDACIAEKFTAHAESAFFRQLPGAGPQLAPRLLVAFGDCRDRYPDASSLQKYAGLAPVKEKSGRQLWVHWRWNAPIFLRQTFVEWAGQTVVYCGWARAYYMHQKRAGKGHHAIIRALAFKWIRILWRCWQRQEPYDEARYLDALRRRRSPLIADLDAAPTQA

SEQ ID NO: 50696 - protein, 418 aa, unidentified
MKVVFPTCCGVDVHKSFLVATIIKTPKESLQPSYQKKRFSTFNSDLNRFADWLHGNDCLDVCMESTGKYWVPVFNILEKRGIRVTIANPKWVKAVKGNKDDTKDSKWIGDLFRIGLVKSSFIPAKDIRILRELTRYRYKLTSMKSSEKNRFQNAFTVCNVALDSVVSDMFGKSATAITDYLTSDEDFDPQHCVSLLHRSLKKKAEDVLSSIEGYEITLEQKCRIGIVRDHLHYIEKLIERVDICINTMVEKYDGAISLLRTIPGIDRSSAITVISEIGVDMAQFGSSKRLCCWAGLTPGNNESAGKKKSVRISRAGVYLKPVLVQAAHAAVKDKLNPYYALKYERIAKRRGKKRAIVAIARMILTAIYSMLSTGEIWNPVDLFKVDMPEHLKEQQLQKAMKQAVRFLKAQGLTVLDSA

SEQ ID NO: 50697 - protein, 456 aa, unidentified
MKIPQSTIRLLTGRLVKILLNREVSTMKSNTQNAKIEAITEKTLVLGIDVGSETHYARAFDYRGIEYSKKPFKFSNTEAGFVTFKEWILDLKEKHEKDKVVPGMEPTGHYWFNLGKFLQDNEMKPVLVNPHHVKKSKELDDNNPTKNDRKDPKVIAGLVREGRYMIPYLPDGVYADLRTASNIRFQLQAELTRIQNRISRWFNIYFPEYKTVYGKPDAKSGMLILKHAPLPEDILTLGIDGVNQIWRDAKMRAVGKARAKTLIEAAEHSVGSKEGAISARMEIRMLLEDYESRNIRLQEIMTLIEELVNQIPMAEKLLEIKGVGIKTVSGFLAEVGDISRFNNPKELQKLAGLALVENSSGKHKGRTTISRRGRKRLRYLLFEVAMSLVAKNPEFRELHTYYTTRRLNPLKKMQSLMAVAAKLIRVFYVMLTKGVDYDPKKMVGDIKRPAVYLQAA

SEQ ID NO: 50698 - protein, 330 aa, unidentified
MKDITAVAIDTAKQTFYLVGFSRTGKVEGRRKLGRSALKRWLAKQPPLTVFMEACGGSHDWGRVLKKQGHTVKLIAPQFVKPFRQGQKNDWNDALAIGIAGLQPTMRFVAVKSEDQQSLQALHRVRSRVQHDRVATANQLRGLLYEFGVVLPRSIAVLRKRVPEVLEAGVLPGVMAALVRDLLRELRELDERVQRYTDLIEGMAKADPVACRLMELSGIGPITASALVADVADARVFRNGRQLSAYLGLVPRQFSTGGKPRLGTITKRGDRYLRQLLVHGARSVIRHLGDKQDRISCWLRELIARRGINKATVALANKQARWAWAVMVKA

SEQ ID NO: 50699 - protein, 389 aa, unidentified
MLHDHLSDGPAAIRTQFGAIFVSLELSRSNWLVTSLSPGKGEKMSKHSITAGDVAGLLKLFADLKRKAMARTGQSYPIITIQEAGLDGFWLHRALQQEGIESHVVDPASIATPRRRRRAKTDRLDGETLLRALLAYKRGEPRVCAMVVAPSPEEEDRRRLCRERRTLIDERIAHVNRIKGLLFAQGISGYAPLRRDRRARLEALRTGDGRALPSYLKTQISRELDRLELLLDQIKAVEAEQDALLAAAGKGAGEQAAPDPVTMLLALKGMGANFTAVLWSEAFYRQFSNRRQLAAYAGLAPTPWRSGSIEQEQGVSKAGNPRLRSTMIQLAWLWLRHQGQSALARWFKAHSQRGRKTAIVALARKLLVALWKYVTAGVVIEGAVMKSAA

SEQ ID NO: 50700 - protein, 362 aa, unidentified
MAFELSEKTWKLGFTTGHGQKPRERTVTARHHEHVLNEIAQAKRRLGLPATAPVVSCYEAGREGFWLHRFLQAQGITNHVVDSSSIEVNRRRRRAKSDGLDVRKLLSMLMRYAQGERQVWQVVKVPAVEAEDHRHLHRDLETLKQERASTTTRIQGLLSSQGIRLTSLSKLPEQLEALRLWDGSPIPPGLRRRVLRVYAHHTFLSEQIAEVEAERRAQLQTSTEAHIDKVRQLMQLKGIGINGAWLLVMEFFGWRAFKNRREVGGLAGFTPTPYQSGESAREQGITKAGNRHVRWMTTELAWSWLRFQPDSALSCWFRERFGSGGKRLRRIGIVAVARKLLIALWRFLETGVFPAGAVLKEG

SEQ ID NO: 50701 - protein, 387 aa, unidentified
MCLPPSGWLSNELSGQPVSLLGCGSKEARTQSTRIRSAHLGFTVNEKGIVMTMIGIDPHKATHMAVAVDDDEQVIDEFTLRSSNDQAERLTSWAEGLGKREWAVESANGLGYLVARQLVACGETVFDVPPVLAARVRVLGSGKSQKNDPNDARSIAIAALRSDRLRVVEPDDHVVVLRLLVKRHRDMARLRNKHCSRLHALLIELEAGGIGGKISVTNASELLDRITVTDEAARYRVLVAREVVDDIARLDTTLKASKKRIAVAVQASGTSLTDIVGVGPIGAATIIGYTNDITRFPTKGHYATYNATAPIEASSGGNKRHRLNLRGNRILNHAIHIAAVTQLRHDTNGRIYYDKKIAEGKTPKEAIRALKRRISDAVYRRLAADNQ

SEQ ID NO: 50702 - protein, 337 aa, unidentified
MTMIRIGLDTAKHVFQVHGVDENEQTILRRQLRRGEVGKFFGKLAPTRIGLEACGASHYWARLLRGLGHEVVLLPPQYIKPYVKRGKNDANDAEAICEAMSRPGMRFVPIKSAENQAALMLLGVRNLLIKQRTAVINTIRGYAAEFGVIAAKGPVKVAELLQQAYAEEAGVPVLALDMLRLLAAQLDTFDVKLKLIETRLIASHRENPVSQCLASQPGIGPIGAVSFALRVTDAKSFRSGRHFAAWLGLTPKDNSSGGKRRQGRISRQGNEALRKLIVLGATAVIRFARPGRASPWLLNLLARKPKKLAAIALANKMARTLWAMMVSGELYRRPLPA

SEQ ID NO: 50703 - protein, 421 aa, unidentified
MENTLARKLKQVPEGYLIIGVDPHKKKHAAVAITQDFALRDRFKFDNTREGLEFLLRRVKAEMVKSNCRGVMFAIETGGHYWRNVAYYLDERGIPFRFINQYTLKRRREGKDLNRRKNDYRDSEVAAQLLCTGEFVESVIPQGVYAELRTAHNAYRRLVKERTRITNLIKGLLDSLFPEFVQVFKDPCGLTALSVLSTCAIPGVIAGMTEDEFVATIEVKHRGRLMRKKLMALHYVARSSIGVAAGAKSVSSELSFLVEKLKLIKGHICSIERTLVRLVDETEEGKYLLSIRGLNYIAVAGLLAELGCFKSYRSSKQMIKMAGSNPTESESAGKKGTRTPMSKQGRPVLRYCAWTSVVPMLRFNPDFRAWAKQRRERPVHANPLGGREIVGAALNKLLRLSFALVKNQTFYRSPQLVQVIG

SEQ ID NO: 50704 - protein, 411 aa, unidentified
MHNRQNYLYVGVDLHKEHHTAVIINCWQEKLGEIQFDNKPSAFSKFLLEVETYVSDGLSVVFGLEDVGGYGRALAKYLVDHEQVVKEVNPALSFLERKSQVMIHKNDSWDAECVARILINKFNQLPDAKPNDLFWSIQQLVSRRNALVKAQSALKNQLHIQLNHHYPSYKKFFSELDGKTALAFWQQYPSPSCLEGANIKQLTAFLLDVSNNTCSVKKASEILKLVKEDGHTMKEYQETRDFLVRSIVRDIEFKKTEMKYIERELKQLVKLLDYQLETMPGIELVTASALIAEIGDVRRFPNANKLARFAGIAPVYFGSGGKGKTHKSKQGNRALHALFYNLAVQQVQVAKGSKMPRNPVFHAYYQKKLKEGKTKGQALVCIMRRLVNIVYGMMKYTTAYELPIVEEKEVV

SEQ ID NO: 50705 - protein, 353 aa, unidentified
MKYHTSTTQFNCGIDLHARQMYVCVLDRDGKKLVHTNIKNNDFAYFLKLVAPYRHDLTVCAECMFGWYWLADACADAGIHFVLAHALYLKAIHGGKNKNDRLDSEKIAHLLRTNFIPPGYVYPTEKRPLRALLRQRLLYVWNRTELLARIQSHQLAHNRPTTRQTLYNREPWGKNLLASEPDPVRQLALQNDLALIGHYDAQLASLEKELLKLTKQTASRDFTLLQTVTGIGDYLGLTILHEIGDIARFPTVKDFLSYCRLVKGTVASAGKIKGLRGAKLGNPYLRWAFGEAAIIAKRDPLLGPLAQRLEARLNNKFKANTVLAIKLARAVYFMLKQKTVFDPERLVAALSKN

SEQ ID NO: 50706 - protein, 339 aa, unidentified
MQLYAGLDLHSRNTFIGIMDKEFKRVFAKRVSNNLPLIIKTLEPFQDQLKGLVVESTYNWYWLIDGLMDAGYDCLHLANPSAMKQYEGIKHTDDQHDSFFLAQMLILGILPQGYIYPKEDRPVRDLARKRLFLVRHRTSHILSLQSLITRCCAQRVSASEIRKFTVEDLQQLLKQEHIVLSAQANLDTIVFLKQQIQRLEKTIQNKVKLNKAFQQLMTVPGIGLILAMTIMLEVGDIGRFAQVGNFASYSRCVSSQRLSDGKSKGHGNRKNGNRYLSWAFTEAAHLSRRYNEHFRSYYNRKVAQANTSLATKALSNKLARLCYYIMRDQVPFRQELLSH

SEQ ID NO: 50707 - protein, 348 aa, unidentified
MPLYGGIDLHSNSNQAAILDEDRKRIVRRKLKNDPDEILRFWDPYKPNLAGIVVESTFNWYWLVDLLQENGYRIRLANPAGIQKYSGLKHADDNHDAFWLAELLLLGILPEGYIFPKELRALRDLLRKRLHLVRVRTSLILSLQNIVTRNFGVTLSSQDLKALREDRVQIYLQENEDLLLAGSASKTAVDTLTRQIHRIEEAVVKKLKLKIPYTHLLGLPGFGRIVASTVQLETGPIERFSRVGCYASYCRKVNSQWTSNEKVKGHGNKKNGNKYLAWAFGEAAERARIFHKASREFYQRKLRQRKSPALAHGALAHKLARAAFHILRDTVPFDHEKMFGYPEAPLEN

SEQ ID NO: 50708 - protein, 407 aa, unidentified
MEVLYPRCAGLDVHKDSVVARVRCVSVPMADVVRTFGTTTRELLALSDWLQSLGCMHVAMEATGIYWKPVWHLLEGNFELVLANAQHIRNVPGRKTDVNDATWIADLLAHGLIRGSFVPPAQIQELRDLTRTRKQLVREISQHTLRIQKVLEDANIKVASVLSNILGHSGRAMLAAIIDGEEDPQRLAHLALGTARKKHSELVEALRGHVTPHHRTLLKLHLDLIAALESALREVDAAVGKALAPISYATDLLNTIPGVGDVVAHVIVAEIGADMSRFPTAAHLRSWAGLCPRNDESAGKRRSTRVRKSATWLKTTLVTAAWAAVRKHNSYLRGQFLRLKSRRGPKKAILAIAASMLTAVYFMLRDGVVYHDLGHDYFERRDKTKAINRLVRRLHDLGCEVQLKPAA

SEQ ID NO: 50709 - protein, 343 aa, unidentified
MQIHSVGIDLGKTTFHLVALSAAGKVLLRKKFTQKQLITFTANLQCSLIGMEACAGAHFLSRTLREQGHDVKLIPAQFVRPFVKSNKNDFLDAEAIAEAVSRQNMRFVPIKTDDQLDLQAIHRVRDRLVARRTSVINQLRAFLLERGMTFAKTPFKLKVAMPDILENAEANLTPRIRNLVSLLWSEWKDLEQQIVGLNEEIEQIASSDPACQRLRQIPGIGPLVATAIVAAIGNGAAFHKGREFSSWLGLVPRQHSTGGKARLFGISKRGNRSLRKLLVHGARSAVLRVKRERSPFGPWLDTLETRAPINVVVTAAANKLARIAWAVLSSGQDYRAAVNSVAA

SEQ ID NO: 50710 - protein, 338 aa, unidentified
MTVVTVGIDLAKNVFAVHGVNAAGKAVLVKPLVRRAKLLELIATLPACLIGIEACTGAHYWAREFQKMGHTVRIMAPQLVSPYRMSGRHGKNDAADAAAICEAVARPNMRFVPIKSVEQQGQLFVHRAHQGYVSERTALINRIRGLLSELGIVLPQAFKAFLSGVAQVLEDLPGYCNQVIGDLLNELYHIEEKIKNSEKLIQQLARDNSAAQLLMQFRGIGPMTATAIVASIGNGHDFKNGRQFSAWLGLTPRQQSSGGKARLGRITKAGDSYLRTLLVLGARSVLLGAAKNDDPVSRWALQLKEMRGYGRALVAIAAKNARMCWAMLHLRDEFRFPA

SEQ ID NO: 50711 - protein, 385 aa, unidentified
MRTVCGLDVHKDSVFMCILDSKGEKIEEKFSTLTPDLDRMRDIMVEHGVQEVAMESTSIYWMPVWNILESDFSLKLVNPLFIKQLPGRKTDVKDAHWIATVLQKELIRGSYVPEHAIQELRLIERRQADLRKKGVRVLQRIDEALQRCNIRLSNYVSDVESKSMQKVIAAIICGERDGIKLARLVHGRTRNKYGMKVLVDSLTGCITPSVVFALAQLKEELEMIRKHEEACLKEMERLCMELYAAEVELLDTIPGVAKQSAMTIIAELGVDLKMFATAAALVGWLGLRPRNEESAGKIKSKKTMHGNKYLRVILVQCAWAAIREKGSRFKNKYNMLRKRMSPQKALIAIARKLVLVIWNVLTKKEVYNPLLGHRPALVSQHNIVR

SEQ ID NO: 50712 - protein, 429 aa, unidentified
MNNPYISVGIDVGADFSYVCIMMPSYELFCKPFKVVHTDLSSMNKAVSTIKKAEVEYQMKSQIFLESTGIFHFPLFCFLRESGFEVSVINPLIIHSTKNMDIRKVKNDKFDSKKIAKVGLDPTIRKSLIPDEFVLNLRFLCREYYSLSDDRTALINKLSGYVRLVFPAFIGIFSQLAGGASLAVLNYTQSLDHLLSASDDEIIGLIAKAARKGKKYAAEKYIAILDAATVSKTLSMQLPNVFTLIHSIINHISLIDQQMDDILKTINSILDDNHDHVFVRQIQLIDSIPGVGFLSAVTIMCEIGDFKAFKNPKQLFSYFGVDPSVNDSGKFKGSRNHMSKRGSRFARRVLYSIALASIRNKPNSQPMNAVLQAYYQGKVVSKFKKVALGAIMHKVCNIIFAVLRDDSSFVLRSPKEHICLHALSASNAA

SEQ ID NO: 50713 - protein, 280 aa, unidentified
MNIKRIGIDLAKQVFQLHGVDHQEKPVLRKQLRRNQMLSFFANLSPCLIGMEACSSAHYWARELQKLGHTVKLMAPQFVKPYVKSNKNDANDAEAICEAVSRPTMRFVAIKTVEQQDIQSVHRIRSELVQQRTAKVNQIRGLLAEYGLVVERRVEKLRKALPLILEDAENGLSADFRVLLEELQQDLITLDNRVGEMDKKIQLLAGANAAAKRLQQIPGIGPITATALVCAIGDGKQFKRGRDLAAWLGLTPRQHSSGGKDCLLGISKRGDAYLVPDRKV

SEQ ID NO: 50714 - protein, 409 aa, unidentified
MLLLVGDDWAEDHHDVEVQDETGRRLGKARLPEGIAGIARLHALIGQHIGDDDEPVEVVVGIETERGPWVQALLAAGYQVYAINPLRVARYRERHQVSGAKSDPGDAHTLADMVRTDRHQLRPVAGDSDLAEAIKVITRAHKTLIWERTRHTLRLRRALLDFFPAALAAFDDLDAPDTLELLAAAPDPVTAAGLDGEQITTALRRARRRGIPDKVAKIQEALRAPQLAQPSVVAGAYAVTVQAQVAILTTFNTQITLMEQQVGMHFGRHLDAEVYLSQPGLGGILGARVLAEFGDDKARYTDARARKNYAGTSPITRASGKKKTVLARYVHNDRLLDALGQQAFAALKASPGARAYYDQQRARGIGHRAALRQLGNRLVGILHGCLKTGTQYDEHTAWAHHQHDQQTAA

SEQ ID NO: 50715 - protein, 418 aa, unidentified
MKIINSILVGLDWADQKHDLCWRDPDTGKIQTMVLKHSPELINEWVCDLMSRFPGKRIAVCLEQTRGAIVFALMGYNTVDIYPVNPSTMSDYRKAFSPSGAKDDPSDAALMLELLELHPESLKLLKPDTENTRLLRSLCEDRRKAVDMRTALCSSMRSRLKGYFPQALKLVSEQLFTELTCAFLMKWPSFESVAAARSSTVRSFYYAQQSRSEKCIKERLELVSSSRPLCSDTSVVNSSVMWIQMLVKQIRVLNREIKNYDKRIKDLFGNHEDKFIFKSLPGAGQQLAPRLLTSFGTDRDRYDKAEEVSNYFGISPVIVRSGKQKWVHWRWHCPKFIRQSVVEFAGKSIMYSAWARIYYEEQIKRGKGHHAAVRALAYKWIRIIFYCWKHKVAYDEKTYIASLSRHGSWIAENLKKTA

SEQ ID NO: 50716 - protein, 438 aa, unidentified
MSDLPVLEPRATFVDVGSEQLHVSIAGGPPRVFGTVTAQLAALRAWLLAEGVQAVAMEATGVYWLPLYGVLEDAGLAVTMVNGRQIRNLPGRKTDMLDCQWGATLHAHGLLQAGFVPPAQIRRLQDYLRLRADHITLAASHVQHLQKALERMNVKLHDVISSLTGVSGLAVVRAILAGERDPQRLLALCDVQIQRRKAEQVKESLRGTWAAEHLFALKQALRSWEHYQEQIAECDREIETLLHEMNGGDDPPAAPPKRRQSPGVNAPAIPQLRELLVQLCGGQDLTSLPAHGAYSVLQLVGEVGTDLTKWATAKRFTAWAGLAPGSHQSGKRHHVVRRKRNRAGRLFCVMARALARSKDIALGGFYRRLAARRGGLVANIALARKLATLFWQVMVKGMDYVEHGLAAYEAKVLETKQRTLRRLAAQLGQQLVPMPHTA

SEQ ID NO: 50717 - protein, 346 aa, unidentified
MMIIGCDFHPSWQQVSWLDTETGDCGERKLVHASGDAKQFYEQLAAPVLIGMEATGNGQWFVELVEDLGHEIWIGDAAQIRASYVRKQKTDKRDAAHILRLVVEGRFPRLWTPDREQRDLRQLVLHRHKLVEIRSRVKNELQHLSLNKGMQRKAKLWSQAGQKLLRELALKPWAACRREDLLGLLSMLNQQIGKLDAAVQTAAEGNPQAKLLMTQPGVGPNTALAYVLTIGEVSRFQRGKQVASYLGLIPREESSGGRQKLGAITKQGNRMLRSLLVEAAQIAVRYDPEMKKQYLHRCHQKPKGVAKVAAARKLAVRLYWMLRTNVSYPEIVRIESSPRVPLVGAS

SEQ ID NO: 50718 - protein, 341 aa, unidentified
MKPEMSVLGIDITQRVFHAVGMDERGRIVWRKRLSRHDLMPLLAKLPPVRIGMEACGGAHDGARRFREHGHEVKRMAPQFVKPYGKANKNDSRDAEASAEAVTRPTRRFVPIKDVDQQDIQALHRVRERLMGERTALVHAVHGLLHEDGMVMPKGGSKCRQAVVGKRESEKAKLTPLSQEMLWQVVEEVAALEAQLASSQEKLATLAQTHPACQRLMTIPGIGPCTATALVAAVRDASAFKNGRQCAAWLGLVPRQHATGGKERWLGISTRGDSSLRQLLIPGARATLRWVGRKTDRRSHWMRQLVERRGTNRTAVAVANKNARIVWARLTSHQDYQPATS

SEQ ID NO: 50719 - protein, 403 aa, unidentified
MSSAVSYLCRRMKGSTALVIIGVDPHKRTHTASVVETGTDKVLATLQIDASLAGYRRLLKWASGFEQRRWAVENARGLGRHLAQWLVAREEVVDDVPSTATARFRELSRGGRRKNDVIDAAAAASVAALRGDANPVVADDLTTVLALLDERRDNMVTQRTRLINQLHALLRDLLPGGAPTALTAVDASRLLTGVRPAGPVEAARKHLARDLVAEIRDTDQRLKTLITQIADTLDARCTRLRDVAGIGPVIAGRLLGRTRRAGRFRSASAFASYAGVAPIEVASGDHTRHRLPRGGDRQLNLALHIVALTQVRMRESTGRAYYDTKVAAGKSHNEAMRCLKRRLADRVWRLMLSDEHRLAAGPGGHSGATLTSSAAGSTPTTSSSDKSLPGPADRNSTTPSPAA

SEQ ID NO: 50720 - protein, 334 aa, unidentified
MQNVTLIGIDLGKHSFHVHCQDKSGKALLRKKFTRAKLIEFLAGCTSATVVMESCAGSHFMARRIADLGHEAKLISPQFVRPFVKGNKNDFVDAEAICEAASRPAMRFVQPRTEAQQAMRALHRVRESLVRDKVKTTNQMHAFLLEFGISMPVGIAVIKRLSTVLAENDLPPYLAQLLMRLHAHYLYLIEQITELETALEQELSRDDVGQRLQTIPGIGPITASVLSSQLGDGKQYANSRYFAASTGLVPRQYSTGGKNTLLGINKRGDKNLRRLLVQCARAFIQRIDNQSGKLADWVRTQLARKHFCVVCCALANKLARIAWAITTRQTVFER

SEQ ID NO: 50721 - protein, 460 aa, unidentified
MQQPVEVQVDEHEPIVERVAAIDVAKASGMVCLRIPHETIPGRRVTKVWPVQSTTAALVELGDHLRAERVTRVVLESTSDYWRPFYYLLEAAGLIVWLVNAAQVKNVPGRPKTDKIDAVWLAKLAERSMLSPSLVPAEPMRQVRDLARARYDLVEDRTRVKQRIEKLLEDALVKISSVLTDVLGVSGRAMIEALIAGQRSPKVLAELARGRARTRRADLERALHGRFTDHHAQLARLLLGQLDELSARIGEVTTLLDAAINVLPTPTPGARTAASTSNDPADRTDSPSTAQPPPVAYTSAITRLCAVPGGGPDSVRAVIGEIGLDMSVFGTPQRLCSWAKVAPRTAQSGRKTGRARTGRGNPYLKSALAQIATGAAKTDTFLGERYRRLIKRMPKAKALVALQRSILVIFFHLLNDPAAEFTDLGSDFYQRRIDRARRTTHLLRQLHALGYEVQLTEPAA

SEQ ID NO: 50722 - protein, 366 aa, unidentified
MKRVMAGMDLHGNNVMIGIVDADGTRLRHRRLACDLEEVIAFLNPYKPFLDRVAVESTFNWYWLVDGLKAAGFPVVLANPAKIDQYEGIKHADDKNDAYFLAELLRLGILPTGYIYDPESRPVRDLFRRRMGLMRLRTTLLLSSKSLHHRTTGHSLAVGQLKALSPADLAAFYSHPANRLTAEIQKELIEALNQCIRRIEKMVASEALKKPYYKRLQTLPGIGVILGLVISMEVGEIERFAEPERFANYCRTVDSNRVSNGKKKGSNNEKCDNKYLAWAFVEAAHAARRYDAHCRRWFDRKSAKKGTTIATKALACKLAKAAWHVMAEAVDYDPAKMFPELAAGRIEQISGRQTSASKGVGPEPED

SEQ ID NO: 50723 - protein, 384 aa, unidentified
MSADPISSPAAIRIDLGAIFVSLELSKSTWLVTSLSPGSEKMSRHPVPGGDIPALLACLNALRDKTQAREGRRYPVIAIQEAGLDGFWIHRALVSENWITSHVVDAASIAVSRRHRRAKTDRIDGEMLVRTLMAWMRGEPRVCSMVRVPTIEEEDRRRIGRERKALVKERTVHVNRIKGLLFTVGIRDYVPNRRDRRERLEELRTGDGKPLPRHLKAQLSRELDRLELLAEQIKRVEAERDDLCAAANETAPQVMLTTLKGIGPEFANVLASEGLFRHFDNRRQVAAYAGLAPSPWRSGSIDREQGVSKSGNPRLRTTMIQLSWLWLRFQPDSALARWFQERISHSGGRGKKVAIVALARKLLVAFWKFAMSGVVIEGAIMAKA

SEQ ID NO: 50724 - protein, 320 aa, unidentified
MQQLGIDIAKDKFDVALVIDANADPIRFKMKSFSNSIGGFAKLTDWIGAKASGPVHVCMEATGSYWEQLAEHLCDAGLLVSVVNPAPIKKESESWSMRNKTDEVDARMIARFCLAKRPRPWVAPAPEVRQLRDLVRHLQTLEDEKQAHLNRLGVTTSEAIVGSLEQLIGFLDEQIRLLEEQISEHIDRHPRLKRACELLSSVKGIGMKTAAVIAAEMPDVSNFSSSKAAVAYAGLSPTRMTSGKFVGQTKLCKMGNSRLRKALYFPALVAVRFNPVISEFYLRLRRNGKTKMSAIGACMRKMLAIAYGVLKTDTPFKVPV

SEQ ID NO: 50725 - protein, 340 aa, unidentified
MTHATIIGIDLAKNVFHLHGTHDDGTVVFRKKLSRGQVLPFLSEQPNCLVAMEACATAHDWAREIGKLGHGTRLIPPQYVKPYVKRQKNDTADAEAITEAVSRRNMRFVEVKSEEQQVSAMAYRTRQMFIGQRTQTVNALRSHLSEHGIIAPKSKAGIKKLMAMIEDDTALISEKVRDIARVYVDHIEQLTAKISDATEAMKAAAKVSETAKRLQTMPGIGVQTAMAIEAFAPDMTCFKRGRDFSAWLGLVPKQHSTGGKSRLGRVSKMGQADIRSQLIRGAMSVITAATRFGIKRGAWLERLLGRKPKLVAAVTLANRMARAVWAMLTRNEGYRNPEAA

SEQ ID NO: 50726 - protein, 316 aa, unidentified
MQSILDLGADVDSRFVMVACAADSFRPQRIANERKAIAAWLRTVPRGSRLAMESTGGYQELLAELAHKAGMQVFVINPRDLRRYAEGIGRRGKTDRMDAEVIARYVAREHSELHAYVPPSKAQRELAQLMRRRAKLVQTKGSITQSLRGLPALRGEAKQLVARIDRLIARVELMMERALQQTAPAREAAEHIATIPGFGTLSSTCLGHSFTRLPYRNSDAAVAASGLDPRPEDSGQKHGRRRLSKRGPAEPRRILFNCARSASRTKLWQPYYAAQIAKGLSTTAATVILARKMLRVAFAVYKHRQPFNASLLATSA

SEQ ID NO: 50727 - protein, 356 aa, unidentified
MVQRKELNFEGQNIYIGIDVHLKTWHVSILTESGCLKKHSQQSSAQALFEHLKKHYPNGNYLSAYEAGFSGFYYSLLDFGIECLPVHAADIPTGQYESVMKTDAIDSTKIARALKSGLLRGIYIPKKEVLDDRNVMRLRITLKRQLSGYKSRVKHLLYNNGVIYPECFQNSKSHWSKRYLKWVHEDVQLLSESRNSLDLLLRQVELFRKSLLEITRLVRTLSRNGRYGEAYENIVSIPGIGMITGMCLLTEIGDIHRFRNERQFASYLGLVPTSHSSGEKTSHGEMTFRGNKRLGPLLVESALVAIRQDRALAAAYREYCKRMLPQEAIIRITRKLSNRILIILKSGKKYEHDRCY

SEQ ID NO: 50728 - protein, 383 aa, unidentified
MNKHSMIFIGLDTHKEFHEVAYCEEQRGAAPVHYGRIPSSKVSVKKLIRQFESKYPGATLHVVYEAGPCGYWIYRLITSLGHCCYVVAPSLIPKKPGERIKTDRRDALKLVRSLKSEDLTPIYVPEPDEAVRDLSRAREAAMKDLKEAKYQLKALLLRNNIRYEGTANWSKKHLRWLTELILPHPAQQIVLQEQLQTIEERIRRLERLDNELTHHVHQWRYYPVVKAVQAMRGVRLLVAVGVVAELGDLHRFDHPRKLMAYLGLVPSEQSSGGKRHLGAITKAGNGRARRLLIEGAHSYRYPANVSTELQLRQEGLPKDIVDIAWKAQLRLCKRYQRMSKKGKHYNLIITAIAREMAAYIWAIAKEVVLTPVNPKLRLSRVPA

SEQ ID NO: 50729 - protein, 341 aa, unidentified
MDHFAGLDISVKETSVCIVDDAGKIVREVRVASEPDALLAVLTNSSYRFKRIGLEAGPLSQWLFGALAEAELPVVCVETRHMQAVLKAQINKTDRNDARGIAQMMRVGLYRPVHVKTLRSQKLRMLLTHRKLLQSKAIAIENDLRATLRNFGLKVGMVGTVKFEARIKELVENLPDLAALVEPLLIVRRVLREQIVILHRRLLAVVRDDDVCRRLMTVPGVGPVVSLTYRATVDVPARFHKSKAVGAVFGLTCSKYQSGEIDRSGRISRCGDEMMRVMLYEAAQSMLRSKKWSWLKAWAMQVARRRGMKKAVVALARRLAVIMHRIWVDGTEFRWTRETMA

SEQ ID NO: 50730 - protein, 317 aa, unidentified
MTQTSMTTAGIDTSKAKLDIAVHNRTERWQVVNALPGWRALLANLTKAGVTRVGIEATGGYERGVVEYLRAAGLTVLVLQPIQVKAFGRVHLRRAKNDTLDAVLIAACAAAIDQPRIAPDPRLAELAENLTFLEQIEEDIRRFKTRLEHIDQPRLRRMVLGDIARLKARRVAQIRDIAKQLRCHHDLAARLDLVLSIPGIGERTALALIIRMPELGRINREEAAALAGLAPFDNDSGQQKGQRRIAGGRARLRRSLFAAALPAAFRWNKALILLYARLTAAGKHHNAALIACARKLLVYANTVVQRGTPWSERPLRV

SEQ ID NO: 50731 - protein, 347 aa, unidentified
MLIIGCDFHPGFQQVAIFDNRTGEIEEKRLQHRAEAEQFYRGLAGQEVLVGMEACGHYPWFEGLLQELGMGLWFGDAAKVRASVVRKQKTDRRDAEHLLDLLRENRFPRIWVPSLEVRDVRQLLVHRHKQVQARTRTKNQLQAMALSHGVQKKRKLWTKAGRAELEQLPLLAYAAQRRKKLLEALDELDVEISELDRRVAEEARERPEAVRLMTHPGVGSVTALAMVLTLGPAERFGSGKQVGSYFGLIPSEESSGGKQRLGKISKQGSSFLRFLLVEAGQTAARYDPQLKRFYRRLAVRKNRSVAKVAVARKLATRLYLMLREQWTYAQLSQAVMQVSPSHSVAGE

SEQ ID NO: 50732 - protein, 426 aa, unidentified
MTLPPAQPDPAPAYVAFIGLDWGDKTHALALHDPASGQTESSTLNHSAENLHQWLDQLQARFGSRPVALALEGTRGAIFPALLDRPWLHVFAVHPATSSRYRAAFTPSGAKDDQPDARVLLELLQRHRDKLTPLSLADAATRELAGLCEARRDLVDRRTQLLNQLTSLLKKYYPQALELAGDDLASTLALDFLTRWPDLLALKSARPATVQAFYYLHNVRRPETVAERLALIAQARALTTDDAVLHVAVRQVRVLVEQLRVVQKHLKEFDAAIAAQFKVHPDAPLFRELPGAGPVLAPRLLVAFGHERDRYPDPGSFQKYAGLAPVREKSGGALWTHWRWQAPRFLRQSLVEWAGQTVLYCPWARAYYQQMKARGKGHWAILRTLAFKWVRILWKCWRTRTPYDDARYLQQLERRGSPLATALKTA

SEQ ID NO: 50733 - protein, 416 aa, unidentified
MNAVGIDVSSRKSTVAVLRPLGEVVCLPFDVSHDADGLASLAEKLKTIDGETRVVMEHTGRYYEAVAKALHEAGFFVCAVNPLLIKEYGANSLRRVKTDKADAVKIARYALDNWADLRDFTPMDAIRYDLKTLNRQFQLASKQRTASANNLIALLEQSFPGIRKCFDSPVRSDGTQKWVDFAHSFWHVDCVRKQPFPAFCERYRKWCKRHAYLFKLSNAEEVYALAKRAVVLTPKSKVVKVLVQEAANQLSSISRSVEVYRAEMDRLAAMLPEYPVVMAMYGVGKSYGPQLMAEIGDVRRFERKQALVAFAGIDPMPNQSGDKNVRSNKSSKRGSPYLRKTLFNVIRTYLQCAPQDEPVFQFLNRKRAEGKPFYVYMLAAANKFLRRYYAKLRDYFASLDTLQPVDPIPTILKATL

SEQ ID NO: 50734 - protein, 321 aa, unidentified
MSSSVLGIDIAKQKIEVALLVSDKVKNKSFKNSGDGFEGLAFWLKKLGIERVHACLEATGNYGEDLAIFLHEAGHTVSVINPARIKGFAQSELVRTKTDKIDAGVIARFCLAMKPDPWAPPSPEIRALRALVRRADSLIDMLTQEKNRLGTAHESILPLIKKHIAYLEKENKKIRDQIADLIDRNPELRRKKDLLASIPGIGKATTAILLAELDDLRKFRHVRELVAFIGLAPRETLSGSSIKGKPRLCKTGHARLRKALYMPALVSIRYNLMIAFYERLREKGKNGKVIVCAIMRKLVHIIFGVLKSGKKYDPNYKPALA

SEQ ID NO: 50735 - protein, 370 aa, unidentified
MKHHISVLGIDIAKRLFHVVGMNERGQIVLRKRLARNALMPFIAALPPVLIGMEACGGAHYWARRFREHHHDVKLMAPQFVKPYIKSNKNDMRDAEGIGEAVTRPTMRFVPTKEVDQQDIQALHRVRERLIGARTALVNEIHGLLHEYGIVVPKGVSKFRRTVVGKLEADKAKLTPLSQEMFGKLIDEFAALEKQLAYDQEKLEALATTHPECQRLMTIPGIGPFTATALVAAVSDASAFKNGRQFAAWLGLVPRQHSTGGKERLLGISKRGDSSLRTLLVHGARTTIRWVGRQTDRRSQWMRQRVERRGTNRTAVAVANKHARMVWALLTSHQDYQLATGEGQPRRASGASVRMEYGNVTKEYMSNFFM

SEQ ID NO: 50736 - protein, 433 aa, unidentified
MNTPHPHDLVIGLDRSDKKADLHLITTATGQRRSQTIDTAPEALWEWLLELRQQHPQARVGLCLEQPAVHLIAFLEAYDWITLYPINPITLQKFREAFVTSRAKDDAKDAQYQAELLLTHHDQLRPWAPEDSATRAVQQLVFHRRAVVDERTALTNRLMALLKQYFPQALVLCGEDLWRPLATRFLLKWSSLQAVQKAKPATLQQFYHLNGSRSAKLLEQRLALVAKAVPVTDETALIESFGLRVQLICRQLQLVQQTLRSYEQQMASAYAAHPDHELFASLPGAGPVLGPRLLASMGSQRERFEAAADLQQYTGIAPVTKRSGGSCYIHRRYLCPKFHKQSFHEYAKESILWSRWAAAYYLQQRTKGCPHHTAVRALAFKWQRVIFRCWQNRTPYREEIYEAALKKSGSPIVALFDQVELGKSPFKNPAKKS

SEQ ID NO: 50737 - protein, 394 aa, unidentified
MKSNTQNAKIEAITEKTLVLGIDVGSETHYARAFDYRGIEYSKKPFKFSNTEAGFVTFKEWILDLKDRHEKEKVVPGMEPTGHYWFNLGKFLQDNEMKPVLVNPHHVKKSKELDDNHPTKNDRKDPKVIAGLVREGRYMIPYLPDGVYADLRTASNIRFQLQAELTRIQNRISRWFNIYFPEYKTVYGKPDAKSGMLILKAAPLPEDILTLGIDGVNQIWRDAKLRAVGKARAKTLIEAAGHSVGSKEGAVSARMEIRMLLEDYESRNMRLQEVMVLIEELVKGIPMAEKLLEIKGVGIRTVSGFLAEVGDISRFNNPKELQKLAGLALVENSSGKHKGGTTISRRGRKRLRYLLFEVAMSLVAKNPEFSEYSYAAEPPVQFRLSHLSRRSEPL

SEQ ID NO: 50738 - protein, 321 aa, unidentified
MDKGKQIYGIDISKDVYDVCTPEGGLLQFENSEGGFRAFAKAIPKNAHCVMESTGYYHLQLAYFLSDRDFAVSIVNPLKIKRFIQMNLSRIKTDKSDAVWIMKYGASQDLELWEGDSELMQENLQLTRLLSVYIKQSTQLKNKIHGEHTLGNPSKVVVSSLKRQLRSLSKEIKKLEERLGENVRSEHQKSLTLLKGIPGIGEKTAISLIVLTDNFTRFDSYKGLCSYAGITPVIRESGSSVKGRPRISKMGNAKLRNLLFMCSFNACRFNTACRALYERLVAKGKSKKLALIAVCNKLLKQAFSIVRSGLPYDPNHCSVIK

SEQ ID NO: 50739 - protein, 341 aa, unidentified
MQAVTTIGLDIAKSVFQVHDATGNVVIRRQLKRRYVLAFFQKLAPCVVGIEACATSHHWSRELKALGHTVRLMPPAYVKPYVKRQKNDAADAEAICEAVTRTNMRFVETKTPEQQSCLMLHRTRHLFIRQQTAVINAIRAHLAEFGIAARVGRHGVKDLLHVVADSSDRRLPEVARACLAALGVQLRMLKAQVLAFDRRIMAWHRSNETSKRLDEIPGVGPALATALVASVADPKAFRSARHFSAWVGLVPKQHSSRGKDRLGSISKQGDRYLRSLFTAGVLAVIRYAKIHGTKHRPWLTALLARRPTKVAAIALANKIARMAWAIMAKGERYKEPAALAA

SEQ ID NO: 50740 - protein, 413 aa, unidentified
MKISRKLSYGFAVKLQAAAGIDVHKDFFQVAICKQGYAPIDLRVGTFTKDLRQLAEILRQHQIGHAIMESTGVYWKPLYRVLSDAGIEVTVVNAYRVKQLPMEKTDKKDARWLARLLISDMVKPSFVAAEQQESLRVFSRMRTRYIRQSTSIKNQIVKILEQANYKVRSIVSDISTHTGMQLVQALSEGVTDAEQLLLLCHKSVLKRQGIQRLLDAFCGLPTPTMQQTLKMLLADLKHIQSQKTNTDIQIRQLLNEYQQHTIQQLTEVEGIATQQAEIITAEIGAGIEAFAHADAAAKYAGLTPGQHESADKRKNTRAVPGNQYLRTNMVQVAWAAIKVKNGYWQATYQHLKKRLGAKKAILAIARKMFKVVFKIMAKAYAYQRWDNQVFTRQLKNNHPYKTTYAPALSHEHA

SEQ ID NO: 50741 - protein, 346 aa, unidentified
MLIIGCDYHPSWQQICWLDTETGETEERKLDHASGEAERLYRGLSAPALIGMESTGNCQWFVEMAASAGHEVWIGDAAKIRASDPRQQKHDRRDAALILKLLLEKRFPRIWTPSSEAKDLRQLLIHRHKLVRIRAQVKNELQHLAMNQGVTKKRKLWSQAGERVLRELPLLPWASRRREDLLKVRAMLDDQIAPLDQAVAEAALKDEKARLLMTQPGVGPITSMAFVLTMGDVRRFPRGKQVASYLGLIPREYSSGGKQRLGSISKQGNWFMRMLLVEAAQTAVRRDPQMRNEYLHRCHRKAKGVAKVAAARKLAIRLYWMLRTNTPYPEVVRVESSSRVPLVSAS

SEQ ID NO: 50742 - protein, 329 aa, unidentified
MEMIALDCHKYYSVASVQSPEGLCLAERRIEHRRGSILAFLAPYSDGSPVAVETIGNWYWIIDEIEQAGKVPRLVHARKAKRMLGSINKTDKLDVRGLNRLQQTGTLPTVWIPPAGVRDQRELPRTRMVFATARTRLKNRIHSVLDKYGFQDQFTGVSDIFGVGVRPRLEGCIQQLPPQAAYTSDLLLEQLEAVQETIEALEQRMAEVFKPTTELELLDTLPGVGLILGVVLVLEIGDIRRFRCAERLASYAGTVPRVHASGGKTYYGRTRPDVNHYLKWAYTEAANAVAVHRKSLAHRHVSQLYSRIRSRRGHASAVGAVARHLAEAT

SEQ ID NO: 50743 - protein, 345 aa, unidentified
MHYVGLDVHWRTSTVCILDACGKEVKTATIRGPWEKMFSWLDREMTDRYVICYEASCGYGTLYDRLCGRASRVVVAHPGQVRLIFRAKRKSDRVDARKLATLLYLDAVPPVHVPRVGVRSWRRLIETRRRLVAKRTRVKNGLRSLLRGHGLRPPMRGLWTRKGLAWLRSVSLPEASSALERDLLLAELGLFTEQVTRLTAELDGLGRRHPGVALLGTIPGVGPRTAEAVVAYIDDPDRFSRSAQVGAYFGLVPRQDQSAGVNRLGHITKEGPSSVRQLVVEASWQVIRRSATARGRFERLTGGLRERRKIALVAVGHWLLKCMHAMLRTGECWREAVPAAKDAAA

SEQ ID NO: 50744 - protein, 385 aa, unidentified
MTQAPGTGTVIDYERTLILAIELSNTSWVLAAQIPGLPGVKAKRSIDPTPEALMAAIENYRGRAEKAGRNVDRVIAVYEAGWSGFWLVRWLAKHGVEEAHVIQPSSVPVDRRARRAKSDGIDAELLLRTLLAWLRGEPRVCSMVPIPAEADEDARRRVRERTELVSERVGLVNRIGAVLATLGAGEYNPLRRDRRQRLDELQTALGDSLPTNAHAKIARMLDRLELLLIQITELEQSRDAVLEDESPDRASSMIQQLAKLRGIGVQSATVLVREGFVREFANGKALGSYAGLTATPYSSGGIEREQGIGKAGNARLRTVMVELAWLWQRYQPGSAQVRWFRERGGTGRRVRKVMVVALARKLLIALWRFATQGVVPEGAVMKPAS

SEQ ID NO: 50745 - protein, 422 aa, unidentified
MNDAIKLAAFVGVDWADTEHTVALRIAGSSNVETSVLLQKPEDLADWAVKLKERFGDQTVGICLEQSRGALIYALSQYPWLVLYPINPRSLARFRESLYPSRAKSDPADAVLLSEFLAKHQDRLRPWRVEDADTRKLRLLLENRDKLVDDRTGLCNRLRAALKLYFPQALEWGGTLTKPMSWAFLLKWSTLADVRKSSKNKLLDFFYAHHVRRGDQINGLYEQVQSAKALVTDTALVDTSVLMVRSLCTQLQDLQAGIDRHDTEIEALYARHPENHLFSDLGGAGKVLGPRLVAAFGSDREKYKDAGEVQKMSGIAPVVEASGKTTWTHWRWAAPSFLRQTFHEFAASSIPRCAWAKAFYNLQRERGKGHNAAVRSLAFKWIRILFRCWKDNVPYDENRYVQQLIIHGSPLLKFLTQKPLEA

SEQ ID NO: 50746 - protein, 375 aa, unidentified
MSVAVTRMDQDTRTLYVAFELGEKEWKLAMSPSLAVRPKLRALRSRATARVLEILERERQRVGAVQVVSCYEAGRDGFWLDRFLRAHGIENRIVDSASIEVRRRARRVKTDRLDAQKLLTMLHREALGEENLWSVVHVPAVADEDARSLQREYRTLVKERSRSSNRIKGLLASQGIVAPRIDGQFLPWLAAARLWDGSAIPSGMRARIEREFARWRFTRDQVLVLEKERRDRTKDETDRSLEKVRALFALKGIGLGAAWTWGLEFFTWRDFRNGKEVGALSGLAPTPYQSGDSSHELGISRAGNRWVRGLAIEIAWGWLRHQPDSALTRWYNERFARGGPRARKVGIVALARKLLVALWRYVETGALPEGAVLKA

SEQ ID NO: 50747 - protein, 366 aa, unidentified
MKKCNKKSQSSWTMAEGVAAVGLDLSDRTGRFYAVDAEGLKIAEGSVVLLGPELQRWASSMGKTVIAIEAGTHSPWVSRLLSACGHEVIVANPVKVALITQNVRKTDPVDAEYLARLARFDRALLFPIQHRGEQAQIDLQLIRTRDMAVQVRTKLIGHVRGAVKSFGERLPSCSTEAFVNTNRKLIPEALRTAFTPILEQIDQLTRTIADYDREVQKIASERYPEVERLTQIKGVGTLTGLTYVLVLEDARRFETSRSVGAFLGLTTRKDQSGKSDPECGITKAGDRLLRRLMIQSAQYILGRFGEDCDLRRHGEKLAARGGKRAKKRAVTAVARKLSVLLHRLWVSGQTYEPLRNSRAAEMSVAA

SEQ ID NO: 50748 - protein, 343 aa, unidentified
MFAESVDVVIGVDTHRDSHALALVDAGLGALIAEERVDANREGYRRALKLASGCGRRRLWAVEGTGSYGAGLARFLQQQGERVLELERPVRSGSRGRAKSDALDALRAARAALTGEPLAELRCGGKREALRVLLVSREASVAVRRSGLNQLRALVLTAPAELRERLQGLPKRALVKRCVALRPRSGQPPQLRGTLLALRSCGRQVELASREATLLERELAVLVEQLSPQLLSHYGVGPITAAQLLVSWSHPGRLRSEAAFARLAGAAPIPCSSGKTIRHRLDRGGDRQLNRALHTIVLARRRGDQRTIAYIHRRTSDGKTEREAIRSLKRYTARSLYRLLEHA

SEQ ID NO: 50749 - protein, 339 aa, unidentified
MNQISTIGLDLAKKVFQIHAVDASGAVVLRRALRRGKVLEFFTMLPPCLIGMEACATAHYWARELGKLGHEVRLIPPAYAKAYLRRNKNDAADAAAICEAVSRPNMRFVVVKTEDQQAAVGVHKVRELLVKQRTMAINHLRGMVAEFGIVVAEGPQHVAELVAIVLDTTDTRIPALLRQPLMAIADLLSSIESKLQGVEKRLLEWGRNNQTCRNLITIPGYGPILSSAMAAIVVNPDGFRSGRDFAASLGLVPRHEGTGGKVRLGPISKRGNGYLRRLLVNGATSVLNSKRARQDRWLRKLLETKPRKLAAVAVANKMARIGWAIMTRQQSFRAAPAAA

SEQ ID NO: 50750 - protein, 412 aa, unidentified
MEILYAICCGLDVHKDSITACLRRLGGRGHVTQELRPFGTTTGELLTLLDWLVAAGCTHVAMESTGVYWKPVFNILEGHFQQVLVVNAQHIKALPGRKKDTLDAEWIGQLLQHGLLRGSFIPPAPIRDLREATRYRKQLIRLRADETNRLQKLLEGGNLKLGSVASDILGVSGRAMLAALVHGETDAAALAGLAKGRLRKKQPQLVAALTGRLTPVQRALLGQQLAHVEYLDRAIATLDALIATLMAPYQAEAERLRSIPGIDTRGTENLIAELGVDMTVFPSEGHCASWAGMCPGHNESAGKRKSGKTRKGSKWLRTVLTEAAWAASHTRSYLGAQYHRFARRRGKKKAVVAVGHSILVIAYHILKDGTTYRDLGQDYFDRRDTARIQERLLGRLRALGLHVTVEAMAPAA

SEQ ID NO: 50751 - protein, 384 aa, unidentified
MYEYNTVFGMDTHARSVTVRAVVIKTGEVRTRRFSNCPKPHEIAEWMQRFPAPHYAAYESGCTGFFLCRELNRLGITTEVIAVSSIPRSTDDKIRKNDRIDAKRLTSELLNPTNSLSRVWLPDEECEGARDISRAHADAVDTMKRAKQQLISFLLRHGHVYSEKTAAGKNKKPFTQEFYSWLKTLCFEEEGARGAFEMHLLAAKDGIEQEKRAKKVVDAFKKKPRWKPYVDGLSALKGVGEVGAFVYATEIGDFSRFRSGRKLPSWTGLVPRLYASGEKNINGSVTKAGNSHVRRHLIEGLNSLVYRSSAQSKMLPGDFEVSDAVRAHAKKGSRRLASRIRHLKKRNKETNVIKTAAAGELIRWIWAIGLMIQEEQQASLHKQR

SEQ ID NO: 50752 - protein, 369 aa, unidentified
MAKSITYVGLDVHKDTIAVALAAAGLRGEVREHGKIPNAPGALRALAVKLAAAGRELRFCYEAGPCGYGVQRQLTEAGHECAVVAPSLIPRKPGERIKTDRRDAINLAKLHRAGELTPVWVPDQAHEAIRDLVRARQAAVRTLRQARQQLSGFLLRHGRHYHRPAWTQLHRRWLASLKFDQAVHHIVLEDCIAAVEAAMARRDRLETHIEAVLPEWSLAPVVEALQALRGVRLVAAATLVAELGDITRFTNPRQLMAYLGWVPSEHSSGRTRHQGGITKAGNGAARRMLIEAAWSYRFPARISRELLLRQERQVKPIRDIAWKAQERLCRRYRKLARAGKQPTVITAAIARELAGFIWAIAKRVQPMAT

SEQ ID NO: 50753 - protein, 346 aa, unidentified
MKINRVGVDLAKNVFQLHGADHKGNTVWKRQLSRSKWIKVLCETVKPGTEIGMEACTGAHHWARLLIQRGYEVAIIPPQFVKPFVKSNKNDANDAQAICEAMGRPNMHPVRVKTVAQQDIQAIHRVREEIKRHRAAKANQIRGLVSEYGLVAPQQLMSLRRAIPEWLEDADNGLSFLFRQLLQGLWGDLHVLDQRMTELDNQIAVMAQQDPVAKRLQQLRGVGPLIATALIATVGDAKQYPKGRDMAAAIGLTPRQHSSGGKDRLLGISKRGDAYLRCLLVHGARSAVRTAKDRDDRLSRWVVNLQSRRHANVVAVAMANKIARMAWAIMTQGTDYDSEFNPARAD

SEQ ID NO: 50754 - protein, 396 aa, unidentified
MDGPIISFDVSKGSSHMRGFLDHGKPAGKATVIRHDLEGFAKLDALRGRIREETGSDPVAVYEFTGVYSHTLERYLDSIGMRRYGVSPLESAKVRKAMIRPTKNDSLDCRTIAEVYYLRPLREGRSDDEIHVGLRDMGRFYHYLLEVKVVEKGRYRRCLDDVWPCFDKVIEPDSPKSLAIISRYGHPSKIRSKEQVKNFLMKLPRRGRASTDELAEKIAAYAKTHVSGASPNSYKTEEVKLMSARVKGIIDESERVMDSMISIAENLPEFASLKTIPGIADVTAARLIAEIGDISAYPKADSLIAYAGLDPAVMQSGQMTGEHMHITKKGNPHLRATLYVAVTNMIMSKAENMITRYVLKKKNSGLSYKAAVIAGCSKLLRLIHAMLRNGTCYSDK

SEQ ID NO: 50755 - protein, 433 aa, unidentified
MEEVTDEPLYRDRVCGIDIGKAELYATIRVPSDTRPQRRMSETRSFATTRRGVLALADWLRCWQVPAAVMEATSTYWMGPFFRLEAEGFECVLADAKQVKNLPGRPKRDPSDSSWLAQCFERGAVRPCFVATKEFRVIRLHTRYRRDLINERTREKNRAEKLLETAAIKLSSVITDLHGVTGRDIMGHLIAGERDPKVLAQLARTRARAKITELQHALEGAEFFTGHHARLLKTMLERIDQIDAQISDLTAVTEELLAPYEEQLQQAESMPGWGRRSAEDAVAETGTDMTRFATGGHLVSWAGRAPLDKQSGKRKGQARHKKGNTYLGGVLGETAVCAGRTQTREGARYRKLARSRGKNKACVAVGNTQLKVYHTLLSHPGMRYADLGPDYYQRRAQTRRTIDYHVRELEALGLEVTLCRLPEPGQAATTPAA

SEQ ID NO: 50756 - protein, 367 aa, unidentified
MKKVSTARTKTSRKISGQKLTVGLDLGDRSSWYCVLDESGAVLQEQKVSTTSKALGEVFGGMPCSRVVLETGMHSPWVSRLLGELGHEVIVAHARNVRLIGESRKKDDRLDAQTLARLARIDPELLCPVKHRSAKAQADLTLIRARAGLVRARTALVNTARGLAKSYGERLRGCNVRNMNPEKAEGLSPELQAALEPLLAALESLSEQIAEYNERIEKLAGQSYPQVALLKQIKGVGTLIALTFLLTLEDPHRFRQSRDVGCYLGLQPGRRNSGQSQPQMHISKEGDPYLRTLLVQGAQHILGPFGVDCDLRRWGLKLAERGGKSGKKRAIIATARKLAVLLHHLWVSGEVYEPLHNAQRVALPAAA

SEQ ID NO: 50757 - protein, 347 aa, unidentified
MAHFVGLDVSVKETSVCVVDDAGKVVCERKVATEPDDITVLLTSVGGEYVRVGIEAGPLSQWLVNGLTEAGLPVVCVETRHMKALLTAQQINKSDRNDARGIAQMMRVGLFKPVHVKTLAAQEQRMLLTSRKLVQRKLMDIECDMRGTLRNFGLKVGVVNTVGYEARIRDLVEGFPVLAAIVEPLLTIRRVMRQQLAALQKMLLHTVRHDPECRRFMTVPGVGPVVALTYRASVDQPHRFVHSRAVGAHVGLTPKRHQSGETDYDGGVSKCGDAMLRTMLYEAAQTMLTHSQKWSWLKAWAMRVAQRRGMRRAIVALARRLAVILHRMWIDGTDFRWSNAATAVTAA

SEQ ID NO: 50758 - protein, 354 aa, unidentified
MMTSTGADVVGGVDTHGRTHHAAAIDCAGRLLGDAEFPASAVGYRALLAWLVGFGRLVKVGVEGTGTYGAGLARHLAAQGIEVVEVDRPDRRTRRRQGKSDPIDAIAAARAVLAGTARGAPKTRTGPVEAIRALRVARRGAVKARTAALNQLHGLVVSAPELLRAELSGLTAAELVARCAGFRIDPALLLEPSTGTKAALRAISRRVQALDEEIALADARLRPAVVATAPRTAAIFGAGPEVAGQLLVSAGDNPDRLRSDAALAHLAGISPLPASSGRIDRHRLNRGGDRAANSAVHRIVLVRMRHHEPTRAYVARRTTQGLSKREIMRCLKRYVIREVHTALLADFENLTQAA

SEQ ID NO: 50759 - protein, 350 aa, unidentified
MDKKVLKQSAGIDVSQKELVVCVGRLYDDWSVDLYGHKSFGNTLKGFQLLVSWVKKMTDAALGVRFVMEATGVYHESLAYFLDDHGYDQSIVLPNKISNYARSLDVRTVTDKTASEAIARFGLERKLDNWRRPKEIFKRLRQITRERDQVVTARTIAKNQLHAEEAQAWPNAGSVSRIKQQIKLLNRQDKEIKEEIAALIKTDEAVKGSVDTISSLPGVGNLTAAIALAETNGFELIRNKKQLASYAGFDVKEKQSGTSVKGKSKISKRGNRHLRKAMHMPALAAIRHDERYKAIYTRLVSRHGIKMKAAVAVQRKLLEMIYTLYKTNTLYDKNYLQRNELKREANVEMG

SEQ ID NO: 50760 - protein, 315 aa, unidentified
MTVLKHAPSAVVGIDVSKNTLTVFDQASQSVSSIDNTRAAVRKLIAGLAPGGLVICEPTGGHEALLVSELNAGAVACHRADTLKVKAFLRSFGRLAKTDTIDAKALAQYGAERWNQLALYRPADNVQARLTALVSRREDLVAIKTAETNRSKAPGHEVIARSCRTVIACLQRQLERIDKQIEELIATSQPLSRRKELYQSMPGVGPRTAIALLATLPELGILTRKQAASLAGLAPHPKDSGLFKGYRRMHGGRPEVRKNLFMAALSAARTNPQLRTFYQRLITNGKKPIVALAAVMRKIVVILNAKLRDELKPMS

SEQ ID NO: 50761 - protein, 432 aa, unidentified
MMVTAEGDGRVLGIGIDWAEEFHDVAVGTPEKGVIEQFRIEHGPDGVAALVERALRLEPDPAEVRVVLETRHGLLVEALLDAGFTVVPVNPDLVARRRGPARKKDDAEDARICCLLALDRHAGLRALVPHGELGGELRAIARDDERAARDQRRLLNRLRADLQTTYPAALTLAGKDLGAPTVLRLLQRWPTQAELAAATREELVTFALASKHGWPERFADRVTAALATPSLPTRDYLVRAKSAGIRLAAVQLLALHEARRGWEQRMAELLLGGRRTGRDHTVKDPDPGKAFPGGAIYLNFPGLGDRLAARVAGEIGEHLTQYESPNALQCYAGRAPVTRRSGKNDFVVARRLAHNRYLGDAVHQWAFCSLTQSGWAREFYDQKIAAGKSHHNALRALGNRWLEILWHCLSRGVPYHEATHVANRNRALGRAA

SEQ ID NO: 50762 - protein, 344 aa, unidentified
MLYTGLDLHKSFSYITIMNDRGEVISQKKLPSNGEILNFLKGFEDSMEVAIEATPSWYWLYDCLEDEGFRVNLSHPLKTKAIAYAKVKTDKVDSATLAHLLRSNLLPLSYVPEKPVRLNRELLRYRARIVRVQTRIKNNIHTILAKNNISHSYSDLFGKEGMAFLYSLSLPENYKIALEGYLSVLETVRHEIRLASKRVQTLTEENQDAVLLMTIPGVGYYSALMIKSEIGDVGRFPSAKQLCSYAGLVPSTYASGNTCYHGHITKQGSRWLRWILIEAAIHAVKSPGPLRHFYFKVERKKGGKVAKVAAARKLLEWIYHMIRDNKTFKEVERLAELQGIRVSP

SEQ ID NO: 50763 - protein, 352 aa, unidentified
MDINNENKLFVGMDLHKSTSTFCVKDEQGNIVKRAKVLTDRNQIRDFMNSLGQKTSIVLEPVSQWYTFADLLEGLGHDVHLAHPMKVKAIASARIKTDKIDAAVLADLLRSNLLPEAYFASKEVRSWKELVRFRASLINLRSQVKNKVHAILHKHALQHNFADLFGVSGTKWLRNLTLEEPFRTSLAQYLSLIDFLTNQIDEAETNVEKQVIDHPQAKLLTSIPGVRYVSALTIIAEIGDIHRFPSAKQLMGYAGLVPSTYSSGDITRHGRITKTGSKWLRYIMVEIAQQQQRCKKRPGFGSYYLKLKARKGAGTAAVATARKLLAVVWRLLIDNREFQSTAPDRGKSESLA

SEQ ID NO: 50764 - protein, 451 aa, unidentified
MSRKRKSHQKTGAPVLLSLNPKAAGVDIGATEIYIAVPGDRDPQPVRCFSTFTEDLHAAADWLKACHIDTVAMESTGVYWIPLFQILEARGFQVFLVNAHHVKNVPGRKSDVSDCQWLQYLHSVGLLRASFRPEQAVCTVRSILRHRDGLVQMASSHVQHMQKALNQMNLQLHPVISDITGVTGIAILEAILAGERNPHTLAALRDRRIKASAEIIAKSLVGDYRREPLFTLGQSLAAFRHYQELIAACDREVAQYLEGFESKMDPPPASTSPSKDGSKPKASEPPFDLQTHLHRIFGVDLTQVPGINVLTAQTLLAEIGPDFSRFASGPELTSWLGLCPDNRVSGGKVLSVKTRKVKNRAATALRMAALSLYRSQSYLGHYFRRMRAKLGAPKAITATAHKLARIVYHMVDTRHAYDETICAHNEVQNRQRLEARLRKQARELGLQIVAI

SEQ ID NO: 50765 - protein, 422 aa, unidentified
MVMEEITEEPGALTERVAALDIGKASLTACIRVPHEDKPGARRQEVRTYATVTRALLELRDWLVCQGVTLVVMEATSAYWKPPFYLLEDDITCQVVNARDVKNVPGRPKTDKLDAVWLCKLAERGMLRASFIPSRPQRQLRDLTRYRRTLTQERTREKQRAEKLLEDAQIKLSVVISDIFGASGRAMLDALIAGHASPHELAALARGKMRAKTSALQEALTGHFTEHHAFMLGMMLDRIDALTTQIATLTARIEQAIAPLAAQVAQLDEIPGIGTTAAQDLIAEFGADMSRFPTPGHLVSWAKFAPRARQSAGRAKAATTGQGNPWLGGTLGEAAISAARTKTFLASRYKRIVRRRGKNRALVAVGNSLLTITWHLLSDPAAHFTDLGPDWHDRLAPRRRKHQLIAELERLSGMKVTLHDAA

SEQ ID NO: 50766 - protein, 343 aa, unidentified
MQIVRIGLDLAKYVFEIHGVDAQGKTVVRRTLRRHAVSTFFANLPPCLVGMEASNGAHFWANALSDLGHDVRLISPQFVTPYVKSNKNDRNDAEAICEAVGRPGMRFVPVKSADQLAVQAVHRIRSRLVADRVRLVNQVRGLLGEHGIVVAKDIGNLRRALARIVDDEDRVLNPLARALMAELREELAELDARIGGYDLKIRELYRNSEICQRLGKVEGIGPVTATALVAAVGDRSSFKNGRQFAAWLGLVPKQRSSGGRARLFGISKRGDRYLRTLLIHGARSALGRVREKQDPRSLWLDRMRQRRHPNIVAVALANKNARIAWSLLTSDSVYDAGLSVRAA

SEQ ID NO: 50767 - protein, 435 aa, unidentified
MQKIRTNVAGIDIGAKKVFTSVEGQPVVSHFTFTQDFLQLKDYLLKHGVKTVAMEATGVYWVILYAILEEAGIDVWLVDGRQTKQVPGRKTDVKDCQWIQELHSYGLLNRCLVVNTDINELRSYLRLREDHIESSSMHINHMQKALTLMNIRLKEVISQIHGASGIAIIEAILNGERDKQVLVNMCHEKILKTKKEAVLKSLEGRYTESGLFALKQAYDGYKFYLGQIEQCDSKIDVIMNRIGNNGKPQNQTTDKKLKRKPIRHHAPRIDNLSANLIKTFEGKDATLISGITDYTWLQLLSETGNDLTKWISEKHFTSWLGLSPGQNNSGKKQRNAKKKGRPTAGQIFRTIAMGLINSKNIAIGEFGRRLRGRKGPGIAIKAMARKLAVLYWRVMVKGLDYVETGIKKYELQLQQNKLKTFNRLAKELKIYSTDN

SEQ ID NO: 50768 - protein, 315 aa, unidentified
MPTVAGIDVSKAFLDVAIVPSQERWRTPNEPDAVDALVRELKRRGVEYAVVEASGGYEACFLVAADTHDLRVARANPRRVRHFARAIGRLAKTDAIDALVIAQFGATQELVFLPKRDPARERLRALLLRRLELQKLVQAERNRQKQAPAWLEESFARVVQRLEAEQQWVEEEMERLLAEAEHLRERAALLQTVPGIGPQVSRTLVALLPELGELTGKQAAALVGVAPFNRESGKQRWRQVTYGGRSEVRRMLYLAVRVAVRYNPVLRQYWLRLRERGKEGKVPMVACIRKLVVMLNAMVRDGRPWSPELHLAAAG

SEQ ID NO: 50769 - protein, 406 aa, unidentified
MDILCKRCCGLDVHKKTITGCIITPEGKAIATFGTMTKDLQALVAWIKEKGCTHVAMESTGVYWIPVYNLLETENLDVIIVNANHIKNVPGRKTDVSDAEWIADLLRHGLLKGSFIPPRKQRELRELTRYRRSLIGEHTREVNRIQKVLEGCNLKLSSVVSRITGTTASLILKALIHGEIDPEVLASFAKGRLVRKKNELMDALNGFIGPHQQKLLALQIDHLEYLEKQITALDEEIAERLRPFEDDLTRLDTIPGVGRRTAEDILAEIGSDMSLFPSAQHLSSWAGMAPGNRQSAGKRKSGRTTKGNRYLRATLCESAQAIGRMKPNFLSQQFHRIAARRGRKRATIAVGHSILMICYHLLKRKTNYVELGANFYDQRKEESIVRHVLKRLESLGYAVSLEKVGA

SEQ ID NO: 50770 - protein, 414 aa, unidentified
MPELYVPPKNHSMPHPFSFDVKIQKACGIDLHKDQLKACYMGTDLATQHKDFGATTLELRKLCQDLLNQGIADVVIESTGIYWIPLYDLLTQQGIRVVIANPLRVKQIPGKKTDTTDSEWLCKLLLNGLVHRSFIPDTTLRQLRQLNRQRYFYTGHLSQVKNRILKVLETANLKLRSVLSNINTKSARKIVQALADGVTDIKVLQSYCLRKAAKKAALLPEALDGTLTANDRTLLQLHLTDWQYYDKQILQLESAMATIIQQHYADTISLLLLVPGIGQQSACTIVAEVGHTLESFPTADHFTSWAGLAPGNRQSANTWYAQHITKGNKYFRSTLLQVAWAAVRTKNGYWQAHFQYLRKRLPAKKAIVAIARKMAKLIYRVIKDQYSYEEKGAAYFTERLNKYHPNNPSTSVAG

SEQ ID NO: 50771 - protein, 353 aa, unidentified
MDKYIGFDIDSQQVSVCVIEQGKKDVYDTLGPDIGSMKQFLLSVRNNGDRLHLAYEVSGYSGFIHDHLCECVDTIAVCNPTKTTWIYRTKKKTDRIDARKLAILLSIGELPTVHVPNKEVRQWRQMILHRRNTVRDICRAKNRIRALLKSVGHFKAGFKGSWWKKVNILWMRQVSAGSEFWQMQLGQLMDEYEFLDTQLFKVTARLDVYLKTKPGAVLLMTIPGIGPRTTEAVLAYTDDVARFGGSREYCSYFGVVPNLDQSGNSRRVGHITKHGPSVVRWLLCEAAWKSVAKSPSLKSFYERVMHGDPKRKKIAIVATGRKLLSIMRAMLTTGELFNEKLVLTHCTQLEKAA

SEQ ID NO: 50772 - protein, 400 aa, unidentified
MDERKGFRWFLGIDISKETFDACCISGQGEKQFSISTSMDRKGFEELIKQIASLSVPQESVLIGMESTACYHVNLYSFLISLGYPVIVINPLLISNFVKLQLRKTKTDKKDASVIAQFLLLNRDSLGRTVGSSDFSDIRDLSRQRESLVDQMTSDKIEIKRLLTMTFPELEHIACIFTKSMLRLLCQYPSAASIRQAKRSKIARILIPGSYGKQTDASVERIVKVAETSIGTASPAKEVILKQKVSLLMQLEQHLQELTDILTEQCKGKMRRDMDILTSMRGIGKKTAMNFLIEVGRDVKEFESHKKVIAMAGLDPALYQSGKIDRKGKITKRGNRHLRRVIWVMTTKVIQFNVRFKQYYLKRIQDGLPYKMAVLATAHKLIRIMFAMLTNETQFNESMN

SEQ ID NO: 50773 - protein, 393 aa, unidentified
MDNKLHLIVGIDIGKNFHQATVINDSGQILGGSVRFPNTTAGAELLMGKIASVNPKGLPLLFGLEATGHYWLPLYAYLTEKGYQIVVLNPYQSDAFRKVSMSSTKTDKEDALLIAELLRFGAFPQTKMADEDMIALRNLTRFRLSLNQQVTDSKRRILTILDKIFPEFESMFSDILGKTGRALLKRYPTPEEMEAVSLRKLTSLITKLSKGHFKEEKAQEVKMKAKTSFGITLALESLTMQLKILLETLEFTEKQLKVVDTEVENLLPATCVLLTLPGISKVLSAAIISEIGDIKRFKTSAQLVSFAGINPTVRQSGNFLGSRNHMSKKGSPYLRLALWQASITSSRFNPILKEYYQLKIKEGKSHMTVIGAVARRLTGIIFAMLRDQTAFTV

SEQ ID NO: 50774 - protein, 340 aa, unidentified
MGNVTTIGLDIAKNVFQVHGVDADGAVVVRQRLTRGRMLKFFAKLPACLIGIEACASSHYWARELVAMGHDVKLMPAQYVKPYVKRGKNDAADAEAICEAVTRPTMRFVGIKTPEQQSAMMLHRVRMILNRQRTQISNAVRAHLAEFGIVAPIGRNGIDQLLDVIADPTDERVPADARVCLEMLATQLRMVKEQILENDRRVLASARETELGRRLMEIPGVGPLLASAIVATVPDPAIFRSGRNLAAWIGLVPRQNSSGGKERLGGITKAGHQYLRQMLIVGAMAVVRYAERNGTKRPWLVQLLARRKAKVAAVALANKNARLIWAMMASGERYREPQIA

SEQ ID NO: 50775 - protein, 321 aa, unidentified
MAERVLRWVGVDVSKATLDVHVRPTGEQWSAANDEAGIQKLVKRVRAAQPEQIVIEATGGYELAVAGALGAAALPVVVVNPRQVRDFAKATGQLAKTDRLDAAILARFAEQVRPEPRPLTTEAQQELHALIARRRQVIEMLTAEKYRYAQALGPGAPRVRKRVQAHIKFLTRELDIADEELGTLVRESPVWRARDDLLQSAPGVGPILSQTMLAALPELGTLDRKAIAALVGVAPLNRDSGKFRGRRTVHGGRAPVRAVLFMGTLAAVRHNPPIRVFYQRLLAAGKPKKVALTACMRKLLIILNAMMRKGAPWSAMLPEKA

SEQ ID NO: 50776 - protein, 418 aa, unidentified
MNEELFARLSRRYMALDIHKHYSVVAGVNFEGQVILEPVRIEHADLEGWLKKHIQPTDYVVIESTTNAWHIYDLLEPLAEKVLVANPIKVKQIAQARVKTDIRDTLILARLLAANMVPVIWVPPAHVRNLRYLLSQRRHLVEMHTATVNRMHSVAHRHHLSHPRGKRFNKKNTEWQQADALSDSEKFQLELDMNTKKHLAEQTEKITEKLRRMSHRKPWAESMMYLIQLPGFGVITGMTVLAAIGAITRFESPRHLASYSGLIPGLEQSGVKLRGKKITKEGRKDLRWAMVEVAQRAVKSDPLWKHRFNALQRRMHRNQAIVAIARRLLELVWYVLSRKQPYRNFSHERIAYKYLTWSWQLNDKDRDGLTRQQFTRYYLMRLGIGHDLKRIALNPKYPRRLSSEAELLALMPDLLQTE

SEQ ID NO: 50777 - protein, 347 aa, unidentified
MVHAGLDLSRRKVDVCLIGGDGEVLGEFACPCDHDGLRQLVERVGLGLRVRAVIESMSGARFVHDSLEQLGWEVLIADAQKVKGLAPLTCKTDRIDAGVLAVLSHRDLVPAIWLPDPRVRGERELARFRMHLVKHRSMLKNRIHSALINWGKPCPVSDLFGVAGRRLLDELEIPQPWRGSIDASLLLIDDLDAQIAKAAAELKASGVDHPYVPLLMSAPGIGWVLGFTIAAEIGQIERFASAQKLVGYTGLCPRVYQSGAKDRRGQLTKAGPKYLRWAMLEATMHALRHRAYRDRYQHTKKRLGRQRGAKVAQIDIARRLTGAIWHMLTRNQPFNPAAGGAAFRLAA

SEQ ID NO: 50778 - protein, 347 aa, unidentified
MQVSTIGLDLAKRVFQVHGVDAAGAVVVRKRLRRGEVLRFFAALSPCLVGMEACAGAHYWARELAALDHAVRLIPPRYVKPYVKRGKNDAADAAAICEAVGRPSMRFVPVKTDEQQAVLMLHGVRDLLVRQRTMLANAIRAHLAEFGIVAARGRVSLDRLIAEIEGGGHAGVPDLARTALRALIEQLRAAEGRIADIEREILAWHRASPDSRRVATIPGIGFLGASALVAKVPDPAQFRSGRDLSAWIGVVARQTSSGGKQRLGGISKQGDRYLRRLLVLGATAVLRHRSAREALGGAWLDGLLARRPGRVVTVALANKMARIAWALLMHGETFRARSRPIAAGAGA

SEQ ID NO: 50779 - protein, 338 aa, unidentified
MRTSQTAQTYTLFVGVDIAATTAAVSIQRAGAPASRSFTIDQTPEGHTKLMHQLQATGHVPSRILVVMEATGSYWISLATHLVHEGFVVSVINPAQAHYFAKALLKRAKTDAIDAQTLAQLAMVLQPEPWRPPPPIYHALQQRLAQRDDLLNLRQQVDNQLHALRQHPEVIPEVRARMEHLLVIFETQLAEVEAEITAALRQDSAWAAAAQRLQSIIGVGWVTAAWTLVSTLNFTTCDTVEALTAYAGLAPMPRQSGTSVWYRPAIGHTGNSRLRTALYMATLSAVQHNPIIKTFYGRLRAAGKPEKVARCAAARKLLHIAWALVKKDQAFDPHYARG

SEQ ID NO: 50780 - protein, 451 aa, unidentified
MSRKQASKKKVVLPILHPNAAGIDIGATEIYVAVPPDRDPDSVRMFLTFTADLNALADWLQECRIQTVAMESTGVYWIPLMQILQDRGLEIYLVNAKHVKNVPGRRTDVSDCQWLQYLHSVGLLRASFRPAQDVCAIRSLLRHRDSLIEMATCHVHHMQKALDQMNLQIHHVISDITGTTGLAIIDEILSGERDTEKLAQLRDPRIRASQETIAKSLVGDYRPEHLFTLRQVLALYREYQGKIVACEAEMQRLMKAFESRADPSSLPPPKDSVKKCKVMNPARAIALREEAYRILGVDLTTIPGISVLHVQTILAELGSDMSKFRSSGAFSSWMGLCPDNDISGGKVLWSGTRKVKNRIALTLRMAAQSLQQSQSALGEFYRRMRAKLGAPKAITATAHKLARIVYHLLTTRQPYDDSVFAKAEERYRKRTENRLKAQAQALGFTLVPAEA

SEQ ID NO: 50781 - protein, 344 aa, unidentified
MKHYAGLDVSVKETSICIVDEAGRICREMKVVSHPEDLLTVLCDPAWQLERVGLEAGPLSQWLFSGLAEAGVPAICIETRHAKAFLKAQVNKSDRNDARGIAQMMRVGLFRPVHVKTLASQKRRALLAARKILQEKALAIENDIRGLLRNFGLKVGIVGVVGFEQRIHDLVEGVPELADIMEPLLAARRVLREKFAKLHRKVLLLARDNEVCQRLMTIPGVGPVVSLAFISTVDVPARFRNSKAVGPSLGLTPVLNQSGERHRVGRISLCGDEAMRALLYEAAQVMLTRVQKWSWLKAWAMNIAKRRGQKKAIVALARRLAVIMHRMWSDGTEFRWTREMAPTI

SEQ ID NO: 50782 - protein, 366 aa, unidentified
MDSVALSGGPIHLGLDVSKNKIAVGILRWDEQVPDTEMLFNDEASVRRLIARFDDRGLLRVCYEAGPTGFGLYRLLRSMGVACEVIAPALIPKAPGDRVKTDRRDCRRLARLHRAGELVAIRVPTEAEEAVRDLCRARAAVVGDRTRIRHRLSKFLLRHDRVWRESAWTLAHETWLLGQRFDDPALRATYAHYRAMLTAREVELAALQADLAYWHDHGPFTDAVARLSAYRGVAATAALTIASEVGDWRRFPAARAFMGFTGLVPSEHSSGDAVRRGHITKAGNTHLRTQLIESAWTYQHRPNLGVQLRRRQQHVTAATVARSWHAQQRLCGRFRRLAAHKSSRSVVATAIARELAGFLWAEMTAD

SEQ ID NO: 50783 - protein, 346 aa, unidentified
MNITTIGIDLAKNVFQVHGVDERAKAGLKKQLKRAQVLPFFANLPPCLIGMEACGSAHYWARKLNELGHTVKLMAPQFVKPYVKTNKNDAADAEAICEAASRPSMRFVPVKTGEQQAVLSLHRAREGFVKARTAQANQIRGLLAEYGIVMPVGIDNIVKRLPDILEDGENNLPGVFRQLLQRLGEHLKELDRQVDELNEQIQLWHRENAASRKLADIPGIGPITASALVASIGDAKDFESGRQLAAWLGLVPRQHSTGGKQTLLGISKRGDCYLRTLLIHGARAVIRVSERNVEQADSWLTRIVDRRNKNIATVALANKNARIVWALLAHNREYQSDYVPAVATGA

SEQ ID NO: 50784 - protein, 349 aa, unidentified
MIVIGVDAHKSTHTFVAVDEVGRKLAELTAKATTDGHLSAIEWAKQWPQLQFALEDCRHVTRRLEADLLNRGHAVVRVKTQLMAVHRRSAREPGKSDPIDAHAVAMAALREPNLPIARLDGPAREVKLLSDHRHDMVCERTKLISRLRWHLHELDPELHVPVRGIRRYRVMDELADRLTHFTGVVAQIAGELLSRCRQMTRQINDLERQIRERVRVLAPSLLAIPGCGVLSAAVIIGETAGAHRFHSKDAYAKFNGTAPIPVWSAQERVRLNRGGNRTVNAALHAIAITQVARGGLGQAYVAKLQAAGKTRREALRLLRRRISDRVFQVLRADESELGNTAKGPFAVAA

SEQ ID NO: 50785 - protein, 408 aa, unidentified
MEVVYRCCCGIDVHKKVIVACLNNGGEQDLREFGTTTSEIKSLAKWLTESGCEMIAMESTGVFWKPLYNLFELMDLDAIVVNAAHMKALPGRKTDVKDAEWIADLLRHGLLKASYIPSREQRELREITRYRKSLTEERCRETNRLQKILEGANIKLDSVVKDINGKSARKLLERIIEDDVPTSEAEVSRIVHGSMRSKLGQLVTAIEGITTPLQRKLLAQVIDHIDDLNKRISNLDKLVQNYMDEYEAAIAALCEIPGIARRSAEVILAEIGLDMSRFSSAAHLCSWAGVCPGNYQSAGRRKHGKTTKGNKALKTILTQCAKSARSVKQSYFSAQYQRIAARRGKNRATLAVAHSMLIAIYHMLKNSMPFRDLGADYYDSFNRDRKIQGYLKRLKALGWEPDALPGSA

SEQ ID NO: 50786 - protein, 345 aa, unidentified
MYYLGVDCHKKYSQVAVLDGEGKLKMNLRVLNNKEHFASLVDNLGQPCQAVIETGYTWGIMYDMLTEFGVDVKVAHALKVKAIASAKIKTDTIDARTLAELLRANLIPEVYVPTKNIRSQKDIIRQRCWLVKLKTMLKNRIHQVISRNHAESPGFSDIFGVGGRKFLNSLELPQPDQAILRQDLSLFDFINEQIKLTEKWIEDFLADNHYRKIIQTIPGFGKILSTLVALEINDINRFNYPGKLAAYSGLVPTTYASGGKVFHGDLLPGCNRWLRYAFVEAAWKSIVVSPYCRSLYDRLKKRKCSNTAVVAVARRLSEIAYLCLKENRCYEERPYKLYEKCLTKT

SEQ ID NO: 50787 - protein, 373 aa, unidentified
MTKNLRYLGLDVHAETIAVAVAEPGGEVRSLGIIPNEPSAVAKLVRKLGGREQLRACYEAGPCGYVLYWQLTKLGVACDVVAPTLVPTKPGDRVKTDRRDAEKLARCHRAGDLTAVWVPDAAHEALRDLVRAREAAKADQLRARHRVSKFLLRHGRRAPGDVKPWTQRHRRWLDTVTFAPVAQQTTLADYIHEVDHAGARLERLETALDVAIAAAPPAMQAIMRALQCLRGVRQLTAATIVSEIGPLSRFAHPRQLMGYSGTVPSEYSSGSSVHRGAITKTGNAHLRRVLVEAAWAYRFPPKCGDTLRTRQRGQPPGIIDIAWKAQQRLHTRYRRLLGRGKPVPHVITAVARELVGFIWAIGIAAEREVAIAA

SEQ ID NO: 50788 - protein, 391 aa, unidentified
MLICGIDIGKNHHEASVIDQSGKLLAKSLRFANTTHGAESLLEYISGCNVGKDVVVIGMEATGHYWMSLYCFLFDAGFQVNVINPIQSDAIRNLFLRKTKNDAKDSFLIAETIRIGRYSKTEMADEDILSMRQLCRHRMDLVDYIADQKRKIIGVMDRVFPEYQTFFSDMFGKTSTELLSKAVTPEELLAIPTEELCKLLKSNSRGRFGQAKAEELRQTAKTSFGITIGTTAFTMQLRQLLEMIQLLESQLVELESEIEQYLVKLNTPITTCPGIGNVLGAIILSEIGDISRFSEPKKLVAFVGIDPSVKQSGEFTGTQNKMSKRGSPHLRRAIWLAANVAAFHDPVLSAFYQKKRSEGKHHFTAVGAVARKLTFIVYAVLRDNKPYVPNC

SEQ ID NO: 50789 - protein, 485 aa, unidentified
MRQRVFVGIDLGGRFHQVQVTRESGERLGKSFRIGRGRAGLEALRAGLTQLGEASAEPIYTIEATQSYWLELVHPLQREGARVYLVSPAKSMALRTFYRRHTKTDTIDAEAVSRLPVVDSGLRPAVVSDARFDALRRLVRQSWQLRGHMADRKRRIMARVLMVYPGYEAVFRDRYCGASLLFVRRYLDPVKARRLGPVRLATLMRKRALGKFDAERAERLWKVVLNAPELSVAYEDLQRLVTLDLDLLEAEERAQKELRERIAELYGEVDPQTRLTSMPGLGDFLAAAITAFIGEPDRFRSADEVVALSGLCPRKKSSAGSDTANQPLTKHGDPTLRGCLYVAAEIARHYDPELRAFHQRLTRRGKHYKQASCALAAKILRRCFSLLRTGQSYRVGHQDALALSKDGGKNIRESVHEVAERLNDISGVTSPAEEASPDRRSSQRQRGALKPPSTNYQLQRMPADRRTARATALKSGAVRPKEALT

SEQ ID NO: 50790 - protein, 452 aa, unidentified
MSRRKQRKKFKVTDLPEHLQQVNLNAAGIDVGSDRHVVAVPSGRDDVSVREFGAFTTDLNALADWLTKCGVTTVAMESTGVYWVPLFEILEQRGFEVKLVDARQVKNVSGRKSDVLDCQWIQQLHTYGLLAGAFRPADQICVLRGYMRQREMLVQASSMHIQHMQKALQQMNLLLHNVVSDITGLTGMKIIKAIIAGERDAKVLAKHRNYRCQSSAATIAKSLVGNYREEHLFALSQAVSLYETYQAKIVECETAIARYLNSQAKRTDEEPPPEDKSSRDRDRLRGGVDVRSKLYQMTGVDLFNLPGLGADTLLTLAGEAGFDMTPWRSEKHFTSWLALCPGTKKSNGKVLSRKTKRSANRAAAAFRRAAASLSRSKTALGAFYRRIRVRVGKAEAVTATARKLAVLYYSMLKHGSAYIESGQAAYEEKYQQRRLYSIQKQALALGYQLIPT

SEQ ID NO: 50791 - protein, 356 aa, unidentified
MNQVSKLDFTGQPIYIGLDVHKKSWSVSIYSNHFEHKTFTQPPNVDKLVTYLKRTFPGAAYYSVYEAGYSGFWVHDQLKQQGIKCMVVNPADVPTKDKEKTTKTDRVDSRKLARSLRNGELEGIYVPSRIKIEDRSLVRTRQSMVRKQTRCKNQIKSIVSFYGIPIPEEMENRRWSRRFISFIEQIRMEKTSGDFALKAHLDELLHLREIIAHLNKAIAQLAKTEQYHPQVQLLKTVPGISTLTAMILLTELSEISRFKTLDKLASYVGLIPNTNASGEKDHKNTLTKRRNSQLRALLIESSWVAVRKDPALMLSFNRLSTRMKKTKAIIPIARKLLNRIRYVLKNQKPYLPAVVE

SEQ ID NO: 50792 - protein, 318 aa, unidentified
MSNEMCVGIDVSKERLDVAVGSSGEIWQVTNDEAGHGELRGRLAAIGPRLIVLEASGGYEAIVAGALWEAGFQVAVVNPRQVRDFARGMGKLAKTDRIDARVLALFGEKVPLEVRTPVDAEAKELQGMVLRRRQLVEMLTMEKNRRGLVPVGRARKSLDKHIVWLEEAVRRANDDIDQTVRKSPLWREQEDLLRSFKGIGPVSARTILVELPELGMLNRKKIAALVGVAPFNRDSGKFRGKRMIAGGRAHVRTVLYMATVTAARSNPVIRAMYQRLLAAGKAKKVALIACLRKLLSILSAMMRDNARFAPGTRATALA

SEQ ID NO: 50793 - protein, 352 aa, unidentified
MNYNTVYVGMDVHKESFTLCSCKYEDEKASHYQRTPASYKNVLRYLAFLRTIYGEDTRFVCGYEAGCLGYSLYHQLENFNVECVILAPTTMLEQRSKRRIKTDKRDAEIIARSLAQHNYSPVHIPTETDNQTKEFIRMRDDHKAELKKIKQQILSFCLRQGYQYDGSGNWTAKHVKWLRSLKPAGLYKEILDEYLLTYTILTDKLNRLDQRIEELASKEEYKESVSKLTCFLGIKTHTALSVIVEVGDFQRFVSARKFAGYLGLVPGQHSSGDDRNGLGITKAGNTHVRRLLVESAQSYTRGKIGYKSRVLRSRQAGNSPQVINYADRANERLRRRYYKTVSYTHLTLPTIA

SEQ ID NO: 50794 - protein, 350 aa, unidentified
MEYIAFDAHKHYTVASVERPTGEVLQETRLAHHRGVIRDFLQQWTPGSPVAVETVGNWYWLVDEIEEAGMVPRLVHARKAKLMSGMINKTDKLDVRGLNRLQRTGTLPTVWIPDAEIRDQRDLPRTRMVLVRARTRLKNRIHATLAKYALTVTDVSDLFGKQGRIILSDKLAQLPPHSRFSAEHLLEQLKALDAHIAEFEVRIRKVFKKTPALEWVISLPGVGLILGIVILLEVGDIHRFPDAEHLAAYAGTTPRVSGTGGKIRFGRLRTDVNHYLKWAYTEAAEVICQHRADWSHRHVSQLYTRVRHRKNHQKAIGAVARHLAEATYWILTKRESYQEPKRRSDASMKA

SEQ ID NO: 50795 - protein, 345 aa, unidentified
MQPMYYIGLDVHKRTVSYCVKDVSGTIHAEGTLPATRFHLDQWMKNLPQPWTAAMEATVFTGWIYDHLRPHAAGLKVAHPLMLRAIAAAKKKNDRIDAKKICDCLRCDFLPECYMAPTAIRERRRTLRYRSLLVRQMVQMKNKISVLLMEAGVSYNKQRLHKAGYFRELLAKNPDINEGLCSLLRVCRETVVRLQRTESALVRSLERDSLLKERVERLMTIPAVGPITALTWALEVGDVERFSSIKKAVSYCGLCGAEKSSANIVQRTPLSKQRNKHLQTTLIEAAKMAPRYSPHLALLYDQEKRKGNANRATLAVARKLVAYLMAVDRGQRNFQVTEAHHCAAA

SEQ ID NO: 50796 - protein, 333 aa, unidentified
MRFNSFIGVDISKLYFDVVLLNNHGGFHSSKRFKNNQHGFNAFTQWLQLNRVCIKSSIACMEHTGVYCLPLCGHFEELGLSYSLQSGLQIKRSMGIQRGKNDKADARIIAKYVYLNRQDITPHKLPSRVLMKLKNLLTYRERLIRTKVSLQTAAKELKSFTDKQLHHLIVSDTEAHLVNIKKSIVLIDKKIKTLISEDEKLNDLFILITSVKGVGLQIAAHMLVSTHGFTRFKTWRKFSCYCGLAPFEYQSGSSVKRRTKVSHLGNKKIKAIIGNGIASAIQNDPEIANYYHRKVEEGKHKMIVLNAIKNKLISRVYAVVNRGTPFVPLYQHS

SEQ ID NO: 50797 - protein, 353 aa, unidentified
MLIIGCDFHPSFQQVAIFDNRTGEIQEKRLQHREEAEQFYRSLVGQQVRVGMEACGHYPWFERLLAELGFELWLGDAAEIRATVVRKQKTDRRDAEHLLTLLLENRFPRIWVPSLEERDVRQLLVHRHKQVQARTRVKNQLQAMALSQGVQKKRKLWTAAGRAELEKLELLPYAAERRKQLLQSLDGLEAEIEQLNRRVEAEVAKRPAAVKLQTHPGVGPVTALALVLTLGPAERFPSGKEVGSYFGLIPSEYSSGGKQQLGHISKQGSSFLRFLLVEAGQTAARYDAELGRFYRRLAVRKHRALAKVAVARKLAVRLYLMLREDWTYAQLCRAVVQASPSHAVVERQNRPLE

SEQ ID NO: 50798 - protein, 320 aa, unidentified
MDSPRPVVGIDVSKDRLDVACLPSSVLTPKEAAFDNTPKGHQRLIAVLKRIQPRLIVLESSGGYQRVLVATLGAAGLPIVVVNPRQVRDFARAMGVLAKTDTIDAMVLARFAEKVDPPIRPIPEPELVDINALLARRRQLVKDRTSETNRLEQCTCARVRTSHNIVIDLLSREIADIDNDLDQRIRNSPIWQHKVALLTSVPGVGDVTARTLLAFLPELGTINRQTIAALVGVAPINRDSGLMRGRRSIFGGRAVVRHVLYMATLTARRHNPDIKRHYEQLVARGKPKLVALIACLRKLLVTLNALIKHQTMWAPKTLQA

SEQ ID NO: 50799 - protein, 343 aa, unidentified
MQIHSVGIDLGKTTFHLVALGAAGKVIVRKKFNQKQLLAYTANVPASLIGLEACSGAHFLGRALRQQGHDVRLIPAQFVKPFVKSNKNDFVDAEAIAEAVERKNMRFVPIKTDDQLDLQAIHRVRDRLISRRTAVINQVRAFLLERGLVFAKTPAKLRAALPDILENADLDLTSQMRSLIDLLWREWKTVEDQIEGLSLELERISAADPGCTRIRQIPGIGPIVATAIVAAIGNGAAFRKGRDFAAWLGVVPRQYSTGGKARLLGISKRGNVYLRKILIHGARAAVLRIKRDRAPIGAWLDALDARAPKNVVVVAMANKLARIAWAVLSSGEDYRPMGNIVAA

SEQ ID NO: 50800 - protein, 352 aa, unidentified
MDTSKYIGMDVHMATTVIAVANSIGKVVSETILETKATTILDFLKSQRGTVHVTFEEGTQAAWLHDLIRPHVAEVVVCNPREIPAQDNKADKSDAKRLAELLRTHGLKAVYHGEHGTQALKELTRSYGAILSDSTRVKNRLKGIFRGRGISCTGTSVYSKKGRDQWLKKLDDSAVRSRISKLFKELDCLTELRNEAEKELLAEARKHPATKILRSIPGIGPLRAAVILGFTITPHRFRTKNQFWKYCGLAVMSEITGEYALIDGRVVRSRKKPLVRGLNINYNHALKEAFKGAATTAAMGVWRSHFDAMVANGTRPSLVLLTLARKIASITLAVWKKGELYDSNKLKFVHAV

SEQ ID NO: 50801 - protein, 323 aa, unidentified
MQGKVSFQEDAMLVVYAGVDVSKEWLDVHLHPLGESRRFSNDKTGIGQLKRLLARYRPERIVMEATGKFHRPVHRSLWCDGFAVAVIDPLRARMFARACGYLAKTDRLDARFLALLAESLRPPAAAPPSPHIEALQELVNARSAAKDDLTALQNRSKTATTAVLRGELNRLVRRLEQHIDRLDKEIERYVGKDPQLCRKAEILTSIPGIGRITALALMAGMDELGSCSGKQAAMLAGLAPIANDSGARTGRRSIRAGRPAPRRALYMAALSACRYNPALARFAETLKAAGKPAKVVLVAIMRKLLVLANCLLSQDRLWTPNPP

SEQ ID NO: 50802 - protein, 417 aa, unidentified
MNRYAACLSIDWADKKHDLCLFDTATGKKSKQVLPHTPQAINEYFTNLRARYPGQQIAVGLEQSRGPLLFALLQFDFLVIYPINPTTLAKYRQAFSPSRAKDDPTDAEYVGELLMQHSDRLKAWHPDDDQTRTLRYLVEHRRRLVGDRTRITNRMTSLLKCYFPQVLSWFPDLATVLVCDFLLRWPALERLRGVKRTTLLNFFRAHHSVRTDTLEKRLAAIKESLPLTTDRAIINSSVLMITALAAQLKTTIEAIRSFDSEIAKLCAVHPDFPLFQSLPGAGEVYASRLLAVMGTKRDRWTTAQDLACLSGIAPVMERSGQSTWIRWRYFCPKFMRQSFHEYAGESVKHSFWARAYYEQQIAKGKNRQAAVRALAYKWIRIIWKCWQTHTPYHEVKYLESLRKKGSPLLSYAAKNAA

SEQ ID NO: 50803 - protein, 339 aa, unidentified
MNITTVGLDLAKNVFHVVCLNEHNKEVKKRMLRRNHVRQFFAQLPACTVAMEACATSHYWGRELIALGHNVKLIPPQHVKPMVLGNKNDYNDACAIAETVNRPKITFVAVKTTEEHDMQAIHRMRAQCIRDRTALSNSTRGLLGEYGISFSKGLAVLRRKIPELLEDADNGLSLRFRNLLARRYGQLVEIDEHVAFYTKELELLSKQDDACERLQTIPGFGPIVASAFRSAIGDGRAYVRGRHAAASLGLVPRQYSSGGKNVLLGISKRGDRYLRKLLVHGARTVVLHAANRDDPLSRWINRIRERRGYNRAAVAMANKMARMGWAILRHNTSYEPTLA

SEQ ID NO: 50804 - protein, 322 aa, unidentified
MNNLKYSVGIDVSMKDFACCLSVINDQQEVKVRATRKFTNGESGFKSLLEWVKKHAKEQIPIFYIMEATGVYHEQLAWFLYSKDQSVSILLPNKAKNYLKANGAKSKNDQIDARGLAQIGAEKKLDLWIPPSKDLYALRAYTRQHQSINEMYTATANQLHSIAHSQFQNKDIIKQLKSTLKLLEKHLKEMEGIMAKVIKSDPVLNGHYQNICSIKGLGILSFAVIAAETNGFALFDNAASLVSYAGYDVIENQSGKHTGRTKISKKGNSRIRRILHMPALCAVRDDQPQFKKLFERVYERTRIKMKGYVAVQKKLLVMMYYL

SEQ ID NO: 50805 - protein, 338 aa, unidentified
MVHIGIDVHVRESQICVLRETGELTQQRIATRRDRLAAVLGSLAPARVLLEASGQSEWVATCLEGLGHEVVVADPNYAPMYPGRRRIKTDRRDAEALAVACAKGTYRPVHRRAAAQRAVQVQLTVREQLVRVRTQLINVVRATVRGEGLRLGSGTAETVAARVAGLALPAALRTTLAPLLTLLDQVSAQLAEVEATLTAAAAQTPGVAPLLTLPGVGPVTALAFVGTLDTPTRFGRTAEVTSYLGLVPGERSSGDRRQRGGITKRGPRRLRWLLVQAAWCVWRSTRADIAPLRAWAHRLGARRGVRVAVVALARRLARILFAMWREGTPFRPLAAVSA

SEQ ID NO: 50806 - protein, 347 aa, unidentified
MQYIAVDGHKRYSFFRMEDRQGRLLRQGRVEHAPGAIEAVLAANCEPGSPVAVETIGNWYWIVDEIERAGMEPRLVNARLAKLMMGQLNKTDKLDAAGLNRLQRNETLPTVWIPPAQVRDERELLRARMALVGQRTQLKNRIHANLDKYGLSVSGISDLFGRAGRQALEVLIPQLPPHTAEATRLMLGQLDDLGETIGALERRIAEVFRDTPERKLLLTLPGVGPVLSAVIHTEAGTIERFATGDRFASYVGATPRVHASGGRSYGGRVRPDCNHYLRWAFVEAANAIVLQQQRHPDWHVVRLYQRVKARHGHQKAIVAVARHLAEATYAILTKGESYREPRPSRRG

SEQ ID NO: 50807 - protein, 326 aa, unidentified
MEHELHYIGIDTAKEKLDVDVLRPDGRHRTKKFANTTKGHDELVSWLKGHKIDHAHICIEATGTYMEPVAECLYDAGYIVSVINPALGKAFAQSEGLRNKTDTVDARMLAEFCRQKRPAAWEAPHPLERALRALVVRHQALTDMHTQELNRTETAREVQRPSIDAHLLWLEAELKRLEKQIKDLTDDDPDMKHRRKLLESTPGIGEKTSAVLLAYIGLKDRFAHARQFAAFAGLTPRRYESGSSVRGASRMSKAGHVSLRRALYMPAMVATSKTEWGRAFRDRLAANGKKGKVILGAMMRKLAQVAYGVLKSGVPFDASRHNPVAA

SEQ ID NO: 50808 - protein, 340 aa, unidentified
MEKISALGIDLGKSAFQVHGVDAAGGTVIERRFTRQGLRAWLVRLQPCLIGMETCSGAHHWGRWLQKQGHEVRLMNPRYVKAYVKTNKNDARDAQAICEAVTRPSMRFVPVKAIEQQEVLMLHRIRSRLVADRTALANQVRGFLLEFGIVVNQGIRVLRRRLPEILEEAQNELGDEGRMLLAELREELVALDSRVSELDERVQRQSQSDESCRRLQAVPGIGPLTASALVSTIGDPHSFSGGRHLAAWLGLVPRQDGTGGKIRLLGISKRGDRYLRTLLIHGARAALRTAGKRQDPYARWALSVEERRGRNIAVVALANKMARIVWALWAKQQPYAAGCA

SEQ ID NO: 50809 - protein, 368 aa, unidentified
MSQSRASQHSGLRGIFEGGCDYHPSFQQIALVDTESGELQERRLKHRDEAEHFYRALAAAGKKVRVGMEASGHAGWFERLLAELNIELWMGDAAKIAAKRVRKQKTDRRDAQHILTLMVKDDFPKIWVPNWENRDVRQLLWHRHRMVQTRTRIMNQLQAAALNEGLRYKKKLWRESGRQQLESLPLAPWASRRRHDLLEVLDRINPTIAELTQAIEQQAEKCPEAQCLMTHPGVGALTAMAFVLIVGEAERFGCGKQIASYLGLVPEEASSGERRRLGHISKQGNSLLRFLLVEAAQVTVRSDMRWRNWFFHLAQRRGRKIAKVAMARRLAVRLYWMWRRRWNYAQLESFGSHVGQPVNPMVCSKSPT

SEQ ID NO: 50810 - protein, 354 aa, unidentified
MQIHTIGVDLGKTVFHLVGLNLRGEVVVRRKCSRSQLLQFTANVQVNLIGMEACAGAHFLGRALREQGHEVRIIPAQYVKPYVKTNKSDFIDAEAIAEAVGRPSMRFVPVKTDDQLDMQSLHRVRERWVIRRTAVINQIRGLLLERGITLRQGRRHLEAALPGILEDATARLSGALRMLISQLKHELEELANFIGEADGTMERTSRENESCRRLLAVPGIGPVTATALIAAIGNGAAFRRGREFSAWVGIVPRESSTGGKQKLLGISKRGNPYLRKLFIQGARAVMLRGTKQSVDLRTWIENIALRKHHNVVAVALANKMARIAWVVLARGEAYRPSLLIDSERNLNGLQMTPA

SEQ ID NO: 50811 - protein, 341 aa, unidentified
MTKAITIGIDIAKNVFHLHGAAPDGAVVFQRKLSRARLLDFLAKQAPCLVAMEACAGAHHWGREIGRLGHDVRLIPPQYVKPFVKRQKNDAADAQAIAEAASRASMRFVAVKSAEQQAQAMVLKVRDLLQGQRVQTINALRGHLAEHGIVVAQGPSNLPKLEAALDDEGLSLPGVVIELCRGLFNHLRVLTGQIDGLTARLKAAARRDETAKRLMSVPGIGPICAMALTALAPPKESFGKGRDFSAWVGLTPKQHSTGGKVRLGRTSKMGQRDIRRLLIIGAMSVIQAAERRGGAPVGSWLARMLARKPKMLVAVALANKMARTAWAVMTKGEVYRVPLTA

SEQ ID NO: 50812 - protein, 365 aa, unidentified
MRAFGLDVHRDFCEVAIAEGGAIRSAGRVATRVGSLELFAQSLVAGDVVALEATSGADRIVSLLQANGIRVVVANTRKLRSITEAKAKTDRLDARTLARLLVSGLLDEVWTPDERTRSLRRLTNRRERLVRARTRAKNEAHGVLARNLCERPPVTDAFGKAGRRWLARLDVPVDERLTLNGCLRQVDFLDAEIAALDSEIARAALAWPEVLRLMTVPGVNVQTAATFMAAIGDIRRFPSPRKLVSYLGLDPRVRQSGSTPARHGRISKAGASEPRHMLGEVAWKVMLTPGPLRAFFERVRARRGPQVAATATARKLTVLLWHLLTREEDYAFARPAMTRNKVRRLELLAGAPAQKGRKGIAGGKV

SEQ ID NO: 50813 - protein, 394 aa, unidentified
MKLIGIDIGKNKHFFCVIDQQTGEIISQPVSFSNDKEGFDFLVQEIKSYPKDSILIGMEDTGHYHFALLKHLLDLQYTVALINPKTTDFNRKMQGGITKNDKLDTINICDVLDTPERKKQYRITKVNSFDLYEQKQLTRHHHNLKEEENVYKNRLQKCIDIVFPEFNKLFNSKYGIVYMNILKMFGSAENIANTDIRTIRKCFEIEGRGNRISLTPERLKECARSSIGISSSAEVIQIKHLTAQIELIEEQLTEIDKKIEEFSIQNNSPILSIPGISHFSGTSILAELGDISNYSKPSQIIKFAGVAPLHYESSQFNAQHTAITKKGSKYLRKTLYQIILPVIRHNPVFNKYYQLKISQGKGHRCAQGHCVRKLLRIIYHLLKTNQQFDPQLLR

SEQ ID NO: 50814 - protein, 348 aa, unidentified
MVMTIVEAPHAVIGGVDTHLDVHVAAALDPIGGVLGVESFPTTARGYQSLLGWLESFGAVERVGVEGTGAYGAGLARFLGRSGIEVVEVDRPNRQARRQKGKSDPEDAVEAARSVLSGRSKGRPKTRTGKVEAIRVLLVAKRSARQGRLRAVHQMRQISYTAPEQLRSRLKGLSTEDLVAEAAAMRPRNGIDPVDFATKVALVSLGRRALELEEEAAHIDSQLAELVEDVGSGLLGVFGIGIDTAAVLLATAGDNAERLHSEAAFARLCGVAPIEASSGKVTRHRLNRGGDREANQALWRIVMTRLSFDPRTREYMERRTKEGRSKREVIRILKRYVAREVYRHLRPA

SEQ ID NO: 50815 - protein, 349 aa, unidentified
MEAAYDGPQIVGMDLHRRRSVLVRMTEDGTRLGTARITNSAAELRREIARAGQRPKVVLEATYGWYWAADALAAAGAEVHLAHPLGVKAFSYRRVKNDEKDAADLADLLRMGRLPEAWIAPAEIRELRELTRYRIKLVRLRTSCKDQVHAVLAKLGIEVTCSDIFGVAGSAWLDELPLPQPYAGKVASLRTLAGELTAEITLLEAAIADLLAHHDGYHAIQALPGIGPVLAAVLVAEIGDITRFATPARLCSWAGLTPRHRESDTKVRRGHITKQGSPLVRWALVEAIQHVPAGHPLRQRKEDILARRGDQAKNIAKIAVARQLLTWVFYAMRDGQVRDLATATGRKAA

SEQ ID NO: 50816 - protein, 398 aa, unidentified
MDLPVYYELETNNCNRDYRIQIGGHYMNYNTVYVGMDVHKESFTLCSCKYEDEKASHYQRTPASYKNVLRYLAFLRTIYGEDTRFVCGYEAGCLGYSLYHQLENFNVECVILAPTTMLEQRSKRRIKTDKRDAEIIARSLAQHNYSPVHIPTETDNQTKEFIRMRDDHKAELKKIKQQILSFCLRQGYQYDGSGNWTAKHVKWLRSLKPAGLYKEILDEYLLTYTILTDKLNRLDQRIEELASKEEYKESVSKLTCFLGIKTHTALSVIVEVGDFQRFVSARKFAGYLGLVPGQHSSGDDRNGLGITKAGNTHVRRLLVESAQSYTRGKIGYKSRVLRSRQAGNSPQVINYADRANERLRRRYYKMVLKDGKKYNIAKTAIARELACFIWGMMTDNIY

SEQ ID NO: 50817 - protein, 403 aa, unidentified
MLFCGVDWASDHHDVCLVGEDGEVRWRGRIAHDPSGIERLREAITIHEPDPKAVAVGVETSHGLLVGALVEAGYVVYPINPKAAERFRDRRKPSGGKHDRLDAEVLAQAVRTDRPSLRALLPDSALASEIATLARDRHALVRDHTRLLNQLRSALGEYFPAATVAFELDADSTLAFLERHPTPEAAAKLTAFQIAAFLKSRRANRDLAAKAAAAKEAFRAPALRARPEIARAKARLVRVVCAQLQALRPELAAYEHELERLLKTHPEGELFLSLPGLGTILASRVLAGTGDNPARFRSAAGLCAYAGTAPIVLQSGKRATVKARSACPKEFRDAVQQWADQARRPGRSAWAAEFYRRHRKRGHNHNESLRALGNRLLELIFDLRRRGIRYDEAVHAANIRWAA

SEQ ID NO: 50818 - protein, 355 aa, unidentified
MNQEKYIGMDVHDATISAAVKNAQGKLLMECVLETKAATILEFIQGLRGTLALTFEEGTMATWLHDLLKPHVSRLVVCDPRKNALMRDGNQNDRVDASNLAELLRTNQVRAVYHEKHGTRALKELGRSYLTLTKDSTRVMNRIKSVYRSWAIPCAGTSVYSRHHRAEWLAKLVEPGVRIRAEHLYEQLDSLQPVRQAARRELLRESRKHAAVKLLRQIPAIGPIRSALLVAILQTPHRFRTKRQLWAYSGFAVQTYDSGEYRFVRGKLQRNRERITVRGLNHNHNPDLKNLLKGAAITAIERPGPLQDFYAALVDKGIRPSMARLTLARKIAAITLTMWKKGVSFDPKQLQRQAA

SEQ ID NO: 50819 - protein, 333 aa, unidentified
MSEITSVAIDLAKGVFQLHGTDGQGRVRLQRQVRRAQLLSVLARLPRCEVTMEACAGAHYWARQLRLLGHEPRLIPAQHVKAFARRQKNDRNDAEAIACAARQRGIPQVAVKSEEQQAVLAVHRVRTRLLRERIALTNQLHGLLGEFGCVLPRGLKRLREELLCVLDAGTLPALLQSTLRDQLEHLGQLEQRLQTLTRQLDELARHSEPCQRLMRHRGVGPLIATAFAAEIADPGVFRNGRQVAAWLGLVPRQHSSGARVRLLGITKRGDPYLRQLLIHGARGALRHAARHSDAVSRWVLNVQQRRGANRASVALANKTARHLWATLRYSTAS

SEQ ID NO: 50820 - protein, 415 aa, unidentified
MEQMFPHCAGLDVHKKTVVACVLVTGADGKLQAVKRQFVTTMAGLEQLAAWLLSYGVTHVVMESTGVYWKPVYNVLAPQCEVWVVNAQHVKQVPGRKTDWNDAEWLARLMCYGLLERSFIPDVEQRELRDLTRYRTRLTAERAAAANRLEKTLEDANIKMTSVLTDIQGVSARAMLEALIGGESDPEVMAELARGRLRAKLPQLEEALAGQMRPHHRFMLRELLYHLDHINTCIVNVNGRIAELTAPHEAVIQRLCAITGVKRHTAEVILAEVGPDITPFPTAKHLASWACLCPGNNLSAGKRRSGKTRKGQPWLRAALVEAAWAASHSLDTYLAAQFQRLRARRGDKRAAVAVAHSILTVVWHLLANPEAVFTELGGDYFLKKNPEREQRRAVRKLEALGFTVTLTPVVAAATA

SEQ ID NO: 50821 - protein, 419 aa, unidentified
MTANSLMQRRSAIKPDTLIVGVDVAKFNHVACTLVPGGAIGKPFEFANSREGFIVLSAEIEARKPTPASAVIVGLESTGIYWINLARWLAEHGCQVVQVSGLYVHRAKELADNSRGTSDGKDALLIADLVAQGKYLGFVRPAGVLADLRQLVGLRQRLVQERAARYNLLHQSVDLLFPEFAAVFRDVTGPGARRVLRRFSTPAAALAHPPDEMRRQLSEDGRVRVSVTKLAELQAVARQSIGACEGTTGLEYALNDTLLELGSLDTRVKKVEAEIDRLLAQVDETPILTSVLGIGPMTAAIILGETGGLKQYSCAAAVLKLAGLNLYQISSGKYCGDRHISQMGRPLLRQALYLAALQHTHPGTPLYPHYADLLRRGKPKPVALIAVCCRLVRLLYALVRDGRCYSAQPPEKNRQTRAA

SEQ ID NO: 50822 - protein, 390 aa, unidentified
MPKRMRADRAELKPVKVGAAAIDVGSKMHMAAVHPSCVDMPVRAFGTFTQDLIDLADWFKSCGVTSVAMESTGVYWIPVYEILEQRGFEVILVNARYAKNVPGRKTDVSDAAWLRQLHSYGLLRGSFRPDAEIASLRAYLRQRERLVEYAAAHIQHMQKALMEMNLQLHHVISDITGATGMRIIRAIVAGERNPDVLATYRDVRCHSPIETVRAALVGNDREEHVFALTQSLELYDTYQAKIVACDRKLESLIATLTDKTAKPVGKLSRPRVKTKQVNTPSFDVRAALYGVLGVDLTEIHGLGPSLALKLIGECGTDLRSWPTAKHFTSWLCLAPGNKISGGKVLSSRTRRSSSRAAALLRLAATSIGRSDTALGAFYRRLSSRVARQRP

SEQ ID NO: 50823 - protein, 377 aa, unidentified
MKKELYLGLDVHKDCIATAVAEEGRRGEVRDTGVISNDLHALEKLIGRLRKAHGSDVIIRACYEAGPCGFGLARRLGQLGVECEVVAPSMTPTRTGDRVKTDRRDARKLARLLRAGELKAVYIPEPTDEAIRDLCRARTDAVDDRRRSRHRLKGFLLRHGYRYQGKTSWSAAHERYLRELVLAHPAMKVILEEYLISIEAAGERIERCELAMRDLLKKWRLAPAVQALMAMKGFQTVAAMILVSELGAIDRFTHPRQVMAYLGLIPSENTSNDKRCQGAITKCGNAHARWLLVECAQHYLTPPKVSKELSRRQQGQSREVRTISWKAQNRLHGRFARLSARRLQRNKALVAIARELCGFIWELLRTQRCYQALIPLD

SEQ ID NO: 50824 - protein, 359 aa, unidentified
MQSPLTVYPKLFIGIDVHKKSWSVCMRTDICEHKTFTMPSDAGQLAGYVNAHFYDHTIHVCYEACCCGFTAARYFLNLGWAVTVVNPADVPRMDKQNYQKTDKLDCRHLCRLLQKDQLRGVYVPPEQQEQLRSLSRQRHHVTRMLRKEKTKIKALLLYHGITIPQAYDNVNWSHAFKDWLQQLEWQHSTGKSTLQSKLRLLKIIYSEYLSLANELRSYCRQHYRKDYYLLKSIPGIGGYLASALLAELGDTRRFNNERQLASYIGLVPGIHQSSETKSYMGITPRCNALLRTYLVEAAWVVLRKDVGMQKYYRSHVGKNPKSVIVKIAHKLCCRILSVIKQERPYEVNYKTEVATTNPL

SEQ ID NO: 50825 - protein, 430 aa, unidentified
MTKLYSTPPDAVLVAIDMSKHRQEVLLERPEGGRRRRMTVMATKADYDRLADDLTTIGRPVIVGFEATGNYHRTLAHRLLSAGCELRLISSVALARTREALHNGWDKNDSKDAQVILHMLKIGATQRYVDPLAAGINDLQEMSKTHEAISKAKTQTWHRILTHYLPLDFPEIERFAGNSRSDWFLALIERFPTPGSITSIGREAFTEQAWPLIGRKVSKARVVNDIYETACASIALPIDEDSTAVAMFRMVIAQARTLIQQRNEIERIAHDALATNSDYQLLRMIPGIGPINALTILAEAGDLRRFSHHRQFLKFCGLDLATYQSGIFRGRTKLSKYGNARLRRTFWMATQVAIRQPNNSFRDKLSRYVDGHADDPDRRRKAMTALTAKMARVVHAVIKTGTEYRPFVERADTRWKDPSLLCREGATATL

SEQ ID NO: 50826 - protein, 281 aa, unidentified
MQITTIGLDLAKNVFQVHGVDATGQVVVRKSLRRSQMLAFFTKLAPCLVGIEACGTSHHWARELIKLGHEVRLMPPAYVKPYVKRGKTDAADAEAVCEAVTRPTMRFVPVKSPEQQAALSMHRTRDLLVKQRTQLINMIRALLAEFGVDIPKGMERALLMARQIVDGKAPEVPFEAAKVVGTLSQQALDTHVRLREIDRDLAVWLRGNEVARRLMTIPGIGPVGATALAASVTDPHQFRSGRQFAAWLGLTPLQKSSGGKERLGHITKMATNTCASCSLSA

SEQ ID NO: 50827 - protein, 355 aa, unidentified
MADKVTVAAVVGGVDTHKDLHVAAVVDQNNKVLGTQYFATTRQGYRLMLAWMTSFGALKRIGVECTGTYGSGLLRYLQNAGLEVLEVTAPDRMERRKRGKSDTIDAECAAHAAFSGIRTVTPKTRNGMIESLRVLKTCRKTAISARRVALQIIHSNIISAPDELREQLRNMTRMQLIRTLGSWRPDASEYCNVTNVYRISLKSLARRYLELHDEIADLDVMIAAIVDELAPELIKRNAIGYESASQLLITAGDNPQRLRSESGFAALCGVSPVPVSSGKMNRYRLNRGGDRAANSALHIIAIGRLRTDDKTKEYVARRVAEDIQKWKQYAVLSAISHAKFIHYCEIKTGRSTASR

SEQ ID NO: 50828 - protein, 386 aa, unidentified
MQHATTLPVPAPTCSRGDCATLFVSLELSRSTWVATALAPGSDKMSKHTLVGGDGRKLLDLLTRLKARAEQRIAAPVKVVAIHEVGLDGFWIHRLLEANGVESHLVDPASIAVPRRHRRAKTDAIDGETLLRTLMAWQRGEPRVCAMTVPPSPSEEDRRRISRERATLLQERIRHTNRIRGLLFGQGITNYNPLHKNRRENLEALRTGDGRSVPAHLKSQILREIDRLELVLRQIGEVETERDQMLQLAQASSPVALLMRLKGIGAEFATVLYLEGLFRQFENRRQLAAYAGLAPSPWKSGTIDQEQGISKTGNPRLRTTMVELAWMWVRYQPASALSCWFRQRVGFERGRTRRISIVALARKLLIALARYVSHGEIPAGAVMKAG

SEQ ID NO: 50829 - protein, 363 aa, unidentified
MTMISAERTDTTVEVILGVDTHLDFHVAVAIDHLGRRLGESSVPTTVKGYEELLCWAQDFGPVRCAGVEGTSSYGAGLARHLKAREIEVLEVERPKRRRPSSRRHLKKSDPSDAERAARAVLVGETSGVPKSADGRVEMIRALRAARRSAMKARTQAANQLQGLRVTAPEQLRHRLRGLSTKELVSVAARFHLGDDPHDVPTATKFALRSVARRYEALSGEIAELDSHLDRLVAQLAPELVSLAGIGADHAATLLIAAGDNPQRLRSEASFASLCGVAPIAASSGKVLRHRLNRGGNREANRALYMICLARMRRDRRTQEYVARRTTEGKSKREIIRCLKRYVAREVYRVLVSRVACSSPIGP

SEQ ID NO: 50830 - protein, 332 aa, unidentified
MNMHTQGGVVGSAARPNAGIDVSKQHFDVCCAGDEFRLDNGASGWDAAIVKLKAAGVDLVVVEATGGYERGLVCALQDAGITVARVNPRQARDFAKSMGMLAKTDQVDARALRDFADVLARHKDRQKYITEPTEPQRVELAALVTRRKQLVDMRVAEGNRLEQARTHKMVKSIKNVIKTLDKQLADIDHDIDDLLEEHFHDQRSLLDSVKGVGPVTIVTLTALLPELGRLERRGIAKLVGVAPLANDSGQFKGKRSIWGGRAGVRSVVYMATLSAIRYNQVIKAFYARLVAAGKPKKVAIVACMRKLLTILNAMLRDQVVWDAAKHVQPQTA

SEQ ID NO: 50831 - protein, 384 aa, unidentified
MNNNNIIFIGLDTHKEHIEIASAEDGRDHAPEHFGRIPTTKQTIIKFTRQMQSKYPKATLHFVYEAGPCGYWVYRLLTSLGHCCYVVAPSLIPRKSGDRIKTDKRDALMLTQLLKNSNIAPIYVPEPEDEAIRDLSRARESAMLDLNDGKFQLKALLLRNNINYSGKANWSLKHLRWLTEMILPHPAQQIVLQEMIQTITERMNRLQRLDNELVHHVKQWRYYPVVKAIQAIRGVRLLVAVGVIAELGDLTRFDHPRKLMSYLGLVPSEHSSGPKRRLGSITKCGNSRARRLLVEGAHSYRFTANISTDLQKRQEGLSKEIVDIAWQAQLRLCRRYQRLMKRGKHYNVVVTAIAREMIAFIWSISREVVLSPVNPKLRLVRRPS

SEQ ID NO: 50832 - protein, 424 aa, unidentified
MEEIEQEKAIRAWIGIDWADEKHDVSLYDVATGDQEASIIRQSPEALQEWLGQLRSRYEGGYVAVVLEQGRGGLLNALMGCEFLVLYIINPKSLSSFREAFYGSGAISDPVDAKLMRDMVRQNPGRFRAWRPDDVMTRSLRLLTEGRRNLVNQSTALTNQLTALLKGYYPQALAWVGMLDTAWACDFLEQWPTLQSLQASSRRQILRFYEKHPRASLDLNEQLKQIQDARALTQDEAVLESSALMVQALVSQLRSLLASIAEFDRKIAMIFRKHPDRPIFESFPGAGAALAPRLTAAFGTDRDRFQAATEMQELAGIAPVTEKSGKKSFVHWRYACPKFMRQTFQEFADHSRRWCKWAKAHYELLRRRGKSHNAAVRALAYKWIRILFRCWKDRQPYQDEVYTKALLKHGSPLSSLLAESVENP

SEQ ID NO: 50833 - protein, 429 aa, unidentified
MNIKPIAGIDVGKFFSEMVILSPSNELFARMRIHHDSNADMRRAIELLKKAEKDFASRPFIVMESTGHYHKILFHFLQKSGFEVSTINPIQTNCIKNFGIRKVKNDKVDARKIALLYRFHELKPTSISNEDIDCLRSLCRQYYKLSDELTAYKNRFISIVDQLMLNFKEVFPNVYSKTAIAVLEECPTPTAIIEADRDKLISIIQNNSRKSLEWATKKYELLVSKAREFEPLSINNAANVTMLGIHIAMIKTLQENLDKVLKAIHQLIADDLSKDLPAMALTIQLLQSIPGVGFLSAATIVAEIGDFNAFSKPKKLVAYFGIDPSVRQSGEFTGTHNKMSKRGSRLLRRVLYTIALANIRTKRNNEPCNPVLMEFYKKKSQNKPKKVAIGAVMHKLVFIIFAVLRDRKPFELRSPEQHAKILAKNRTVA

SEQ ID NO: 50834 - protein, 365 aa, unidentified
MQKISTMRRSGKNIFRGQLTIGLDLGDRSSAYCILNEAGEIVFEHKVATTPEAMKQVFGSMPRCRIAMETGTHSPWVSRLLTEMGHEVIVGHAQKVRLITKSRRKDDRLDARTLARLVRIDPELLSPVKHRSAQAQLHLAEIRARAGLVSARTALVNAARGLVKSYGERLRKCGTQQFGRETTSGLSAGLREALEPLLRQVESLNEGIQEYDRRIERMVNEVYPETALLKQVKGVGDLIATTYVLTVEDPHRFRKSRDAGCFVGLQPGRRNSGESEPQMHISKEGDEYLRTLLVQGAHYILGPFGEDSDLRRWGQKLSARGGKNAKKRAVVAVARKLAVLLHRLWVSGEVYQPLHNSQKAMSAAA

SEQ ID NO: 50835 - protein, 408 aa, unidentified
MNTLYVGIDVSSKSNVVYLMLPNGDKHSNFSVANSHEGSTQLVKRILSALTSHSLDTVLIGLEATSVYGDNLVYFLREDATLASFNRKIHVLNPKQVKKFHDAYNDLPKNDYVDSFVIADCLRFGRINKEVYMGDYRYKALQNLTRARFFAVQNLVKEKQRFMNVLFKKYSTMTQEKVFSDTFSTSALAVYDEFESAEALANMDLHELTDFIIEKGKNRFPDPDAVAKAIQKAARSSYHLPKTVNDSVNQVLSISITSMKALESQIKEFDKAIKAQMELLPNVLISIPGIGPVYSAGIMAEIGDINRFNSQAALAKYAGLAWKQHQSGSFESEVTRLIPSGNRFLKYYLCEAAFSLVRCDKEYSDFYHLKYKEVNRCQHKRALALTARKFVRLVFRLLKDNRLYCPAK

SEQ ID NO: 50836 - protein, 369 aa, unidentified
MGTSVARGVGPIHLGLDTSKNTILVGILRPDEVSPDAEKIFNDEAAVRRLVDRFPDRGGLRVCYEAGPTGFGLYRLLRSMGVACDVVAPSLIPKAPGDRVKTDRCDCRRLARLHRAGELVAIWVPTEAEEAVRDLCRARADMVGDRTRTRHRLSKFLLRHDRIWRGGDAWTLKHEQWLTGQRFEDAALQATYGHYRGMLAARDAELAAAEADLAHWYTHGPFAEAVVWLAAYRGVAHLAALTIASEVGDWRRFATARTFMGFTGLVPSEYSSGESVHRGHITKAGNTHLRAQLIESAWCYQHRPNIGVTLRRRQQQAGPATAARSWTAQQRLCARFRRLGARKTSRNVVTVAIARELAGFLWAEMTATG

SEQ ID NO: 50837 - protein, 411 aa, unidentified
MDVLYERCCGIDVHKKTVVACLITPGADSVPTKETRTYGTMTVDLLEMMDWLLDAGCTHVAMESTGVFWKASYNLMEGALEVYVVNAAHIKTVPGRKTDVKDAEWIADLLRHGLLRPSFIPDRPQRELRELTRYRTSLLQERSAEVNRLQKTLEGANIKLAGVATDIMGKSGRDMLAALVAGRTDAAALAQLARGKMREKLPQLEKALRGQFGAHQRFLVAQQLTHIDGLDDIIERVSAEIAERVQPFEEAIDQVDTVTGIGRRTAEVLVAEVGTDLARFPTHRHLASWAGLCPGNNESAGKRHGGKMRKGSPWLRAALVEAAKAAGRSKKTYLGAQYRRLKARRGAKRAAVAVAHSILVIIYHILTKHEPYHDLGVTYFDERDRQAVERRLVKRLQGFGYAVSLQPLTAA

SEQ ID NO: 50838 - protein, 403 aa, unidentified
MSDMITNHADIDVFIGIDVGKHNHHAVALDRDGKQLLSKALPQNETKLRALLGRLRKHGTLLVVVDQPATIGALPVAVAQAESITVAYLPGLAMRRIADLHPGEAKTDARDAAIIAEAARTMPHTLRGIRVADENVAELSMLCGYDDDLAKQATATSNRIRGLLTQIHPGLETVIGPHLDHPAMLAVLAKYPTPKALRHAGKHRVETLLRRQAPRAWKRWAAAIFTALDGQTVVVSGTDAAGLVLPQLANSLAQIRASRDEVLVRIEELVKTHPLFGLLTSMPAVGVRTAARILTEVVGKDFESAGHLASYAGLAPVTWRSGTSIRGDHSSRRGNKILKRALFLSAFAALKDPLSRAYYDKKRAEHKKHNQALIALARRRCNVLYAMLRDGAYFHAPEAATAA

SEQ ID NO: 50839 - protein, 425 aa, unidentified
MSESTSAAPAAGIAAYIGMDWADQKHDVALRSAAEPAKLEHSQIEHQPDALMDWLGGLQRRFAGKGKILVSLEQSRGALIYHLMSYEFLELYPINPSQLSSFRETFKPSGAKDDRPDAELLCELLYCHRDRLKAWEPDDELTRKLAFLNEGRRKAVDQRTGLANEIKSQLKVYFPLALQVLDNDCSTALAADLLLQCSDLDSLQKQPAHQLRKFFYAHNSRQEKKLLERLALIKAAKPLTRDRAVIEPAALRVQLLAQQLKGLLPYIARYEKQIAKLFDAHPDSFLFRDLPGAGPALAPRLLTAFGDDRDRFEHSIEFASLSGIGPVRRASGKKATIHFRNACPKFLRQSLHEFGWHSIRSCPWAKALYQSLRERGKGHHAAVRAVTFKWIRVLFACWKQRIPYDPERYLQALKTRGSVYAQTAP

SEQ ID NO: 50840 - protein, 348 aa, unidentified
MIWIGVDAHTQLHQASAINEEGIVGERRITNEPAQWAALLDWARQWPERVWAVEGAWYLGRGLAQYLATPGEAVHEVNGRWTAGRRRGMRKPGKSDRLDARSVAQLLREERPTLPRVYAEEDELAPVQLWSRLAAELTEDRTRLLNRLHNLLLLCDPQYNSTLPELTSKAGVGAALAYQAPGASAVARERERAVRQTAEQLALLESQIAELERKLERVTRGSFRALRQIEGVGAKIAATFIAELGRPRAGFGDQQLAAMAGAAPLEASSAGGTRHRLNRGGNRRLNLALHRIVLTQGRIYPPATAYLARRRTEGKTAREARRALKRHLCRRIVQAWRACFEQSLPAAA

SEQ ID NO: 50841 - protein, 347 aa, unidentified
METEQNPVGYRLFVGVDIAAATAMAAWQPVGGKVGRPVQIAQSPEGHADLHEKLHASGVPAGETLVVMEATGSYWITLATTLAQRGYAVSVINPSQAHDFAKALLKRAKTDAIDAQTLAQLAALLQPERWTPPPAIYMELQQRLAQRDSLLDLRQQVRNQLHALEQGPVVIAAVRHRMEALIATLTVQIKEVEKEITPVLAQDAAWAKAATLLQTIIGVGLVTAAWLVTSTLNFSVCPSPDAAAAYAGLVPYVRESGTSVRGKQPISRSGNKRLRRTLYLATLAATRWNPQIKAFYTRLRAAGKPAKVARCAAARKLLHLAWAVVTTGRAYDPAYQPRSTAQSASAA

SEQ ID NO: 50842 - protein, 342 aa, unidentified
MNKVAIAAIDLGKHSFHLHAQDERGHELCRKKFTRPSLIQYLANLDPCTVAMEACGGAHFMAQEVAKLGHTPKLIAPHLVRPYVKSNKNDFADAEAICEAATRPTMRFVAAKTQAQQVLAMLNSTRDAFIKDRTATVNRIHAALLEVGVSLAPGFKSIKELPALLEASSFSVPLKNILMRLHGHFCYLDEQVKTSDKDLECQAAEDDLAARLMTMPCVGPITSSALAAELGDGKQFKCGRGYAASIGLVPKQHSTGGQTVLLGISKRGDRNQRRLLIQCARVYLIQLDRQKGALADWVRQLLASHHHSNLVVCALANKLARIAWAIAAHHTEFDAGPAAMNA

SEQ ID NO: 50843 - protein, 324 aa, unidentified
MSETENKRMCVGIDLHKTQFTVCALDEESGVIELEGEFRTNAEGYTDFTNRMHGIESKSGHVIELAVESTGNARFFKNKMEAEGFSVVVVNTNKFKVITMSTNKNDAHDAKTLAFYLLKEMLPESHLCDQTSEEIRRMLKTRSILVQATVKMKNQIHGMMLGYGIETKSAQFQSKKKRQELYQDLADHSFSEFNASSLKVILDSLDDLQKQIKTIEEQLEKMVAENRNVELLKTMPGIGPIGAVTIAAYTNDMSRFDGNFKRFASYLGIVPSNHDSNKTVRRGKITKHGPQELRTAFVQVAMGIIRQPQNTSEWKLMIDYCRMK

SEQ ID NO: 50844 - protein, 411 aa, unidentified
MKALYERCCGIDVHKRIVVACLKCGKKQEIREFGTTTEELRSLTEWLSDSKCQMIAMESTGSYWKPLYNIFELSSLAAIVVNARDMRNVPGRKTDIKDAEWIADLLQHGLLRASYIPNREQRELRELSRYRKSLIEERARELNRLQKMLEGGNIKLASVVSDINGRSARNLLTHMLKRDTSLTKEEVSSLVRGRLRHKVESIMKALDGFLTPLQKQLILKVVDHIDDMTKRIGEMDDLMNQYLTEYHEAIQKLDEIPGIGRQSAETILAETGLDMSRFPTAKHFSSWAGLAPGNNESAGKRRYGRTTKGNITLKTTLIQCAKAAVKKTDSFLSAQYQRLVVRRGANRATVAVAHTMLISIYHMLKNNVPFTDLGADYYNQFNTQSKIQHYLKKLKRLGWELDSATIPTAAV

SEQ ID NO: 50845 - protein, 344 aa, unidentified
MKVRTIGIDLGKTSFHLIGMDERGNVVLRRRFSRTQLITHISKLDTCLIGMEACSGSNILGRTLRAQGHTVRLIPAQFVRPFVKSNKNDYNDAEAIAEAVQKPNMRFVPIKTEDQLDLQAIHRTRERFVTQRTRVINQIRAYLLERGIVLRTGRLYLQRQMASILEDGEQRLSGLVRRLLAILWQEWKHLDVQIEELQQQIETMAQQDEACQRLMEIPGIGPLASTLMVAAVGNGSAFRRGRDFSAWLGIVPAQATTGGKPRLLGISKRGNKYLRQLFVHGARSCKTHMNREKHPFGEWVTALEKRAHSNVVSVALANKIARIAWSVLATGERYHAHVPVMQAA

SEQ ID NO: 50846 - protein, 376 aa, unidentified
MAGIAALHALVAEHLGDGEPGDVVVGIETDRGPWVQALLAAGYRVYAINPLSAARYRDRHVVSGAKSDAGDAHVLAGLVRTDRHAHRPIAGDSELAEAVKVLARTHQGLIWSRQRQANALRSTLREFYPAALAAFDELAGRDALAVLDLAPTPARGRALSRSKIASALRRTGRQRNIDAKAAEIQAALRTEQLAALPAVEAAFGHTVTALVRVLAELSRQIETLEGELTAHFDRHPDAEILRSQPGLGTVLAARVLAEFGDDPHRFADAKARRNYAATSPITRASGTRRVVLARVTANKRLRDALYLQAFAALRASPGARAYYDTHRARGATHNQALRAVANRLVGILHGCLRHRTTYHEATAWPASTQPELAAAA

SEQ ID NO: 50847 - protein, 379 aa, unidentified
MDHAITGTPAETILHGALELSKNSWLLALQFPDRAQPSLYPIRGGDTVGLMAKLTVARDRWAKMSGKAPSIVLCYEAGYDAFWLARFLKARDIECLVVDSASMQVNRRARRAKTDRIDVGMLLRALIAWGQGDRHVWSVVRVPSMDEEDLRRSHRERDRLVRERTAHINRIKGLLFGQGIRGINVKSKYKTLQIDKLVTGDGCPLPPRLASEITWEIARLALIQEQIATLERERDQAPTPCKATEKKKVQLMCLTGIGPAIAAVVTREVYYRQFDNRRQVAGFLGLATSPHDSGDVERSQGISRAGRGQVRGTIIQAAWLWLKHQPKSAITRWFVQRTAGQSGRIRRIMIVAVARKLAIALWRFLEQGLVPQGAMLANR

SEQ ID NO: 50848 - protein, 324 aa, unidentified
MIKTVIGIDISKSTFDVALLKNEKIKTKKFTNNSNGFAELKKWLTNNEASDVHACMEATGCYGTKLAEYLYVNNFMVSVVNPARIKGFSQSKLCRVKTDKADCQLIAQFCQMIQPDPWKPTDQHIQKLKEWVHRLDILLANKLQEGNRIEGSSPEVVADIQAHIEFIDERIKKTQALISNHIQQHEDLNDNYKLLATIPGIGDKTISVILASLSNIEDFDSAKQVAAFIGLNPKHRQSGSSLNMTSKISKTGDAKLRKAFYMPALVSIRYNPIINEFSQRLTEAGKPKMVVLIAAMRKLIHIIYGVLKNKTPFNENIMKKVIDV

SEQ ID NO: 50849 - protein, 430 aa, unidentified
MMEEVDDAELVVERIAALDLGKAGLEACVRVPSPHRPGRRMQELRGYGTTTAQLLEMVAWLRHWGVQRAVMESTSTYWKGVYYLLEAEGFECWLVNAREVKNVPGRAKTDRADAIWLAKVAERGMCRPSLVHPAEIRRLRDLTRYRRALVQDRTREQQRIEKLLEDAQIKISSVLSELHGVTARAMMDALIAGQRDPRALAQLAKGRARKKTAQLEEALRGFFTDHHAAILRMMLDNTDRISAQIAALDARIEKEIGPFSHQAARLAEIPGVDAVAAAELIAEIGVDMTRFPSDAHLVSWAKFCPQTHESAGKSKSKGRGRGNPWLAGTLGRIAFANSRADTFLGARYRRLARRRGKQKAIVATGNSVLTVVYYLLSDPTATFCDLGPGYYESRINVHRRARDLVTQLQALTGQHIVIRDGKAVITDAAA

SEQ ID NO: 50850 - protein, 422 aa, unidentified
MSESTSTSTSIFASTVASAGSIASAPPNAFAPPAPPAAQSPTMYYVGLDVHLKRSSICILDAHGKQVKRLEVKGHWPAVLAEIQSRVPRPFAICYEASCGYGYLYERLAPIARHVSVAHPAQLRLICKSKKKNDKVDAAKLAKLLYLDMVPQVHVPRVDVRAWRALITYRHRLMDKRVAIKNQIRALLRGLGIAADVPAGKRLWSGTGIKWLKEQQLAEPDALRRDLAIEELDEMNVKLKRVEKELNRRADAHPGVTLLKTIPGVGVRTAEAMVAWIDDVSRFARNKHVGSYFGLVPCQDASAAKNRLGHITKDGPPVVRKLLCEAGWQGTRRSAAIRAYFERVMRNDPDRKKIALVATAHHLARVMAAMLRTGEAWRADEPTTTAPTQCRPTAIGSDQIRNGKDGCAGGDSASPPRKTAVA

SEQ ID NO: 50851 - protein, 330 aa, unidentified
MDKLEMCGIEVSARELVVALGEQRGGTRLRRFANSPVGHGALLRVLKRVGKVRVVLEATGLYGMDVALALSAEQGIELMVANPRAVRHFAQAMMQRSKNDQLDAVVLREFAARMPFRAWVRPPENQLELWAIARRLEALTAQRAAEKNRQHAAGLSHAVPIVVRREIANSLRFLQRSIARLQKEAQRRIAADAQLQRCYELLCTIPGVGRVSALHTLGELVLLPKDRDVRQWVAYAGLDPRECSSGTSLRKRVRISKVGNRHLRRALYMPALVASRRQPQVRAFYERLQRRGKNKSQALTAVARKLLHAIYGMFRPLRPFDGTLLFAPAS

SEQ ID NO: 50852 - protein, 347 aa, unidentified
MKHSAGLDVSVKETAICIVDEVGKVVRETKVVTEPESIIALLNSAGLEYERIGLEAGPLSQWLVNGLAEAGLPVICVETRHMKAVLKAQQVNKSDRNDARGIAQMMRVGLYKPVHVKTLASQQERMLLTTRKLLRDKLQDMENELRGTLRNFGLKVGVVSPGRFEARIRELVAGHLRLEMIVTPLLAVRRVLREQLAKLHKMVLDQVRSDKLCRRLMTVPGVGPVVALTFRATVDQAQRFVRSKTLGAHFGLAPRRFQSGEVDYDGRVSKCGDAMMRTALYEAAQVLLTRTQKWSWLKAWGMQVARRRGAKKAIVALARRLAVVMHRMWIDGTEFRWRKETDAAAAA

SEQ ID NO: 50853 - protein, 342 aa, unidentified
MNKVTTVAVDLGKKTFQIGFADQYGREAGKQERLTSREAFSEFVANADPRWTVLMEVGWGAQAWARAFKARGMRVRLLPAQLVMAHRTGAKNDRNDVLAILRAGQDQHIHEVPVKSAEEAAIQSEHRVRRGWVRRRTAVANQARGLLADQGMVFAKGDAAFVDGVERTIEDAGLPIPDGLRQLLQELLIEWRQQGARIHSADLRLERLVREHPVARMLDELPGVGPIGATALACKMVDLERFANARHFAASFGIVPEQHSSSDRVRLGHMSKRGDSYIRATLISGARAVFRHLPARKDNSKETQRLRRWYAKHGCTGASIRLANRNLRIAFIKVRNSMRDSA

SEQ ID NO: 50854 - protein, 401 aa, unidentified
MPEQLIIQRWIGLDIHKAYFVAVGVNAEKCTVFGPHKIPNEQLENWIAKHLLLTDAVVMEMSTNTYLFYDTLLPHVGSVISVHPPNVRLVTGVKVKTDKKAALTLAQLHAAGLLTGVWIPPVEVRELRAVIAQRSKMVRLQTQAKNRLTSLLHRTHRERPAQPFKPEQKAWWESLPLSTIEKYIVASDLETLAFAGKQIDAIGEVLRQEATKDERVPLLTQLPGIAMLTALTILAAIGPIERFEDAKHLVGYAGLGASVHDSGQMHATGHITKAGRRDLRGAMVDAANAAVRHHPYWKKEFERLEYRLGRSKAIVAIARRLLVAVWHILTNGVVDRHADETGVAASLYKLAYEIKVNNLPKGTSARAFTRQQLDRLGIGQNLEVLPWGGKKVKLPPSQLKT

SEQ ID NO: 50855 - protein, 463 aa, unidentified
MKKRSPSHSSKRLRPTPKGGRVIVANASGDLHQVNEHASGIDIGAERHYVAVPSSADPHPVREFSVFTKDLYAIADWLQACGVTTVAMESTGVYWVPLYEVLDERGFTVKLVDARKVKNVSGRKSDVLDCQWLQQLESYGLLTAAYRPTDEIVVLRSLMRQREMLVKCAASHIQHMQKALQQMNLRLDNVVTDITGLTGMRILKAILAGERDVNKLGAMRHPSCHASADLIAQSLVGNYRQEHLFALKQAVELFEFYQAKILECEAEIEKYLRRLTHKRDDEPPRLEGSQKRQTMSFNVRAEAWKLLGVDLFRIKGLNAETVLRLMSEVGVEVSRFASEKQFASWLSLSPNRRVSGGKVLSSRTKASKNRAAAAFRQAAASVARSDSELGAYFRRMQARKGPAAAITATAHKLARIYYHLINTGHVYEEGGARAYELRQRELTVANLRKRAKGLGYELVPLAA

SEQ ID NO: 50856 - protein, 372 aa, unidentified
MTQSNILFIGMDVHKESIVISLADDDRSEVRRYGAIGGTMEDFKKLLRKLVSTGKELFFCYEAGPCGYELYRYITSQGHQCIVVAPSLIPKKAGDKVKTDKRDADNLTRLLRSGDLTSVYVPSAEDEAMRDLSRAREDVVLVLKSSKQRLKSFLLRHNIRFNGSANWSEKHLRWLAEDVNMPYPAQKVVFQEYVNSVTEANERVKRLEKEILFHVKQWRLYPVVECLMALRGVRMVVAVTIMAELGDLTRFDNPKQLMSFLGLTPSEHSTGDKKKKGAITKTGNQHARRVLVEAGWAYRFSAKVSKEMQKRQEHIPLPVRDIAWKAQLRLTKRFRTMSNNGKLKNVIVVAMAREIAAFMWAIAHEVPILPRD

SEQ ID NO: 50857 - protein, 318 aa, unidentified
MPDLVPSAGVDVGSLWLDLGFYPFAKPIRAANDEEGIEAIVAALRLRGVGKVALEAIGGYARKLVTALVEVDFRVFVVNPRRIKAFRDAEGLIAKTDRLDAALIARFAHTMTHELRPLSDADQAILKALSTRRRQLTESIAIEKTRLKQALDALVVESCRDMIAILEDKRRVIEDDLNRRIDAQNELARRRDILTSIPGVGARISTLVVVEMPELGVIDRKAAASLAGLAPHPSQSGLARGRNVISGGRPCLRAAFYMAALVATRHNPRFRSRYADMRAAGKPAKVALIAIARHIVTLANALLRDNVRYENANFASPP

SEQ ID NO: 50858 - protein, 396 aa, unidentified
MYFLGIDIGKNNHVASMIGEDGKPVFRAFSFSNTTEGGESLLSKLSSYNLESQELVIGLEATGHYWLAIYSFLRNKDYRLHVINPIQTDGWRKGMEIRKRKTDVIDSLLIAQLVRYGDFIEAKLPEETIISLKNLTRFRSYLVDSISDLKRKVICVLDQVFPEYQNVFSNVFGKTSKEILLQFSSPAELESVSADTLAELLAGLSRKKLGIEKAEELNRAASASFGVTFCRDSFTFQLRMLIEQIKYIESQVKDTETEVKRIMSTLCSPIMTVPGVGKTLGAVILGEIGGIEKFDNASKLVAFAGIDASVNQSGEFEGTSNRMSKRGSPYLRRALYQASLIAVIGKNPDPVLRAFYQKKLAEGKHHSTCIGAVSRKLCYIIFSVLKENRPFEVRNP

SEQ ID NO: 50859 - protein, 411 aa, unidentified
MNASSQPRYVALDLHKHYAVAAAVNRDGEVLLPPRRIDNDRLPNWAQKHLFPTDVVVIEATTNAYHVYDMLSPLVAEVKVAHARKVRQIAESRRKTDKSDVLILARLLAANLIPEVWVPPHHVRELRQLMTQRRRLVGMHTKVANRLHSVSHSHHLGHPKGKRFTPETTSWKDALTDMERFQVELDLETLHYLEQQIAHITDKIAELSHQEPWASQAMYLMQLPGFGLITTMTTLAAIGDIHRFPSPKHLISYAGLAPGVEQSGTKHRAKPITKEGRKELRHALVEAAWSAVRSDPFWKQVFQRLTRRKHPNDAIVVIARKLLVILWHVLTKQQSYRQYSEERIAYKFLSWAWRLSKSQRGGKPRPQFVRYYLMRMGIGQELKRIELNPKYPRNIAPPEEVERWLRRESTA

SEQ ID NO: 50860 - protein, 412 aa, unidentified
MTAIDKFAAHVGLDWADKKHDVCVQFKNGERIFHVVEHTPEALDIWLNELHQKVKGRIAIALELKKGPVVYALQKYPFVTVFPVHSLSLARYRQTFWPSGAKDDPQDAELALELMLRYPQKIKAIEPDNADIRLLQQLVEQRRQLVEDKRRFVNRLINTLKQYYPQPLEWFSHRGSLLLCELIIRWPSLQQLKRARRDTIRNFLNAKGGRARSLTEQRVASIESSIPLTTDPVVIGANVLMATALAAQIKVVSEIIKTYDERIETLFDTLPDAELFKSLPGMGPCMGPRMLAALGDNRNRFNSAEEIQNYAGIAPITERSGQKSWVHWRWQCAKFVRQTFVEWTAKTVNSSYWARRYYQGQREKGKSHQSAIRALAFKWIRVIYRCWKTRTRYDEAKYLLALEERKSPLLVP

SEQ ID NO: 50861 - protein, 314 aa, unidentified
MTNKKEKTGVNVGIDVGKFQLDIFIWERNRHFTVENTETGIHEALKILCRYTLNRVVMEATGRYEMAFACAAFDKGIPVAIVRPILIRQFARAADQLAKTDKLDAQIIARFAAVMQPRLTQQKSENLQLIKDLVVRRRQLIEMRTKELNRVKLAGKALERSYHHLVNVLNTDIEWVEQQLNEAVQQEAAWQERKLLLSTVPGVGNTLIWTLLSEMPELGTLNHKQIASLAGLAPINRDSGKSKGKRRILGGRHSVRTTLYMATLSATRCNPIVGGFYRHLVKQGKHKKVALTAAMRKFLTILNAMVRDGKEWAY

SEQ ID NO: 50862 - protein, 369 aa, unidentified
MRIAIGMDLHKKSAVCFAVYAGEGQPAEDEMEFLERFNRDHRTQPSEPEDIAAIARALEGHEAHFLIENSTKTFDTYWVLTNLGCHVTVAQSRDLYRITKSVKKNDNNDSMELAFYMRRRLHGENEFSVCVMPSKEWMQLREICRTVFKEKAHLADLKRRARAHLLLHGIRLSREYENIFCKRAIAEMESTCDVCLRIFANEAKTILRRTDMETRTIELMFRDIRIYALILSIPGFGRVSAAYLASMIMDIARFDTCNQFTASFGIVPKQRESSDVSHNCATTHRGDEEARRLLKQAAWVHVNNCDSVVTRMYRRLKRNGKAHNEVLVACARKLLTVVWSVLRSDRPFTTDPRLLARSAAMAEEVEGED

SEQ ID NO: 50863 - protein, 337 aa, unidentified
MGEVTTIGLDIAKRIFVAHGADAAGNEVLRKKLRREEVHAFFASLPTCLVGMEACATAHNWAREIAALGHDARLIPPSYVKAYVVRQKNDFVDAAAICEAVTRPSVRQTPIKTIEQQAARVAQRTHELLSRQRVTLINALRGHMAEFGILAPAGPQHVGRLIEKLADPATPVPSAARDALNVLVDQLVALGREIDRMEAQMRRSCRNEEKAMRLLTIPGVGPITASAIIAGVPNIQGFRSGRDFAAWLGLVPRQNSSGGKERLGRITKMGDRTIRRLLVTGALSAIRWGRREPGFSESWIGRLIARKPIKLAAVALANKMARIAWALLTHGEVYRTA

SEQ ID NO: 50864 - protein, 408 aa, unidentified
MDIVVERCCGLDVHKDTVVACVCTPGKGGKRQQETRTFGTMTVDLLGLRDWLVALGVTLVGMESTGVYWKCVFYVLEDATECWVLNARHLRNVPGRKTDVADAEWICQLVEHGLVRPSFVPPKEIRELRDLTRYRKAQIDERGREAQRLDKVLQDAGLKLSSVASDILGKSGRDMLEALVRGTRDPEVLAELARGRLRSKLPDLRRALEGRFSAHHALIVGQILSKLDFLDEAIGTLSGEIDRVIAPFGAEVELLDTIPGVDRRIAECLIAEIGVDMGRFETSARLASWAGMCPGNHESGGKRKSGQTRKGSKWLAANLAQAAEAAGRSKDTYLGAQFTRLRGRIGHPKARKAVEHSILVAAFHILAGAVPYDDLGADWFQRRRPEAHARRLAHQIEALGYRVTIEAA

SEQ ID NO: 50865 - protein, 406 aa, unidentified
MNLNAVGIDVSKRKSTVSVLRPGGDVLMKPFDISHRTADFQTLADKLKALDGETRVVMECTGHYYEPVARELSQAGLFVSAVNPQIINKFQGQGNPLRKVKTDKADSVKIARYTLDNWANLKQYTLMDELRSQLKNMNRQFDFYMKHKTAMKNNLIALIDQTYPGANTYFNSLAREDGSQKWVDFLDTYWHVDCVRKMSLQAFTEHYQKWCSRKKYSFRKSKAEEIYGIAKELVPVLPKDNFTKCIIKQAVAQVNAASQTVEQLRSLMNETASKLPEYPVVMAMKGVGPSLGPQLMAEIGDVTHFTHKGAVTAFAGVDPGVNASGDYSQKSVHASKHGSPMLRKTLFQIMDVLIKTKPDDAVYLFMDKKRAEGKPYYVYMTAGANKFLRVYYGRVKEYLSALQESY

SEQ ID NO: 50866 - protein, 363 aa, unidentified
MAMKAMTLVGLDVHARQTHAAVLDPTSGEIAVSRLRMAPLEVASFLADLAPAVRAVYEAGPTGFGLARAAREHGIDVRVAAPGSIPRGPGDRVKTDRRDAIRLVRLLAAGELSFAFVPSVADEQFRDLVRAIEDVRGDLMRARHRLGKFLLRHGERYPGAGHAWTGAHMKWLRALSLPDPCSRARFADYLASVELLIGRRASLLAALEQQIPECSHAPVIARLRCFRGIDTLSAAGLCAELGHFARFPRPDQLAGFLGIVPSERTSDTKRRQGAITKAGPPHARRLLVEAAQHYRHRPAIGQKLARRQAGQDPRIIEIAWRAQRRLHARWQHLHQHRRKPAGVVAIACARELSAFLWEAATLD

SEQ ID NO: 50867 - protein, 414 aa, unidentified
MLKIVYRICCGMDIHKSFVVACIASTNEQGVTTYKSKRFSTFTGDLRRCADWLSENNCKDVCMESTGKYWIPVYNILEPTCNIVLAHPKYVKAIRGKKTDKRDAKWIADIFKHDLVSGSFIPPADIRQLRDLFRYRWKLTNFTTGEKNRAQNCLTVSNFKLDDVFSDVFGKAASAITAWILEHPTEKITDISAFRTKGMKATDERVLSAVDGEMCEEQAEKLRIIRSHMSSLQLCKLNLESLILSTAEKYLPQLNLVMTAPGIQSFAAIGIISEIGVDMSVFPTSKHLCSWAGLTPQNNESAGKKKTTRISRAGAYIKPLLVQCALCAIRAKQFPEVRNRYLALKKRRGHKKAIIAIARMLLTAIYNMLKKNEPYNSELYRKSDRPPVHREVSVAEAIFILQRQGYLVAAPPTV

SEQ ID NO: 50868 - protein, 350 aa, unidentified
MIIIGADYHPGFQQIAFVDTDTGELQERRLEHREEAETFYRGLAQPGRTVRVGMEASGHARWFERLLAELQFELWIGDAAEIRTKRVRKQKTDRQDAQLILQLLLEERFPRVWVPSGENRDLRQLLWHRHRMVQARTRIMNQLQAVALNEGLRCKKRLWRDSGREQLESFLLAPWASRRRHDLLELLDRLSPTIAELTQAIEQEVEKCPEAQRLRTHPGVGALTALAFVLIIGRTDRFRCGKQIACYLGLVPVEESSGERRRLGHITKRGNSLLRFLLVEAAQVTVRSDQEWRSKFFHLALRRGRKIAKVAMARKLAVRLYWMWRKGWDYEQLKKFGSHAGQPGHRHGVH

SEQ ID NO: 50869 - protein, 347 aa, unidentified
MGHYAGIDVSLECSSVCVVDASGKIVREGKVASEPVTLITWLGSLGVNLERIGLEAGPLSQWLYGALRETGLAVELLETRHVKTALSTMPVKTDRNDARGIAQLMRLGWFRPVHCKSMAAQEVRALLTARKLVQSKLYDIEMSLRGILRGFGLKVGPTTSQSFAARINHLVDGQTSLEAVAAALLSLHAVALREFKSLEKSVRQISRADARVRLLMSTPGVGPLVALTYVAAIDDPARFTSSKSVGAYFGLTPKKYQSGETDVSGRISKMGDGSVRTALYEAAHVILTRPIKGGALKSWAMKLARRAGMMKAKVALARKLAVVMHRMWIDAIKFDTDKASGCVRVAA

SEQ ID NO: 50870 - protein, 436 aa, unidentified
MKPARLQVGVDISKHRLDVCLLSPDGDLLEQRTFPNTLSGYQALRDLLLAVGREEALAGIDLTAESTGPYWMPLFLQCQQDEALAAWDLQTYLLNAREVYWFKKGAAEAEKTDARDAFHIAEKRRTQRRQPPWGWNPASLRLRFLTRHRFRLGQQRTRLKNAFWALMFLWCNRYGPRRPFSDAFGTCAQALVREAPDWQTLVEPSAKELGSRLDTWSRQGLDDPVETARRLQAVIADSFPLPQELAEVLHPLLRLTLDHLNFVEQQIRQVERLIKQEVQEHHPGAQCLQTIPGIGLVLAAGIAAEIGPLSRFLDGEKWDRRKKRWRRKNLRDVEDAVAKTAGLWWPRKESGDFRAENRRLAKQGNRYLRYYLVEAADRLRQHLPEYRAYYERKYQEVKKHQHKRALVLTARKSVGLFVGLLHRKEAYRSPEERLND

SEQ ID NO: 50871 - protein, 345 aa, unidentified
MEPMYYIGLDVHKRKISYCMKDSGGKVYSEGSLSATRLDLDVWMKTLPQPWSAAMEATMFTGWIYDHLKPHAAALKVAHPLMLRAIAAAKKKNDRIDANRICDCLRCDFLPECYMAPTAIRERRRTLRYRNLLVRQMVQMKIKISSLLMEAGVSYNKQRLHKAGYFRELLATNPDIDEGLRSLLRLCRETVVRLQKTESAVVRSLESDSLLMDRVERLMTIPAVGPITALTWALEVGDVQRFSSIKKAISYCGLCGAEKSSGNTVQRTPLSKQRNKHLQTTLIEAAKMAPRNSPELAMLYDKEKQKGNANRATLAVARKLVAYLVAVDRRQKEFLTVERENRTAA

SEQ ID NO: 50872 - protein, 425 aa, unidentified
MTQSYGNTGENVLVAIDIAKQRNAVLIQFPDESRKKFIVANKLSDYQEFTAYLKSLRFSCVIGLEATGNYHRPLAYYLQQEGFDLKLVSSVAAARTREAMYNSWDKNDPKDAQVILHLLKTGLTQTYHDPLLHLINDIQELSKTYYQVSLRKTRVQHSIMTHYLPLYFPEVQKYYYTSRAQWFSSLLLRFPSPSSVLKYSREEFIEAARGVAGRKVNKAAWLTDFYETAASSIGLPVEEDSEAMVMFRLVLQEHQHLCRLRRSIEERAKLYLKDNADYNRLRTIPGIGPVIALTILAEAGDLRRFNHYKKFLKYCGMNLSTHQSGNFRGMSKLSKHGNARLRCVFWMAGTVAIRMRENTFRKKYENYIKADPDNPDLKRKAYTAIAAKMARVAYGLIKSERDYRCFFESSIPSGKIPSVGPLRHL

SEQ ID NO: 50873 - protein, 339 aa, unidentified
MDHVAIDLGARKSQICVRSSEGEIVEEKRWETWDLKRFLAGRPKSRVIVETCAEAFGVAAVAKELGHETRIVPATLVRTLGVGARRMKTDQRDARALSEVSCRVDLPSVHIPKVESRARKTFCGMRDSLVGARTKVINTVRGWLRGQGCRLGKGSRATFTDRVRAACGAELPGYVERQLRVVEQLTVEIDQADKELEAEADQNEICRRLMTAPGVGPLTALRYVAAIDDVGRFSNAHQVESYLGLVPGENSSSERQQRLSITKAGPPALRWVLVQAAWALRTRCRQPTAVPLQLWAHRIELRRGKRTATVALARKLAGILYAIWRDGTEYDASRGAKMI

SEQ ID NO: 50874 - protein, 416 aa, unidentified
MNFNKLLSGNITKYQKEGFIMISVGIDVSKGKSTVCIMKPCGEILESPFDIGHTADELDSLISLIKSFDEETRVVMEDTGHYHLPVATYLSSHNIFVCCVNALRMKKFCSQSIRRAKTDKIDSIKIASFGITYWNELVKAYPSNVIYDELKFLARQYYQVTGMLVKSKVNFSNLLDQVMPKINDVLSNQGENHKLTEFVSRYIHFQNILDMGEMKFTSDYCKWAKKKGYRLNERKAAEILVLAQNGIPTLPNSQSVKIAVSEAVKLIHSIEESRNTILAQMQDLCNTLPEYSVVKEMDCIGDTLAPRIIAEIGDVRRFKNKHSLIAYAGIDAPPYQSGAFHASERHISKRGNSYLRKTGYEIMQSLIKHKPADNAVYDFIQKKRSGGKCGKEAMIAGLNKFLRVYYGKVMEFYSEH

SEQ ID NO: 50875 - protein, 315 aa, unidentified
MTITLEVYVGIDVSKDKLDIARWNEKKCIDVANSKRGITKLVKQLWDWKPKLIVVEATGGYEEALVLALFEAGLPVALVSPQRVRQYARAKGLLAKTDRIDAQVLADFGKKLQPRLFMGKSEERKRLSALLGRRKQLNDMLQAEKNRLRTRDLSLQQSLKRIINCLQAELEAIDQEIEQFLHEQKGLAEQEKLLRTAKSIGRVTAATLLADLPELGQLDRKEIAALVGVAPMNHDSGRKRGYRRTKGGRPDVRSALYMSALTGIRHNPILKAQYDQLVKRGKEKKVAITACMRKMLTILNAMVRDQQPFRYPASA

SEQ ID NO: 50876 - protein, 330 aa, unidentified
MKSIVYVGMDVHSEDNCMAVYLDDRGEPEYESTIPNTEAKVQRFFQKLKEKYPDCTIQTIYEAGPTGFVLYRKLKEVGISCLVAAPSLLPHAPGDRRKTDRRDAKSLAKALRSGMATPCHIPSKEFEAVRDYQRMVADTKDAVGTAKKRLIMFLHRQDCPSYEGTYWTQRHLQWIKTVSLDHVDRETCDEYLMMVKELQDRLARQLGRLEEFAAMKEFSEEVAKLKCFKGINTQTALALVTEVEDFQRFPTARSFMAYVGLVTSEHSSGGRRVQGGITKAGNRHVGSLLVESSWHFRYPFVQKSRAFKERQQHQDIAVVSYADKANNRLT

SEQ ID NO: 50877 - protein, 347 aa, unidentified
MRFYTTQHPFYCGIDLHARTMDMCILDQAGEIRLHRNMPATPEALLKAIAPYREQIVLAAECMFTWYWLADLCAEHGIPFVLGHALSMKAIHGGKAKNDTIDAHKIAVLLRGGMLPQAYVYPAEMRATRDLLRRRMHLARKRGELLAHVQNTNSQYNLPAIGKKIAYKANRAGVAERFADPAVHKSIEVDLALITYDDALLRDVELTIVKTAKHHDAQTLSLLQTVPGIGKILSLVLLYEIHDIARFPRVQDFASSCRLVTCAKASAGKRFGTSGSTIGNAHLKWAFSEAAVLFLRDHPTAQKLLARLEKKPSKGKALTILAHQLARAVYSMLKRQTAFALETFLHA

SEQ ID NO: 50878 - protein, 323 aa, unidentified
MEVGNRKQLVRVVMSRALRRKDVLAFFERLPSCLIGMEACGSDHHWARELASFGHDVRPMPPAYVKAYVRRQKNDAADAAAICEAVTRPSMRFVPVRSVENQAALMHHKVRELLVAQRTQLLNALRSHLAEIGIIAAQGPNNVRALAVLIMESNDMIPAIVRSALLPVVRRLNELDHEIGQSDQAILALARADETARRLMSVPGIGPVTASALAASIQDISAFSGRREFAAFLGLTPRQSSSGGKERPGRVSKMGNRYLRKLLVVGAHAVLFHRKRCDALRSWADRLIEAKPFKLVAVATANKLARIAFALMRDDARYAATPA

SEQ ID NO: 50879 - protein, 344 aa, unidentified
MFQSHAVIGCSKNEDNKDMIKFFIGIDFSKRTFDATIMEGDKLDEKGIHAVFENSLNGAKKLMDWVMEQTHVFSKETLLFCGEDTGLYSKIVSDTLADAGCFMWLESALRIKRSLGISRGKNGKKDSRDIAVYAARYQDKKKRHVAPDERTEVLKALFMRRKFLVGQRDALRRRNKEMASVLKGNKMSGKSFRSDDRLDAAYRKEIASIENEIKRLIDSSAEMKRTYQILTSMKGIGLINAVALIVYTVNFKKFDYDARRIATFWGVAPFGAESGTTLHTTPHVSHYADKYLKSLLSEAALCAMRFCPVIKNYATRLLARGETSEHRQKQCQEQNATYSCGHGT

SEQ ID NO: 50880 - protein, 425 aa, unidentified
MVGCLTVAAGILARSETICNDPQVCRIVDLPVYYELETNNGNRDYRIQIGGHYMNYNTVYVGMDVHKESFTLCSCKYEDEKASHYQRTPASYKNVLRYLAFLRTIYGEDTRFVCGYEAGCLGYSLYHQLENFNVECVILAPTTMLEQRSKRRIKTDKRDAEIIARSLAQHNYSPVHIPTETDNQTKEFIRMRDDHKAELKKIKQQILSFCLRQGYQYDGSGNWTAKHVKWLRSLKPAGLYKEILDEYLLTYTILTDKLNRLDQRIEELASKEEYKESVSKLTCFLGIKTHTALSVIVEVGDFQRFVSARKFAGYLGLVPGQHSSGDDRNGLGITKAGNTHVRRLLVESAQSYTRGKIGYKSRVLRSRQAGNSPQVINYADRANERLRRRYYKMVLKDGKKYNIAKTAIARELACFIWGMMTDNIY

SEQ ID NO: 50881 - protein, 352 aa, unidentified
MLGVDVGKAELHGTWRDPETRRVRWQGAVPNTEAGIRQLLRRVPGTAVVVEPTGRYGEALVRAAQAAGREVLLATPRKARAFLWSEQPRAKTDRVDSAGLALYGLTGRLRSYQLPSPAVDRVKQLLAARRGLSQSLVSLRQQRASLPLAADVLTPAITALEQQIAALDRQMKRALASAPEPAPQRALAAAAAADPAVAPTPAPPGHALATAATALMAIPGIGEVTAPALAACLVEKQFTHPDQFVAYIGLDIRVSQSGRRRGQFGLSKHGDAELRRLLYLAAMAAANATRDTTFANRYAREQAKGLAKTAALNAVARKLAKVAWSLVTHGTQYDPRRVDSQPLDHKPLDNQP

SEQ ID NO: 50882 - protein, 314 aa, unidentified
MNEHFIGIDISKDYLDIADSATQKTWRTSNDETGIADLTKRLSTPAPTLIVIEATGGLETPLASALAANQLPVVVVNPRQVRDFAKATGQLAKTDTLDAKTLARFAAAVRPELRQIKDQETRELAALVTRRRQLVEMLSTEKTRLKQVSKPILQNVEIHIAWLKNQIREIDQDLSKTLKRSSVWRENDQIIQSVPGAGPVLSVNLLANVPELGTLNRRQIAALIGLAPLNRDSGTFRGRRCIWGGRASVRSTLYMATVTAMQHNSVIRTFYQRLTAKGKPFKVAITACMRKLLNIINTMVKNRTQWNENLILGT

SEQ ID NO: 50883 - protein, 470 aa, unidentified
MRIIGLDLAITSAHKVVVMDERGKFLTPVFPVTTWAESLAALLQRAREGAEANCPLVVVMEPTGAAWLPVAIYLIMRAVTVYLVNGQQVADLRRFYKRHAKSDRIDARVLAKLYLVAQEKLHALSLSPAALFSLQRGCKQLDWVISERTKLINQIIALDRMTWLGGWEDLGFGDPFSTAACWCREHYYSPVAVLEAGEECIRQAWYASELAKPGEKEVWIPTLVELAQKVMAVYGNPCPYVDFTALQAEAALKQKWLGELQMDRDHLRKQVIFPLYHQLHPSGNLESLYGVGEESAAVFLSFIGDPLRFPSGRQMRGWSGMIPDSRQSSGSESKGLRISQAGPNLIKKFAFLDADVARRYDPQLAALYYDQMVNRGKHHTQAVCTVATHLLDRVWVVVAKDKPYELRDVDGRPVTPEQARQIIAEKYTVPEEVRKRNNRKARRERIERHAERSFSHEERVRESLPDLVRG

SEQ ID NO: 50884 - protein, 347 aa, unidentified
MRKIAYLSMDVHARNCVLGDMDGNGKFRGNRSFTTCEVNIIKALKAIKAKKKYLVMEAGPMSNWAAQVANDHATKVFICDPRENALIYKSSHKHDKVDTKKLCRLLRLNEFKEVYRPENDQRALFKAAVQHYQDLRDQLKALKQKTKAMYRQWGIINVFTDSVYSVSGRDKFLQQVRHRPIYLQLKRLYTLLDATAAMKQEAEKSMASLGRNYPEIKEFKKMPGMGIIGPHTFDAYIQTPHRFAKRNRLWKYCRLAVTDRTSDGKPLGFKRLDKSGVSELKAVSYRAFLSAMKGDNEVRRFYHNSLQRTHDRKHARLNTQRKILSVMLSIWKKGEAYRSELFLDPSI

SEQ ID NO: 50885 - protein, 329 aa, unidentified
MLFRSVDVSKKKLDFCVLFEGKVLREEQVSNHQQAVARLIGELKNDLEMDNEQFLICAEHTGQYTFPLVCACKSVECKLWLENPSQIKYSSGMQRGKNDKVDAKRIAIYASRFGDKVKYYDRPSEEIERLKQLERERALYVTDLAKYKGQMYDQKDFMPAALYRKKTKRMKGLIQELQAAIDAITAEMEKIIGSTEVLARQMELLMSIDGVGKVVALNVIIETEAFSRFDNPRKFCCHAGVAPFSYTSGSSQHSKNKVSHRANKNIKKLLHMAAVSVTHRKEGELKAYYMRKVEEGKNKMSVINALRAKIVARMFAVIKRNEFYTPIYS

SEQ ID NO: 50886 - protein, 487 aa, unidentified
MANRKQSTFERLSSGHLNRQQRKELARKLTAEHPGLEIVNRNVAGIDVGNESHYVAVGPDRDPQPVREFGSWTADLERMADWLKACGVEMVVMQSTGVYWMALYDILEARKFKVCLTNARHTKNLPGRKSDVQESQWLLKLHTYGLLRDSFHPPEEIRALRSLWRLRDRHVKDAGRAVLHMQKTMTVMNVQLSNAISDISGATGQAIIRAILAGERDPWKLAKLRDRRIKATEEEIARSLEGNWRADMLFELKQAVDAYDFIQSQITECDLRLQALLAALPQGEVRGTDVQTEAPVVRESVKVKQNRKKSRADGNAPRFDLKAELKRVCGVNLTSIDGIDIMTAQTIVAELGTDFSRWKDESHFTSWLGLTPNRDISGGKIVKQESRKIKSPVAMMLRMAASSLIRSESYLGARYRSLRTRLGAGKAIKAMARYLACLVYRMFIYGQDWVDRGTKEFESKRTQRELSSLQRKAATLGYSIIPQPPSA

SEQ ID NO: 50887 - protein, 334 aa, unidentified
MYVGLDVHKKVCYGTVMDEKGKVAKQAKFTNDSEGLKEFMQDLDEALVVMEAGYCWQPIYDQLESLGYHVKLAHPKEVKAIAKARAKTDKIDSETLTHLLRADLIPESYVPPRDVRELRDRVRRRAFLVGMRTMLKNRIHAELAKRAIRLGRPLWSREGRELLRGLGLEAVDQVMPVMATLDRQIAKMSLDLRRMCGENPRARLLTTIPGVGYYIALLLVSEIGDVRRFPDSEKLCSYAGIVPTVRRSGGSTHHGGITREGSKWLRWALTQAVHAHLRHETNLTRFYGRLAAKKPKQVAVMATARKMLKTVYWMLWNNEPYHPGPGVVDPVHRC

SEQ ID NO: 50888 - protein, 408 aa, unidentified
MDENTGFDIWCGLDVGKQSHHACALDTAGRRVLDKPLPQDQTKLEELFTRLEGHGRVLVIVDQPNTIGALPIAVAGSMGIQVAYLPGLAMRRAADLYPGSAKTDARDAFIIADTARTIPHTLRRIDADEETLAELKVLVGFDEDLAAEATRLSNRIRGLLTQIHPALERVVGPRLTTKQGLAVIEQLGGPQGMAAASKSRLLKVITKAYPHRAQDFADAITAALAEQTVTVAGTAAAEQVLPQLAASLRQTLDQRHALAAQIEQVVDAHPLAEVLTSMPGVGVRTAARILLDVGDASQFPTAGHLAAYAGLAPVTRRSGTSIRGEFPARSGNKHLKRALFLSAFAALRADPTSKAYYDRKRAQGKKHNAALICLSRRRCDVLFAMLRNREPYRTPAPNPEPSPTPLAA

SEQ ID NO: 50889 - protein, 413 aa, unidentified
MEQQDKACGADIHKDFLVACIHSRDGSKVISKFDMTVEGILNFEEWLKTNGCKKVAVESTGNYWHLVYQVLEDDFEFILANAFQTRGHPGAKTDRLDAEWLAELCLNNQIKPSRILPEKDRELRALTRARKGYMDFRGKTKSRITQELEACTVKPSSVLSDVFGKTGRHILEGLINGMNIDDIVQNLPSKNIKKSKEEIKEAIQSGLTPVSMFLLRSHLDLIDEVDKKIEQIDIECRRLIQRRKTDLEIAMSMPGISFVSAVAILSEIGDYRNFGRGEQLAAFSGLDPSVYESAGKKYTGPITKKGSKYLRRMMIECAHASSSTKAKTRLKRFYLRVLAKKGKKVAIVALARKMLCILYHLLVNQEIYKDDGLEKPKRVKVKYSDVSNYPSLEEMVKIVGEAGYKVTREFPEG

SEQ ID NO: 50890 - protein, 356 aa, unidentified
MSPLFGTKQRKGYSIMSNIIYFIGLDIACNDFAASIYQTPEKPIITKEAILNNQDGFNMLISWLKEHNINNANSIICMEATGVYSKAITRCLAADGFNTCVEAPLKVKRAFDPVGHKTDAVDSKQIAEYAYRYRDELKYWQPKDEILEKIRQLLAARERFTKQGTAIKNASKAYEKEPIKVALIIKSHKQALKQLKKHIADIDKELDKHIHQNPTIFHNTNILKSIPGCSTLLSANLIVLTDNFENIKDHKRLAAFIGIIPYKHQSGTTIYKKPRIRYFGPQTTRKLLRLGAQSVATHNKVFRQYYLRKQAEGKAKALVLNNIANKLVKIACAMIRENKSYIKEHRSIHPMCLKTA

SEQ ID NO: 50891 - protein, 347 aa, unidentified
MARSTVHAVTAIGIDMGKTTLHMVGLDSRGAIVAREKVSRRRIASRLANLPPCLIGIEAGMATPYVARELAALGHDVKQVPPTYAKPFRQGHKNDFRDAHAVAEAVQRPTTRFVPVKTDEQLDLQALHRVRSRLVSERTAVINQMRGFLLERGIIVRQGLRFLRQLLPDILAKRTDVLSPRMIRIVIDLAGDWRQLDERIETVTDEIETLAKSDDSCRRVMTVPGIGPIISSAMVAAIGSGAAFAKGRDYSAWLGLVPKQMSTGDRTILGHISKRGNGYLRMLFIQAARVILVRPANWPKHGFGAWLVRAAQRLHPNVLAVALANKLARIAWTVLAQERSYEARVMK

SEQ ID NO: 50892 - protein, 412 aa, unidentified
MKQQADRAAGLDVHRDNVVAATRINEPGGEVVVTKKRFPTTKRGIGELAAFLTQAGVTRVAMEATGVYWKPIYYALEGLFDELWLCNAQHVKNVPGRKTDLSDAEWLADVAAHGMVRPSFVPPPEIRELRELTRYRKTQVDARAREIQRLEKTLQDAGIKLTSVASAVWSVSSRKIIEALIAGERNPGVLASLAVGKLRPKTAQLEEALDGRFGAHHGFVCRQVIDHIDFLDDSIAKLSEEIAARLLPFEAAVRLVRSVTGIGELSAQAIIAEIGIDMSRFPTAGHLCAWAGVAPASHESAGKKRPAGTRHGSTWLRRVLIEVARAASRTKGSYFSAQYSRIARRRGTNKAAVAVANSILAVIRHVLTNGCLYEDPGADYFERRHDPAVEAKRLQARIEALGFDVTLSPKAA

SEQ ID NO: 50893 - protein, 348 aa, unidentified
MQIVGALDVHRRQITFKTLDLVSGESRRGRISPAARRPLREWLEQFAGVESEFVLEGTTGWRFVVEELERAGHVARLADPAETAARRGRKQRAKTDDSDCELQLRLLLAGELPQAWIPPAHIVELRTRVRLRKTLIDQRTAWLQRLQAQLFHQGVPPGLKPRTTAGRGDLATLELSPAGREVVELCMRMLDQLDRELAPIDSALRSIARQQPGCRALTGQLYGVGAVTATAILAELGDARRFTSSDDAVRHSGLDVTVWQSDRKRASGHLSHQGPALLRWALFEAAQCAARRSSPDHSYYLQVANRIDHNRACLSVARKLCRRAHHILRELGDDALAPTRTRLVDAAA

SEQ ID NO: 50894 - protein, 337 aa, unidentified
MQITTIGLDLAKHVFQVHGCDAAGNCGVKRRLRRNQVLEFFAGLAPCLVGIEACGTAHHWARELRALGHDVRLMPAHYVKAYVKRGKNDAADAAAICEAVSRPSMRFVPIKTREQQAVLTMHRTRDLLMRQRTQLINAVRGHLAEFGIVEPQGVWHLGRVLRHLEVDDEVIAPARQVIGLLASQLNDLEGRIKEVDKQIALWHKASPTSQRLATIPGIGPVIASAIAATVPDAGVFRSGREFAAWLGLVPRQRSTGGKQRLGRITRDGDRYIRRLLIMGAQAVLQSSKAARANPWIQNLLARCPRLKVAVALANKTARIAWAVMTKGEIYRQAAASA

SEQ ID NO: 50895 - protein, 412 aa, unidentified
MRVIIERCCGLDVHQETVVACLLIGAPGDRPTKEVRTFRTVTRDLEVLRDWLAAAGVTHVGMESTGVYWRPVYAVLEGHFDLIVGNARHIRNVPGRKTDVKDAEWIADLVRHGLIAKSFVPPRPLREMRELLRYRRKLTESQAAERNRLLKLLETANIKLASVMSDVFGVSGRAMLRALIEGWVSVEAMADLARGQLRRKRSDLILALEGRMEEHHRFLLAAQLRRLEAIEQDIATLDLRITERLEPYRTPHALLMQIPGVDWLVAAVLIAEIGVDMSVFLSVYHLSAWAGVCPGSHESAGRQKSGRARKGNVHLRTILVGAAISAARTKGSYLKDKFHRLKARRGAMRAALAIAHKILVSAYHMLAKGLAYRDLGEAYLDQIGQTRTVANLKRRLERLGYHVTLQRTTQAA

SEQ ID NO: 50896 - protein, 338 aa, unidentified
MTTGLAAGTYELFVGIDIAATTAEVSTQRPGAKAGRSFKIDQTPEGFHRLVHTLQATDNEPSHVLVVMEATGSYWMSLATRLVHEGFRVSVINPSQAHHFAKALLKRAKTDAIDAQTPAQLAMVLQPAPWMPPPQIYYELQQRLAQRDDLLNLRQQVRNQLHALDQYPEVIASVRTRMERLLVLFQSQIDEVEGEIAAALNQDSAWAAAAERLQSIKGVGWVTAAWTLVTTLNFTTCDTVDALTAYAGLAPMPRQSGSSVWHRPSIGHSGNGRLRTAFYMATLTAARFNPAIKAFYNRLLEAGKPEKVARCAAARKLLHMAWAVVKKDRPFDPNYAQG

SEQ ID NO: 50897 - protein, 418 aa, unidentified
MIDDVQWFVGIDWATQSHRVCLLDIEGRHVDERDFAHGGAGLTELRDWLLEKTKAAPGQIAVAIETPHGPVVEMLLDHAFQVFAINPKQLDRFRDRFTVAGAKDDSRDAHVLGGALRTDRHAFRRLVVDDPVMIELREWSRMADELQQERTRLANRVRQQLWRYYPQAIELTDDVADDWFLALWQRVPTSAAAAKVSEKTITRILKDHRIRRLDAATVLQTLRKTPLFVAPGTTEAACAHIRNLAARLRLVNQQIKEAHRALDGLCAKLEAATESPSGQIREQRDVTILRSWPGIGRIVLATLLTEATEPLRTRDYHALRALAGTAPVTRRSGKQCFVIRRLACNKRLQNAVHHWSRVAIQHDAAARRRYDALRRRGHGHARALRSVGDRLLYALCTTLKRQTPYNPNCQIVQVTAGL

SEQ ID NO: 50898 - protein, 417 aa, unidentified
MKKHNNSAKKSEPTLKRTKSRGPVQRDTKEVMAELVGKLTEKRHAKAVAASAGEEHRRGELRPNLDRLTVGVDLGDQWSHYCILGLEGETLAEGQLRTTPQEVAEFFEGLNAARVIVEVGTHSAWVQEVICGYGHEVLVANPRLMEGSKRRKRKNDRIDANKLARLGRVDPQSLHPIQHRSREVRQDLVVLRARDALVAARTELINATRGLGKSMGRRLPECSSPSFAQKVEEAVPVEIREALLPLVRMTAALSDGIQEYDKKIEKLGSEKYGHTALLRQVKGVGPITSLAYVLTLENPERFAKSRDVGPYLGLVPKQEDSGESQPQLGISKAGDTMVRRLLVGSAHYILGPFGPDTDLRRYGLRLCERGGKNAKKRAAVAVARKLAVLLHCLWVSGEVYEPLRNAMAVAIAPAAAA

SEQ ID NO: 50899 - protein, 331 aa, unidentified
MKIKDVIGIDASKLTLDCCLHKSGVQEVFDNTPEAIAHMADWSMKSSGLDKDGLLFVFEHTGLYTHQLARYLSEQSYYFHLVPGLEIKRSLGIARGKDDKADAKRIALYGYRLREEIKPYQMPKESLETLKRLMSMRRKLVAQRAGHIATLSEQKRVLDKELGPLLFQVQQEIIGVLDVQIAKIEKELDRIIEQDPELQDLYRLLMTIKGIGAVTARFLMVYTVGFTAFKTWRKFASYCGIAPFPNRSGTSIRGRTKISQLANKEGKTLLNLCAVSAIQCNPEMKAYYERRTAKGKNKMSTLNIIRNKLLARAFAVVVRGTPYVNTMGYIS

SEQ ID NO: 50900 - protein, 497 aa, unidentified
MNVNHYIGFDVHKKSVSYCVKTAGGKIVDEGKVRATHDELRRWAGERPEPWRGAMEATLFSGWIYDALRPFAAELQMGHPALMKAIAASKKKNDQMDARKIADMVRCDLLPACYVAPVEIRELRRTLRYRNLVVAQATRMKNKVSGLLMEVGAEYNKERLHGKQYFTQLLETVAEVPDSVKDLLRLSRGAMELFETTQQQLLARLKRDELLSKRVTLLESIRGVGEVTALTWALEVGDPHRFSSVAHAVSYCGLTSALVSSADKQQRGPLSKQRNAHLQTVLVEAAKLAPRWNPQLAALHERELARGNRNRATLAVARKLVAYLLAVDKSGQPFEVRSAPAAAAEVQAVAQKELRAHRRENNHASLCAAQRRFASDPPAAPRLTGDCTRGTCLLMCQRDCFEAGRLIQTQSSWTASRRSRKWMSGHADADALTQSATDRKQRVVVQLGGYAMALQETHPSAGRILFSLDKPLSWMSPVGSGWLNRGSAGSNSGRLIL

SEQ ID NO: 50901 - protein, 369 aa, unidentified
MSERTRFVGLDVHKASIAVAVAEAFGDPEDHGHIANDPSAVRRLMQRLGGPDLHLEVAYEAGPTGYALHRQLTAMGISCLVVAPSLIPVKPGDRIKTDRRDAAKLARLLRSGDLTPVWVPDEAHEALRDLVRARDDAKADLLRAKHRLSKFLLRRAIHPPVGVRAWSRAHDAWLARLTFEHAADGVVLEHYHAVVREAAERVRRLETALAQCAAASPHAELLAALQAIRGIGFLTAVTIVAEAGDLRRFPTARQFMAYVGLVPSEHSSGDSRHRGHITKTGNRLIRHVLGQAAHNARYRPNVSTSLRARQRRVLPAVVELDRRAQARLHARYRHLAGRIGTNKTIIAVARELAGFVWATGQLVPTALAA

SEQ ID NO: 50902 - protein, 453 aa, unidentified
MPRKKTKPVPKRAKKASIEMPVVNANAAGIDIGGNFHMVCPRQGQVKEFGVVTRQLHELAKYLKQEGITTVAIESTGYHWKPLFVLLQDYGFEVLLVNARHIKNVRGRKTDVIDSQWIQLLHSLGLLNASFQLDNLGEELRSYTRHRAYLIQQRSKFISKMHAALIQMNIQLPTVIRDLTGKTGKAIIQAINEGQRSPQKLADLAHPRIQASRAQMVDALTGTWRAELLFQLKQCYQMYETFTEQIEECDRQIEQLLETEIIKKQLDEFQGEVKKKCRQKNDPTFDVATFFFQLTGINLSDIGGIGSSIILTVFSEVGWDFSKFKSAASFRSWLGSCPNPKVSGGRIISRRGVKKKNRALEALKKAANAIGNSKKDPLYGFFQKINRKHGRVYAIKATANKLATIIYNMATKKEAFNYMNSEQHQKRMRQKSLNAARKIIQKNELTLVELGFQ

SEQ ID NO: 50903 - protein, 342 aa, unidentified
MEANGARVIGVDTHKDSHSAAMLDQLGAVQAAVDVAANCGGYRRLLNWARAKSGERIWVVEGTGSYGAGLAGFLSQRGEVVYEGDRPQRRAPGAAGKSDQLDAIRVAREALSRQHHAIPRRRGQREAIRVLATARGGAVGAYRQGLNQLYALVVTAPEPLRERLIRLKGEGLVRACRRLRSSGDLETSITAATLRRVGRRVAELEAEAAEYERQLTELVASSAPSLLAEPGLGALTAAQVLVSWSHAGRLRSESAFAALAGVAPVPASSGRLVRHRLNRQGDRQLNRALHVITLSRSQFDPATKNYIARRTAEGKSGREIRRCLKRYVARRLFRLLSGLDRS

SEQ ID NO: 50904 - protein, 318 aa, unidentified
MKITAIGIDISKDHLDIAVRPTGECWRVAYSQEQLPALLTRLQALDPERIVLEATGGLEVLLATQLAAAGLPVVVINPRQARDFAKATGQLAKTDPVDAAVLAHFGEALKPEVRPLPDEQTRALEALLTRRRQLVEMLVAEKNRHAALSRQPKLQKGVAEHIDWLNRRIADLDDELKGQLEQSPVFCRNDSLLRTVPSVGEVTSRTLLACLPELGKLTHKQIGALVGVVPFARQSGQWKGEAHIRGGRLEVRSALYMATLSAVRYNPIIKAFYQRLLARGKKKKVALTACMHKLLTILNAMIRQQQEWKTPQISAATS

SEQ ID NO: 50905 - protein, 386 aa, unidentified
MLAPTPMNDREITGGQRIVMMWTASPERHQVPRHDRCRSRIGKPSMKTFIRIGIDLAKNFFQVHAIEREGAPAVTRKLSRGKVLAFFAQTAPCRVGMEACGSSHYWAREIRALGHEVVLIPPAYTKPYVKRGKNDANDAAAICEAMSRPEMRFVPIKSADQQAVLMLHKTRELLVKQRTMTVNALRGHLSEFGLIAPKGIQRVKELLKLALVDETLPEEARQATAMLASHGDGLDERIDDLEKKIARASGRNQTSRLLDEIPAFGPVIASAMVAFNPDPSVFRSGCDFSASLGITPSQNSSGGKDKLGGITKKGNRYLRKMLVVGCTSVLRVAHKYKGALAEWIVAIRARKPERVVAVALANKLARIAWAMMTTGESFRAELYTKA

SEQ ID NO: 50906 - protein, 347 aa, unidentified
MNYYAGIDVSLEFSSVCVVDGSGKIVREGKVASEPEALIAWLGSLGLSLDRIGLEAGPLSQWLYAKLKQAGFAVELLETRHVRDAFKAMPVKSDRNDARGIAQLLRLGWFRPVHCKSMEAQEVRAVLTARKLVQRKLRDVENNLRGILRGFGLKVGKTTAITFAKRIKELVVGQTSLERITDALLAVRAVLRRELSAFDRQVRSMARADTKALLLMSTPAVGPIVALTYGSAIDDPARFTSSKQAGPHFGLTPKKYQSGETDWSGRISKIGDATVREALYESAHLILTRPIKGCPELKSWAMRIAKRAGMAKAKVALARKLAVILHRMLADNVPFNPNAKAAKLATV

SEQ ID NO: 50907 - protein, 402 aa, unidentified
MDIGDIDVFIGIDVGKSEHWATALSRDGQKVLDRALPNDEERLRALYKKLADHGNLLVVVDQPATIGALAVAVAQDMGITVGYLPGLSMRRIADLTPGSAKTDAKDAAVIAQAARTMPHTLRAISTSDEEAAALSMLTGFDLDLARQVNQTANRIRGLYTQIHPALEAVVGPWLEHDAILEVITAWPTPAELKRAGKTRIDARLKKHGCRRHATWAGQIVSALEHQTVVVAGTDAAGTVLPHLARQLITLHAQRADIAAQVETLVQAHPLYQVLTSMPGIGVRTAAVFLAETLGKTFDTGAQLASYSGLAPVTRRSGSSIRGEHVSHGGNKRLKRAMFLSAFASLRSDPVSRAYYQRKRDQGKRHNQAVLALAHRRILTLHAMIRNGALYDPQPATKLPAAA

SEQ ID NO: 50908 - protein, 369 aa, unidentified
MADRITYVGLDVHKDSIVVAVAAGGLRGEVREYGRIANTSTALDRLLRKLGGDGMRLRFCYEAGPCGYGIQRRLSTRGHECVVVAPSLIPKRAGDRVKTDRRDAAGLAKLHRAGELTAVWVPDVGHEAMRDLVRARLDAVHSLRRARQQLSGFLLRHGCHYGRPAWTRLHRRWLAGLKFEQAVHHIVLEDYIAAVEAAEARRNRLTAQIEPMLPDWTLAPVVAALQTMRGMALVNAATLIAELGDLSRFANPRQLMAYLGLVPSEHSSGSSVKRGGITKAGNAAARRLLIEAAWSYRFPARLSRELLLRQERQPRLIRDIAWKGQVRLCARYRRLARTGKPANIVTTAIARELAGFVWAIARQVTVTTD

SEQ ID NO: 50909 - protein, 407 aa, unidentified
MNPLFVGIDVSSKNNVTYLMKPDGSKYSSFSVQNNLGGAKLMSEKIVSALEAMQLSDVVIGLEATSIYGDGLVCALREDGRLGQYQRKIHVLNPKQVKKFKDSYPDLPKNDWVDAFVIADHLRFGRIGKEVYMDDYRYKSLQTLARARFDVVQNLTREKQHFANYLFLKCSGMAQDKDIANSSATTIALMERFETVDELAYADLDELTRFIDETGRNFADPAAKARAIQAAARNSYRLPVTVNSSVNQAMAVSIATMRALEKQIKVLDKAIEQQFQIIPNTLTSIPGIGKVYSAGIIAEIGDVHRFNSQASVAKYAGLVWTQHQSGDFEAQHTKLIKSGNRYLRYYLLEAANSVRRCDSEFRRYYDLKFKEVNQFQHKRALALTARKLVRLIYRLLMDNRLYIPPES

SEQ ID NO: 50910 - protein, 425 aa, unidentified
MNYKQNEKINQVKESTLVVGIDIGSTTQYARAFDWRGIELGKVFTFSNSREGFEAFKAWMQRLQDKYRKSDVIVGIEPTGHYWFDLGAYLEDEGILLVMVNPYAVKQTKELDDNSQSKNDRKDPKVIAKLVTEGRYSAPYTPDGVYADLRIMVTNRKRLIREMTQIKNRFARWFAIYFFEYTDVFGDYEAQSSMLLLKKVCTPEAIVELGAEKINQIWRDAKLRAVGMKRATTLCETAKRSIGLKKGSSAAQYEMKLLLEDYEYKKAQLDAVIEEIEKLCRKIPESEQMLAIKGIGVITVAGFLAEVGDVRRFESPRQIQKLAGLSLRENSSGKHKGQTTISKRGRSKLRAVLFNAAIPLIATNPEFKSLHEYYTTRANNPLKKKQSVIAISCKLIRVFYAILANGVTYDAQKMLSDIHRQPQAA

SEQ ID NO: 50911 - protein, 340 aa, unidentified
MEELHIIGVDLAKRVFQVHGSDRAGRVLFRKKLSRQQFKKFLCEIPSCTIAMEACATSHHWGREAEEAGHIVRLIPPNYVKPFVKRHKNDAVDAEAIVEAALRPSMSFVAVKTKEQQAQAVMFRSRDLYLRQRTQLINAMHGHLAEYGVLLPTSRASVARMVAMAKERSEDLPAPVFEMAVLMADDIERLTAKVATIDKALKMLAQASPEAKRLRTMPGVGPITAVAIQAFCPAANSVDSGRGFAAWLGLVPRQNSTGGKDRFGRITKMGQRDVRRLLVTGALSVISASERKGRCDDPWLANMLKKKPRLVVAVAFANRMARQLWAMMVTKKNYEIRAAV

SEQ ID NO: 50912 - protein, 309 aa, unidentified
MEIEVGCDISMDWIDVCVLEPPRHFRVANKPKPVERLARELPPGSRIGMEATGTMHQLLADALCAAGHTVYELNPRWVHRYAGGVGVRGKSDRGDAMVIARYVHAEGAHLHPYRSPTPQQREIRTLLHRRAQVMKLKTASRQSLGDQANEVVQTFKQLVKDIDRRIATLLGADPQWKGLAAKLRRIPGVGPLVAAHLVEALARRPFEAVKAFIAYTGMDPRPNDSGRKKGIRRLTHHGDAHLRAALFMGAMAACKVARWRAVYEHNRRKGLPSTAAIIVVARKLARVAFCLFKTGQDYDPERIGGVAPT

SEQ ID NO: 50913 - protein, 372 aa, unidentified
MVERDFYLHGSKADLMGRKIWTGLDVGVETTQICIINDHGEVLQETACATSLAIIDREIRWLRRRRWAKLGMEASSGSHLARGLRSRGYSIDLYETRELSKFLRLRRNKTDQGDALGIAEAGRLGATVVSKVHLKSFECQCLQSKLTIRRNLIRQRVALINLLCRQLELYGGRVSRSTRSMQLRSAVEAEFKKVFGRAAACPIDEFYQLLSYSEQLLSYQTSVDRELRSLAAENDVCRRFLEIPGVGPICALTFYAAVGDPYRFSSSKDVGAYFGLCPTIYQSGLTCRVGRISRMGNVSVRSLLVQASMAFRRHRNADRKLLEWVAGIEQRRGKRKATIALARKLAILMLAIWKSGDHFRSEPRSEAVGLVS

SEQ ID NO: 50914 - protein, 412 aa, unidentified
MTNGMRRWFAGVDWGSEKHQVCLLDEAGTVVGERVFQHDAAGLAALCDWLVSVAGDTSSVAVAIEVPHGPVVDVLLDRGFAVHAINPKQLDRLRDRFSPAGAKDDRRDARVAAAGLRTDPHLFRPLQVGDPAVIELREWSRLAEELQQERVRLANRIRQQLWRYYPQLLALSDDLTAEWILALWTMAPTPAKAMRLHEATIAKLLSRHRIRRLDAAGVAEMLRQPAITVAAGVTEAAVLHLRSLIARLRLANAEFCQAEQKLDELCTRLSQNAAAAAQGPCDAEILRSMPGIGTVILAILLTEAGDPLARRDHAALRTLSGVAPVTKRSGKSHVVVMRYAAQVRLRQAVFHWARVAILHDPESRRRYDALRQRGHSYGRALRTVADRLLGVACVLLRRQVLFDPDHGLAKTA

SEQ ID NO: 50915 - protein, 417 aa, unidentified
MNNWNEITHYAGFDWAKEHHQVIIIDRHAQIVAEIQFDHSLEGWTKWRELIRAYPALAVAIETNQGAAVEQLLESQLTVYPVNPRSAAAYRQRKIPTSNKTDWLDAWSLAEALRMDGQSWRPLQPLDPIIHELRLLCRDEWSLIGQRTELVNQLQQALGEYYPGLLQVFDDWTLPSSWKFLERFPTPEALAKAGPRKWENFLHCHRLYRPQTHAARMESLSQASQFRSSAAVTRAKSLLVLSLVKMLIALENQLKEYRSQIEKLFASHPDHELFGSLPGAGPKLAPRLLGEIGADRSLFPNAQSLQCYAGTAPVSYQSGQIHKVYLRRQCNKVLRCAIHLWADLSRRWSQWAQTYYQHLRQRGKSHAEAVRCLGHRWLKIIWKMWQTRTPYDAELHMRNQQEHGSWVLQFMPQKTSE

SEQ ID NO: 50916 - protein, 317 aa, unidentified
METVGIDISKLTFDARVHTSQAYQSFDNENKGYQDLISWAYENSSFSKEKIIFVFEHTGLYSHQLSVYLTSQGIPFLMVPGLEIKRSLGMARGKDDKKDATKIAQYAYRLRDEIVPSKLATEEVMSLKRLLSLRERLVKQRSGFKSSLKEQKRVLPKKGNETLLSTQEKMIRYLSKQIDSVEKQMEGMIEENESMSRNFRLLTSIKGVGPQTALFMIAYTANFTKFKNWRKFASYCGIAPFPNSSGTSIRGRTKVSNLANKKIKSLLDLCAKSSIQHNPEMKQYYNNRIETGKNKMSTINIVRTRNEPYINLMKYAA

SEQ ID NO: 50917 - protein, 399 aa, unidentified
MMPDTSEIRICMDIGNRKHHVAIGLSTGEVLENFDLCHKPTDIQAFFHKIHQYQKQYNLSVAVAMEGYNGYARPIDRIVLEKGYRLLNVNNNKLAQFKKIFAGPAKTDKIDALKMFELFSLSDHLSVAKGVLQEITKKPEINEKLKCLSRRRRVLVDEKTRTVNRLQGDLQAISPDLLSITGSVDNVWFLNFITSKEDIRKIVGLRRSSLLKIKGVGRQYAKKIISWQKTALFSTDAEWIGPMVLSDAKRIIALQNEIAELEETMKTLSEGSEIARRLKTIPGFGLVCSAELAGEIGVLERFSSEASLALYLGVAVLDNKSGNYSGTKRAKHVNHQGRMAMMTAIARHINHVAEAKSYYEKKRKEGKKHNQAVRSLARHMIKVIWSMIKNGRDYRIKIT

SEQ ID NO: 50918 - protein, 338 aa, unidentified
MVYGAIDLHMRYSQIRIIDADGRVVREQRVVTSAERLVAIFGDHGPMRILVETGTESEWVAQALETAGHAVIVADPNYAPMYGEIRRKVKTDRRDVAALAEANRRGWYRATHRVSTAQRALRQQLRSRRLLVQMRSGTIALIRSLLRQSGYRLAPGSSERVPRRLAQLVLPADLADTIAPLRRMVSTMTTEIAEVDRRLQTHAASDPIVHRLQSVPGVGPVVALTFRAFVDDVARFSSAGQVSAAVGLVPREDSSAERRHRGHITKAGPRELRSLLVQAAWACWRSHASGTLRAWVERLASRRGRRIAVVALARRLSRILYALWRDQSVFDAATLAAA

SEQ ID NO: 50919 - protein, 346 aa, unidentified
MLYAGLDLSRQRLDVCVLDEEGRTVEVTAVHPDADALRTLAARILRHGEEVTATIESMTGSRFVHDQLERWGWDVAIADPVKAKGLAPLAAKTDKIDARVLAELARRDLVPEIWLPTPGVRAERERARFRQHLIHHRTALKNRIHSTLMSFGYTVPVTDLFGIAGRELLARLELPEAWATSLTTSLAMVDDLDERIDLFERELKRLGADHPYIPLLMTVPGIGWVTAYTIASEIGDIRRFASPKKLTGYTGLCPLVRQSGNHDYRGPLSKHGPRYLRWALIEAATHAARDLRYRDRYERTKRRLGPQRGSKVARVDVARQLAEAIWHILTKNEPFAPAGPAIKLVA

SEQ ID NO: 50920 - protein, 423 aa, unidentified
MSKQNVELAAFIGLDWADEEHAVCLQGAGESRREISTLDQTPEGLQAWIHQLRARFGGRPVAVAVEQARGSLIYALMHVDFLHLYPVNPQTLAKLRQAFYPSGAKDDPGDAQLLLEVLLNHRDHLRVWVPDDVLTRSIQLLTEGRRKLVGERTALTNQLIAALKMYFPQALDWFGDLHTPRACAFLYRWPSLQQLKTATSSSVRKFYQNQGYRGEDKLKQLIQDIQQALPLTGDEAVLLASTMMVQALVKQIPSLTESIEEYDRKIAALFKSHDDSTLFGSFPGAGPTLAPRLLAVFGSDRSRFEYAAEVQQLSGIAPVTEKSGKACWVHWRFACSKFLRQSLHEFAGQSILKSAWARAYYQQQRARGSSHQAALRALAFKWIRIIFRCWKDRTPYDEAKYCQSLQLRGSRLASTLKTASTEV

SEQ ID NO: 50921 - protein, 443 aa, unidentified
MSFYRLKRTQRRKRLLGHKLKPSRATLFVQNSKPHLSMKPTYFLGIDAAKHKMRATLSNRSEHVLFEKDLSVEATGLRQLLAAIKRQVNDPEQLLVLIEATGLLHLNWSAALTKAGYAVAVINPLIARRLYTLQNSIRDNKSDPIDARGLCTIGLLHGEKLLVHYRFSLRPEQFTLQRAQSVRKALRSALSNLKKTYQSLMDLSFPELGGLLQLDGVGIRQLLIQAPTPAAIASKRLSTLEKNWMVRPKAAALKALAADSMADPDLAAASGPALVALLEAVAAMEARLHALDQQIAELACTSVDPQTKALIETIPGFGPVNAAKTLAWLPTEILHSGSNRKVAARLQAFMGNDPRLRQSGQWKGHTKMSKRGVEMLRTAFFQSAFSAAHNDPELRAYYQCKRAQGKTHEVALSHLMRILTRRLVAVLRSGKPYQSHYNLKNAA

SEQ ID NO: 50922 - protein, 403 aa, unidentified
MTAFFAGLDWASQSHAVCIIDDHGNVRERVDIAHSAAGLTQLQRSLVRDERPPIAIERPSGIVVDTLLDAGFTVIPIHPNAVKATRPRYRSHGAKSDASDAYLLADLLRTDGHRFAPLPAQSDDIRALRALVRGRDDVVAARTQLANQLRSLLASFWPGAAEVFADVDSPIALAFVERYATPESAHRLGPKRMAAFCAQHAYSGRRSAQDLLARLQQAPAGVCAEMEMEAKGELARSLARALSQLVEQIRLLSSRIEHHVESLDDGRIVMSFPRAGRICAAQILAEFGSVRERFANEARLAAEAGIGPVTYPSGKSRTVTFRCACNHRLRAALTCLADNSRHASAWAAHVYNRARARGCDHPHAVRVLARAWVRVIWRAWTDRKPYDPTRHGAAQLLAKSAGG

SEQ ID NO: 50923 - protein, 375 aa, unidentified
MQAAKNRGYESGSVLYMAMELSNRKWKLGFSNGARMRRKSIEARDQVRLLEEVLLAKRKLGLASEAQVICCYEAGRDGHWIYRWLTAAGFEVLEIDSSSIETARGRKHVKTDRVDVEKLVDLLLRYCLGFRKAFRVVRVPPEEAEAGQRLHREDEYLTRQRTRVTNRMKGLLVAQGITELSLKGDFAARLERERRWDGQGLSPELKAELVRMHAQYRLIEEQLAALVRAYAAELESDTAVGASRRRLEILKSMGPKTSRVLAAEVFAWRKFGNAKEVGGMSGLTATPSQSGDEQREQGISKTGNRRVRWVMIEFAWLWLRWQPNSELSRWYRQRFAHGSRRMRRIGIVALARKLLIALWRYVEFGELPAGAVLKA

SEQ ID NO: 50924 - protein, 407 aa, unidentified
MKHVIALDVSKGKSTVAIYDGHRQCEFEGMLHHTRCDFERLHERMEEITKQDGQAPAIVFEATGIYSKPVEAFFKDYGYAYCRMNPLEANLQMATMRRNKTDISDAHELAKTHFKMERETTYIQDDYYEQMRALTRYYDEIDEEIILLKSRMHAILQLSFPELEKLITPSSALFLNIVQLYPHPALLQAHSKTMIKNRLKVNTRKNLSLMRAEAKAITLLEAAENSYPAIKPTDIRCDQARDYAARIADLLEKKDALVKQMVELSEGRKEYLVFRSIPGIGDSTACRLIGEIGDIRRFQNAKQLNAYTGIDIMRYQSGNTQYRDRINKRGNKHLRKILYFMVCAMLMAKGKPNHFVDYYYKLKKQPQRKPHKVAIIACINKFLKVTFQLLTRGILYDYESALPAQKS

SEQ ID NO: 50925 - protein, 319 aa, unidentified
MHCIGVDVSKQELVTFDGVKERTFPNVDGLEEFATYALGRRGVVVVFEPTSTYSRRLEALCRQERIACCCLNPRMIPHLRVVAGGRSKTDRSDAELLYRYGVERGQVEAGRLTQDPLVQAVAAHLACYRVVQKARVAHQGVLEALTQDPSSPSDLVTELRGEIDTLKEKEERHIEQAEAVIAADEAGACALDRLLGIPGVGPVTAITLLALFRKYSDANRRQMVALAGLDPIQIQSGTSVHGKSRISKRGSGEVRKRLYEATLSAARYNPRVRAIYRRLKEDGKPDKVARTAAARKLLLIAHAIYNSGESFRGSEEVET

SEQ ID NO: 50926 - protein, 348 aa, unidentified
MAVTIVEATRAITGGIDTHGEVHVAAALDDVGGLLGTESFDATPDGYSALLSWLAGFGAVGKVGVEGTGSYGAGLARFLTRAGIEVIEVDRHNRQNRRRQGKSDPIDAVEAARAVLSGSVQGKAKSRDGAVEAIRVLVVAKRSARQARVKALTQMRQLTVTAPDQLQSRIKGLPTPQFIAAAKGLRSTRSTDPVTAAAKVALSSLAHRISELDAEIAELDSRITPLLEAHAPDLLNIYGVGIDTAATLLVTAGDNPERLRSEPAWAHLCGVSPLQASSGKVTRHRLNRGGDRQANRALWTIVITRLASDPDTQAYMERRVKEGRSKREIIRMLKRYVAREVYHQLLRG

SEQ ID NO: 50927 - protein, 366 aa, unidentified
MKKISTVQVFGNEVFKEQKLTIGVDLGDRWSFYCVLDEAGKILLEQKVATTPEAMKQTFGKIPRSLIAMETGTHSPWVSRLLTELGHQVIVAHAQKVELITKSNRKDDRHDARTLARLARIDPELLGPVRHRSAKAQIHLTVIRARAELVSARTALVNAARGLVKSYGQRLPKRGTYQVSRELATGLSAELRDVLGPLLKEVESLNERIQEYDERMEKIAKEEYPEVSLLKQVKGVGTQISLTYVLTIEDPYRFPKSRAVGCFLGLRPGRRNSGESEPQKGISKEGDRYLRTMMVQGAHYILGPFGEDSDLRRWGLKLAERGGKNAKKRAVVAVARKLAVLLHRLWVSGEVYEPLRNSQKAMRAVA

SEQ ID NO: 50928 - protein, 387 aa, unidentified
MQQPNELSRSLAALDQDSTLIAVIEMSRSTWLVASIVPGINRQPLKKLAADETALLQLLYRWRDEATKAGRTIDRIAVAYEAGRDGFWLARWLRGRGIEAYVIHPTSVAVSREHRRAKTDRLDTELLKRAFLGWLRGEPRHCSMAKIPTPEEEDAKRPNRERENLVSERTRIVNRMKSTLARLGLRGFKPTLRKAAERLDRLRTAEGVPLLPNTLAELRRDIARLRFVMDQIREIEAARRIRLEQHPELASHAMVRLLARVIGIAIETADMLVHEILSRNLRDRKAVARYAGLTGSPDESGARRREKGLARAGNARVRRGMIQLAWRFLMFQKNSALAQWYRLQTTDHRGTTRKTMIVALARKLLVALWQLVTTAEVPEGVVLRPAV

SEQ ID NO: 50929 - protein, 347 aa, unidentified
MNIIGCDFHSRSQQIAMLDSETGEVVEKRLEHESGEARRFYEGLKAPALVGIEATGYTRWFAEMLGELGHELVVGEAAKIRAMNPRKQKHDRRDAEHLLNLLVRGDFPKIWLPPAEERDVRVLIEHRHQLVELRTRAQNGLQAMALSYGLRRRQRLWSKAGQEQLQKIPLREGMARRREDLTRLVRQLSVWIKELDQRILEEVARRPDAQRLMTHPGVGPLTALGTVLVLGPVERFPDDRHLTSYLGLIPQEDSSAGRQRFGHLTKQGNRLMRFLLVEAAQTASRYDPRLRRAYRRLVFRKGAPVAKVAMARKLAIRLYIMLRDGIDYEEFCRRGSHAGMLGDVALV

SEQ ID NO: 50930 - protein, 304 aa, unidentified
MNGIGIDVSKRQLDIGTTDGETLQVSNNRSGFSELDVWLKKRPTRQIVLEATGGYEQPVLDFLHKAGHPVVRANALRARKLAQGLGQTAKTDRLDAYALAQMAALVKLPPYQPLQPWQQKMREFVRARRQAMDALTIARQQQEMVLDRELRRLLQGNITRLQTLAERLGKQIAEQVGQQPQLKTLKSMKGVGPALQAVLASYLPELGRITGKRIASLVGVAPMSHDSGTMRGKRSIHGGRAEIRQVLYMAAMSAMRHEPRLRDFYQSLQARGKEGKVAIVAVMRKMLVMLNARVRDAESGLVPA

SEQ ID NO: 50931 - protein, 345 aa, unidentified
MNKTIVGVDLAKKVIQVCIYTNRKVHSNTEMTPKEFTCWLVNSMPATIVYEACGTSNYWKQLASSHGHDARLISSRLVAVVRQNQKTDKNDALAIVQASLLPDVNFIQGKTAEQQQLQSIVRLRELSIRQKTASKNQLIALLSELNIQVSNRNGGLRATIDETLEDADNGFSPSFRQAISTAWDQYSSLVEAIDTYDDCLEKSLSYQPECKKLLKIEGVGTLNAVNLYIALGCADIGAFSKGKAAAACIGLTPIQHSSGGRAKIGSIGRGFKNTLFRSQLLTGAMSIVSKVANRPPKTKKEEWLKNLIERRGKKCAAVALANKNVRTAFAILTQGTEYKAEPLVS

SEQ ID NO: 50932 - protein, 411 aa, unidentified
MLFIGVDLSDKNFDSCISNSSGDVLAVNKFNFDDDGFSDFVHKINEHESDNKNCIIGLENPHSRLVDFLIQRGYSVIPTHPGSIAKYRESRIPSRAKSDPMDARLIADYIREHHKSLRLIKMPDDTIRELSILLEDRDKLVEQKVRFSNQLTSTLKEYFPQALDAFGSVTNKSALEFLARFDTHQEVKALLAESSQKLDDVLAECGFFRKDSKERFHSAMSKNLSAISQAVIKAKIRLKNALVGHLLLLIQQIEDYEKQVQKIVDETPNGSIFRTLPGADYILGARLFVLYSSREFVSASEAQAFWGTCPYTSRSGNMTAIGFRRGCNHFGRNTFHQLAFCSLKSSQWSKKQNAKKRKEGKHSNHALRCIANTWVKITYAMWRSKTPYDESKHLASIANHIISQPAFILGG

SEQ ID NO: 50933 - protein, 372 aa, unidentified
MYYVGIDIAKYKHDCFIFTSEGEIVLESFTFENTREEFNKLKLVLDALNYSQKIKIGLEATGIYRKNLKFFLSSIEYDFDELNPLQVKRFTNAMSNRKNKNDKIDASQIARFVSTGASITYVYSSYHTEALKQLTRARNSLIDERSKHQIVLTDILDVEFPEFKGFFNNKFIDTALYLLNKYQTVKRISKLSHNDCVLLHNKSRNTCGHHFDYNDSLISANLQIIKCLNNEIDKIEKEINSIMSTINSPIVSITGISAISAASIIGEFGDFSRFNNTKQLCVFCGVEPSIYQSGTSYHEGKMVKHGSSNLRRTLFNVVPYIIMHNETFKTFYDKRSEGKVYRVAQSHVVKKLLRVIFTLEMTGNTFDPSKLY

SEQ ID NO: 50934 - protein, 343 aa, unidentified
MSVFAALDVSQEETAICVVDRDGGLVAEAKVPTCPDAIVRWFAERAEGLERVGMETGPLAVWLWNALTARQVPLVCLDARHASGVLKMMPNKTDHHDARGLAQIVRTGWFKPVQIKSHDAYVNRALLTAREALVGMRVKLENEIRGLLKTFSVMFGKRVGGFKRRAEEIIRDELAVSPDLVPIFEALMQARRDILARIAALDSRIRSIARRHATVRLLMTAPGVGPITAMAVVAAFDDAFRFRRSSSAGAYLGLTPRRYESGEISRNGRISRRGDMFTRKCLYEAAKAIFCRNLGDTRLRSWAKAIAERTGPRKAKVALARKLAVTLHAMWRTNTPFREEAMA

SEQ ID NO: 50935 - protein, 320 aa, unidentified
MQRPNAGVDVSKQHLDVCLHSSSGRLGNDAQGWSELVAMLKAAEVDLVVIEATGGYERGAVCALQAAGVAVARVNPRQARDFAKSMGILAKTDQVDARTLRDFADVLARHDKRGQYITPIEEPARRELGELMDRRRQLVEMRVAEHNRSEHAGPRARRSIDSVIKLLDKQLGLIEGQIDDHMDRHYKRQRELLDSVKGVGPVTILTLTAALPELGRLGRRQIAKLVGVAPLADDSGSRQGKRRVWGGRANVRAVVYMAAIVAIRHNAVMRAFYERLLAAGKPKKVAIVAAMRKLLTILNAMLRDQRLWDATRHLNIAQPG

SEQ ID NO: 50936 - protein, 345 aa, unidentified
MTKLIAGMDLHSNNVVIGLMDRNGKRVAHQKVECRLSEVVKFLAPYKKRLEQIGVESTYNWYWLVDGLRALEYPVLLANPAGMEQYNGIKHADDTNDAFFVAELLRLKILPTGYIFDPELRPVRDLLRRRLTLVHHRTALMLSFKSLYTRTTGQQMTLGELKDLGIKQAQDLYDHPANQLIAGMQIKHIEQLAESIEKVEKLVLDCARELPCYSKLTTLPGVGKILGMTITLEVGDIKRLAKPGHFASYCRTVEAKRTSNSKKKGVNNSKCGNKYLAWAFVEAANFARRCDEQCRRWYDRKAAKTSNVIATKALACKLAKAAWYLMAEGTAYDPKRMFGQAASTK

SEQ ID NO: 50937 - protein, 396 aa, unidentified
MASVGIDIGGRAHVAAQCRTGEVRSDRKVLRISQSRAGFDAIDAWLAAGPEPVDQVVMESSGHYWLPLASHLGRRGVRVAVVNPLVAKYVARSRLGRTKSDPADARSLAEMAMRDTPPARDPLAGAELRQAARFAMTLVTEQAKACQRLIRLVELGFPELGELFDDPTCRTAREVLRIAPTARAATRRRTATLANANAGPGHRRLGQARAERLQAAAADSIAVPELAAEVAFEVGLLLDQYDLLEGQIEAADRHVAELLDGELARRLRTIPGVGPSIVATLIAEVGDIGRFSDFDQLLAYAGVHPAERSSGRKGSNPETAWHMSKAGNSHLRAAAYRMAVVGVQHNPVIAAHYARKRAAGKSKMNALGHCMRKALSLVWGVWRNGQDFDPDWGVEA

SEQ ID NO: 50938 - protein, 266 aa, unidentified
MKDTMIGVDLAKNVIQIHGASMAGHLKFRKKLSRLQLLKFMAEQPSAVVVFEACGSAHYWAREMMKLGHEVKLIAPQYVRPFVKRQKNDAADAEAIVIAAQRPEMRFVAPKSEDQQARAVLFRARERLVHQRTELVNALRAVLYEYGSIVPQGIVHLKQIETILDAPNSGLPALVRQECRDLVAQIAEKTIRIEAKTKKIKELAARTDTARRLQTMPGVGSMTALAVEAFAPEMSSFRCGRDFAAWLGLVPRQHSSGGKERLGRVV

SEQ ID NO: 50939 - protein, 376 aa, unidentified
MLDHTHQNTKPTIYAAIELSKKSWVVAILRPNKDQPSIHRVKGGDVSELIAKLRGAAAHGERLLICYEAGYDGFWLARSLDRAGIDCRVLDPASLQVNRRARRVKTDRLDVLMLVRALVAVDRGDRHVCSIVRVPTIEEEDARRSHRERQRLIRERTAHINRIKGLFFGQGIRGIEPLRKRSRVNLSEIRTAEGVPLPARLRAEIEREFSRFDHVEEQLKAVEAERDTADAQNPAVNKKREMLIRLRGLGPASAAILSREVFGRSFANRKQLGSYLGLTPSAYDSGSSTRCQGISKSGNSHARHMMIEVAWLWLKYQPQSALAKWFAQRAAGQSPRIRRIMLIALARKLIVSLWHYVEAGIVPEGAVSVVEGAATA

SEQ ID NO: 50940 - protein, 313 aa, unidentified
MKEEKTFIGIDVSKEKLDVGVRPQVDFMTFANTEDGISLMTDFVKSKQPELIVLEATGGLEMAALRSLVVAKLPAVCVNPRQVRDFAKAMGVLAKTDKIDAHVIARFADSVRPEIRPLKTEETEMLDAFNTRRSQIIIMLTAEKNRLTTASKWTKKDVEKSIKGLEKALAKINREVENLIKKSPHWRHMDKILQSVPSVGPVMSLTILADLPEIGTMNRRQIAALVGVAPLNRDSGKYKGRRAIWGGRARIRSVLYMCVISGICHNPKIKAFYNRLISSGKKHKVAITACMRKLMIILNTMIKNDTCWNESGC

SEQ ID NO: 50941 - protein, 331 aa, unidentified
MNNDLCRNDIAMERVIFDQVVKVGCGIDVHKDNIVATVRKSEKEYETREFSSFTSSLTELREWCKTEGVTHIAMESTGVYWKPVFNILEEGEFEIILVNARHVRNVPGHKTDKKDSQWLSKLLLSGLLKASFIPPIEIRDLRDLVRYKKKVTAQASSEKNRIIRILEDANIKLSSVLTNVDGAVGSHIIDDLIAGKTNVDGLMQHYHGQIKASKEEFRKALQGRLTKHHQFMLRVLKESITDKEKLIDKLDKQIDEMAKQYAVEIELLQTIPGVAYDSAVGIISEIGADMKQFSSEQHLSSWAGMSPGNNESGGKKKAQKPSTGTHICKPS

SEQ ID NO: 50942 - protein, 411 aa, unidentified
MRLFVGDDWAQDHHDVELMDERGRVLARARLPEGVAGMARLHELTGEQLGEGADDAEVVIGTETDRGPWVCALVAAGYTVYGVNPLQASRYRERHGVSGAKSDRGDAHMLADMVRTDSRQLRAVAGDSPAAEAVKVVARTHKTLIWERTRQVQRLRHQLREYFPAALEAFDDLDAPDALELLGKAPDPAKAAKLTRAQISAALKRARRRDIPGKATAILAALRSAQLGQPPAVTAAYAVTARSLIAVITVLNEQVKTLESQVEADFGRHPDAEIYLSQPGLGYILGARVLGEFGDDPDRYVSGKARKNYAATSPLTRASGKKKVVAARFIRNDRLIDALMAQAMSALGASPGARALYDAERARGIEHNAALRKLANRLVGILHGCLKTRTLYDEATAWPHREKTAQSDIAA

SEQ ID NO: 50943 - protein, 409 aa, unidentified
MKIDYYLGLDAAKHKVRVALRGRAERLLLERDLPVNAAGRRELLALLARHLPAGACLLVLIEATGVLHLHWAAALAKAGHAVAVINPLMARRLYRVKNSLRENKTDPIDARSLCALATRDGAELLEKYRFSLAPARCALQRLEGVRQSWRHALTNLKKTYSSLLDFIFPKLGQLLEIDGVGIRALLLKAPTPQAIAGLRLSTLEKDWKLRPKARPLKALAADSIADSELAKASAPALVALLQSMAELETRLLALDRQIEQLAFQAADPARHQLLQTLPGFGPITAAKLIAYLPEELLHAGSNRTAATRLQAFMGNDPRLKESGQFKGQAKMSKRGVEILRTSFFQAAFSASVSDPELKAFYQRKRAQGKPHQVALSHLMRILTRRLVAVLRSGQPYDPHYHQQLLKKAA

SEQ ID NO: 50944 - protein, 456 aa, unidentified
MSHCTATKKAASAFVRRNSIPTTGAVAKALFNSAIGIDVHHDILVCAYQYCNRESDEITTEVCSFGTTASELAKFTDWCRNHHPEQILMESTGVLWFSPYEALESVGFTNRQLSLINARDFKAIVGRKSDKQDAERLALYARIGNVRSSFVPAKCFREMRAVSRLLSKTTDEQSRARSRYLKTLNFIGCRASSVFSDVRGKAATAILEVLAEGTREQLIDAIKIHGRRLRKSAAEILDALDFAVSPAMAMQLRIQKQHMEALSQTCEELYALLKVMQANYQPWINRLMTVPGIKERAARVIFAEVTNDLSSFPDAAHLASWVGVCPGTMESAGKRYSGRAAKGNRYLRRILVECSQAIGLMRKGALYSLFHAFKERKSTRRAVVDMAYHLVKIIHCLFTKGGNFEAQSTDALTKVRKQKYLSAVANIKKQNFEILTSGSLVDKATGAITAVDPMTV

SEQ ID NO: 50945 - protein, 366 aa, unidentified
MGKIRVIEGVRQAPIQVARRPGPGQEVFLAIDISRSKLVYCVRWNGVEQRRLSSSFGLEHVRALVEDYKHCRLHIAYEACGFGYRLAWWLQEQGVRVTVIAPSRVERAPGLQVKTDRLDAGKMARKLESGELKGIYIPSVSIHQQRQLGRTYSQCIKERKRAQVRIRSLMQEQGDIGPAPRTGWKAYCQWLTDQKLPAPIELCVGALKQLRQSADAQALQMRAELTKLTRTEPYKPLVRALSEQPGVGPMSAIRLVLELGDMSRFRTTDSLPRYLGLTPSEYSSGELEHRGHIMKCGPAVLRGMLIECAWAAVRKGGDEQLSARFERLAPRIGRKRAIVAVARCLAINLRRRWRSALEPDVPSQAP

SEQ ID NO: 50946 - protein, 465 aa, unidentified
MTPRRSKDGRIAPQPEPLRLTNPHAAGIDVHSESHFVAVAPDAVPVGVSNPDPALPPHVRKFGACTADLEQLADHLQACGITTVAMESTGVYWVPLFELLERRGLLVYLVDPRQTRHAPGRPKSDVLDCQWIQRLHSYGLLTASFRPEDQVVVLRGYLRQRQMLIGYAGQHVQHLQKALEEMNIKLTEVVSDITGVTGLAILKAILDGQRDARTLAKLRDPRCKRTEAEIARALLGNWRAEHLFALRQALQLYEFYHARLRECDVQIEAHLRTFADKSEGKTLPPKPGKGKQTANAARFDVRAALYRLAGIDLTAIEGIDVATALVILSEIGTDMSKFPTVKRFVSWLGLCPQHQGSAGKIKSRGVRRGSNRAARALRIAAQGCHHAKNALGAFYRRIQARAGGGKAVVATARKIAERVYRMLKYGEAYVRQEQSAYEETYRLRLVKGLAQKAQELGYRLEPASE

SEQ ID NO: 50947 - protein, 343 aa, unidentified
MKTIMIGVDLAKNVFQVHGIGKAGEVVIRRRLRRGQVLGFFAKLEPVVVGMEACGGAHYWARRLKALGHEVRMMSPSYVKPYVKRNKTDGRDAEAICEAMQRPTMRFVALKSEEQQAIMALHRTRALMVGMRTKTANALRAAFAEFGIVAAQGIKGLRSLMAQLPAPSGIPQQADAALAMLARQWQALDSDIQTLERHIVQVMRATPAAHALMPIPGVGPLTASAVVASVADMRQFRSGRSFAAWLGLTPRQNNSGNTRRSGRISKQGQRDLRCLLVLGALAQLRQQRRRGVKDHPWLAQLLARRPVKVAAVALAAKTARIIWAVLAKDEPYRALAACRLSHQ

SEQ ID NO: 50948 - protein, 651 aa, unidentified
MSTMQSLKNQNSNRRRSVRRATKPSSTSTKRDPKVQHLGIGIDTGRYGHHVSFLRDDKQLAAPAITVMEKAADYDKLKSCLEKLHQRFPNAHLHLRIDAAGQYADNIEAFVRSLDQLPMTVSVGQPKVNKDYHSVVAPKSQTDKTESYAMARYAVVEQPQASYGTPPEFTTLKRIASRLQAQVKQTTRLTNALHEALTCVFTELATLAPNIAADWVLMMLMKYPTAKRIAAARLSSLTKIPYLLPEKALEIQNAAKRTVSKQSSELDEELIQDLVGELQHSLSEEKRRKQLLVKAFNALPKGPHQRIATIKGIGDQTAAAIVATAISIDRFETDRKLVGYYGIFPRELQSGVDKFGRPIPPGKKVMCKQGNDLVRGLLWQCAKCASAANGGNPEVRALYLRRLEAGDTAMCAWGYCMTKLLRQVYGVWTTDTDFDPEYEARRRAARQAAQQAAQQAAQQAAQQTDRIKGKAETEVSGHKDVSGSEETGNVVTNTPASMEPVSHSDDIVHDDPSAGTVQAEVAPTAARPLIDFAELRSRISMADVLTKMGYSFRVGAGQHRGKCPLHDPSVGRGKPFSVNFKREVFRCFESSCGCQGNVLDLWSAYRKLPLYESALDLAKTFNIELPEKTDQRRSSPRKKQKKLGGHTPPTP

SEQ ID NO: 50949 - protein, 365 aa, unidentified
MNHYFLGIDASKGYSDFVMLNAKKQTVIENFQLDDTFDGHARLYELLHSFNKDNPEATIYVAVESTGGYENNWFQSLLKFQGSLPIKTAHLNPLGVSHNSKADLKRNTTDKISAQNVAEYMIAHPEKVSYQHQDSLASLRKQSGFITMLTKQSTQLLNQLESLVYNANPEILTYCKDGTPQWVLKLLTSYPTALRLSRAKVKVLARIPYLSDARAKQLVATAKKSVASASDKVTEQLIVATVKQILHLKKSIKTQSEILANECQIPEVQLLKTFTGIGDYSAIGLMLQIQSVSRFLTSKKLSSFFGIHPAYKKSGDGIYKYRMSKKGRKEGRRILFIVAMSAIQSNPLIRDVYQQAVERGMEKMN

SEQ ID NO: 50950 - protein, 371 aa, unidentified
MQQPDGVAGIDAHKQVFSVAVLDGRGGRRTVASFATSPEGLTDAVALLDSFEFAIGRIGVEGSAGLGRHVTQALTTAGYDVREVQANRTAERRRRRRRHKTDREDAEAIARETLADPNLPPAGKQRRPDPDWEELVAVRNRRKSLINQRVRLLNEAEAVLTGLPLTVRAVLPQTSRVRPRLRALQQGVASSVQVTAADRVNLAWLAETADDIARLDARVTELAKKIPPLLGRLGSTLTHEHGIATVGAMELLVEVGDPTRFATEAQFARWCGAAPVAVSSGEGDQAPTHHRLDLAGNRQVNSVLHLMHITQVRGYPPARDYIDRKRSEHKTKREARRAHKRHLANVVIRRMWADHARRHTTNVQPPAAAAA

SEQ ID NO: 50951 - protein, 421 aa, unidentified
MMEEVAQWFVGVDWGREAHQVCVLDAAGAIVGERAFTHGGAGLADLCDWVVASTGAEPAAIAVAIEVPHGPVVETLLERGFQVCAVNPKQLDRFRDRFTVAGAKDDRRDAHVLGDSLRTDRHCFRSLAATDPVVVELREWSRMSEDLQQERTRLANRVREQLWRYYPQALDVAGGDAAADWFLDLWSLAPTPAKAARVRESSVDRVFKKHRIRRLDAAEALGRLRQKPLTVAAGTTEAAVAHIGTVVQRLKLVNRQIKQAHRRLDALCDALAGGGEDETPEPSDEPSDVAILKSLPGVGRIILSALLAEASEPVRARDYRALRTLSGVAPVTRRSGKRCIVVMRNACHVRLRNAVYHWARVAIQHDAVSRDRYAALRKRGHSHGRALRSVADRLLAVACAMLTHRRLFDPNHATREVIEAA

SEQ ID NO: 50952 - protein, 337 aa, unidentified
MSRSQKTVTKEVGICYIGADISNKVVDFYYEDEKKGNHKVVSNNYKKLVEYLKMLASKFKIHLVMEATGTYGDALKHALHDNKIMFSVINPVQSKGFMRSQNMTTNNDKQAAKALMQFGQMKQPPCFVMPSVEKEQLKQLLSALNALKKDKRRLENQIHAQNQLLHLNEAIATIWQNRKEQIDAQIKELQTQIDQLANDNYKEMIDNISTIKCVKHTTARAVVAVTGGFANFKNAKEVAKFIGLCPTENRSGSSVRKGSKIPRQGVGQVKALLFNCARSAIRYNPQCKDLYTRLIAKGKNGKVALTAVMHKLLRIIFGVAKSGEKYNPNYIKPKKID

SEQ ID NO: 50953 - protein, 335 aa, unidentified
MTKVMDAVSVGIDVSACTLVVALERDHQPGRQRREFPNTAAGHQVLVQWLSKSATAVQVCLEATSLYSLDLALALDRAEGIEVMVANPRAIADFAKALLQRSKTDQLDAEVMLEFVRRMPFVPWQPPKPHRLDLRALMRRITGLKLASQQEKNRLHSVSQAAEITPLVRKDIQSHLVQLERHIEKLEQQAEAIVQADPELAQQFRHLVSVRGIARVSALHILAELVVLAPDMTARQWVAHAGLDPRHHDSGTSIHKPARISRAGNRYLRAALFMPALVATQHDPNIRAFYQKLVDRGKTKMQAIVAVMRKLLHALHGMLRTDSDFVGEKFYVIPS

SEQ ID NO: 50954 - protein, 394 aa, unidentified
MKLVGIDVGKNSHHFCVMDKETGEFNVTPTSFSNNKEGFDFLINSLKPYSKKSILIGMEDTEHYHVALLKFLLSNGYTVALINPKTTDLTRKMEGGITKNDKLDTITICDVLDTPERKKQYRITKVDRFDLYEQRQLTRHHHNLKEELNVYCNRLQKSIDLVFPEFNTLFSSKYSIVYMNLLKTFGSAEAIASTDIRTIRKCFEIKGRGNRISLTPEKLKECAKNSIGISSEVETIQIKHLVSQITLIKEQIAEIDKKIEEFSITNNSPILSIPGISHFSGTSILAELGDIGNYSKPSQIIKFAGVAPYHYESSQYNAQHTGITKKGSKYLRKTLYQIILTVINNNPVFKKYYRLKISQGKGHRCAQGHCIRKLLRIIYHLLETGQSFDPALLR

SEQ ID NO: 50955 - protein, 337 aa, unidentified
MHYIGLDVHSKNFAIAITDRDGRLLFEGQQPTSERNLRAVIATVSGAKVVALEETTVAAWVYRVLKPHAQRVIVCDPRRNELIAKSGHMTDAQAARQLADLARGKFIKPVHHPVDEGRQAFRELVQSYHQLSRELVRVKNQLKAKLRQQGIPCAGSDVYQPHQRAFWLAQVKHEDVRFQVAMMMDTVAHLTEQKIAYLQRLKQRAKAFPEIAAFQALAGIGLVHAATFAALVDEPQRFANKKRLWSYCGLGIAQRSSDGMSSPPHLNRNGNRLLKCVAKSAAQMAVRHDDNPFARQYQRLLANGVKSTNAQLTVARAIIATMYAMWRKGEAYIPREV

SEQ ID NO: 50956 - protein, 355 aa, unidentified
MSQEKYIGMDVHQATVSAAVRDRNGNLLMECILETKADTLLEFVQGLHGTLSLAFEEGTLAAWLHDLLKPHVNRVVVCDSRKAARLRDGNKSDRIDARNLSELLRTNQLKPVYHGEHGLRTLKELGRSYLTVSKEMTRTMNRIKSLYRSWAIPCAGTTVYAPRHRRQWLAKIAEPGARVRAEHLYEQLDHLQPILVRARRELLQESNQHDAVKRLRQIPSIGQIRAALLVALLQTPHRFRSKRQIWAYSGFAIETHDSGEYRYVRGKLQRNRERITVRGLNRNHNPDLKNIFKGAAISASSRPGPLQDFYETRVAMGMRPTMARLTLARKIAAITLTLWKKGANFDPQQLSRQAA

SEQ ID NO: 50957 - protein, 432 aa, unidentified
MSKYFYSPVIGIDVSEGYHIVSILDPKGDVYRKPFKITHSLDGFNYLVEQIKKVEKEFNMKSGAFMESTGVYHLSLFHFLKSNNIEAYVINPLVTNSNKNKDIRKVKNDKKDSLSIARMGKFENIKVSDYFDTVLFSLRSLCRDYYKQVDIRSLYKRKLSADLHLVFPGYKMAFKNVTCDSSLAILKLYPTPSAFLNAPKDEVTQLLKVKSLKGLTWATNTYNSLNKIAADAAVIGIQASGLSVRILLNVSIIETLSEHIDNLIKEMKKVVASSEFPQCFKKNLELIDSIPGIDFLSAITLLTEIGDICRFNKPKQLIAFLGIDPSVNESGKFKGDHNKMSKRGSKIARRALYSAALVSIRHKRGGQTFNQVLFDYYNNNLKDKKKKVAVGAVMHKLSYYIFAILRDQKEYEIRMPKIHEQMYLNNQQLKAS

SEQ ID NO: 50958 - protein, 423 aa, unidentified
MSHDTKDVPFQQQFKLFAGFDWASDHHDVVAVDPGGRIVLELTIEDTAGGWATLREKFAKRVGQDLSAVAVAVETCNGPAVERLLEMGCGVYPLNPKAAQRYRERKSPMGAKCDRLDAWSFGDALRTDGHGWRRLQPDDPLTQELRILCRDEVQLIQQRTAFVCQLKQALHEYYPAALEAFDDWVNLSSWAFVEKFPTPQILVKAGKRRWEKFLHANRLGRPERYAQRMETFARADQFCGKQAVTNAKSRLALALVAQLRVLEKQLHDYRKAIESLFGRHPDNGVFGSLPGAGDKLAPRLLSEFGQNRDRFAKAESIQCYAGTAPVTRQSGKSRVVCIRRGCNKFLRTAVHLWANESREKCAWAESYYQTKREQGQSHACALRCLGQRWLKILWKMWQTGTPYDEALHMRNQVQHGSWVIQLG

SEQ ID NO: 50959 - protein, 408 aa, unidentified
MIYCGIDWAERHHDIALIDDTGQLLAKRRIMDDAAGYQLLLDLLAEYGDSENDPIPIAIETSRGLLVAALRQGQRQVFSINPMAAARYRDRHGVSRKKSDPGDALVLANILRTDMPIHRPLPNDSDLARAIAVLARAQQDATWNRQLIANQLRSLLREYYPAALEAFAHWQNGLCRPEARALLKAAPTPARAARLTRTQITSALKRAGRQRGIEPEAERLRGIFRADFAHQPQLVEDALGQQMLALLRQLEAVCIAADELAEAAEASFRQHPDAEILLSFPGLGPQTGARVPAEIGDDRNRFADARSLKAYAGSAPITRASGKKHHVGRHMIKNNRLHHAGYLWAFSSLTASPGANAHYRRRREIGDWHAQAQRHLFNRMLGQLFHCLKHKTLFDEHQAFPSSLVVAA

SEQ ID NO: 50960 - protein, 351 aa, unidentified
MKTKDTTDSKLFIGIDVHKRSWKIRTATDLFDGSSLTIPPDAFSLKKYVDRHFKGYTVYCCYESGCCGFSHHRHFISFGWHAKVVNPADVHRPAKAQFQKTDKIDARMLCKELKDSRLKGIHVPSIEREQLRCLFRRRNELVKEHRKIKTQIKMQLLYLGIEIPKVFDNSHWSHNFRDWLGGLTFEYPTMDYCFETRLMTYEYIDRQKRDVSTKLRAYCRKHYKKDYYLLRSVPGVGGIVACGLLCELGDLRRFKNFKQLASYVGLVPWVHQSGDNLKTSGLTPRANRLMRSYLVEATWQALRFDPVMQAYYRSHSGKDVKRILIKVARKLLSRIHAVIRTEIPYEVGVVS

SEQ ID NO: 50961 - protein, 331 aa, unidentified
MHYIGLDIHKAFTYGVIEDKEGDVIKEEKFSNTNESFSKFLDVCNPENTKIVMESTGVWEFIYELLEEKGYHVKLANPSKTKAISGAKIKTDAIDAKTLADLLRANMILESYVPTREMRLLREKVRNRNVLVRTRTKIINKIKAILNRQGVNLLQKRWSKLSEGWIEKQEFRNKDIVMMHIRIMNKIEEEINVLEQGMEDLVQESEDAQLLMSIPGIRMLSAVSLVSEIADVNRFSDSSKLACYAGLVPGLRQSGNTSFNTGLIKQSSRAMKEVLVRCTWSAIRRKETNTLQIYYKRLVKKKGKQKAVCATARKMATVVHAILKDKKEFIA

SEQ ID NO: 50962 - protein, 497 aa, unidentified
MTKKLDTTFIQIVHPVCCGLDVHKKKISACLITIDEQGKEQYEIKEFGTFTNDLFVMRKWLTDNNCPIVAMESTGVYWRPVHNVLEGFMEVILVNARHIKNVPGRKTDISDCKWLAGLLRHGLLRGSFIPPKEIRQWRELTRLRRSYTESLADYKRRIHKLFETANIKIDSVVSDLFGVTGRNLISLLCDESELSLANIKKNAKGTLKSKSNELHSSIHGFFEDHHRFQLIGMMEIITNFEQKITEITKRLNSLTAGHQNLLDRLDEIPGINKKSAQSIVSEIGVILDDFICMAALASWAGLCPGNNESAGKRKSGRSSVRSHPFKTILIEVAWAAIKKKGSYYRAKYFKLKARRGAKKAIVAIAHRISKAIYNIIKHGATFKDLGEAFIQPKSQIESGVESGVESGVESEPLRIQILHLLKKKEHSKKEMAISFGHKKTYRHLDETVRSLVEAQMIAYTIPNKPQSRLQEYRLTDKGRKWLEALYRVKNKYQGVAT

SEQ ID NO: 50963 - protein, 444 aa, unidentified
MANRKHQPATAARQTKAHAQRQAKAHAKVEARRQQDIDRVNALPITHRHAAGIAIGGSSHWVCVGFTQDENPQLIRALPAHTAGLQPIVAFLREHPVSTVAMEATGIYWVPLYERLQSEGFEVLLVDPSYTKQVQGRPTTDKRDAQWIYRLHAVGLLAGAFRPDDKTCPLRSYLRQRAKLIRYGGQHVPHMHKALEQMNLKLMTVRSDLTGVTGQKILGAILRGTRDPSKLAAYRHPKCQATAEALLQALTGSGREEPVFRLRQAYEAWQFYQKPIDKVEEQIQTQLRRMKTDRALPPLKPKPRTRGRKPNDPRFDVRRALYYAIGLDRTEIEGIDEVTALVILSAIGVDLSKLETAKRFCSWLGLCPQFRQTGGKVKSSRRRPGTNRTATALRLAANSLHSSKSALGAFLRRRKSRLGAPAAITATAHKRARLVYYALKNGLP

SEQ ID NO: 50964 - protein, 344 aa, unidentified
MNTTTIAVDVAKSVFEVAVSIHPGQVRERHRLSREAFGRFLGAHPPATVLMEACGSAHHWARHAQSHGHRVVLVAPHVVRPYVVRNKTDRTDAKGLLEVFRNEDVQPVPVKSPTQQALAALHRLRSTWLATRTARLNTVRGLLREFGLVIPVGARHVVPHVRAVLEDADAAIPGLLRPALAAAMEEIGDLDTRIRAIEHQLEAAAADSVAVGQLRTIPGIGLLTATALVATVGDVQRFPSARHFASYLGLTPREHSSGARRHLGAISKRGDTYVRMLLIHGARAVLWHAKAKAASSPDRLRTWALQLERLRGHNKAAVALANKLARIAWAVWRRGTPFAVVPAV

SEQ ID NO: 50965 - protein, 324 aa, unidentified
MIDGILGIDVSKNTLDASISSCNKVRARAFANSSDGWRHLLDWLITQKIRRVHACLESTGRYSLGIACALYEAGHVVSIVNPAQIRDFARTKLGRNKTDGVDASHIREYCELFKPQPWAPPSEAHRRLGELQTIRAGIVAGLTEWKNRKNSGMVDAVAQSLADVTIAHFTSQLRAVDEAIAQTIDNDSSLRRKRDLLLSVSGVGEILAGVVLAELPGPDVLRSSAEVVAYAGLNPRQHQSGTSIDRVTRISKIGNAVLRAALYMPAMSAMRFNPAIVALVTRLKSRGRLSPKQIVVAAMRKLLVLCFGVLKTGKPFDPAIAMGC

SEQ ID NO: 50966 - protein, 332 aa, unidentified
MKYIGVDVGKNRCQACIMDEEGEILDEFPFTNTWEGIQALLEKTGDTKSKAVVESTGNLWLRIYEALEGHGVEVKLANPYKTKAIASARIKTDKLSARILAHLLRADLVAECYVAPRDVRQVRALLRQRASLVKMRTMVKNRVHSHLDRYGYTSSWSDIFGLAGLEWLRGLELEPVDRCILDTHLRHLECLNSEIGFLDSRIAGQALESEDALLLMTLTGVDYNSGMLLACEIGDISRFPSPKQLVSWLGLCPSLYQSGNSLVLGRMKKDSNGRARWVLVQAARTASRRDPRMRELYLRVASRKGTGKAAVRVANKMAVIMWYMLTERKPYM

SEQ ID NO: 50967 - protein, 415 aa, unidentified
MTHPKMQYTYVGVDSHKHSHTAVFLDCFYEKLGEITFENLPSKFGAFLAKAEKLRADGTTLLFGLEDVSMYGRLLAVFFRDNGQKMKHINALLVTKERKNRNVTQKTDAIDAECAARVLLSRFSDLPDAQPDDKYWILQSLVTRREFIVKNNISLKNHLHSLITQHYPNYRHWFPSIDSHTSLAFLMRYPSPSMLAGVTHESLAEFIREASNNRVGAGLNSNDRAQKILDTLQDTTMPFQEIRDRSVQSTLRQIGVNTQEVKQLEQDIADFMENFACTLTSMNGIETTTAAQLLTLIGDIRQFPTAAKLARYAGIAPVTYASGQSGKQYADSRGNRALNSIIYLLAVRLIGSSTNKIVNPFIHSYYHKKLSEGKTKRQGLKCVQRRLINIIWRMLTYNEPYTNPPMTDKIAVELV

SEQ ID NO: 50968 - protein, 343 aa, unidentified
MQTTTTIGLDIAKSVFQVHGVDAAGQVVIRRQLKRRYVLSFFQKLPQCLVGIEACASSHHWSRELQALGHTVRLMPPAYVKPYVKRQKNDATDAEAICEAVTRANMRFVPTKTPEQQSGLVLHRTRHLFIRQQTSVINAIRAHLAEFGIVAPVGRRGVEELLTVVADPNDERVPEIARACLSAFGAQLRSIKEQVLEFDRLITAWHRSNEMSMRLDEAPGVGPVLATAVVATVADPKVFRSGRNFSAWIGLVPKQHSSGGKDRLGSISKQGDRYLRGLFVAGALAVIRYAKIHGTKHRPWLTALLARRPTKIAAIALANKIARMVWAMMAKGERYKEPIAHAA

SEQ ID NO: 50969 - protein, 419 aa, unidentified
MNEPNPIELAACVGLDWADQRHVICLQASGSTPTESCQLEQKPDALHEWIAQLRVRFPGGKVGIAIEQSRGAVIHALMMYDFLVLYPINPKALARYREAFRVSGAKDDPLDAQLLLDFLRLHQSRLRAWSPDTVETRQLQLLCEYRRKLINSRIRHTNRITSWLKMYFPQALDWTGELDTIQSCDFLEKWPTLACLQRVRPTQLRKFYQQHHCRNLALIEERLIQIRTARALTEDSAIVAALSFAVQVEAAQLRPIIGGIARFDQTIAQQFAAHPEHELFESFPGAGAVYAPRLLIALGTDRHRWDSAADLQCHSGTAPVTKKSGKSCLVHRRLACPNFVRQTFHEFAAQSIRYSTWARAYYDQMRRRGLHHPAATRALAFKWIRIIFRCWSDQKPYDEQVHLESLRAKQSSLVKEDSE

SEQ ID NO: 50970 - protein, 344 aa, unidentified
MDYFAGLDVSVKETSVCIVDDTGRIVREVKVASEPEALLSVLKNPAYHFKRIGLEAGPLSQWLFSALAEAGLPVICVETRHMRAMLKAQINKTDRNDARGMAQMIRAGLYRPVHVKTLRSQKLRMLLTHRKLLQSKAIAIDNDLRGTLRNFGLKVGVVGKVGFEARIRELVENLPDLAALIEPLLIVRRTLREQFCILHRRLLAIVRDDEVCRRLMTTPGVGPVVSLTYRATVDVPARFRKSKSVGAVFGLTCAKYQSGEVDWSGKISRCGDEMMRVMLYEAAQSMMRSKKWSWLKAWAMQIARRRGMKKAIVALARRLAVIMHRIWVDGTEFRWTREQAAAAA

SEQ ID NO: 50971 - protein, 358 aa, unidentified
MTKTKPKAIQYVGIDVHQATLVVAVLSADGKLVFESTVATKREAIEQVLRGLTGRVWVAFEEGTQAQWLHDVITPLVEHVVVCNPRETRQGENKSDRIDARKLADKLRLNALKPVFHNTANVRTLKELVRLYESLVSDSTRSKVRVKAIFRGRAILTPGGSIYDAKKAAELMERIPDKGTAFRASKLLVQIAAIDALRQEAFIEMIREAKHHSAYKLLTALPFIGPVRAAQLMAVMVTPFRFRTKRQLWTMSGLSVITHSTSDRRIVEGKLVRSKRPPMTRGLNRNHNHTLKNLFKSAATDASVRKGPLKDFFEAMVKRGISPEMARLTLARKIAAYTLRLWKKGGTFDPKKLTMSTT

SEQ ID NO: 50972 - protein, 286 aa, unidentified
MSIITIGIDLAKNVFAIHGVNETGKPELVKPKVPRDQLLQLIANLPPCLIGMEACSGAHHWARQFQQYGHTVRLIAPKFVTPYRMTGKRGKNDAADAAAICEAVTRPQMLFVPIKDEHQQATLTLHRTRQGFVEERTALYNRLRGLIAEFGVVLPQKVERLRAEIGAHLEDLPGWANRCVGDMLAHADRLEERLHEYDKAIAQLAKDDVRSKRLMQLPGIGPTTASALLASIGGGHDFNNGRQVAAWIGLVSGQYSSGGKARGAHHQGRRQLPAQPAGAGRTLSAQ

SEQ ID NO: 50973 - protein, 312 aa, unidentified
MITQPEVFIGIDVSKKTLDVCGYPDKYKAQFSNDAAGHQQLLEAMRKVQPTLIVMEATGGLEFEATALLVTGELPVAVINPRNARDFAKAVGLLAKTDQVDAWALARFASAVRPEQREIKSEALRGLEEVLTRRRQLVDMVTAESNRKGQASAKMAKEIEEHISWLKQRIKNADLDLGNAVKASPAWKAKADVLISVPGIGSVATFTLLAELPELGTLDRREICALVGVCPFNRDSGTLRGKRSIWGGRASVRAVLYMAALVATRYNPVIKQFYQKLLDAGKLKKVALVACMRKLLVILNSMVRNNTLWASC

SEQ ID NO: 50974 - protein, 333 aa, unidentified
MSNYSFFVGSDVSKAFFDVSFHQNNEPVYLGQYPNSNEGFTKMFKDLKNKTNIPVSQWFICFENTGNYSKLFLSWLVHKGIACIEENPLRISNSLGMRRGKSDKTDSLDICQYVFEKRDSIKPTVISDKVIVWLKKLLSRRDFLVRHRQALRTSVKEQKGFIDNDLYEELKKGNELLLNTYTEQIKVIEQRIQDLIQSDEEIKKSDTLIKSIIGIGNVTSAYLIATTNNFQAFTDSRKYASYSGIAPFPKQSGIRKAKKRVSHMANKKIKSILSNCALSAIRHDPQLALYYNRKINENKETGIVLNAVKNKLVQRIFAVIKRQSPYVKFMTYA

SEQ ID NO: 50975 - protein, 322 aa, unidentified
MKTIANNPGIGIDVGKSELVTCIRHSNGAAEPPVAFANSSIGFRKFVVHLTNQKVQSDTPILLESTGPYHWNIARYLADEGYLSKVVNPLHTKQIARYSIRKRKTDKIDAGQLAFLASQNYGYAFVETKEIARKKALVRHYWKLKSVIGNLSKHERYLKQHRGITRATVTPYLIAKCESLKEKIIQDWENGNNLKYLDSIPGITPFLGATILAELAPLERFQRTEQIIAFAGLDPSVKQTGGKSGTHGKLSKRGSRVLRTTLYLAAFGAFNRSLRPLYDTYRKRGLRHSETLCIIARKILRIAVALLKKRRMFDPKYLEVIP

SEQ ID NO: 50976 - protein, 355 aa, unidentified
MTSTKYIGMDVHKESISIAVMNAFGKIVMECVIETKASILLQFIHGLRGDLHVTFEEGTWAAWLYDLLKPHVTEVVVCNPRKIALLKDGSKSDRIDARKLTEQLYLNKLQAVYHGEHGLRTLKELARSYLTITKDLTRVMNRLKALYRSWGIPCAGNEVYAPRHRSEWLGKITEPGVRRRAEHSYQQLDVLRLMRQEVRRDLLVESKKHKAWKLLRQILGIGPIRAALLVALIQTPHRFRTKRHLWTYSGLGLETHDSAQYRVVEGQLQRSKKPATLRGLNENHNHDLKDIFKGAAMRASTAAGPLHDFYEALLAKGRKPTMARLTLARKIAAITLIVWKKEVRFDANYLKPQAA

SEQ ID NO: 50977 - protein, 338 aa, unidentified
METYAGIDLHSSNNFVGVIDSKDKRLYGKRHSNRLEDVLRALEPFQESLKGVVVESTFNWYWLVDGLQDNGYQVHLANPSAIKQYEGMKHTDDRWDSFWLAHMYRLNLLAEGYIYPKEHRAVRDLLRRRLLFVQQRTAQILSLQSMISRNLGFKMSNNEIKKLAVNDIEELFDCPNLVFMATNSWATIEFLKHIVRGIEKRVMSQVKLRKEFSKLQSIPGIGKILALTIMLEVGDIGRFATVGDYSSYCRCVESKRISNGKKKGENNKKNGNKYLAWAYVEAANFAKRYCPKAHSFYQSKKAKTKNVVAIKALSNKLSRASYYIMRDQVAFDEDKLFS

SEQ ID NO: 50978 - protein, 393 aa, unidentified
MGDEHGTRVFMPRDLCEEPSDVVKRVAFGREREMLESQPPDVGSTRSFSWERLKQPEADMDHCGIDLAMESSSVCVTDRRGKVLLERVVATEEASLREVFAACRPMRCLLEASPLAEWAADLLEEWGHRATVIDTRKAKGVIRTKKKTDKLDARNLARMSRTGWYTAVHRKSREARAMRTYLQARQGLLQTALAQGSRIRGLLRAHGIKLGQLPDSAYAGRVKRLAMEKAPELWPMLEPLVELRRQAIRSAAEMKKHLARQISQDPVGQRLMSAPGVGPLTAVAYKATIDRPERFTSSDQVGAYVGLVPSVAQSGEQDFHGRITREGDGLLRSYLFEAAHVLLTRKYGTCRLKKWGLKLANKKGYGKARVAVARKLAVLLHHLWISGQNYQSA

SEQ ID NO: 50979 - protein, 333 aa, unidentified
MEKKWFIGIDISKKTLDVVIYVPTKKHADETNYERFLNKDEGYKSLLCWLKKKNMAKKRLVISMENTGIYSFDLCLFLEAASIDYCSFNPLHLKRSLGLVRGKNDRVDAERIAYFAYLHRDELSYSKLSGSSIIRLRDFAAERKRFVKQQAEYKGFLTDRKDCEMTSTIERAAHMVKILDEEIASVEEEMLQIINSDPSILRNYELLNSIKGIGTINAMNTIIHTNNFQAFETARQYACYLGIAPFEHSSGTSIKGKTRVYPTGAKLLKADLSQAANSAIVWDKEMKEYYERKRKEGKAYGVVLNAVKFKLVGRMFAVVKRGTPFVELMTYKK

SEQ ID NO: 50980 - protein, 334 aa, unidentified
MQNITLIGIDLGKHSFHIHCQDKSGKALLRKKFPRTKLMQFLATCPPSVVVMEACAGAHFMARCISDFGHETKLISPQFVRPFVKSNKNDFVDAEAICEAASRPSMRFVQPRTETQQAMRALHRVRESLIRDKVKTTNQIHGFLLEFGISLPIGDAVIKRLSLVLAEHEIPEYLSRLLVRLHTHYFYLVEQIAELESELSQSINADDTAQRIMTIPGVGPITASLLSSQLGDGKQFSCSRDFAASTGLVPRQYSTGGKSTLLGISKRGDKNLRRLLVQCARSFIMRLERKHGKLAEWVREQLNKKHSNVVTCALANKLARIAWAITTQKKEYQA

SEQ ID NO: 50981 - protein, 359 aa, unidentified
MHSERTSVGLDVHARSVAAAAVDGVTGELRRARLTPSHDHILSWIEQLDGPVAVAYEAGPTGFGLYRALTAAGIRCVVAAPSKLQRPSGDRVKTDAKDAVHLARLLRLGEITPVTVPTVDQEAARDLVRAREDCRGDLMRARHRLSKLLLRHGQVYCGGAAWTGPHDRWLRKQRFASPAVTLTFESDYEVVQVVTARRDRLDAAIAAMAVDSEFTPIVYRLGCLRGIATLTAFALAVEIGDWHRFTGNSIGSFLGLVPSEHSSGASRVQGSITKTGNTHARRLLVEAAWHHRTRYLPGKPLRDRWELAPAAARQRGDAGNRRLHARWVSFNLRRKKAVTANAAIARELASWCWSLAVLD

SEQ ID NO: 50982 - protein, 376 aa, unidentified
MKKRRSSDDKVIAPTKTEPSKERPMDTSKYIGMDVHMATTVISVVDSIGKVVSEAILETKSTTIIDFLKSQRGTIHVAFEEGTQAAWLHDLIYPHVSEVLVCNPREIHDYDNKDDKGDAKRIAELLRTNGLKAVYHGEHGTKALKELTRSYGAILSDSTRVKNRLKGIFRGRGICCSGTTVYSKKGRDQWLKKLDDIAIRSRISKQFKELDCLTELRNEAEKELLAEARKHPATKILRSIPGIGPLRAAVILGFTITPHRFRTKSQFWKYCGLAVTSEVTGEYVIIDGRVARSRKKPLVRGLNINYNHALKEAFKGAATTAAMGVWRSHFDTMVTNGTRSALVLLTLARKISSITLAVWKKGELYDSDKLKFMHAE

SEQ ID NO: 50983 - protein, 365 aa, unidentified
MEYYTAIGIDVSDKTSKICIMAKIAGERRIVEETTVATTKEAFSEYLATKDRKAAVTFETGVHCRWMARLIRGMGFKVNVANPAKLRALTHSNTKNDRNDARELARYTLADVEMLHPVYLRPETHQQMIRLLEARLALVETRTKLINEMRGFAKSMGFRIPKKDAAYFHLLDRTGWPKDLEAVCWPMMGVLKTIHVKIAAIEKQMHELADTPEFAADVERVRQVVGVGFFCSVAYVAILGGSYARFDKARDVGPYLGLVPRQDQSGDIDKQLPITRAGSTLLRTLLTEAAQVVLKDGVRMTDLKLKGLRIAERGGKNARKRAVTATVRGLAVTMMALLKHPEREYIPLSETNQKFIEQMATIKTA

SEQ ID NO: 50984 - protein, 419 aa, unidentified
MKILYRRCAGLDVHEKSISACIRIVKNKNEVEVVEATFSTFTEDLEQLRDWLRRNRIQRVAMESTGVYWRPVWNVLEQSKLNLILLNPQHVKALPGHKTDRVDAARIAELAQYGLVRASFVPPQEIRELRDLVRRRVHLQQDRNRVSNRIHRLLELQNIKLSSVLTKLTTATARSILEGLATATTMKPEALALLATHKRVRDKRDQLRKALRCTLTDHFRFLLRELLEELDRLTGKMKLLESRIAERMQPHGDLIERLCEMPGVEKLTAWTLIAEIGVDMSRFPSAGHLASWCGLCPGNAESGGKRHSGRTSKGNRYVRRALVQSAWAAARITRQRTFFTTFFYRISHRAGMKKAAIALAHKILSLAYIMIRDGSTYREQGPDYFDRLHPERTRTRLTARLERLGFLVHLEPKILPSTS

SEQ ID NO: 50985 - protein, 368 aa, unidentified
MWEAPVKVQRTSVGLDVHARSVVACGLDGDTGEVFQRRLCPDHQEVLEWIKGLPAPVAVTYEAGPTGFGLARFLLAAGIMCLVAAPSKLQRPAGDRVKTDARDAAHLARLLHLGQIVEVTVPSVAQEAARDLVRAREDCRGDLMGARHRLSKLLLRQGIVYHGGQAWTGKHELWLRAQRFDNPALTLAYEAALDAMVACVHRRDRLDEAITTMAVDSEFTPVVARLGCLRGISTLTAFGLAVEIGDWHRLTGRSIGAYLGLVPCEYTSGTTRVQGGVTKTGNGHARRLLVEAAWHHRAPYRPSRDLRRRWDAATPSARARAHAANHRLHTRWAGFDQRKKRAVVANAAIARELAGWCWSLAVMPALRF

SEQ ID NO: 50986 - protein, 346 aa, unidentified
MKPSTIGLDIAKSVFHLHGVDASGAVVLRKRLRRRELVAYFAKLEPCLIGLEACGGGHHWARELAALGHQVRLLSPADVKPYVRRNKNDAIDAAAICEAVSRPSMRFVPVKSRAQQAALVPHRVRDLLVRQRTMLINTLRSLMAEFGVVAPRGRGHLGALAARLEEPEAASPSNPAIPAAARPLLLELVAAIAALSERIARAEKAIVAAVRKDPLGRRLMTVPGVGPITASAVLATVGEPARVRNGRHFAAWLGLVAKQSSTGGRPKLGRISKMGDRYLRRLLVLGATARLACVGREQSPLAAWTRALLARRPARLVTVALANKTARILWAVMARGEAYRPEAAAA

SEQ ID NO: 50987 - protein, 385 aa, unidentified
MHDVTPCLHPGEVRRWISFDQHKFSIVAAVLPPDGGKPEVYRIETSERAIRRFIDKMGGPAGLSVCYEAGPGGFALWRLLTKLGVACDVVAPSLIPVRAGDRVKTDRRDAKKLVGLYRAGMLRFVHPPTAELEGLRDLLRARDDLRGARLAARNRVLKQLLRHGRIFREGKTAWTKLHRAWLARQRLDDPLAREALEQLLIHLDGIERQLATLDARLAEIAGSDRWGGQVQILTRFRGIATITALGLIAEIGDFVRFSHPRELAAWLGITLSEYSSGDQQHRGHITLSGNRHARRLLIEAAWHYRHAPRLPASGLPPDERAWQAQVRLHHRHRHLTDHGKRSTVANVAVARELVGFLWAAMTDQPLRATDDPSSVNRDQLQEAAA

SEQ ID NO: 50988 - protein, 345 aa, unidentified
MPSIVGGLDVHRKQITFDCLDTVTGEVSRGRVVPADREHLRIWLARRFPRPQEVALAVEGCTGWRYVAGELRRAGIEVHLAEPADTAAARGRKKHARTDRSDARLARELLVQGRLPECWIPPGHVLECRALLELYHDLRAEHTAWVQRVHAVLFHQGAPAFGDLSRADGPAQLAELARARLSPAGQAQILTYLRMLDGLEAELAAVRRRLGAAARHLRGARTLTESLYGVGPVTALALTCWLGGAGRFSSARKAVRFCGLDITVRSSDGKGPPGRLSRQGPPVLRWCAYEAGKAHARGAAPGHGYYAAVKDRAGGTRAALAEARKIVRQACHILAELGGDALTTV

SEQ ID NO: 50989 - protein, 417 aa, unidentified
MSLTPEPVVPVIAGRVCAGIDWASIDHAVCILDGQGAVLEPFFVVHDAAGLKTLVRRLLKAGVEEVGIERSDGPVVDALLQAELAVLVIAPGQLKNLRSRYGSAGNKDDRFDAYVLADVARTDRARLRPLVRDSAATTAMRTTVRARRDLVEHRVAAANQLRAHLQLVFPAAAGLFAAIDSAINLTFLERFTTQTHADWLSPTRLASWLSKSAYSGRTSAAVLHTRLLAAPRGTTGTDAEVHALTTKAYIALLRTLNTQIGALEDNLAAQLTSHPDTHIFASLPRVKTLRTARLLAEIGDARGRFPTADSLAALAGVAPSTRQSGKVKTVTFRWGANKQLRDALCDFASDSRHDNPWAADLYNRAIARGHDHPHAVRILGRAWAHIIWACWHNNLSYDPSQHRALQNILANTTAQAA

SEQ ID NO: 50990 - protein, 343 aa, unidentified
MVVHYIGADVHSNNTELGIERNGKIAERHSLPTTVRAIRQVLDNLQGQKHLTFEEGPLAGWLYRNLKDHVDSLTVCDPRRNRLITSGGDKDDRIDAAKLAALLRGGYLHPVYHSDDLQRVAFKRWVTLYHDRVKDATRSINKLRGCCRVYGERIPRRALRDPAIRQAWLASLEKDLADQLRLLWRSYDTNAAQVRTAKRQLARRARAFPVIAYWSALPGVGPIRSATLFAYLDTPWRFKRKSQLWKYCGVGLQRSTSGQDRYGRDRSARLKLAWAVNKRLKNVVIGAAISAIRSRDNIFRQAYERRLTDGSLDSNARHTVARKMLTVMWGMWKNQRPFDAGLC

SEQ ID NO: 50991 - protein, 432 aa, unidentified
MKPKPEVEFAAFAGIDWADAKHDICLQTAGNEEREWAVVPHRPAAIDAWASTLRQRFHGRPVAVCLELAKGPLVYALQKHDFLVLFPVHPATLAKYREAFTPSHAKADPTDAELALELLLRYRAKLKPLTPPSGPMRMLLRLVEQRRRLVGDQNRISSRLADALKQYFPDVLTWFPERDTLLFCDFLTRWPTLKQLQRARRATLLSFFHEHHVRSQSRIDERLLAIKSAIPLTDDLAVIRPNQLLVLTLVEQLRVTLRAIESFDAESATVSQTLPDYDLFRALPGAGATLAPRLLVAFGEQRERYQSAAEIQRYAGIAAVTESSGKKCWVHWRLQCPTFLRQTFVEWAGATIPRSFWATAYYRQQRDKGCSHQAAVRALAFKWIRILYRCWKTRTPYDESTYLNALKRRGSPLLNSIAATAKILDRQSQGVS

SEQ ID NO: 50992 - protein, 404 aa, unidentified
MKGPIVSIDVSKGKSDYQAFKEMNVKYTGSRSIKHTKEGFDEIVSLVREMEKKLETEVCVVYEATGVYHRVLKKVLEDNNIKQFIINPLLSAKTRKNDSLRSPKTDKLDPKSIAKTYYSHSLHNSHKPETIYHELRELSRYYEDILVHLRKDKVAFRAQLDVVFPGYDTLYDDLYGPVALAVIEKYPHPEMLQKKKINTVSKVIQSKTCHRQAMSDTMADKAIEYSKTIYSGCDKDDIEVLILQRFIKKLKEDMAEAERTIGEMIKLAQELPDFSIIKSIPGIGDNLAARIIAELGDMTRFKKKNELVAFAGLDPRISESGQNDGDHMHITKKGNKRLRCLLYLAVTCSIRLKRDDNSIKDFYIKKKQQSNPMCSKAAKTACASKLVRIIYSICKTGELYQYNK

SEQ ID NO: 50993 - protein, 387 aa, unidentified
MTTRANDMGRCLATFDQDSTLTAVVEMGCSSWLSAGLIPGIERQPKKKIESNGEDLLRLLGRWRAEAVKAGRPISRIAVSYEAGRDGFWLARWLENRGIETHVIHSTSVAVSREKRRPKTDRVDAEMLLRVFLGWLRGERGHCSMVAVPTIEAEDARRPGRERGALVAERTRIINRMKANMARLGVHGFKPHLRSAPKKLGSVRLPEGVAIPPNTMAELERDMARLAVLRQQIAAIEQTRLERIEAAPDNGPHAMIRLLARVLGLGIETADMLVNEVMTRRLRDRRAVARYAGITGSPDESGKRRREKGLAKAGNARVRRGMIQLAWRWLTFQKESALTLWFKARVEGAPRLRKTLIVALARKLLIALWRMATIGEVLQGVVMRPAA

SEQ ID NO: 50994 - protein, 315 aa, unidentified
MAMPVLVSKPIVGVDVAKNELVIYQAELDLLEAIPNTKATIKQWLKELPETVAIAIEATNIYHLEFADLAFEAGCTIYMVGGYELSHYRKGVKVRAKTDALDAKLLARYLKNEAEELRPWTPPTPLYRQLLSLFRRRAALVQARVGLVQSWANEPLLKTAFAEQVKSMQQLEVLVEKTIKDHLKEAGLLGQLKRCLKVEGIGFLTGARLIAAFQRGDFRNANAFIAFLGMDLRVAKSGQKDCRRSLSKRGDPEARRLLHNAAMSASRTAAWKGFYEAQRARGFSTTQALVMLARKLARVVFALLNGQSEYQPKTS

SEQ ID NO: 50995 - protein, 331 aa, unidentified
MGQVSTIGLDIAKRVFQAHGADSAGNEVFRKKLARGKVLTFLASQPSCVVALEACGGAHHWGREIAKLGHRVKLIAPKYVKPFVKRQKNDAADAEAICEAAQRPTMRFVAVKSAKAQASALVFRTRDLLVRQRTQIINALRGHLTEYGFVVAQGPTHVAELIEYVKDPKCDLPQEALSILPVLIASLKDLDEKMTLLDREIAKRAREDQVARRLTTIPGIGPIIATAITALAPPVGTFKRGRDFAAWVGLTPLQRSTGGKQKLGATSKMGERTIRRLLIIGASAVVRQAVRRGAPPRILARAHARSQAANACHCCLGEQDGPYCLGTAGQG

SEQ ID NO: 50996 - protein, 315 aa, unidentified
MNAKEIFVGIDVSRDHLDIGIHPTGKTWQLLHDEAGKEQLCQELRKLKPDLIVMEASGGMESALAVKLQEAKLPAAVVNPRQVRDFAKAQGILAKTDRIDAQVLARFAERIRPEVRPLPDEAQRALEGLMVRRRQLVIMMTAEKNRLRRASEEVAQGIRDHLEWLKKQLDGVDREISRRIQRNDVWKQKEKLLKSTPGVGPVVSRSFLSGLPELGTINGKKISALVGVAPFNCDSGKFKGRRRIWGGREHIRSVLYMGTVAAVRWNPIIRSFFLRLVKAGKSKKVALTACMRKLLVMLNAIIASNEPWKYGKVVY

SEQ ID NO: 50997 - protein, 455 aa, unidentified
MPAQSKFKAKSNSQLPTLHPHAAGIDIGATQIQVAVPHDADPKPVRTFSTFTDDLLKLRDWLKACGVKTLAMESTSVYWIALFQILEAAGLEVCLVNARHCKNLPGRKSDVSDCQWLQYLHSVGLLRASFRPPEHICAIRSLLRHRAALVRYAATHVQHLQKALTQMNLQIHNVISDLTGVTGLAILDAILAGQRDPQQLAALKDHRIKASRDLIARSLQGDWRPELLFVLQQALATWRHYQSLIAQCDGQIHSLLAALDSQRDLRQHPLPPARLQHKTPQRNEPAFDARTELYRLAGVDLTQVPGFQVNTALVLFTELGPDFVQRFSTAKTFASWLGLCPDNRITGGRVISVKTRDVKSRAALALRLAAQSLWRSKDYLGDCFRRWKARLGTPKAITAMAHKLARILWHLVRFQVPYDPSVWAKAEEKLRQKKINRLHQSAAALGFKLSSAPTT

SEQ ID NO: 50998 - protein, 329 aa, unidentified
MDHFAGLDVSVKETSICSEPEALLAVLKNLAYHFKRIGLEAGPLSQWLFSALAEAGLPVICVETRHMQAVLKAQINKTDRNDARGIAQMMRAGLYRPVHVKTIRSQKLRMLLTHRKLLQSKAIALENNLRGTLRNFGLKVGMVGKVKFEAHIRELVENLPDLAVLVEPMLIVRRTLREQIVILHRHLLAIVRDDEVCQRLMTTPGVGPVVALTYRATVDVPARFRKSKAVGAVFGLTCAKYQSGEVDRNGRISRCGDEMMRVMLYEAAQSMLRSKKWSWLKAWAMQIARRRGMKKAIVALARRLAVIMHRIWVDGTEFRWTREQATAAA

SEQ ID NO: 50999 - protein, 327 aa, unidentified
MLASQCFATTRDGYKQMLAWMGAFGSLQRVGIEVTGTYGAGQLRYMQKAGIEVLEVTTPDKQDRRKRGKNDDLDAQNAAHAAFAGKRTVTPKSRNGMIESLRVLKACRKTAVAARRVALQMIQNTIVCAPDELRELLRKMTRMQLIRTLAAWRPELTDYRNVTSAYRITLKSLGRRYLELHGEIADLDVMIVAIVDELAPNLVARNSIGHESAAQLLLTAGDNVQRLRSEASFAALCGVSPVPASSGKTTRHRLSRGGDRAANSALHIIAIGRLRTDPRTQAYVAKRISEGHSKLEAIRCVKRYIAREVFSSIKHRPQESRPVATAA

SEQ ID NO: 51000 - protein, 351 aa, unidentified
MSQTLNAAIAVVGIDIGKNSFHIVGHDERGAIVLRQKWSRGQVEARLANVPPCLIGMEACVGAHHLSRKLKALGHDARLMPAKYVRPYSKGQKNDFRDAEAIAEAVQRPTMKFVATKSADQLDLQAMHRVRERLVSQRTGIINQIRAFLLERGIAVRQGQRFLREELPHLLAAPPEVLSPRMVLIIEGLASDWRQLDTRIEDVSAEIEDLASRDAGCERLMSIPGIGPIISSAMVAAIGAGDGFSKGRDFAAWLGLVPRQISTGDRTILGKISKRGNRYLRVLFVQAAWVVLVKVKPDRWEGHGLKPWIDAAKKRLHRNVLAIALANKLARIAWSVLARGRAFEASKLQVA

SEQ ID NO: 51001 - protein, 343 aa, unidentified
MRLFVGLDVSLEKTAICVISEHGKIVREAQAASEPEALLRWIGEQDGSIAAIGLEAGPLSQWLHRGMDEAGLDVVLMETRQVKGALKAMPIKTDRRDAEGIARLLHLGWFRPVHCKSVSAQEVRAVLGARKAVQQGFIALEMSLRGLLRNFGLKVGTISRGRFEYRIRELAAGNPMLEAATGPMLRARAALRKELAGLERSVRQLAQDDPVCRRLMSMPGIGAVVALTYRSAVDDPARFTSSKKVGSWVGLTPSRNQSGERDVSGGITKAGDVNLRRALCQAATVMMHRRRSTWLRTWAAQVARRRGGKRAMVALARRIGVILHRMWVDDTDFRSDIPIPHAA

SEQ ID NO: 51002 - protein, 408 aa, unidentified
METIHPICCGLDVHQASVSACLRRVNAQGAVSVESREFGTTVKELVALADWLVAEGCPIAAMESTGVYWKPVWNILSPLLDVWVVNARDVKQRRGKKSDRADAKWIAELVAHDLVQPSFVPPPRIGVLRDLVRMRTVLVQGRTQVKNRVLAVLEDTNVKLASVVSDPFGASARKIMEALVNGQRDCKVLSEMAKGVLRRKIPQLEVALQGGFTEHHAFMIRLGLESLDQSNRQIAELDAQIERLMDPLQEEALRLTSIPGVGQNAARVVLSEIGTDMSRFGSAERLASWAGLCPGNHESAGKRYSGKTRKGNRYLRRVMAECAWAASKTNTFLGRTFRRFQIRIGGKKAAVAVGHKILVIIFHLLNEGRLYDDGRYDSISQREEIRQRNRALTTLQRLGYQVALTPAS

SEQ ID NO: 51003 - protein, 366 aa, unidentified
MKKYTVFHSVTAAPAVAKSKVMRSGSLLKIGLDIHREKFVAVAQYDHATARPPQHFAPAEFVPWVEARLREGFQVHVVHEGCGFGYGLYRALLEAGASCYVIAPQKLDEANTRVKTDGRDSHALCLRLDRYLAGNKNSLAVIRVPREEEERARHWGRQREQLVHHRQKLEAQGRSLLIDHGLPAPARWWRPQSWSRLDKLLPVWILSHLELYRPMLLALDQQIRTLTAELEKAAPVALPKGMGALSTVVISREICDWQRFNNRRQVSSYTGLCPGEYSSGAKRVGRSITRHGNSRLRAALVELAWRLVRYQPGYHAVQKRLTVLAKGARATRAHRKKAIVAVARQLAVDLWRLHTGRCTPAVLGFK

SEQ ID NO: 51004 - protein, 502 aa, unidentified
MKMISSRRRMIAARSGKIEAGMEKSTLFSCLIWSAHDCTSKWALAFPCGSGDSPRPCLMEDAARSPLPQEIAMAYRIAGIDVHKKMLAAVVADVEVEGEYDFVRQRFGSNPQELRRLSAWLSQHGVEEVVMESTAQYWQPVWGALERYWRPVCQKREGAGAMSGALHLAQAQSNRGRKGRKKDFPDAERLIKRLVAQELILSFVPQAEQRLWRAVTRRKYQLTRNRVQLHNRVESLLEEAHIKLSSLVSDLLGVSARRMLNALAEGETNPLALAALAHQCLRATEAQLTDAMGACTELNPVYRRLLKMALEELQFIEQQRDQLEQEIAALLRQHEDAVQRLAEVPGLGVDSAQQIIAEVGATAATFASAKHLASWVGACPGDEESAEVSKSHRSPKGSRHMRRILNQAANAAVRTKGSIFQIVYRRLVPRLGHHQTIGAIAHRLCRLIWLILHQRVCYEERGPAVSQKSKCQRTRKMIRELQKLGYRVERLSVAPNAPAPAQ

SEQ ID NO: 51005 - protein, 344 aa, unidentified
MNKLSRVGIDLAKNVFQLHGVDRHEKTVWRRRLKRDNWLKVLLEKVEPDCVVGMEACTGAHHWARQLQVKGFAVKLIAPQFIKPYVKSNKNDANDAEAICEAMSRPGMRFVAVKSVAQQDIQAAHRIRSELIGHRTAKANQIRGLVAAYGLVAPQQLACLRAAVPVWLEDAENGLTGRFRGLLNGLWNDLKTLDHRIVELDHEINMIAQSDPAAKRLQQLRGVGPVVATALVAAVGNAEQFANGRQMAASLGLTPKQHSSGGKERLLGISKRGDAYLRTILIHGARAVIRTAKEKDDRLSQWVISLAARRHPNVAAAALANKTARIAWAMLRHGTDYQPDRITV

SEQ ID NO: 51006 - protein, 419 aa, unidentified
MATVDIVYPICCGMDVHKNFLVACIATTDERSNTTHQIRRFSTFTGDLRRLAAWLLENHCCDVCMESTGKYWIPVFNVLEKTCNVCLTHPKYVKAIKGKKTDKRDAKWISELFKCDLVRASFIPPPEIRQLRDLCRYYVKLTYMNTSEKNRAQNCFTMCNLKLDAVFSDVFGKSATRVMDAFSLHNGPDFDIAPLLDKHCKSSAEDVRAALEGELSLAQTEKLNFIKQHQECISNLQDALESLILNLAAKYQPTIDLLLTVPGISEPLTAIRIMAEIGTDMSVFETAKKLCAWAGLTPQNNESAGKKKTTRIGRAGVYLKPLLVQIALAVGSSNKHPELRDKYQALKKRRGGKKATIAISRKLLTAIWHIISKREPYNAELYHRADKPPVNRELTPEQAIALLRSRGYIIRDAAPAVSA

SEQ ID NO: 51007 - protein, 362 aa, unidentified
MHQSSTLYVGWDVHQESIAVAYVAKAHDAEVIFLGTIGTRQADIDQLVRTLQAKAKHLVFVYEAGPCGSWLYRDLTNTGHICGVVAPSRMPKQAGDRVNTDRRDAVQLARLMRSGDLTPVDVPKVEDEAMRDLTRAREDALRDLKAAKFRLKAFWLRHAIRSTGSATWGPAHLRWLSEVIRPTPAQPMVFQAYVRAVNEHTARLGRLERARQDQVQSWRVSPVVEALQALRGVQFTVAVTTVAELGDRTRFDHPRPLMKCLGLIPSESSSGERRRQGTLTTAGNTHARRALVEGAWSSRLPLRLEPQPKAIQEISWKAHVRLCKRFRRLMARGKHANQIVVALARELVGFMWAIAKQVPVTP

SEQ ID NO: 51008 - protein, 333 aa, unidentified
MNHIAIDLGSKHSQICVRDAQGKILQEQKLANAELLQLFDTPAALVSMETCAEAFCIADHARSKGHQVRVVPSTLVRSLGVGARRVKTDRKDAQALSEASCRIDLPSVHVPSTWSREAKTLCGLRQALVSSRTKCINSVRGWLRTQLVRPRLARKTLPSSLRQYSEAHHLSLPACVERQLRAIEALSEQITAADREIRTIAESSEVCVLLMTAPGVGPQTAVRYAAALDGWERFADAHQVASYLGLAPGENSSSTRKQITSITKAGSAAVRWLLIEAAWTALRTVPDDPMCRWAKHIAERRGTKIAVTALARKLAGILYSIWRERTPYQIPAT

SEQ ID NO: 51009 - protein, 323 aa, unidentified
MTRTICGVDIASASVVACIGHDGAAATFANTLEGIAELAAFCLSHGVELVAMEATGGYEQRAFAQLSEHGLPVAVLNPRAVRQFAQSMGALEKTDAIDAGMIAWYAETRKSPPQCLAPRTQLELRARVTRLRQLTEVRTAQLNQQRLVIHPDVQRGFRKMLKFLAQQIEQLEQAIAALIEADPLWRQLNLAFRTIKGVADRTVARIMAEMPEIGTLSNKTISKLAGLAPLANDSGKHQGKRAVRGGRSAVREILFIVGSVVARHEPDFIAFQQRLRAAGKPPKVVRIAVAHKLLVRLNAKAREVRQHGAELATPPTLAFAKLR

SEQ ID NO: 51010 - protein, 427 aa, unidentified
MSERKSLEIRVSVDVGSRSHQVAIGLSSGEVLEEFEIAHRVEGFEDLFSRIERHRKGNSYRVAVAMEGFNGWARPLDSMVRGRGYRLYNINNLKLARFKEIFPGAAKSDRIDARKGLELFQLRDHLPLAKEVLQEVVGTPHENEVLKRLSRRRRRLVDERVRVVNNLQADLQAVCPGLLEITKEAGNQWFLNFLISADTLPQLARLRRTTLLKIPSVGVKYARLIQDWQERAHFSEEVEWVSAMIQEDARRILELDETIKALEVKTAEVAETSTIAKLLRSIPGYGAICTSELAGEIGTIERFNKEGSLALYLGMATLDNSSGKYQGTKRPKHINTRAKAAMMTALDRHRKYVPQSQKYYEKKRAQGKSHNQAIRALGRHLCRIIYKMLKEKREYEVRPLKRDTQAKVTSRSSRIGQIGKKKISAKG

SEQ ID NO: 51011 - protein, 387 aa, unidentified
MPQPNDLSRSLVALDQNSTIIAVIEMSQSSWLVAGMLPGIERQPRKKLEPSPERLLALLHRWRDEAVKAGGTITRIALAFEAGRDGFWLARWLAARGVEAHVIHASSLAVSREHRRAKTDRLDTELLKRGFLGWLRGERGHCSMARVPTIAEEDAKRPNRERDCLVGERTRIVNRIKSTLARLGIRTFKPTLRKAAERLATVHTPEGMPLPPNTLAELQRDMARLGFVVSQIREIEEARQKRLEQQHETGSHAMVRRLARIVGVGVETADMLVHELLSRAMRDRRAVARYAGLTGSPDESGAQRREQGLARAGNARVRRGMIQLAWRFLMFQKESALALWYRARTADSRSGTRKTMIVALARKLIIALWRFVTTGEPLEGVVLRPAS

SEQ ID NO: 51012 - protein, 317 aa, unidentified
MSHDLWSAGIDVSKDTLDAGLVRGEEEMTWQIANSPAGWAELVAACKKRSIDRIVLEATGGYERRVVAELLAAGLPVVVVNPRQARDFAKATGRLAKTDRLDALGLARFAEAIRPPIRPMPDEKTAELQEKVARHRQLVQMHTAEGNRLAQAYSKPVRRSIQAVVKIIEQQLEAIDQDIDQRIEECPAWQDKDRILQSVPGIGPHTARTLLCSLPELGQCSRQQIAFLVGVAPLNRDSGKMRGMRSIHGGRGPVRQALYMATLTATRFNPLIRKHYQHLLGLGKRKKVAIVACMRKLLCIVNAMIREHKTWNLEASA

SEQ ID NO: 51013 - protein, 382 aa, unidentified
MHTVPHTAEGLSEWGRELDEWRAQGIELWAAIERPEGRVVDVLLDHGVVVYPVNPKALDRARDRFRQSEAKSDPFDARVLADFLRTDHLHLRALQPSSEAAQELKLLTDDYQRQIRQQTRLVNQLTTTLKAYYPRGLEVAELTTALAREFLQAYPTPAALTALTERQWQRWARAHRLSEARTRELWAGLQRPQLPVPAHVVRAKVRLMQSLVAQLTLVVEVVGAYREAIEDFFARIPAAQWIRTLPIGDHGITAPTLWARLGDAPGRWESFRHLQAQAGTVPVTIRSGKQQVVRFRFACDKSLRYVIDHVAFLSLRWSEWARAYYDEQRARGHSYRQALRALSAKWLKIIFVMWERHVPYDEQYHLASMTRQQLRLRQKKLA

SEQ ID NO: 51014 - protein, 415 aa, unidentified
MGFPALDKVAALDLGKAELVCCVLGGDGAGGVIREVTTWTTMTGALTGLAEHLVSAGVELVAMEATSDYWRPVFYRLEAHGLVVMLVNAKHFKHLPGRPKTDVLDAVWLARLASKGLLRPSFVPGPDIRRLRSLTRDRADLADQRAANKNRVEKLLEDACVKLSVVASDIFGVSGRAMMEALIAGQRDPAQLAEMSKGALRSKKARLVEALNGFFTDHHGFRLRLMLDRIDQIDADIATLDTRIAQELEPHARQIEQLCAIPGVSRVTAAAILAEIGVDMTRFATPGHLASWAKYAPGVNESAGKRKGSGSTGKGNPYLARALGQTATATRLTKTFLGDRYRRLSRRIGKKKAQTAVGRSILVGIWHVLSHPANEWHDLGPDHHTTRHPNTEQATTSHIKALQQLGYTVTLTPTT

SEQ ID NO: 51015 - protein, 379 aa, unidentified
MPTPTTHNESPRPGPTLHVALDLGNTSWCLAGAPGVAAPARVRLFPARSLARLHAELASARQHFGLPADAPVVLCYEAGRDGFWLQRACTAAGIGALVVDSSSIEVSRRARRAKTDRLDATALLRLLFRHTAGERGHWRVLHVPTVEEEDRRHVHRELARLTQERTRAVNRLKGLLALHGIRLTSLRAVPDQLPHLTQWDGTPLPPGVSERIQLIWTRLTLIQAQRTALVRARRALLETATDPTIQTVRRLLQLRGVGEVSAWLLTMELFSWRRFRNRREVAGVLGLTATPQASGDRRRDLGIGKGGSALLRGLAMELAWGWLRYQPASALSQWYRTRFAAGGSRQRRIGIVALARRLMIALWRYVETGQVPAGATMKA

SEQ ID NO: 51016 - protein, 340 aa, unidentified
MEKRYIGIDLHRNRFTCCIRLENERTYVTEWALEALGRFVKKLRPTDEVAVEITSNTRLFFDAVAPQVKRVVVVDTNQFRVISQSVKKTDANDARLLSLYLSKNLLPEVRMKDKDLAQLASLTQTRDTLVKQRSALKNKINNILSARGLNLAKEALASEKKLAEVLELPFAEIVRIELRVIVEQIRSLNKSIAELEKTIGEEGSKLEGYKGLSSIKGIGKITGAILLSVIGDVNDFADEGRLASYFGIVPRVSNSNETEHSGRIHKRGTKLGRTALVQSALIAANYSPYLKRFYEQVKARRGAGKAIIALARKFLGIIYRTLKNNWVFEDFPNFVLAEES

SEQ ID NO: 51017 - protein, 324 aa, unidentified
MKMTQKDYSLVIGIDVSKAKLDIAWGPNGPLETIENTDQDIARLLIKKIEDPVNTLIVMEATGGYESGLVEMLHKSNLSLAVVNPRRVRDFAKGIGLDAKTDLIDAKVIAHYGEVVKPKEHVAKTDSEKKLEALVTRRRQLLDLTHQESNRLKQTRDKEIQKLIRQTIKTLEKQTQTVDRLIAEAVAADQQNARKIEILQSVKGVGAVTVSTFLAELPELGTLNRGQIAKLVGVAPMNNDSGNRSGKRKTIGGRSSVRRVLYMATLTATRFNPKIRAFYIRLLAKGKPKKLALVAAMRKLLTILNTLIKKDELWIDPQTLQEMQ

SEQ ID NO: 51018 - protein, 369 aa, unidentified
MGEYSEAFVAFDTSKVKHAVAIAEGGRRGEVRFVGDVASSPATVARLIGKLTGRYAKLHFCYEAGPTGYGLYRQIRELGHECTVVAPSLIPKKPGERVKTNRRDAVSLARLLRAGELTAVWVPDATHEAVRDLVRAREAAAQDLRRKRQQLLSFLLRHGRIFDGRKHWTMAHRRWLADQRFDHPAQQIVFQDGIDAIEDALARLRRLEEQLVAIVPSWSMAPVVEAYQAMRGASFLVAVTFAAEIGDVRRFDNPRQLMGFLGLVPRERSTGETVRRAGLTLAGNHRARRVLVEAAWSYRHPARVSQTMLVRLEGLPKAVRDIAWKAQVRLCGRYRRLSAGGKKLPVVIAAVAREMAAFLWAIGHQVAPA

SEQ ID NO: 51019 - protein, 406 aa, unidentified
MKQQQGIVYGGVDTHLDVHVAAVIDSTGRLLATKSFPTSPLGLRQLERWLASHGQVAKVGVEGTGTYGLGLQRVLQASGHEVIEVNRPNRQMRRSKGKSDTVDAEAAARAVLAGHATSTPKSRDGIVECLRVLRLADRSMREQMTRLHGQLDHLSITAPEAIRIDTNGLSALRRAQKAAAYRPSDSIGDVTNATKTAMRTLARQWLGLREERARLRDQIQQLTAQSNPALLEMPGVGPDTAAALLIAAGDNQARLRSSAAFAALAGVSPIEASSGKKSGHRINRGGDRSANAALHRIVLVRMSRRHQPTMDYIARRTAEGLSKRDIIRCLKRYVAREVYHALTHPEPTTNIATLRARRNTLGIPMKTVAEHFHRPINAIARLERGQVHDAELATRYHAWLDTHGAA

SEQ ID NO: 51020 - protein, 435 aa, unidentified
MIPAVLTHCAGIDIGKRNLAVCLMVGPAESEPRVEVREFSTFNADLEAMKRWLVQAGCTHVVMESTGPYWKPVFNILEDSLVVCLANAEDVKGRKGHKTDRRDAKWPAHLLRHDMVRASFVPPRPIRELRDLTRRRKQLLGDATSERNRVQKTLEDANVKLGSVLSDVFGVSGQRMLEALLKGSESPKEIAEMARQKARQKIPQIIESLTGHCFSEHHRFMIRMSLEHLRMLERQIIDLDEELVKRINSLGLERLVNLLQTIPGLGHDSAVSILAEVGPDMKQFPTGKQLSSWAGVCPGNKKSAGKDFRGHTTRGNRWLRSTLTECAWAASKSKKSPLLEKFWRWAVGGKKKAVVAVAHGLLLQVYQVLQTQQPLAQAPSSALDEQRRKRIVRHHLRCLGRLGISTGPKRISAHGIVAKPGRPKNAKNNAPEATG

SEQ ID NO: 51021 - protein, 454 aa, unidentified
MQDDSSRRRVEGLPVIRAKVAGIDLGSERHWVCAPAAEGGGREVMDFGATTPELVRMVAWLKERQVESVAMESTGVYWIAPHEMLEAAGFEILLVDTRQLARVPGRDKKTDRIDCEWIQRLHSCGLLRGSFRPQEQICMLRTLIRDKANLVAESGDWVRRMQKSLDQMNVRVHRAVSDLDGVTGMAILRAIAGGERDAQQLAKLRDRRCQKSQAEIAEQLSGHWREDHLFSLQQSLKMYDAIQQRIAEYNKEILGKLTAMQREDCREPAAPEVKNPQKAKAIKKRGEEPMREALYRMSGVDLSSIDAIGVETAQVVLSEYGPDLSRFPTEKHFVSHVTLAPRRAMSGGKPVKRKKPNTASTRVAASLRMAALSLRHSRTALGAYYRKIARRLGGDVAVFATARKLATLIYRLLRWGQQYVDEGAEAYERRYQQLRILALTNQAKELGYQLVPTV

SEQ ID NO: 51022 - protein, 337 aa, unidentified
MELETQYVGIDLHRRRSVIVRRNGAGETLDTVRIDNDPVVLAAELAKAGEHPEVILEATYGWYWAADVIQECGGTVHLAHPLGNNWGNRRVKNDERDATDLVDLLRLGRLAEAWIAPPPLRELREHIRYRAKLVHLRTNLKSQVHAVLAKEGVAVPMTDLFGVRGQVLLDEVHLGDAYRVRVESLRDLIEHVSREIAMLEEQTAPYFAGDLGYHAVQAIPGVGPVLASVFVAEIGDIARFKSARHLSSWAGLTPTHKESDVTVRRGHITKQGSRLVRWAAVEAVAHQRGDTPIRAHHRRVGERRGTQIGRVAAARKLLILVYYGLRDGEIRCLAGTG

SEQ ID NO: 51023 - protein, 449 aa, unidentified
MGKGSGVTRGDRRRNERLAELRALLPPGNAIAGLDLGEKKQALAVIDHDGRVLARRSPRVRVHDLGVHLDWALGRARAAGFGGLSVACEPTGSRWMYVQQMCAGRGLPMVCIQPLVSHIAREQQDLTGDKTDEGDCVLVARLAGELHCYVPEELGGVWAVLRDEGRRRAQLITNGTAARQLIRDKLGLACPALLDACAAPFKSLTWLAALEVVLGQGGGNPLRLAGQGYEHFAGLVRAALGGWGGRRLGPACAAVFAALADERGVARMRRAALRRARHALGDLKYARARRAETEAEMIALLDELGIDTARVCQIPGLTPAGLAAILAETGDLHQYSSSSSVVKHAGMSPARNESGAFRGQSRVSRRGRPGLRLAVWRATWAVLRHCDVLAARHAALTSRGGTGKLAPAQAHVACAASLLRWIYALTVHRTRWDPRIAAGALGHHHAMAA

SEQ ID NO: 51024 - protein, 313 aa, unidentified
MEEIWIGIDVSKARLDVGVGENGETWSASNDGEGIAGTVERCRQLQPRLVIVESTGGLENHLVSALYLAEVPVALVNPGRVRQFAKAAGLLAKSDMIDAHLLARFGQALKPAPTCLPSEEERLLSALITRRRQLIDMRTAETNRLPTAHVSMQPNIQACLSWLNAQITDLELQINAFIQNQPDFKAKDDLLQTVPGIGPVTAAILISDLPELGLLDRKKIAALVGVAPFNDDSGFRRGKRRIKGGRPNLRSVLYMAAISASRYNPVIRLFYNHLLKVGKLKKVALVACMRKLLVILNAMLRDHLPWQPAPLVS

SEQ ID NO: 51025 - protein, 312 aa, unidentified
MTDKSIVGVDVSKDWLDLAIVSGVGAERIKNDELAIARWLKRVKPDLVAFEPTGGYERVLQRCLRAQGILFVRVHPNAVIAYRKSRGIKAKTDKIDARLIAEFASEVLSRRGLKPSLAGDEVLRELAARRRQIGDAIHAENCRLGLAETKAVRKSITLVIASLSRSLKAIEAEIRQHLKADTDAWQLQNLLQTITGVGPVVSMTFLADLPELGHLSGKQIASLVGLAPLTCQSGKAIGRDRIGYGRPAVRGVLFNAARSAIQRPCPFKAFYDRLVTEHRKSGKVALVAVMRKILVTANAIARDRKPWRFADA

SEQ ID NO: 51026 - protein, 341 aa, unidentified
MKNLFIGIDFSKEKVDVAIIFAEGLAETSVRVFNEFKNSVSGYKQLVKWVEKNANGIDSSLWLFCGENTGDYSKPLCNHLYGRGFDMWLENSKCIKDASGIRRLKSDRADAAMIAEYAMRNHDKAIVYEPLSESLTQLREYYLYRQMVIRHRCSFEVRRGEKRLMMEKSAAKTVIAQSGKHIVSELNKEIAKIDRKIASLIESSDELSEVYRIVTSVPGIGTQNAVCLMVYTDNFRKFNYDARSIACYYGIAPFGQDSGTSVHVDPHVHYMANRHIKAMLTQAALAAVRFNPIIAQYYQRLIGRGKKMPVAMNNVKNKLLHIVTSMVKNKQVYKPEYRFSA

SEQ ID NO: 51027 - protein, 308 aa, unidentified
MTIATIGIDLAKNVFAVHGVDHNGKTVIVKSRVTRAALPGLIAGLPPCVIGMEACSGAHYWARLLRQYGHEPRLMAAKFVSPYRMAGKSGKNDAADAQAICEAVRRPHMRFVPVKDKGQQAMQCLHRTRQGFIEEKTAAYNRLRGLISEFGVIASQSTAALRYAAARHKDSLPAQVRQCIEDLLAHITRIEEQIAEYDRILSQVAKTDNRSQRLMKLQGIGPTTACALVASIGNAHDFKSGRQLAAWLGLTPSPYSSGGKSKPGRITKAGDAYMRTLLVQGARSVLINADKKTDSFSRWGCSLVERRG

SEQ ID NO: 51028 - protein, 470 aa, unidentified
MQSAPTTLPRTPDGGLTSGIDWASSDHAVAVVNTDGLQVDRFITEHNQAGLLAMTRRLRKLGVGEVAIERPDGPVVEALLGAGFTVVVISPNQVKNLRGRYGSAGNKDDRFDAFVLADTLRTDRARLRPLVPDSPQTVTLRQTCRARKDLVAHRVAVANQLRAHLQLVFPGAVGLFADIDSPISLRFLDRFDCQERADWLSPKRFEAWLASVGYCGRTDPAVLHARLVAAPRGAAGTTATVHITRAMTAVLRTLVDQIKALSEQIDEQLAGHVDAHIFTSLPRSGTVRAARLLAEIGDCRARFPTPESLACLAGVAPSTRQSGKVRAVGFRWACDKQLRDAVCDFAGDSRRGNPWAEHLSTSKPSPANTTTRTPSASSPAPGYSSFGTAGKTASLTTPPNTEPSKTWASRHDRGSFRVVIAPRLPRQAPPAALPSRTLARRLAVRAGPRRCFPCCWEGSSGGLDRELGRV

SEQ ID NO: 51029 - protein, 453 aa, unidentified
MKKRSKREDDFTIKNPHAAGIDIGSSVHYVAVSENIDSKPIREFRANTEDLALIVDWLTSLGITTVAMESTGIYWIALYDMLASKGIEVCLVNARHFKNVSGRKTDVSDCEWLRKLHTFGLLNASFIPDELTRELRIYVRQREALETLKAKDLTKIGTALHSMNIKLHNIVSSLEGETSMNILRSIVGGEHSPEALVLHWRKQMKATIDDAKRSLAGNYKEENLFVLRQALSSYDFHKSQMLECESMIEKVLKQISLQSDKRVGSEITAEAVGRKKKRKARKNEYHFDAVEDLKKVTGVNLTAIDGFGVNTVLSLLAETGTDMSKFKTAGHFCSWLRLCPNPSISGGKLLGHRKSTSSSRAAKAFRLAAQSLHSNKGYLGQKFRAIAYKKGTAAAIKAIAHKLAVIYYTMLRDGQEYRKEDMEVLQRKNELAMVKNLENKAKKLGFNIVKVAA

SEQ ID NO: 51030 - protein, 340 aa, unidentified
MKLYTGLDLHSSNSYLGIIDESGKRVFKQKLPNDRERILAALNPYKNDIAGIVVESTYNWYWLVDLLMGESYHVHLANPAAIKKYTGLKFADDQHDAFWLAEMLRLGILPEGYIYPKEDRPIRDLLRKRMHLVRLRTSLIVSLQNILSRNNGFKLKASDVKALTEDRVAPYLAGSEDLALAGMVSKESIDFLTRQIKKIEAVIENKVELKPPYEKLQSVFGIGKILALTIMLETGPITRFAKVGNYVSYCRKVSSKWLSNDKVKGKGNKKSGNKYLAWAYSEAAEHARRSYTQARAYYNRKMQKTNFMAAHNALAHKLARAAYYVMRDEVNFMPEKSFVG

SEQ ID NO: 51031 - protein, 344 aa, unidentified
MPHSIKDPHRVPPPEAPCCPNGSVVGIDISKDYFDACFEGQHRRYAYSLEGIEAFMSKTARLGKARFVMEATGNYFYKLALALVEAGRKSDVVNAYRVRAFGKSRLQRHKNDKADARLIDDFAVANREAMMLWQPESQTIAALRQLRTVRRQLQKTATVYENQLHALLQLPESQHSQDALQICKQMIAHCQKQLNLIGKQMQALSDDELKKNYELLDTIAGIGRESALMLLILTGNFTKFRSAKAFADYIGIAPTHYESGTSVKGRGSISKMGDARARQVLYLAAMSAVRHNVACRVFYVRWRQTGRAHKHAVVAVANKLIRQAFAVIRQQAPFETRGAWSVST

SEQ ID NO: 51032 - protein, 348 aa, unidentified
MDHYAGIDVSLECSSICVVDASGKIIREGKVASEPEALIAWFQVLGVGLERIGLEAGPLSQWLYRGLKEAGLAVELIETRHVRRMLEARPVKSDRNDARGIAQLMRFGWFRPVHCKSMGAQETRAILAARKLVQSKLYDIENHLRGTLRSFGLKVGKTTKRSFAGRIQELVADHPSLATIAQALLAAHAVLLREFNGFEKRARVMGRCHAQAKLLMTTPAVGPIIALTYASAVDDPTRFKSSKTVGAHFGLTPRKYQSGETEINGRISKIGDAAVREALYQAAHVMLTKPVRGCSELKSWAMRIAKRAGMRKAKVALARKLAVILHRMLADGKPFNCAATANAMAAAA

SEQ ID NO: 51033 - protein, 439 aa, unidentified
MARTENALAGGRPAKRRRASARRSGAGRPPAAKSAPEKAALNQTQRSVSCEALVVRDTNNLNRAFSGTGSTRNKRLAVDRATLGGLHSAAQRDRGQPHELNPNSRSHRARPRASSSPHAQGRDAFMNALTSVGIDVSKATLEVALAPEAKPFSVANERSGIDKLQDKLPAPGTCLITLEGSGGYERLVIAELLDRGHHVALVNPRQVRDFAKGLGILAKTDEIDACVLARFGQVVGPRSLEKPTGSQTELQQLVERRRQLISLRTAELNRRQQATSKRTIRSIDAVLKTLDRQITTLEADIAALVEQHADWKQKADLLTSAPGVGDITAMTLLADLPELGQLNRERIAALVGLAPYAADSGTITGVRSIRGGRADVRNTLYMAALAGLRCNPVLKAFYERLIASGKQAKKALTACARKLLVILNTMLKTNSPWKAPHAL

SEQ ID NO: 51034 - protein, 348 aa, unidentified
MEQVTTVGIDLAKRVFHVCGRDAAGRVILERRFSRAGLQAFMAALAPAVVGLEACGGAHDWGRRLRALGHEVRLMHPARVAAYVGAHKNDRADARAICEAAGRPAVRSIPVKTVDQQALQALHRLRGGLVKERTAAINRMRGILQEFGVTLPKGRAAFLRRYPDLAAMGRLDELPAVLVDELDAAFAALAAASRRIAKVEGKILALARADVRARRLMEVEGIGRIGASALVAAVDDARAFRNGRAFAAWLGLVPRQRSTGGTPRLLGISKRGDSHIRLCLVHGARAVLTALRRRGPRTPLERWAAAKADTMHPNKLAVAVANKLARYAWVIMARDQPYRPKQLTSKAA

SEQ ID NO: 51035 - protein, 378 aa, unidentified
MDVIYPRCAGLDIHSETIVACALWEEAGQIQKEIQTFSTFSKGLGDLLQWLEERGITHVAMESTGVYWKPVFAFLEGYFDLTLANPQRIKNVPGRKTDVSDAEWIAKLLRHGLVEKSFVPPADIRELRDLTRLRKKWIGQLVSEKNRIQKVLESTNIKLGTVISDIFGVSGRNILARLLEKGYVDEADLEECLRGRVKKKKQAIYDSLLDTLTEHDLLLSRLSWKHITELESLIDKVDQHIDRLLEPYQQEVELLMTMLGVKKETAAVVIAEMGTDMSVFETPPSLASWTGLSPGNHESAGKRKSTRTTKGNPHLRSALCEAAWALSRCRNQPLAAKFWSLAARRGKKKALIATARRMLTIIFCMISRKEPFRQPQLN

SEQ ID NO: 51036 - protein, 331 aa, unidentified
MMLHAIDLHKSTIEIATMAADGEKILKETRLPATEKALRAYLAQWPASRHRVLVETSGTWYWVDDALRAHRNSELRLAHAAKVEAISSAKVKTDRVDVRTLLTMLRLNLFPEAHVISPGLRELRDLLRLRLRLVGKRTSSLNSIARLLEKYNRASVEALPQLAQVQAGFHRGQIELLDAQVKALEKRIARELKPHEDVRRLRRIPGIGRLVGWTLYLEIDGIERFETERKFFSYSRLSPGSDNSGPRTRSKHSRAGNRYLKLAFSHAAIRAVQRYGEITAAYRKRLRKKNPALARAWVRKELARIVYHVLKDGVEYDNTFRGVALSRPKRV

SEQ ID NO: 51037 - protein, 416 aa, unidentified
MLFGGIDWSDSVLDFHLRTADGKVLAQGEVQPSVEGLADLFTALETHAQPDEIGIAIETSHGAWVQALLDRGYKVYPVNPKTVERFREALSAAGDKSDKIDRKVLAMFLATFHQDNKPLRPDATEIISLRIACQDRLRIVEERTAKLNELGAILKCYYPAVLGLFGHFKSYIALDFLLRFPTQNKMQALSERRFRSWLKRHHYPRPQRIDDMVDILERPALSVAEHLQKSKEPLICYLAGSIKLLNAEITERNKQITEQLNQLPEANWICSLPGAGEVLAPSLLACLGRDPQRFASAADARAFMGTAPVTKASGNYRSVHFRRGCWKFARRTLQLFADKSRHQCAWAQVFYEKQRNSGHNHHAALRALAHKWLKIILAMRRTGTLYNEQTFTNSQRRYLLKVPILTTKNSNFLIRA

SEQ ID NO: 51038 - protein, 371 aa, unidentified
MIREEYYIGMDVHKDFVQMAVFEEKGDEPIYERKLKNDIGLLVKEVKRFNTKGKTEAAYEAGCHGYTIQRAMEQAEITCYVLPANKVAKKRTERIKTDKRDARLIGRELRSKSIRPISVPDEVDEAARDMLRCREDANEDLRRVKQRLLKFMLRHGYNYTGGGNNWTIKHWEWMDRCQFKHEHERIVYEEYRSQIHSLEERLVRLENQIKETAECPRYKAAVSRLRAFKGIDYIIALSVVCEIGDFKRFANAKAFMSYLGFVPSENSSGGKRNQGSITKAGNGHLRRLLIEGAWHYTKNSRPGKRLEKRRQGIPINIIDTADRALHRLHKKYKRLVFKGKHVNKAVTAVARELAGFIWAVQVSADRRLGVA

SEQ ID NO: 51039 - protein, 478 aa, unidentified
MERVLKSHPSTPSATGLGVKTLLNQHLECQRRTVSQVNGTHVLRVRRAKSAEIGQQGPVAADGQRQHRISQKEEPVLLIGIDHSPKKHDVCIMDEEGCQIACISIPGTVAGFEQLHTACQELEISPQDCLMAIETDHSLLVDYLLDYGYQVYIIPGRLVHDSRSRFRQSRSCSDPADAAVLAHILRTDRKLHQPWVADTSLTRQIRSQVKLVDNLTRNIVRFTNQLRGLLWRYYPIAANLFSSLDSQIALKFIQAFPSPQAAKALTQAEFTHFCRSHNYRRSDLITQRYGQLSTAQTYASSEIAVSYVDQARSLARVVHSLVLEKIAAQKALTGTFEQHPDAFIFTSLPGAGEFLAPALLSKFRDHRGRFPTAAVAQAVAGTCPVTIESGKRKKHVRFRRACDREFRYYMTQFARSSTLQAPWARAYFDSVRPRHAKVTQAYRRLANRWVSIIWRLWMDRVEYDEALHQRNRLKRGKA

SEQ ID NO: 51040 - protein, 457 aa, unidentified
MPISFSGVGSMKQKKPSRKRSPKLPKHLQHLNQNAAGIDVGSRSHFVAVAEGTDEQPVREFSTFTDDLERLAKWLASCGVTAVAMESTGVYWIPVFELLERHGFEVRLVNARHVKNVPGRKSDVLDCQWLQQLHTYGLLQGAFRPADQICTLRAYVRQRATLVRSSSSHIQRMQKALAQMNLQLHNVVTDITGVTGMGIIKAIIAGERDPQILAGLRDKRCKNTKETIARSLHGNYRPEHLFSLQQAVELYEFYQQKIADCDQQILAQLKSFDSSDGSDPDSKPPRSIEEALHQMSGVDLSSINGINTNTALKIIAEIGTDMNRWMTVKHFTSWLGLCPGSKISGGKVLSSATKPVANRAATALRMAALTLFNSKSALGAYLRRQRSRMGAPKAITATAHKLARLVYSMLKHGTAFVDAGQEQYEERYRSRVVQNLKRKAQEMGYKLVSIQEEPQTT

SEQ ID NO: 51041 - protein, 465 aa, unidentified
MSEDTEVIAVGKAKPQVIEDDEHQRVFERVAAVDVAKASGMVCVRGPGADGRRRASRVWEVTAVMGAVTGLGRELARDGIEMVTLEATSDYWRIWYYVLEMCGLAVQLVDPSQARAIKGRPKTDKLDAMWLARLTEWGMLRPCFVPPAPIRVLRDYARARTDLVHERTRCWQRLEKLLEDALVKLSSVASKLTTVSARDMIAAMIAGERDPAVLAGLARTRMKARHADLVAALDGMFDSHHGDLAQLELDQIAFLDQRISWAEDKITAVLAGIPAAWGIDADGSTGPDAGTGPDAAVLPAVRRLAEIHGVTVLTAAQIIAEIDLDMARFPTAAHLVSWTGLCPIDSQSGRRHGKRKGHGNTYLRGYLGQAATGAASTDTFLGERYRRIARRRGKARAQVAVARSILIIIWHLLADPTARYTDLGPDYAATRTSRDKKIRNHLRGLRALDLTDQEILTILTAHQAA

SEQ ID NO: 51042 - protein, 360 aa, unidentified
MRTVSCAQSEAVARIATRMQLTLTYPIKFSGSQRKGFFMIFVGIDISKLTFDVAVLIDGKYMSRQFENKQSGFLKLSQWIKSFKKPAYFCLEATGIYGLALAKHLYQTNQKVIVANPLQTHAFAKMEMARNKTDKADAMSIARYCQYLFNRGEIDKSLFIPRSAAFERVQFLVTRLDQLSKMKSQENNRSGVSLDKAAARSIESMLTFIDKQIVVIKKEITMIIKQDEQLTAQLKLLVSINGIGDKTAWALLAYIGDISLFENSKQISSYAGLNPSIDQSGTSLNRSSLSKTGSTRLRKSLYMPAMVAVRYNPLMLAFYNKLLTKGKPKKVALIAVMRKLLVLAFGVLKSGKPFDINYQH

SEQ ID NO: 51043 - protein, 410 aa, unidentified
MKDTLFIGIDVSSQSNTVHVMDSAGDKLWQHTFKNSQDGCLDLVRQLLETQSKHGAGFLSFGLEATGCHGSLLAMYLRETDSIPRSDKVVRVLNPRQVSRFKQSYSELPKTDAVDAFVIADSLRFGRIGLRGTVVEDKYLSLQKFTRARFQVAKDLSREKNRYLQTLFLKFSSMTQSPLFSDNFGTTAMDLVTEFESVDQIAYTPLPELADFLNSRGKGHFVDPETLAREIQKAARSSYRLPKAIQDSVNQVLAMQAQTIRFQEHQLKEYDKLIADQMTGIPSTLTSIKGIGPVYAAGILAEIGDVSRFKDQAALANYAGLSWSRHQSGKFEAEQTHLVHSGNRFLRYYLIEATDHVRKHDPELKRFYARKYEETPKTKAKRALVLTARKFVRVVYALLRDNRIYISRED

SEQ ID NO: 51044 - protein, 382 aa, unidentified
MTGTEPHAWGTGLMDDITFVGLDVHKATVCIAVAEGGRGGEVRQLGVFENRPEILSKVASRLSKGGRRLSFCYEAGPCGYGLHRLLTGYGHECVVVAPSLIPMKAGDRVKTDRRDALMLAKLHRAGELTAIWIPDAAHEAMRDLVRARATSVRVLAKARQHLQGFLLRHERIYCGARAWTLAYRRWLTTVRFEHPAQQIVLQDYIHAIQEAETRRDRLTQQIEELLPNWSMAPVVAALQSMRGVALVVAVTVVAEVGDFRRFANPRQLMAYLGLVPSEHSSGSSVRRGGITKAGNALARRVLIEGAWTYRMSARVSRKLHDRLEGLPAAVRDIAWKAQLRLCARYRRLAATGRPKVVVTTAIAREMVGFIWAIARLAQPAPV

SEQ ID NO: 51045 - protein, 422 aa, unidentified
MILKGVPMALKIVYKICCGIDVHKTFVVACIASTNDKGVTSYESHRFSTYTSGLKTLLQWLLKRNCKDVCMESTGKYWIPVYNILENDCSIVLAHPKYVKAIRGKKTDKKDAKWIADLFKHDLVAGSFMPPADIRQLRDLMRYRFKLTCFQSSEKNRLQNCLTVSNIQLGNVVSDTFGKSAQAILDKLLENPADTSFDLEPLVYKSLKKKLPELRDAIDGYITPEQAGKLKVIKAHYESLESRKAELEELILALAAPYQQELAILQTAPGIRSDFTAIGIISEIGTNMEAFPSAKHLCSWAGLTPTNNESAGKKKSVRVSKAGCYIKPLLVQCANAVVTSKKHPEIRNRYLRLKKRRGHKKAIIAIARMLLTALYHMLKNGETYNAELYRKSDLPPVDREITVEQAIIIARNQGYKIKSATA

SEQ ID NO: 51046 - protein, 319 aa, unidentified
MMAQDDRVVVGIDVAKDKVDVCVRRLALRQVFPNSAPGHRKLVAWLRQHQVNKAVMEASGGYERAWAKVLRQADIEVRIVDPRRVRNFALSAGRLAKNDPIDAEMIGWFAETFEAPGQIHDAAREELASLVKARKRLIDLKTQLQTQDEHAAPKAVEKAHTRVLKSLATEIAKLEAAICATVKATPEFAERAEIIESVPGLAETASATLIAGMPELGQVSDVVAAALIGLAPYDDDSGKRRGERHIKGGRRWVRNAIYMPCLGAATLSNPVLKAFYQRLIAKGKEPKVALVACMRKLIIILNTLIARRQKWDPSRYARA

SEQ ID NO: 51047 - protein, 516 aa, unidentified
MLKSSKESFRAGQRFAYVAGVDCLESLGSELRGRFWFNHFGQSSLSPFAMPRLREHWMEKRPADHPLTGPVMSFDRLKRTQSRKRLPGHKLKPSKANLFVQNSKPHLSMKQTYILAIDVAKHKVRAALSGAEERLLFEKDLPVSAGGLRELLVRLREHVAEPEGLLVLIEATGMLHLNWSVALIRAGYAVVVINPLMARRLYTLGNSIRDNKSDPIDARQLCGIGRLHGEKLLSLYRFALKPEQLCLQRLHSVRKAVRKSLSNLKKSYGSLLDVSFPELGRLLEIDGVGIRQLLSQAPTPCAIARMRRSSLEKNWMLRPKAAQLKKLAAESMADPELAQASRPALLAMLQSIEAMETRLRELDRQIEALTSQSVDPQTKALVESIPGFGALNAAKLLAFLPGEILHAGSNRQAAARLQAYMGNDPRVRQSGQWQGQTKMSKRGVEMLRTALFQCAFSASQHDPELRSFYQRKRAQGKHHEVALSHLMRILTPRLVAVLRSGQPYQPNYNSKLKNAA

SEQ ID NO: 51048 - protein, 406 aa, unidentified
MELTTLHKRVIGLDVHQAQITACAIIEDEHGEHQVEQRQFGTFKRDRKALAEWAAALRPDLVVMESTGIYWKSPYAALEAAGVPTLVVNAKHVKNVPGRKTDIGDAQWLATLARAGLLRNSFIPPAQLRELRLLSRQRQKLVGQLAAEKNRLHKVLTDGGIRLGVVVSDVHGAAARKMVKALIAGKSAPEVLELASKRFKASREELFDAVQGELTPSHRFVLDELMRHIEEIEARIARFDAQLLAGMNEQRNALALLQTLPGVDLIGAAMLLVEIGTNMDAFGSPDRLASWAGVCPGNNESAGKRKSGRAGKGNPYVRRLLCEFAHSARRTTCVFKSKFEALHIRRGHKRAIIAIAHKLLRTVFFMLKRGQCYRDSATDYEALAVKRNAPRWIKALKKFGLIDQPA

SEQ ID NO: 51049 - protein, 343 aa, unidentified
MVYVGIDLHRKSSQLCALDEHGEQLLSRRVVNEPEALLAALAQLPERPAVALEAAFGWEWLADLLESEGIELHLAHPLRTRAIAAARVKTDAVDARTLAELLRARLLPEAYVAPRELRQLRQLLRQRICLTQLRTSLKNRVHALLAREGIQRRQASLFGPAGRAFLAGLPLRPPERARLEQLLRLIAVFDTEIAALAAEIEARAQSDPRVSVLTSLPGIGRYTALLVIAELGDVGRFASAAKLCSYAGLVPRVRASGGRVRLGAISHQGSPYLRWALVEAAQQASRRPGPLRRRYERIARRRGRNVAKVALARQLLTLCYYGLRDGEIRCLARASSAWDMAAA

SEQ ID NO: 51050 - protein, 354 aa, unidentified
MLAELVDYVIGVDPDRDWITLAAVDAHSSGVVATGRFPAERDGYRDAIEWADAHSVPGERAWVIEGTASYGRGLCAALQGNDELVVEFDRPTRKATKDGAKSDSLDAVRAAREALGREQLCEPRAHDGIREAIRVHTVARAAAVRARTAAINELKALVVTADETLRGELRGLRTRDLVACCARFRDRNGRGVDARCTRLAMRALARRIGHLNAEVADHDRMLKTLLTEAAPQLLAEFGVGHVTAATFYLAWSHRGRCRSEAAFARLGGVAPIEATSGQNQTRHRLCRGGDRQLNRALYLVAVTRRRSCPTTRAYIDRRTSEGKTEREAIRCLKRYIARRVWRLLEHPHPFLDAT

SEQ ID NO: 51051 - protein, 400 aa, unidentified
MKTKQSSAVVEPITKVHNTLDFSNKVLYVGIDVHKKRWQAAVFLEGIILSNVSIAASADGLVAYLRKHYGNAAFHCVYECGPFGFTLCRQLWAAGMECIVVNPNDIPGTDRERRSKTDPIDARKMARHHAAGLLQGVHVPTEKTQKQRSIIRFRKKLWGDLVRAKNRLKSELKFHGIEVPAKFDNPHWSHNFLNRIDQQAHKDEDLKDTLLLMLQEVKTLRLLLLKTERKLRELMWTSDYKQNSELLRTIPGVGPLTAMLFLLEVGDVSRFKTFDALNRFVGLCPDSDSSGESERHTGLTKRRHKTLRSALVESAWQLIRRDVAMFDHYKELTKRMKSQKAIIRITRKLLRRMRAVMLSKKVYVKGVDGNITSDQINAPELPVPKLKGRPKRSATAGVTV

SEQ ID NO: 51052 - protein, 328 aa, unidentified
MFYIGIDVSKAKLDCSLLLDATSGKRKSKTVANAKSGVIDLLAWCSKQSVAVTDLHAVMEGTGVYHEQAALALFDTGVTVSIVNPAQVKDFGRGLGVHTKNDGIDSLVLAKYGALLNPKPWSPPSPEARELQALLSRREAITQDLLRERNRLEKTEVTVVPPAIRQSILDTIAFLEQQLGKLQQNIDQHINNHPNLKQDRDLLTSIPAVGPQVGNHMLAVLHSHSFRSAEQFAAYLGLVPIERQSGTSINGRPRLSKTGPAHIRAKLYMAAIVATRHNPHLKSLYLRMQANGKSKMSALGAVMRKLAHLCFGVVKNQLPYQLNYPIPC

SEQ ID NO: 51053 - protein, 419 aa, unidentified
MKSASNTLPETPINDVTAGIDWARDDHAVCIVDGRGRQVAHTMVEHTAAGLRDLIGFLARHGAGEVAIERPDGPVIDTLLSHDLTVVVISPNQVKNLRSRYGSAGNKDDRFDAFVLADTLRTDRPRLRRLEPDTAATIALRRACRARKDLVGHRVATANQLRAHLRNVLPGAVGLFAEIDSAISLAFLARFTTQDQADWLTPKRFGDWLAKVGYSGRTSPEQLHVRLVAAPRGITGPDATTHAHITRALLTVLSTLVEQIKALSAQISHQLDAHADQHIFTSLPKAGRVRAARLLAEIGDCRAKFPTPESLACLAGAAPSTRQSGKLRAVTFRWACDKQLRDAVTDFAGDSRHANPWAADLYDRARDRGHDHPHAVRILARAWLYVIWHCWHQGVAYDPARHHALQRVLAQPPAPTKAA

SEQ ID NO: 51054 - protein, 349 aa, unidentified
MIVIGIDPHKQTHTAVAVDGATGKVLADLTIKARTPGFERLLEWARALDDERLFAVEDGRHVSGHLERHLIGRGERSVRVPPRMMGEARRTDRISGKSDPVDATAVARAALRHSDLPEATLAGPERQIGLLVAHREMLINERTDRICKLRWLLHDIDPDLAPALRTLGRFKTLDRLVRALETVEPTVEVEICLDLLARCRAITVRANELERQIGALVKTHALALLEIPGCASLTAAKIVAEAAQVARFPSEGHFARYAGTAPIPASSGARHRQRFNRRGNRQLNAAVHRIAVTQIRIHDPAKDYLAKKRAEGKTKTEAIRALKRHITRVVFKTMTSMNQPTDRLTAVAA

SEQ ID NO: 51055 - protein, 444 aa, unidentified
MNLNAAGIDVGATEHWVAVPADRDAQPVQRFGAFTADLYALAAWLRQCQIDTVVMESTGVYWIALFEVLEERGFAVKLVDPHTVRQVPGRKTDVKDCQWLQELHTYGLLRGAFRPEDEVCGLRSYLRQRSMLVAMASRTVQHMQKALEQMHLKLTEVVSDITGKTGMTILRAILAGERDPQLLATHRDKRCKHDQGTIAKALTGHWRAEHLFALQQAVDQYDFLAQQLRACDGHIEECLQTFVPDVEVDAPPSPPVRAWRSSRSNPLSFDVPTYLEAMTGVDLTQIDGIDSLTALKVISEIGLDMTRWPTSKHFAAWLGLCPGNKVSGGKRYRIRSKPSANRAATAWRLAAQGVANSHSALGAYYRRIRIRLGAPKAMTATAHKLARLVYSMLRYGTAYVDAGQQAYEQKYRDRVLTNLQRKAKAFGYQLVHVADLDSGVASTP

SEQ ID NO: 51056 - protein, 418 aa, unidentified
MNEELIARLSRRYLALDIHKHYSVEAGVNFEGQVVVEPVRIEHADLESWLKKNIQPTDYVVIESTTNAWHIYDLLVPLAEKVLVANPIKVKQIAQARVKTDIRDTLILARLLAANMVPVIWVPPAHVRNLRYLLSQRRHLVGMHTATVNRMHSVAHRHHLRHPKGKRFNEKNTKWQRDNVLSESEQFQLELDMNTKKHLAEQTEKITEKLRRMSHQKPWAESMMYLMQLPGVGVITGMTVLAAIGEITRFETPGHLASYSGLTPGLDQSGVKLRGKKITKEGRKDLRWAMVEVAQRAVKSDPLWKHRFNELQRRMHRNQAIVVIAHRLLELVWHVLSRRQPYRNFSHERIAYKYLTWSWQLNAKDRDGLTRQQFTRYYLMRLGIGHDLKRIALNPRYPRRIASEAEVLALRPELNQTE

SEQ ID NO: 51057 - protein, 315 aa, unidentified
MTKTNITTAGIDTSKAKLDIAVHNRTERWQVANALPGWRALAASLAEAGVTRVGIEATGGYERGVVEHLRAAGFTVLMLQPLQVKAFGRVHLRRAKNDALDAVLIAACAAALDPPQIAPDPRLTELADYLTFLEQIEEDIKRFKTRLEHIDEPALRRIVNSDIARLKARKAAQIRDIAKRLRAHDDLAKRLKLVLSIPGIGERTALAIVIRMPELGRVSREEVAALAGLAPFDADSGQHRGQRKIAGGRSRLRRSLFAAALPAAFRWNKALVALYARLIAKGKVHNAALIACARKLLIYANTVVQRGTPWTEKAA

SEQ ID NO: 51058 - protein, 441 aa, unidentified
MIHEHEPDAAGIDVGSTEMYAAVPAGRDEESVRRFSAFTADLIRLADWLKQCRIQSVAMESTGVYWIPLFQILEERGFRVCLVNARHVKNVPGRKTDVLDCQWLQYLHSVGLVRASHRPAQQICEIRAIWRHRENLIQMAAVHVLHMQKALDQMNLQLHHVITEITGNTGLAILDAILSGERDPEKLAELRDSRIKASRETVVQSLIGDYRSEHLFTLKQSLAAYRQYQQWIADCDRDVEDRMKTIQSRVDLTQKTLPKPKYRGKPRRNQARFDLRSHLYRVYGVDLTAIPGISSLTAQTFLMEVGTDLSRFPTASAFASWLGLCPDNRISGGKILSVHTRHVVNRLTIALRMAAQSLHGSRSFLGDYFRRIRARLGAPAAITAAAHKLARILYHLITTGQSYDESVFTEIEKHNQQRRINYIKKQAVALGLRIAPEACVP

SEQ ID NO: 51059 - protein, 401 aa, unidentified
MHLWAGIDAGKAHHHCFVIDGDGNRLLSQRVPNDEPALLQLLASVLEIAAGDPVVWATDLNHGGSALLIALLVGHDQDILYIPGRTVHHASKIYRGEGKTDAKDAAVIADQARMRNDLQPLRAGDDISTGLRLLTARRADKSADRVRAINRLQAQLLEYFPALERAFEYSRSKAALTLLTKHRTPDGIRRTGEARIHAWLKKHGARSSAAVATAAVEAAKSQHTIVPAQHVGEGIVAALAREILALNEELAELDALITEKVTEHQHTQVLLSMPGFGPVLAAEFLGATGGDLTVFQSADRFAGVVGLAPAPRDSGRISGNHHRPRRYDRRLLRVFYLSGLSALKSCPASRGYYDRKRSEGKSHIQAMLSLARRRLNVLWAMLRDGKTYTKPVALGAAPMAV

SEQ ID NO: 51060 - protein, 402 aa, unidentified
MFFIGIDIGKRHHEVALIDSQGKPVGNPLRFSNTTEGSEKLLAFINQHDLLPDNTMIGLEATGHYWLSLFSFLTALEFNVIPFNPIQSDTLRNFYLRKTKTDTIDAVLIAQVVRMDLPDPAYLPSEEMIRLKQLSRFRYSVVDQTSDIKRKIVACLDQVFPEYEQLFSDMFGKSSTQLLLQSPLPEDLLKIDSQNLIDLLHTASQGRLTMDKSTEKVHRLKHLAQNSFGIRIGADVFKLQIQCLLQQILLLEKQLGTVEEEMAELVNRQDQYLTTITGIGPITAAVILSEVGDISRFERPNQLLAFAGLDASVHQSGDFTGTRNKLSKRGSPYLRRAIWQAAFVASYKDPALSRYYQSLRKRGKHHGTAIGAVCRKLVNIIFAVWTKAQPYEIRIHPDLIDT

SEQ ID NO: 51061 - protein, 388 aa, unidentified
MRQTDDLSKSLTPFVQGNTLIAVIELSLSSWLVAGVVPGITRQPLKKLEPDEAELLRLLQRWRDEAVKSGCTIERVVVAYEAGRDGFWLARWLRAHEIEVHVIHSSSVAVSREHRRAKTDRLDTAMLLRVFMGWLRGERGHCGMVAVPTIEQEDAKRPHRERENLVGEKTRIINRMKAAMIRLGIRGFKPELRRAPGKLDGLRTPDGLPIPPNTLDEIRRDMTRLAMVREQIELIEQARLERITQAPNTGPNAMVRLVASIVGVGVETADMLVREVLSRDLRDRRAVARYAGLTGSPDESGSKRREKGLAKAGNARVRRGLIQLAWRFLMFQKESALAQWYRARTDGVKGVRKTIMIVALARKLLIALWRMVTTGEVPEGVRLRPVEA

SEQ ID NO: 51062 - protein, 391 aa, unidentified
MQPTQVSNFTHEADVLAVSLELSGKEWKVGLDDGKRKAPAVCGGVVKHEDPPRRLQQAVGVIEATKKKWRLAAEVRVVIVYEAGQDGFWIQRGLEAEGYEVLVVDPASIQVNRQARRAKTDRLDALLLVRALRGWLRGEQDRMRVLRIPSVAAEGQRHLMRERGQLQKEIGQHRDRMRKLLQTMGCVANADDLSGQLARGEVKGADGQVLPAGLQQRLVREGARLQLVHEQLAALEQSLPEQLPEELRQRIEQLMQLKAVGPVGAYRLLLELFWRDFNNRREVGSCVGLVPQPYDSGESRVDQGISKAGNRRVRALLIEMAWMWVRYQPQSELAQWYFGRISGTGTNKRSKRIAIVGVARRLTILLWRYLKHGVLPKGVALKPVKVVLKAA

SEQ ID NO: 51063 - protein, 482 aa, unidentified
MKKRTIYQNRSQELLSLFERAGNSSKVMCIPIDFAKKDHVVMFCNGFGDILRKPFSVKNSQMGVAYLIDQVMRSCCHHRIKKEHVFFGGEDAQSYTENFVNTLRSEGFLVANVNAHEAKKQRENLQASTDRLDLMGIAVMLLNRKANCAPAQAGTYLNLRTLVRHRKKLVKMKTGVSNRIHTVIDRLFPGFLNEKKSGIDPFSKSSLYLMSDRFSAQQICRRRRSTLTKHLRRFGTKGAENVATKLQAYAKQVLTPLEEYTATLQLSLSYNIKHYRCLQENIDHLEKEIALLLSQTQGAFLTSIKGIGIVLSAGVTAEIGDPFAQKPLNNLVSYAGIIPRVKQSGGSEGQPYMGRVSKRNNHILKDYVVQSAFHIGRHGPKDLLLDYKRREAQGQHADFGMGRRFMRMAMCMMRASQVYLPLRLRGNSVDQRDKAEYYLSIWPLLKEKWKRADALESAFEKDRPLGHWRQIVQHLYDIELDI

SEQ ID NO: 51064 - protein, 334 aa, unidentified
MQTATLIGIDLGKYSFHVHCQDRQGNALLRKKFSRSQLATFLATYPACTVVMESCAGAHYMARTVSQLGHRVKLIAPQFVRPFVKSNKNDFVDAEAICEAASRPSMRFVTPRTEDQQAMSALHRVRSSLIRERVKTTNQMHAFLLEFGISLPRGSAVIKRLPSVLEENGIPPDLERLLARLHTHYGYLSEQIKEIDNELKTHLNEDETAQRLLTIPGVGPVTASLLATRLGDGKNYASSRDFAASTGLVPRQDSTGGKPTLMGISKRGNKVLRSLLVQCARAFMRRLEHNSGRLAEWVKKQLASHHSNVVACALANKLARIAWAVTAHQTEFSK

SEQ ID NO: 51065 - protein, 373 aa, unidentified
MPRYSTAFGMDVHLRSTTVCALDAETGEAVARRFRGNPWGEVAEWMSGFPGPSLAAYESGYLGFAPQRELSGLGVDCVVAAVSRVPRSAADLSSKNDRNDAARMAKAILSHDVTPVWVPSPEIEGLRDLAAAHDAATARLAAAKQRLLAFLARRGYVYGGTTPAGNPRKYWTYGFLRWLDGIRPADDGGIRALAALRNEVEAADETREAVLAEYRAAVAAGPLSAEVEALQSIKGCGFVLAAAFASEVGDFSRFRSGRQVTAYFGLAPKQRSSADSVRLGGISGAGNALVRRLAVEGSWRYAQAGHQPKLMPKGSGVPLEIRMHGRKGSERLLRRREEMLERGMPQAKANAATAAELVRWLWALGMMCREAGE

SEQ ID NO: 51066 - protein, 318 aa, unidentified
MSESVFVGIDVSKAQLQVASLPSTALQAIPAARQGTFANDGDGVKTLVTSLRALQPALVVLEPTGGLEMPAAVALGAAGVPVAIINPRRIRDFARAEGRLAKTDALDAQVLARFAQALRPEPRPLPEAGVRDLRGLVARRRQVVEMITAEVNRRSSAPPEVREHINRHLAHLRAERAWLDEQLAEAIRAHPVWRERARLLDSVKGVGPVLIATLIARLPELGALSRREIAALVGVAPFNCDSGQHQGKRKCWGGRADVRRVLYMATLSAAQYNPVIAAFYQRLLAAGKPKKVALTACMRKLLTILTAMLRDGRCWQPT

SEQ ID NO: 51067 - protein, 400 aa, unidentified
MVTHETPEVFLGLDVGKTEHWACAITMNQKVVWNKALPNDEAKLIDMYRSLQEHGSLLVVVDQPATIGALAVAVAQHMGIPVAYLPGLTMRRIADLYPGDAKTDEKDAFIIADAARSLPHTLRELTQADTDEATLGMLTGFDLDLSRQVNQVSNRIRGLFTQIHPALEKVLGSRLEHDAILEVLMTWTTPDKLRKAGRARIDAKLKKHGARRHSAWTEEILVALARQTVTVTGTEAAGIVIPHLARQLISLHAQRADVAREVEGIVVNHPLYLVLTSMPGIGLRTCAVIIAELSGKTFTSAAALASYAGLAPTTRQSGTSIKSERVSHSGNKRLKRALFLSAFAVIRTDPTSRAYYNRKRNQGKRHNQAIIALAHRRLTVLYAMLRDNTLYDPPELAQAA

SEQ ID NO: 51068 - protein, 385 aa, unidentified
MSELNDLSRSLTSLEQDKTIIAVIEMSQSSWLVAGIVPGIERHPLKKLEPSEEELVRLLMRWRTEATKNGHTITRIAVAFEAGRDGFWLARWLRARDIETYVIHPTSVAVSREHRRAKTDRLDTGLLKRVFIGWLRGEPDHCHMAAIPTLAEEDAKRPNREREGLVRERTRIVNRMKSCLVRFGIRNFKPTLRKAPERLATLGTPEGVPLPPNTLLELRRDMARLRFVMDQIKEVEDARAQRLEQAPQEKTHAMVRLIARVIGVGIETADMLVHEILSRQLRDRRAVARYAGLTGAPDESGNKRREKGLAKAGNARVRRGMIQLAWRFLVFQKDSALVQWYRTRTESAGKKRKTMIVALARKLLIALWRLVTTGEVPAGVVLRAA

SEQ ID NO: 51069 - protein, 335 aa, unidentified
MNVTKDCLGIDVSKDLLECCLGLSTKSDEQIFMGEKKFKNDPQGFKDLLSWVRQNTKNEVLYVMEATGVYYEHLAYWLHDQGLALSVVLPNKVNYFAKSHNIKTKTDGVDARVLARMGLERDLDPWHVPSKAMREVKLLTREYRELKRKVTATKNQLHAKGSGYQCPASIIKRLKRQIRVLETQLMEVEAELRILVMRDSFLADQVERLETIPGVSFMTIICVIGETNAFALVKNAKQLASYCGLDVQHNQSGTKQGKTRISKKGNSYIRQALYMPALCATRHNPHLKTFYNRLTQKKPAKKIAVTAVARKLLILIYTLWKNETEFNPEYAVKTT

SEQ ID NO: 51070 - protein, 326 aa, unidentified
MTLSHLTDNIFVGIDVGGAGLDVAWHRGDSAHYANRPDAIATLVERLRTGPAVTRIVLEPTGGYEKSLVKALRQAQLPVEIIHTTRFNAYRTLVGVKAKSDTSDARLLASYAAAPDEVRGRKAGYVELPEDAIREELSELASRRDQLKYMIHAETCRLGTVRRAELRQMITAHLEALRAEDKQVHRMMLELVRQRTDLRRDQRLLKTIKGIGVKSALSLLASVPELGRIDNKAAAALIGVAPFVRKSGTMTAPARIHGGRAAVRSILYMAAVTASRHNPVLAPFYQRLIAKGKPPKLALIAVLRRLVVFANAVLRSGQPWMGAVTS

SEQ ID NO: 51071 - protein, 346 aa, unidentified
MSHKTAATVAHTIGIDKGKNTLHLIGLDDQGAIVLREKIARGRIAARLANVPRCLIGIEAGMATHYVARELSALGHDVKQVPPAYSKPFRQGHKNDFRDAHAIAEAVQRPSTRCVPVKTDDQLDLQALHRVRSRLVGQRTAVINQIRGFLLEHGIAVRQGLRFLRQQLPDILANRSDVLSPRMIRIMEDLGGDWRRLDERIEHVTKEIEVLAHGSESCRQLITVPGIGPLIASAMVAAIGKGAAFAKGRDFAAWLGLVPKQMSTGDRTILGRISKRGNRYLRTLFMQGARVILLRPANWAKHSFGPWLTAAANRLHHNVLATALANKLARIAWTVLTQARSYEARV

SEQ ID NO: 51072 - protein, 335 aa, unidentified
MDNRKYIGMDVHQASTSIAVNDAAGKLLMECVVETKAATIVEFIRGVRGSVWVTFEEGTSAAWLYDLLKPNVAKVIVCDKRKNALLKAGNKNDRVDARKLSDLLRAGLLTSVYHGESGVRTLRELGRSYVTVNQDLTRVMNRLKAIYRSWAIPCAGQEVYTPRHRAEWLQKLQEADVRRRAEQLYQQLDCLVGIRKETRKELMAESRKHPANALLQQIPRLGPIRVALLIALIQTPHRFRTKRQLWSYCGLGLRTRSSGEYRYTGGQLQPSRKPPALRGLNVNHNRELKNIFKSAATQAGASKDPLGDFYQNLLAGGMEPPMARLFGRGRLRPLH

SEQ ID NO: 51073 - protein, 345 aa, unidentified
MKLYGGIDLHSNNCVIAIINEHSETLTVKRLNNDMSVILSFLSPYRDNLKGLVVESTFNWYWLVDALMDAEFKLHLANPAAIQKYSGLKYADDHSDARWLAEMLRLNILPEGYIYPRELRAVRDLMRKRMDIVQQSTKNLLSVQSCYMRHLGYKLSSNKIKQMAAIRKGVDAEKVHADFSSMNTALSVISNLSLIRCAQQQINVIEGAILKQTSLSPEFMNLTSIDGIGNTLALTIMLETGTIKRFDSPGNFSSYCRCVKGARYSNGKKKGATNQKNGNRYLAWAFTEAANFAIRYNPTIKKYYQRKLAKTNQVIAIKTVAHKLARACYHVLKDNAPFDEYKAFA

SEQ ID NO: 51074 - protein, 397 aa, unidentified
MYIVGIDIAKRKHEAAVIDGEGAVIIKPFSFTNNCSGYNRLLAMLAKAKLPLDEVSFAMEATGHYWLALFTRLQKEGFRVQVINPVQTNSIRSFYIRQAKTDPRDALLIAEVIRFGHFSESTLHPENIYELRELCRGRHAIVSMQADVKRKVVALLDQVFPEYETAFTNMFGDTSMAILQTCPTPKELSEMPLEELCHLIEVSSRKRFRMVKAQELQELARNSFGFAMAGDVFSTMIRLYAKHLDFLKQQVREMDRKIAEIMETLDTPITTITGIGPTLGAYILSEIGDISRFSSAAKLAAYAGIDPTMRQSGEYNGVRNRMSKRGSPYLRHAIWLAASSAVLHDPALKLYFQKKRDEGKPYMASVGHACRKMVSIIYAVMRDNKAYTPCIPNEISA

SEQ ID NO: 51075 - protein, 324 aa, unidentified
MYLGLDVSKNTLDCCLNKDGFFYACKISNNQKGFEKLKVWLDGHGCDETLHCCCEATGNYYEAAAEYLAEHYKMSVENPRKIKAYAVSELKRSKNDKQDAKTIAEFCEEKSRKLKTWKPKNQTEKELQSITRYIARLKQQKASETVKRQTASDNIKDLIDETIDYLGRKIKEAEGRLKTYINQNQELKQKTNNLTTIPGVGIQTASIIMAALSGNNNFKTAKQFTAYLGLDPAEYKSGTSVKGKDRISKVGDCITRAALFSPALVAYRIGTFPRLVANMRQNGKHIMQILTAIMRKLAVVAYTLHKTNTTFEKQRHTRIQQKAA

SEQ ID NO: 51076 - protein, 387 aa, unidentified
MTLANDLRKSLVALEQDSTLIAVIELAQSSWLVGGIVPGVEREPLKKLDGDPEAVVKLLDRWRDEATRAGRRITRIAVAFEAGQDGLWLARWLRARGIEAHVIHPTSVAVSREHRRAKTDRIDVRLLKRAFVGWLRGEPEHCRMVAIPTLEAEDARRPSREHERLTAERTRLINQLKSALARLGIRNFNPLLRRAPERLATVRTPEGVPIPENAQDEMRRAMARRQLVREQIKQLEATRLERLAQAPDEGPHAMVRLLARVLGIGIETADTLVHEVLSRELRDGRAVARYAGLTGSPDESSKRRREKGLARAGNARVRRSMIQLAWRFLALQKGSALACWYRARTEAGGKDARKTMIVALARKLLIALWRYVTTGVAPEGVVLRAGA

SEQ ID NO: 51077 - protein, 427 aa, unidentified
MKFNSKINQIKQENRLPVAFDVSRDKLNCYSQWGDKVIYSFDDEFPNRIRIIEHKLKAFYVFAKKKGFRGLHIICEPTGGYERKLMQTAVNHSHKVSYVNGESVNKFQVVENNENDKNDVKDPRVIFKLFLNGKLIKYRQRDQEYQQLKTLGRFYEQDSKNRTEIKNIIHDTLKILFPDFSFPNAFLFETSGRALMQRFNANPYRIVKCGKTRFAKAMKRLAPRIRNKTIERLWTDARSSVRMDFEPDLIEIYQLRMHKLWNDFIENENNINNIKFRMEKIYDKLLATGEQVPIPVKNFVSKFNLARIVAQTGPFSDFPSARCIKRFGGLHLKVRQSGRFKGKVRLSKKGRIDLRTIMAQSIFHLIKKNGFMGELYHKKKEQGMPGTKAMTVVMRKMVDILFALSKPGVVFDENRLFTCQSKYKNAA

SEQ ID NO: 51078 - protein, 345 aa, unidentified
MPIVGGLDIHRKQITFDYLDTVTGEVKRGQIAPADREHLRAWLARFAGRGDVGFAVEGCTGWRYVAEELAAAGIAAHLGEPADTAALRGRKRHAKTDKTDSRHLRVLLAEGRLPECWIPPAQILEYRALLETYHDLRAEHTAWVQRIHAVFFHQGAPALGEGVLRTEQGLAALRVAAAAHLSPAGQPRIATALEVLAAVEARMEVLRVQLRFAARHLTGARVLAAQLYGVGPVTALALTCWLAGAGRFSSSRKAVRFTGLDVTVWSSDRKGPPGRLSRQGPPMLRWAVYEAGKTHARASAPDHAYYAAVKDRKNSKRAALSEARKIVRQACHILTELGDDALTTA

SEQ ID NO: 51079 - protein, 418 aa, unidentified
MDRTKYIYIGMDIHKETHTAVLLNYLEEKLGEIKIKNTLQGFHKLEDYILKQKGELIPIFGLEDITHYGRNLSIFLLDRDYPVKEVNPSLSYMERMSYASTRKNDTWDAQCISAVLMRRSHLLPDANPQDYYWTMRHLVNRRNALVKASTKLMQQFHEQIQTAYPNYKGFFRELDCQTSLTFFEHYPSSKHLENISEEELGAFLRIPSNNSCSTNRARKILDLVAEETTKERDYQFARDTVIQSITRQLRAYQREIKELERTERQMYQELGYQLETMPGIDIVTACALVGHIGDIQRFSNGDKLANYAGVAPLRFSSAGKGKDLQNKSQGNRKLYSTLYFLAIQQIYLTNKGEPRNPVFRAYFERKVSEGKTKIQALICIMRKLIKIIYSMMKHKTAYDLPKIEEKMASDEKCAKMLV

SEQ ID NO: 51080 - protein, 367 aa, unidentified
MKTKNITPSNVPTTPATVSGFTLGLDLGDRQHHVCVLDAAGNIVREAALPNTRPALAQLLVEFPKATVALEAGTHSPWISRYLTEQGATVLVANPRKLHAISRNERKCDRRDAQMLARLARVDAALLHPIQHGSAQAQHDLLGLKLRDALVRNRVSLINAIRFTLKSLGHPVRNPSSESFHKTVLADIPADCLPVVQPLLTVLAQVTEQIKAMERDLVRRSKQDYPATQRLQQIAGVGPLTALCFVLKVGDPQRFSRGRDVGAYLGLCPRRDQSGGTDKQLRISKCGDGLLRRLLVSAAHYVLGPFGPACALREHGQRLTGTGSAREKKRAVVAVARKLAVLLLSLWKHGTDYEPRVTTPRLVLTPA

SEQ ID NO: 51081 - protein, 348 aa, unidentified
MNDMHYIGLDVHKKTISYCVRQSDGTILHEGTIAATRQALEAWMGQQPQPWTAGMEATMFTGWIYDHLESGGATVKVAHSAMLKAIAAGKKKNDQIDARKIADLLRCDYFPECHMASREIRDRRRVLRYRSLLVRQAVRMKNKVSGLLMEVGVEYNQQKVHGKKYFAEMLHEHKEEMPPSLPQLLQLSRSTIETLSGMERQLMRALEQDDLLAARVERLATIPGVGRVLSLTWALEIGEISRFSSVSKAVSYCGLCGAERSSGGKTERTSISKQRNKHLQSTLIEAAKLAPRWNAELALVYEREKQKGNRNRATLAVARKLVAYLMAVDRREQGFHKTVAKVVNQQAA

SEQ ID NO: 51082 - protein, 392 aa, unidentified
MIYVGIDVSKLKHDCFIIDSSGEVLEDVFEFSNSREGFNLFLSKLKKHSKSLSNERIRVGLEATGHYSTCLESFIRKTGLCPVILNPLSTNLYRKATTLRKTKTDKSDARLIARMLLTDVKDPTPMKSYHISELKSLCRHRFRLIGYQSKLKISIRRILDMVFPELRESVWSVHQKSCYQLLLEFPGAHSLAYAHLTRLTNLIAAGSKGKYGKSKAIELRELARNSIGIESAALSAELQQTIRLVLSVREQLVDLEKKIRSIVQSLETPLLTIPGISFILSGIILSEITDINLFPDPAKLLAFAGLEPSMFQSGKYVADNTPMVKRGSTYLRWALLNASRLVVMRDSTFGDYYWKKRGEGKHHNVALSHTARKLVRVIFHILKTGNTFVPQS

SEQ ID NO: 51083 - protein, 527 aa, unidentified
MMPFKAAGRGDRQDLGASCPSVSMVPGASDHNTGDTLRRDPAWETASTPVAPAPAAPWDIRLPRLVEAAMTPRQDHLPHPQRRSRCVRLHVTNPDAAGIDVGADAHWVAVPVERDPEPVRRFGTCTADLEALADWLQACGVTTVALESTGVYWIPLYELLQARGFQVLLVDARQVARAPGRPKTDVKDCQWIQRLHSYGLLSAAFRPAEQVVVLRAYLRQRDMLVTYAGQHIQHMQKALEQLNVKLTEVVSDITGVTGMAIIKAILGGARDPVGLAKLRDPRCKESEATIARALQGTWREEHLFALRQAVTLYEFYHQQIGVCDQAIEAHLRTFADQSGGQPLPYRPRRRKREANEPRFDARARLYAACGVDLTAIEGIDETTALVLLSEIGTDMSRWPSLKHFASWLGLCPQHKISGGKILSRRVRRGSSRAKRALRLAARSLHHSKSALGAFFRRLKARQGTPSAITAAAHKLARLVYTLLKHGTDYVAQEMAAYEVRYRERKVQSISRQAQALGFVLVPAVAGE

SEQ ID NO: 51084 - protein, 359 aa, unidentified
MSTMTQQAIEITGGVDTHKDTHTAAAVDAAGRVLGSAQFTADAAGYAALLAWLRGFGPLALVGIEGTGVYGAGLARHLAAEDVPMVEIDRPDRKSRRWQGKSDPVDAEAAARAALAARRTGQPKARDGKVEALRALRVARRGAVAARADVQRQVKALIITAPETLRAALRGLPDRRLIAACAAARPDRARAGEPATATKLALRALARRHQQLTAEITDLDALIEPLVEAINPALLDLNGVGPDVAGQLLVTAGENPQRLHTEAAFAMLCGVAPLPASSGRTQRHRLNRGGDRQANAALYRIVLCRLRWHPTTRAYAARRTSEGMSKKEIIRCLKRYIAREIYSVLNPTSSSTDVPAQAA

SEQ ID NO: 51085 - protein, 456 aa, unidentified
MTQKRSKPKIDRTMPMVHPNAAAIDVGATMHTAAVRADWTPEPVRSFGTFTTDLHRLVNWFKECGVETVVMESTSVYWIPIFELLDARGFSVFLVNARDAKHVPGRKTDVSDAQWLQRLHSYGLLRASFRPKGQIAELRAYVRQRERLLEYAASHIQHMQKALTEMNLQLHHVVADITGTTGMRIIRAILAGERDPTVLARLRHYSCRSSIETIEKALTGNYRAEHLFALEQALTLYDAYHEKVSACDVRIEAVLKELSVRRGRKSGSLPSSHRRTDQANGLAFDARAALFTLLGKDITQIDGLGPYLSLKLIAECGDDLSAWPSAKHFTSWLCLAPSNKISGGKVLSSRTRRGSRAAALLRLAAVTVGRTDTALGAFYRRLSARIGKAKAVTATARKIAVLFYNAVRYGMEYVDPGASFYETRYRKRVVDNLRRRAKSFGFVLQPFEPTPSVPVS

SEQ ID NO: 51086 - protein, 367 aa, unidentified
MQQITRGQAVRVGVDLAKRVIQVHAVDAAGHAVATRAVSRDKFIAWCAQLPVGCIVAMETSSSSHHWARKLIALGLDARIIAAQLVSPYRRQGASGKNDANDGAAVCEAASRPQMLFVPVKTIEQQSMLCVHRLREGLKAERTACINRIRGLLAEFGLVYAQGPAALQVVLADVLEDASNEMNTLARLVLQRAHSQWRELDEHLAWCDQRIAAHARDNPAVKKAAKLQGIGPIGASAAVATVGDFKQFRHGAQFGAWIGLVPRQDSSGGKTRLGGITKRGDVYLRSLLIQGAKSAVMTAHKRSDPISQWTAALKDRAGWQKAAVALANKNARILWAVMTKGEAFDARHVSVKPAAGGSTPTPPVTAA

SEQ ID NO: 51087 - protein, 338 aa, unidentified
MKKTVIGIDISKKTLDWCIMEGSEIAGYHKTMNSVDDIVRMLSDVLENGCKDIQDVLVCAEFTGRYIYPLVLACHKCGVALWLESGYNIKCEARKERGKDDRTDARRIAEYGRKNQDDARIYRLPSKKIAALRDLMSERALYCSQAAAHKGQLRDMRAYMAPEAYTARAVRQLALIKELERLTEEVDRSMASVIASDPELKRQEKLLLSVPGIGTVCAAALIAVTAGFSLFDNGRELCCFAGLAPFAYTSGTSIRSKRRVSGRADHQLKALMHMCALVAATRIKSGHFAEYYQRKVAEGKNKMCVLNAVRAKLMLTAFAVVRDDTPYDNFSKKNFGES

SEQ ID NO: 51088 - protein, 419 aa, unidentified
MEKSKTKKLKTVNEKTMIVAIDIGKSIHHGYFRGSDGQDIKAFPFYNSQKSYEEFWMKVLHFKQQKNLEEVVVGFESTGPYAEPLMNFLAKKPIRLVQVNPMHTKRLKELTGNSPNKTDSKDPRVIADVIFLGHALTVIVPAGPAAELRRLTQARQRASKNRTAMVNQLHHLVFVVFPEFMQIIKKITSKSSLYLLKNHPFPEDIVDLGFERLQAFLKKISFGQLKQCQVKALFEAAGNTAGIDEGKESILTEIRQLVSCIERESQFMDRLEEQMSQYLKKIPYSQSILSIKGIGEVTVAGLIGEVGDFRQFTTISEIMKLAGLDLYEISSGKHRGQRHISKRGRSYLRKLLFFVAINTIRTNGIMHENYLRMLNRGMPKVKAVVAITRKLLRIIFALVRNHTTYRENYEQQYHGKLAA

SEQ ID NO: 51089 - protein, 438 aa, unidentified
MVQANITVDPDYTIWRCFVMKHNTLFFAGIDWGRKNHQVCLIDQNGSVLAQKSFAHLAEGFYEMAEWMLEVSGSTTNHIGVSIENNRGAVVETLMGLGFRVYSINPKQLDRFRDRFSPSGAKDDRRDARVLAEALRTDGRYFREVTAPYPDIADLRRLTREREELMGERVALINRIRGDLWEYYPQFEQVIGNGSLKLWHIELWELAPTPGDAKKTRPSTVQKLLKRNRVRRIDGKEAIKILRSKEIELAEGTVPGIVRRVRRRVERLKLVDRQLKEIEIFIDDRIKALDSRLRSESEKEGRPSDIEILRSIPGVGRIVLAVFVSEASDILSRRDYRALRCFAGVAPVTKQSGKSRQVVRRHASCRRLMTAVSQMAKVAVMHDSVSKAGYESLRARGLGYHRTLRTVGDRLLHVGCALLKKREVFDKEYGKVRGKAAA

SEQ ID NO: 51090 - protein, 372 aa, unidentified
MQGTTFVGLDVHKPWINVAVLLPGHNTPLEWRIANEAQAIRKMLKRVAGLAPGDVRYCYEAGPCGYALQRQIISWSDASCMLVAPSLIPRKPGERIKTDRRDARKLAQLFRAGLLSEVQPLTEQDEAARDLSRAREDLREDLVRARHRLGKFLLRRAITFTPGKRAWTLAHRRWLDSLRFDNPADSVVAADYLLAIDQIEQRIKSLLVHLERLALDPHYAKAVATLRCFRSFDTISSVGLAVELHNFERFTAARRLMSFVGLIPGEHSSGEKRRQGTITKTGNSHVRRLLIEAAWNYRHRPHVGAALRNRRKGQPPRTIALADRAMQRLHRRYQQMTLRGVLPQKAVVAMARELAGFVWAALSPLAQQTPTH

SEQ ID NO: 51091 - protein, 350 aa, unidentified
MPQRNVPRSAAVYGIDIGKNIFHVVGLGSDGVPVQKVRFRRDTLLQFFERAAPAIVGMESCAGSQWVARKIQALGHKVRLIPAQFVKPYVKSNKTDIIDAEAIAEAATRPTMRFAALKSEEQADLQALHRVRDQMIGTRTRLINQMRAFCLEYGIALRQGAGLFKLDLPQVLEDQSNDLSSAMRKLLADLFADLRQLEQRIGDITREIEAIASREDVARRLMTIPGIGALGATALLAAIGSGRQFQKARDLSAWLGLVPREYSTGGKQKLLGISKRGNRYVRKLLVDGARSCFRHLDRTKDRLGDWLDGLQARMHPNKAVVALAAKMARIVWVVLTKPGALYERRDPAFT

SEQ ID NO: 51092 - protein, 359 aa, unidentified
MQTQRKELNFEGESIYVGIDVHLKSWSVSIFTEKLHHKTFSQPPKAELLFNYLKLNFPNASYFSTYEAGFCGFWVHFKLKEFGINNIVVNPVDVPTTQKDQVRKTDAIDSNKLGRSLRKDELKGIYIPQPETLEDRTLIRVRFTIVKDMVRHKQRIKSFLNLYGIEYPDEFQNTNTHWSKRFINWLKTVQLQFPTGTDALNLLIKEAEQQRLILLEATQKIRILSRTERYTNNIELITSIPGIGLITGMMLMAEIEDIKRFDNSDKLAGLIGVVPDCHSSGPSEKKGEMTKRGQYFMRKGIIECSWVAACKDPALSLAYYEYCKRMEPNKAITRIARKLINRIFSVLKNEKKYEFGIVK

SEQ ID NO: 51093 - protein, 334 aa, unidentified
MKKPYFMGFDIAKASVDFCLLSRCGALLWRGGFDNEPQAIKEFLALVRRRGWKLSQIHFALESSGVYGKRLIAALHEAGLAVSVLNPAQVKFFAISVLRRTKNDRVDAEIIARFCLERKPLSTRPLRPVEEQLKLLVHERDSRVAEQTRERNRAKKDPFQIQLPPLISRQRQHRIKQLQKEIAQMDEAINALIASDEYLSTQSKLLSSIPGIAQNTAAKILSEIAGKEFDSARQLVAYAGLTPSEFRSGARCYGKTHLSKIGNAFLRKALYLPAAVARRWCKPIKPWVSLLEERKLSDLAIRGAIMRKLLHIAFGVLKHQKPFDPSLVFMPKTV

SEQ ID NO: 51094 - protein, 344 aa, unidentified
MMTHFVGLDVSQKMTAICVVDNAGRRLWRGQCPTAPEQIAAMVRRHAGDDSRIGIETGAMTPWLVHELRALGLEVICLDARHARAALKMQINKTDQNDAEGLAQIVRTGWFRSVHVKSFDSHRARALLGARAQLVGMTTRLSNHIRGVLKTFGLLPGAMRGLRFDRKVEVLLEDRSDVAPIVRPMLVAWRQLREQISAFDKAIRVLVRSNSPCRLLMSVPGIGVLSALAYVSTVEDPARFSQSRSVGAHLGLTPRQYQSGDVDRSGRISKCGDTLARTLLYEAAVVIMTRVKKASELKDWALAIAKRSGIGKARVALARKLSVILHSVWRSGKPFRWAEPAITA

SEQ ID NO: 51095 - protein, 334 aa, unidentified
MIALHDEHGKAISESIVKTDAEALRNHFRGLSGTIHVALEVGTQSAWLYEILKPMATSITVCDIRNNKRRGNKSDRIDAHQLARWLRLGALKAVYQGDRNIRKLRDLAHGYLSTVSDSTRVMNRIKALYRSWSIPCGGRDVYYKRNRAEWLSKFPIRESEMRAGLYYAQLDLLKEHRKEVKKAFLKEARRYPIQKILRGIPGFGPIRSAFAIAVIGTPHRFRTERQLWSYSGLSVVIHSSSDHAIISDRIVRKQHKHNTRGLTRDFNRILKMVFKGAAIEAIRKDPMKILYGMKVSKGMRPEMAVLSIARRLAAITLILWKRGEKFDVAKLISN

SEQ ID NO: 51096 - protein, 410 aa, unidentified
MRYYLGVDWADQTHAVWVVNEHGTKTAARTVPHTAEGLSEWGRELDEWRAQGIELWAAIERREGRVVDFLLDHGVVVYPVNPKALDRARDRFRQSGAKSDPFDARVLADFLRTDHAHLQVLQPSSAAAQELKLLTEDYQQQIRQRTRLVNQLTATLKAYYPRALEIAALPTALAREFLQAYPTPEAVAALTERQWQRWARAHRLSEARTRALWDVLQQPQLPVPAHVLRAKARLMRSLVAQLTLVVAAVEEYREAIEDFFARMPAAQWARTLPIGKHGITAPTLWARLGDAPGRWESFRHLQAHAGAVPVTKRSGKLQRVIQFRFACDKALRYVIDHVAFLSLHSSVWARAYYDQQRARGHSHRQALRALAAKWLKIIFVMWQHQIPYDEQYHLATMTRQQLRHGQKQIA

SEQ ID NO: 51097 - protein, 433 aa, unidentified
MPTTHPYDLVIGLDRSDRKADLHLIDTRTGTVQKQTVATSPEALHDWLVQLRRDHPQARVAICLEQPAANLIVFLETYSWITLYPINPISLQKFREAFVTSRAKDDGKDAQYLAELLLSHPDKLKAWQPDDSQTRQLQQLVLHRRAVVDQRTGLTNRLKALLKQYFPQALDLCGEDLWRPLATAFLLKWPTLQSLKKARKESLKQFYYLQGSRSQTLIEQRLERIDKAVPLTDELALLQSYTLRVQLLCKELQLLLKTLQQFDQQIAKVFQQHTDRPIFEAFPGAGPVLAPRLLASMGSERERFAQPENLQSFSGVAPVTKQSGGKCSIHRRYLCPKFLKQSFHEYAKESILHSRWAAAYYGQQRNKGCGHHTAVRALAYKWQRIIWKCWQTRTIYKEAIYEAALKKNKSPLIGLLDQIELGKSPVKSRAKKS

SEQ ID NO: 51098 - protein, 409 aa, unidentified
MKMAGIDVHKKVLMVVVVDTSALQEKPARRRFVTLPSELQRFRIWLQEQGVEEAVMESTAQYWRSVWLELEPHMGLHLAQAFSNRAPRGRKHDFKDAERLVRRLMADELILSFVPNGEQRIWRSLTRMKVQLTRDRVRLQNQMECLLEEMRIKLSIVVSNLLGASGLRILHALAQGETDPKKLAELGDERLHCTEEQLVDALTGRVQPMHRGMLALQLQRLQLIDQQMAQLNHMIAQAMKSHQDAVIRLAEVPGLGVDSAQQIIAEVGAQASTFSSAAELAAWVGTCPGKEESAEQNQSSRSAKGNKYLRRMLNQAAHAAVAKKGCHFQVVFRHLMPRLGYKSAIWAVAHRLCRVVWKILHEGVRFIEQGREVGPREKKQRAQLLARALRKLGYEVTITPINQLAPKPV

SEQ ID NO: 51099 - protein, 359 aa, unidentified
MKIVGCDFHPSWQQVAVFDAETGEMAELKLMNGDGEAERFYQALEAPALIGMEACGNSQWLIDLLERLGHLVWVGDAAQIRASYVRRQKTDRRDAGHILRLLMEDRFPRLWTPTAEQRDLRQLLIHRHKLVEIRTRVKNGLQHLALNRGVQKQSRLWSVRGRAELEKLPLEGWTARRREDLLQLLAELDRHLNELDEAVSRAAEQHPQARLLMTQPGVGPITSLAFVLTIGDVNRFKHSGQVASYLGLIPREHSSGGKQRLGSISKQGNRFLRQLLVEAAQSACRLDEGFRKQYQARCHHKPKGVAKVATARKLVVRLYWMLRQNVGYPEIARIESRSRVPLTGRCQVVTLNERSRIQQ

SEQ ID NO: 51100 - protein, 417 aa, unidentified
MPPTEYVFYVGVDWGSERHQVCVLDAERRVCEERAVEHSGPGRAALAEWLGALAPGHPERIAVALEVPRGAIVDTLLSRGLHLFAVNPKQLDRFRDRHSIAGAKDDRRDAFVAAEALYTDRWAFRRLEPEHPLILQLREVTRLDQDLQQELTRLANRLRDQLLRYYPALLRLAPAANDPWLWTLLELAPTPAAGAQLPRARVVRLLQRHHIRRHTPEAVLAALRAPAVWLTPGTVEAAARHVALLLPRLQLVHAQRAQCTAEIDRLLAALSAAAPAPGPQREHRDVEILRSLPGVGRLVAATMLAEAAHLLAARAYHGLRAHAGIAPVTKQSGKYRGVQMRYDCNHWLQQAVYHWARVSAQCDPHSRAHYTALRERGHSHPRALRGIADRLLAILVALLKTGTLSDAARLRRRELAV

SEQ ID NO: 51101 - protein, 415 aa, unidentified
MKKVYDNCCGIDVHKKLMVACFIHGKEQEVREFGATTRELLELADWLAKGECQMIAMESTASYWKPLYNILESSGLNAMVVNARHMKAVPGRKTDVKDSEWIADLLQHGLLQPSYIPDRDQRELRELVSYRKSLIQDRTRELNRLQKMLEGANIKISGTITDIKGKSARSIIDTILSGTAIDSSKYDEMYNRKVIAHNLKASKEQIIDDLNGFMSPLQRKMMKELLKHVDELDVHIEHLNDDIDSHMKPEEKQAVDAIQQVTGLGTISAQAVISVIGTDMSRFPTDAHISSWAGLCPGDNESAKKRRTGKTRKGNYLLRTTLIVCAHSAAKVKNSYFRAQFQRINAHRGSKKAYVAVAHSMLIAIYHMLKDGVAFQDLGADYYNQFNKERKINVYLKKLKALGWEMPKAMEAQPA

SEQ ID NO: 51102 - protein, 325 aa, unidentified
MTKHIIVRAGIDTGKRKLDVALDGSKEQLQVENAPDGHKLLLSWLRQHRVKRIGIEASGGYEQPVVAELRRKRFVVVVFQPAQVRAYAKFHSLRAKNDKIDAALIAACTTAVRTIHAAPDPRLLPFAEQLTMIDQLGEDIARLQNRIESCRNAQIKARWKEDIARLEKRKTAEFKALVASIRKQSDLARRLVLIHSIDGIGLPTAVAILVRLPEVGQITREQAVALAGLAPYDDDSGQHFGVRHIAGGRKRLRRAVYTASLAASFRWNLQLIELYQRLIAAGKGHKRALVACARKMIIFANTVVARGTPWGDKPPPLKAALAPAS

SEQ ID NO: 51103 - protein, 343 aa, unidentified
MMVIGIDAHKRTHTAVAADQAGRHLSTKTVGTTSKDHLTLLQWATEHGDDRLWAIEDCRHLSRRLERDLLAAGERVVRVPPKLMANARDAARTYGKSDPIDALAVARAALREPDLPVARLDGADREIRLLVDHREDLVAERTRIISRLRWHLHELDPAWRPPTKLDRTSAFDKIGAHVATFSGLVADLALRLVEHLRRLTVEIDELAAEITSRTTMLAPSLLAIPGCAALTAAKIIGETAGIDRFRSKDSFARHNGTAPLPVWSSNHARHRLSRTGNRQLNAAIHRIALTQARCHEDARALLARRKAGGDGGMEALRVLKRRLSDVVFRAMVADQSSLMNVAA

SEQ ID NO: 51104 - protein, 434 aa, unidentified
MEEVTDEPLYRERVCGIDIGKAQLYATIRVPSDSNPARRASETRSFATTKRGVLALADWLRSWQVPAVVMEATGDYWKGPFYRLEAGGFECVLADARQVKNLPGRPKRDPSDSSWLAQCFERGAVTACFVATPEFRVIRLHTRYRRDLIEERTREKNRTEKLLESAAIKISSVVTDLHGVTGRDIMDHLIAGERSPKVLAQLARRRARRKIAELEEALEGAEFFTGYHAGLLKTMLARIDQIDAEITRLSEVIEQLLAPWEEQLQQAESMPGWGRRSAQDVLAETGPDMTKFPTGGHLVSWAGRAPLDHQSGKRQGRSRHKKGNKYVAAATGETAISAGKTGTREGARYRKLARSRGKAKACVALGNTQLKVYHKLLSNPGMRYHDLGPDYYQRRAQTRRKITYHVRELEELGLEVTLCRPGPAQDDPEPTRAA

SEQ ID NO: 51105 - protein, 342 aa, unidentified
MAIAIVGLDLAKHVFQVHAVDETGRAVLRRQLRRAGVEAFFKTLPPCVVGMEACASAHYWARRISALGHEVRLIAPAKVKPYVQRGKKNDANDAAAIVEALMRPHMVFVPIKNEEQQAVLMLHRTRDLLVRQRTMLVNAIRAHLAEFGIVAAQGRRKVKDLITGLDNTEIPELARLALWQIADQIDECDNHIDTLERRILAWHKSDEASCNLATIPGIGPITASAIAATVPDPSAFRNGRQLAAWLGLVPRQNSSGGKDRLSGITKTGNTYIRRLLVIGATSVIRFARSKAPGTAEWLKKLLERKSARLASVALANKMARIAWSVLTRGEVYRDIHPVPKPT

SEQ ID NO: 51106 - protein, 368 aa, unidentified
MEYPKSISKGGRKMRFYVKQHTYYCGVDLHARSLYVCIIDQSGEIVKHKNIDATPEAFLGIIERYREDIVVAAECMFTWYWLADLCRKEGIPFVLGHALYMKAIHGGKAKNDRIDAHKIAALLRGGMIPMAYVYPSEMRATRDLLRRRNHLMRKRADLLAHIQNTNHQYNLPRFKKVISYKRNREGIVEQFCDPCVQKSIEVNLSLIEQYDQLLGKLEYYIDKKAKVHDPESLFRLRSIPGIGHTLALIILYEIHDIQRFPRVQDFVSYSRLVKPAKESAGKHYGHSGAKIGNAHLKWAFSEAAVIMLRESADIKKYKMKLQRKHGKAKALTILAHKIGRAVYYMLKRKEVFNTDRFLNKQMIQTGRA

SEQ ID NO: 51107 - protein, 352 aa, unidentified
MDTSRDTIVVGILRPGEEIPAVDRVFNDEASVRRLIGRFADRSVLSACYEAGPGGYELHRLLTSMGVACEVVAPSLVPKGGSERVKTDKRDAIRLARLHRAGELTAIHIPTPDQEAVRDLVRVRGDLLADRKRAQVRITAMLMRHGRVWRAGAKWTATHRAWLGAQSFGEPALAATFAHYRAALETRETELGAIESELAGWACGGSLAPAVARLGCYRGVAALTALTLASEVIDWRRFPTARAFMGFTGLVPSEYSSGERTRRGHITKAGSEQIRTALIESAWSYRFRPAIGVTLRRRQDGAQPDTLAASWKAQRRLHGKYQQMTARGKPAAVAIVAVARELAGFLHAEMTR

SEQ ID NO: 51108 - protein, 411 aa, unidentified
MEVLHPRCAGLDVHKETVVACVRIASGGEVSRAVRTFETTTTRLIELAEWLEANGCTHAAMEATGVYWKPVWQVLAAGGFELVLANAAHVKNVPGRKTDVNDATWLAELLAHGLIRASFVPGPEIQELRGLLRTRKQLVREKASHVQRLQKTLEEANIKLESVLSDVMGRSGRAMIQALIAGETDPAKLAALAHPKVRAPQARLREALRGRVKRHHRFLLDLHLQQIDALDAGIAAIDREVDAGLASFRDAVKQLSTIPGVSQLSAQVILSEIGIDMSRFATAAHLRSWAGLCPRNDESAGKRRSTRLRTGAPWLKATLVQCGWAAARTKATYLNAQFVRLRTRRGPKKAVCAVAASILTAAYHMLKDGTFYQDLGATHFDRRRPEAQARRLVKRLAELGFCVELNSPVAA

SEQ ID NO: 51109 - protein, 394 aa, unidentified
MGKMYVGIDIAKDKSSACGIEDGGRSLFELTFDMDGAGFAALLKTIEANGGTPGNVVAAMESTACYHINLYSFLSAKGIEAVIINPLLIANFAKLSLRRTKTDKKDAKTIAQFILAHKDSVTQLAISQDTQDMRDMARERESLCHQISAAKVEIQRVLQTTFPELAAMTNPLTKVMLHFIQRFPSARLVSIAKPSSIEKTLKEKPCSCRLRFTVKDLIEAARTSIATVSPAKELILSGKIETLVHLQKRRDELTKALTKYCESTIVEDLRIVTSINGINNTMATTLLAEIGQISNYLSHKHLIAFAGIDPTVYQSGKYEGASRISKRGNRHLRRIIWLMAISVIQHNPVFRNYFLKRRNEGQPFKKAVFATAHKLMRVIFAMLSKKTSFVAECV

SEQ ID NO: 51110 - protein, 341 aa, unidentified
MQVTTIGIDLAKNVFQVHGVDANERVVFNKPLRRSQVLPFFAKLAPCLIGMEACASAHYWARELKKLGHNVRLMPAKDVMAYVKRGKNDAIDAAAGCEAVRRPTVRTVPVKTPEQQARLMQHRVRDLLIRQRTQAINALRSHLAELGIVAAQGYEGLRVLLAIVADASDTRLPEDARASLSALVAQIASCQAEIGTIDKRLLAQHRKNVDSKRLETIPGIGVLGASAIVATVPDATIFKKGRHFAAWIGIVSREDSTGGKQRLGPISKQGDRYLRRILIVGAFAVLRRARAHPEKYPWVTQLLARKPAKVVAVAIANKTARIAWAVLTKKEIYRVQTNAAA

SEQ ID NO: 51111 - protein, 466 aa, unidentified
MEPFYMGIDVSKGYADFMIINSKKHPVVKGFQLDDTFDGHRSLYNTLGRFLADHSDSTLFTGMESTGGYENNWYNSLIEFQGSLNIQTARLNPLGVMHNSKADLKKNKTDKISAQNIAEYLIAHPEKAVYQQHDQLAGLRKQWSFTKMLIKQSTQFLNQLNTLLYTANPELLSYCQGGVPGWVLNLLVKYPGATRLKKAHAKTVAKIPYVSPKLAQQLIANAKHSVASATDHTTEKLIEATARQLLHLKKTIAEQTNRMVNECAVPEIELLKTFPGINDSSAIGLLIEIQTIKRFADTKKLASFFGVHPVYKISGDGAGGFKMSKQGRKEPRQILYMVALSAIRCNPLIREIYERHQRQGKHNMAAMGVCMHKILRILYGMLKHNRPFNPQIDIANRKRSARIKKETPVKNTNRRFQEYDLKAPVTRRQKKKRLERERSQSVGNTKFGITAPVPLGDVIAKILPPL

SEQ ID NO: 51112 - protein, 450 aa, unidentified
MMRLVYKRCAGIDVHKKMVMVCRVRIDEQGEWEQEVRSFGTMTCELLLLMDWLLAWGVTHVAMESTGEYWKPVYNLLEGQVEVLLVNAQHVKHVPGRKTAPNGHPKDAEWLAELLVHGLLKASFVPAKPQRNLRDLTRYRVNLVEERARTIQRLQKVLENANIKLASVATDVLGVSGRRMLEALVAGKADAAVMAELAKGKLRNKLSDLEKALTGIVEAHHRFLLAQHLAHIDFLDEQIETVGQQIERQVEAMPSLPSPPTTGVGAGTSDTSSQRAPVPPLMPLTWQEAIALLDSAPGVDHKLAEQVLAEMGINMRQFPTANHFAAWAGLAPGNRQSGGKRFATRLSDGNQHLRTILTQGAWAAVRTKGTYLSALYHRLAARRGKKRAIIAVAHSLGISFYHMLAKRQPYQDLGADYFDQRSKGVRTDWLLKQLFKLGYSAHLEPVAHHA

SEQ ID NO: 51113 - protein, 351 aa, unidentified
MRKIAYLAMDVHSKHCVLGDMDFRGNFRGTQTFPTSEQNIIKALKAIKATEKYLTLEEGNLAYWVAQVAAPYVAEVIPCDPKENALIYRGSKKNDKVDTQKLCRLLRLGELKRVYHPEDDDRAIFKAAAQHYIDLRDQQIALKQKIKAMYRHWGVIDVSGEAVYSTAKRGDYLCQIKHLEIKNQINRLYFVMDQTESMQEKALKAMKQLGRKYPEIKQFKKLPGIGDILAHFFDAFIQTPHRFANKSRVWRYCRLGVTDRSSDGKPLGFKRLDRSGVSELKSLSYRAWMSALRSDNEVKRFYLNSLQRTFSRVHARLNTQRKIIATMYGMWKRGEPYNPELFLDSPQSGVV

SEQ ID NO: 51114 - protein, 366 aa, unidentified
MKKISTVQVFGNEILKEQQLTIGVDLGDRCSFYCVLDEAGKIILEQKVSTTPEAIKQTFGKIPRSLMALETGTHSPWVSRLLTELGHEVIVAHAQKVELITKSNRKDDRHDARTLARLARIDPELLGPVRHRSAQAQIHLTVIRARAELVSARTALVNAARGLVKSYGQRLPKCGTQQVSRELAAGLHAELREVLEPLLKEVESLNERIQEYDVRMEKIAKESYPHVELLKQVKGVGTQIALTYVLTLDDPHRFPKSREVGCFLGLCPGRRDSGESQPQMNISKEGDRYLRTMLVQGAHYILGPFGEDSDLRRWGLKLAARGGKSAKKRAVVAVARKLAVLLHRLWVSGEVYEPLRNSQKAMRAAA

SEQ ID NO: 51115 - protein, 343 aa, unidentified
MEHYAGIDVSFESASVCVVDGTGRIVREAKVPSEPEALATWLVGLGLELARTGLEAGPLSQWLYAGLRQAGLPVELLETRHVRDAFKAMPVKTDRKDARGIAQLLRLGWFRPVHCKSLPAQEVRALLTSRKLLQTKHHDIEMSLRGILRGFGLKVGKTTPRTFEHRVRELVADHPTLLAIAVAMLAARTALGEQLGRLEKQVRAVARGDQRVRRLMSAPGVGAIVALTFVAAIDDPARFRSSKAVGAHFGLTPKKYQSGETDVTGRISKIGDAGVRTALYEAANVILTRPVKGSLLKSWAARLAARAGMRKAKVALARKLAVVLHRMLADGTTFVAEMSASRA

SEQ ID NO: 51116 - protein, 339 aa, unidentified
MKITTIGIDLAKQSYSVHGVDALGKVALRKTLSRTKLLELMAQLEPCLVGMEACGGAHDMARRLMAMGHTVRLMAAKFVHPYRKSQKNDGNDAEAICEAVGRPSMRFVPVKSIEQQSLLTVHRVRGELVQARTALINQLRGLLLEFGVAMPKGRYQFRAHVGRWLIDERIPSLAREVLSELNARIGSLDHDILGYDRRLEAIARASEPVQRIMAIGGVGPISATAMVASIADAKLFRNGRELAAWLGLVPRQYSTGGKPRLGRITKRGDVYLRTLLVHGARAALTMMARRNDRLAQWARALIARRGFKKACVALAAKNARTIWALLAKGEAYRKPEARA

SEQ ID NO: 51117 - protein, 345 aa, unidentified
MPIVGGLDIHRKQITFDYLDTATGEVRRGQIAPADRAHLRAWLARFAGRDDVAFALEGCTGWRYVAEELAAAGVTAHVAEPADTAFARGRKRHAKTDKTDSRHLRVLLEQGRLPECWIPPAQILECRALLEAYHDLRREHTAWIERIHAVFFHQGAPRLGEGALRTEHGLAALRQAAAIHLSPAGQLQVATALDMLAAIEARMDTLRQQLLHAARHLAGARALQARLYGVGPLAGLAMTCWLGGAGRFSSSRKAVRFAGLDVTVYSSDGKRSPGHLSRQGPEILRWVAYEAGKTHGRASAPGHDYYAAVKDRTDGKIAALAQARKLIRQACHILAELGDDALTAV

SEQ ID NO: 51118 - protein, 351 aa, unidentified
MMIIGVDYHPSFQAIAFLIEETGECGEQELNHSDGQAEKFYRDLKQQGICVRVGMEATGYSRWFERLLAELGFELWIGDPAEIKAKRVKKQKFDREDARLLRRLMLENNFPQIWVPSPENRDLRQLLWHRHRLVQMRTRIMNQLQALAMNEGYRWKKKLFSEQGRAQLEKLVLAPWASRRRQELLELLDRLNPTIEELTAAAEREARKRPEVLRLMSHPGVGPLTALAYVLIIGTPERFDCGKQIGTYVGMIPSEDSSAGKQRLGHISKQGNSLLRFLLVEAAQAAARINPEWRRRYTHLAMRRHKSIAKVAMGRKLGVRLYWMWRNGCEYSQSLEFGSYVGQLGTGHGVK

SEQ ID NO: 51119 - protein, 468 aa, unidentified
MQTAKKLWQNRKEKKELTRRLQSEDPGLEVVHPHAAGIDVGNSAHYVAVRPDRDPQPVRRFECFTADLYRLADWLKSCGVNTVAMQSTGVYWVPLYDILEERGFEVYLVNARHTKNLPGRKSDVQESQWLLKLHTYGLLNNSFHPPSAIRTLRTYWRQRAVHVEGAATCILRMQKALTQMNLQLANVISDLSGVTGQKIVRAILAGERDPHQLAKLRDARIQASPAEIAKSLEGNWRPELVFVLQQEVDLYDAYQQRIAECDQQMQKHLATFADNSNTDQPPAPKGEIKKKKKKLTQNAPAFDLSHELERISGVDLTRIDGIEVMVAQTVLSEVGLDMGRWKTEAHFSSWLGLCPDNRISGDRVLRRGTRRVINRAATALRMAATTLIRSQSYLGAQYRRLRTKLGAPKAITAMAHRLARLVYRLLKYGQTYVDKGAAYYEQRNRQKQIQFLRKKAEQLGLRVTLTQA

SEQ ID NO: 51120 - protein, 341 aa, unidentified
MAVAGGLDLHRGQLTFDYVDTGTGESWRGRICPADRESLRGWLRRFHGVPDVEFAVEGCTGWRYVAEELQRAGITPHLAEPAGTAGLRGRKRRAKTDWADARHLRDLLLDGRIPESWIPPGHVLEARALVRLYKDLLEERTSWQQRVHATLFHQGIPVVPKLGTADGQQRLDAAELSAAGRRAVQAGLRQIERLTQEMASLRRELARLSSRQPGCRALRRAHYGIGGLLSVAVWAELGDCRRFSSSDDAVRHTGLDITVYDSDGRRARGHIARQGPPVLRWALYEAALYASRPASPDYAYYCGVRDRIDGQRALLSVARKLARRCYHTLRDLGEDALAPAA

SEQ ID NO: 51121 - protein, 344 aa, unidentified
MGEVITIGLDIAKSVFQVHGVDEAGAVVIRKRISRAKMLEFFGKLKPCLVGIEACPAAHHWGRELQALGHTVKLMPPRYVKAYLKRSKNDANDAAAICEAVTRPTMRFVAIKTKEQQAALMLHRARQLLVRQRTMLSNAIRGHLAELGIVSAKGRNGIGALLEIIADAEDSRVPPVARGILNVLARQYSALGAEIGSIDRGILAWHRSCEASRRLEEIPGIGPIAATALVAEIGDWKAFGSGRSLAAWIGLVPKQQSTGGKDKLGSITKQGNRYLRWLLVTGAMAVIRHAQKHGTLRRPWLGRLMARRPTEVAAVALANKIARMAWAIIVHGDRYKEPRPLLAA

SEQ ID NO: 51122 - protein, 494 aa, unidentified
MKKRSHRKGTPSQSQRPHKELPKPALTVVNPNAAGIDVGSTSHYVAVPPNAVPADESAVREFGAFTADLDQLVEWVKACGVTTVAMESTGVYWIPAFQKLETAGIEVVLVNAKRVKHVPGRKTDVADCQWLQQLHTFGLLSGSFRPDDLVCQLRTLMRHRGNLVSEAASCIHRMQKACQEINLHLHHAVSDITGETGLRILRAILAGQRDPAELVKLRDPQITKSTEEEMKKALEGDWRAEHLFVLQQNLDAWEFWHEQMARCDRQVEQVLQKFPTGQPPAADPLYPEIKPEVIPAIDVEAGSKPAAAGLKKKTRQSRKQNDPILDLVPELTRLCGFNLCDAAGFRVLSVLSLISEVGLDMSRWRDDKAFSSWLGVCPNNKISGGRVLSRSTRRVVHRAATTLRLAARGVSNTDSWLGHFYRRMKARLGPAGAITATAHKLACIVYHLLKYKTPYVEIKASAYVERIAKARLGKLKKQAEALGFQLVKMEAPTK

SEQ ID NO: 51123 - protein, 310 aa, unidentified
MSTEYFVGIDVSKDTLDVCVYPTQELFRVPNSTQGLDELIKRLKPIGPRLIVCEATGGYETLAVGSLAAAGLPVVVVNPRQIRDFAKSIGQLAKTDGIDAGVIARFASAVRPELRPVKDSASQELSGLVTRRRQIVEMIVAETNRLKAATRRNRRDIQTHIGWLQKRLKQIDDEIKREIKNGPLWRTTDQILQSTPGVGPATSAMLISCVPELGQLDRKKIACLIGLAPLNRDSGRYKGRRTIWGGRGQVRSVLYMSALAAIQYNPVIKQFYQRLRDAGKCFKVAIVACMRKLLIILNTMVRNQTKWRSC

SEQ ID NO: 51124 - protein, 431 aa, unidentified
MKVTRGMQRRTAKLARRAALVGSDTLIAGIDLAKRESVVVFIRAKDKARLGKLRIPTTREGVAELERRGCLMMEREGLTRLVLGMEPTDHYWKVVCRAGERLGIGYAIVQSFVVARARELDDLTRDKTDHRDAALIADLVADLRFTDVRLESGAWLALRSYADARARYRVERASALQEQRSLLELAWPELLRVVLDLRGCHLQAALRLGLTPSEIARIPLHRFTSRLRIKQRAHRFSPEMSRRIWEAARAAREEPEAVSAALRWQLAGERAQAAELAISRLDVRMREAFAATGLDWMRGQIRGLGEILLTNLLAFSGDPRRLDDAACMLKLAGSNPTERSSGEQVAAGGIHRRGRPSLRLLAFQAATCLLRHNPEFQIRYRALVDRARHPLSPKQAQLAVANKLLRVLWSMAVSGRPYDSQLAAGGLRQAA

SEQ ID NO: 51125 - protein, 358 aa, unidentified
MPKKKTTKKVARKYAQTIGIDLGDLWSHYCILDEAGEIAEEGRFRTTEAALRKHFGDVDRARIAMEAGTHSIWISEQLRQYGHEVLVAHVSELRAISRSDRKCDRVDAEKLARYARLDPGLLRPISHRSVAMQESLTLVRARDVLVRARIGLINAIRGLAKPCGYRLPKSATSCFSERCLPSVPIGLLPALKPLFEQVQSIHEQIKAFDKLILKMAKEQYPETKALSQVNGVGTLTALTYVLTVADKHRFLHSRDVGCYLGLRPKRSQSGEHDPQLGITKAGNSYLRTLLTECANYIVGPFGQDTALQRWGRHLASRGGKNARARAVTAVARKLAILLHRLWVTQAEYIPFPERQRAA

SEQ ID NO: 51126 - protein, 343 aa, unidentified
MTKVTTVGLDLAKSVFQVHAADRDGRPVVRKKLRRGQIHGFFAGLSPCLIGLEACASAHYWARELQALGHKVRLIPPQYVKPFVKRNKNDAADAEAICEALARPTMRFAAVKSAEQQAVLTLHRARELLVRQRTMLINALRGHCGEFGIVVAQGASKVTALIEMIEYPEDERFPALARVALGPLVEQLRMAQIQILDLEKKLMAWHRTNEASRRLEAIPGVGVITATALVATIGDESQFHSGRQLAAWLGLVPRQHSSGGKERLGRISKRGDGYIRRLLVHGARADLRWSKHRKERRSIWQESLLARRPTNVVLVAMANKTARVVWAMLSRGEPFRSEARIAA

SEQ ID NO: 51127 - protein, 500 aa, unidentified
MAKATALEAINSPSCGLDIHKEFIEACVIDEEGEKHQKVFDTMRKTLYALRDWIVSKNCLHVLMESTSVYWIPIYEILEEVKGMDVGVGNARNMKQVPGRPVTDKEDASWIARLCMLGLVLKSFVVGRKFRELREYTRYHKKLVQERARQVNRIEKLLQMNGFKLSSVLSDITGASGMRLLRKLRDKGSVTLQEVQESLHGKVKKTAAEVESAINGQMKPTSRILLGKMITRLETCDKEIIEIYELMVENSQEHRLHINLLESIPGIGELSAIYLLAEMSTEFTSFKTANHMTSWAGLSPKANESGGKLKSSKTKKASIYVKSVLIECAWAATRTRNTRLSNWYWSSVKRLGERKAITAVARKLLVYIYAMVKSGELYNDSLDVADTEKRKALKLVPARKTVEHRTTQTHHGDQRQGRLVAAASISQATTEPQTPSKTADTPAPPKKRGRPRKLVEENNQSENRVVPVNTVEASVVLKKRGRGRPRKVAEIVQQAENQKA

SEQ ID NO: 51128 - protein, 413 aa, unidentified
MQTLVERGCGLDVHQATVVACLLIVRKDGKVQKQMRTFGTTTRELLSLREWLLSEGCTHVAMESTGVYWKPVYAILEGGEGGLEIVVANAQHVKKVPGRKTDVKDAEWIADLLCHGLLRSSFVPPKPIRELRDLTRYRRKLVESQSAERNRLLKLLETANIKLASVATDVFGVSGRLMLEALVEGKATPQEMAELAKGRLRQKIDELGPALEGKLEEHHRFLLRLQLDRLEAAEKDLAVLEHRLQEKLKPYEAQLTLLDEIPGVDWTLAAVIIAELGVDMSVFGSVSQLASWAGVCPGNNESAGKRKSSRIPKGNVYLKTALVEAANAAAKAKGTYLWDKFYRLKARRGYKRAAVAVAHKILVAIYHMFSHQVCYNELGDAYLDKRNKHHLTRNLVHRLERLGYTVTLEQKAA

SEQ ID NO: 51129 - protein, 337 aa, unidentified
MKRLSVGVDVSEKTLDVAYWDQDKGEAVFVGSFSNTSEGFQAIEREIEKQRNNIDSCVIHLVMEPSGGYEQPFAHFAHNQGWKVSLPNPLYPKRWAESRGKRAKTDPQDARNLAHFGFVNDPLPWKPLPPEVEQLNHILNRMNSLKKMLSQEKNRAHSAKYHVNGYEAVNDDMKEVIAFLEQRIQQLQKVIKEHLEAHPHLRKQRKLLLTVPGVGDKNVLYILVMMHRWGVLTDGEGGAKGLVAYLGLDPKPHESGTSVHKRARISRQGNRLLRGRLYMSALGGIKAKNSPLTAFYQRLVGRGKPKKLALVAASRKILVWSWAVFKSDTPFDTARFE

SEQ ID NO: 51130 - protein, 450 aa, unidentified
MSGTKTRCKRDISPTHLNAAAIDIGATMHVAAVGPDQASEPVRSFGTFTGDLHRLADWFTKCGVRTVAMESTGVYWIPVFEILDQRGFEVIVVNARDAKHVPGRKTDISDAQWLQRLHEYGLLRASFRLKGEVAVMRAYLRQRERLLDYAASHIQHMQKALTQMNLQLHHVVTDITGVTGMAIIRAIVAGERDPIVLASYRDPRCHASAETIRQALVGNDREEHIFVLTQALELYDVYQAKVALCDVRIEAVLKRLRKASSTPVGKPPTVRTTQKQSNDPAFDVRAALYGLLGCDVTQIHGLGPYLTLKLVGECGTNLSAWPSAKHFTSWLCLSPSNKISGGKVLSSRTRRSGSRAAALLRLAAVAVGRTQTALGAFYRRLSARVGKAKAVTATARKIAVLFYNTLRHGMEYSDPGASHYEENYRRRILTNLQRRAKSLGYVLQPAPTPA

SEQ ID NO: 51131 - protein, 342 aa, unidentified
MSGSQSTGSYSLFVGVDIAAPTATVSWMRPGEKACRPVTIEQTADGYAGLERKLRATGHMPDHVLVAMEATGSYWITLATQLVHAGFQVSVINPAQAHHFAKALLKRAKTDAIDAQTLAQLALLLQPTPWTPPPQIYYELQQRLAQRDAVLDLQQQVRNQLHALDQLPEVIETVRQRYEQLLSTFAAQLATVEAEITEAWQHDEVWALAAQRLQSIKGIGWVTAAWTLVTTLNFTACDTVESLTAYAGLAPMPRQSGTSVWHRPSIGHTGNGRLRTAFYMATLSAAQHNPMIKAFYTRLRAAGKPEKVARCAAARKLLHIAWAVVTKDQWFDPSYARQMQRT

SEQ ID NO: 51132 - protein, 354 aa, unidentified
MIHVGIDLHTRNMVNVAINDNAEMVRQAKMPACPNSLDTFFGKFQEPVQAVVECTSSWYWLSDWFRDHQIPLKLAHAKMVKAISYAKVKTDKVDAKTLAELLRVGLIPEAYQIRADQRELRELTRGRLRMIQRRGKLQSSLWNLGIKYNVRIGEDMGWRYPSQLLEWLRPQLPASARLQSELMIEELVGLQGHIHVLEKAIEQMGDFTRQLELIAPIPGMGMVNSWTILAEIGDIQRFPTDKQFVSYCRLVPGSKDSGGTRRHKSGCKDGNKYLRMAFGQAAVSGYTHYGPVKKFYNKIKRRSGKNVARAVVAKEMAKIVWHVLARNEPYKGFKGQPTRVAQQGYWPQPINPSA

SEQ ID NO: 51133 - protein, 340 aa, unidentified
MKLYGAIDLHSTNNVTVVIDEQDRVVYQKRLANDLALILMELCVYQTELQGIVVESTYNWYWLVDGLMEQGYKVHLANTAAIQQYEGLKYTDDHSDARWLAHLLRLGVLPEGYIYPRADRPVRDLLRKRSQLVRQRTTNLLSIQNLVTRNTAESLSANQIKGLDVRQVDELLPNGDLALAVKANLSVMCSADEQTEILERTVTQRVKLSPQFSFLKTVPGIGQILALTIMLETGDIRRFSSVGNFASYCRCVGSQKVSNGKKKGKGNTKNGNKYLAWAFVEAANFAIRFNSKIKSFYQRKKAKTKGVVAIKAVAHKMCRACYYIMRDRVAFDVTKAFGQK

SEQ ID NO: 51134 - protein, 345 aa, unidentified
MEHYAGIDVSLESVSVCVVDANGRIVREAKVASEPEVLIGWFDGLGIVVARIGLEAGPLSQWLYAGMRDVGLPVELLETRHVRAAFKTMPVKTDRKDARGIAQLMRLGWFRPVHCKSLPAQEVRALLAARKVLQTKNHDIEMSLRGVLRGFGLKVGPTTPRTFATRIRELVAGHTTLSTIAEALLAARGTLFEQWQKLEKRVRSLARQDRRVRLLMTAPGVGPIVGLTYASAIDDPGRFRSSKAVGAHFGLTPKKYQSGETDVTGRISKIGDAGVRTALYEAANVILTRPVKGSTLKSWGMRLASRAGMRKAKVALARKLAVVLHRMLTDDTTFLADKAATAVAR

SEQ ID NO: 51135 - protein, 350 aa, unidentified
MVVVGADVHKRTHTFVAVDEVGRKLGEKVVAATTSGHAEAVMWARERFGTQVLWGIEDCRHLSARLERDLLTAGQQVVRVTPKLMAQTRASARTRGKSDPIDALAVARAVLREPDLPVASHDEVSRELKLLVDRREVLVAQRTSTINRLLWRVHELDPERAPKPRSLDLAKHRNLLGDWLATQSGIVAELARDELADVTRLTETINALAKRIGERVRQVAPALLALPGCGELTAAKLVGEAAGVTRFKSEAAFARHAGVAPIPVWSGNTAGRVRMTRSGNRQLNAALHRIAVTQIRLDGLGQAYYRTRLDAGASTSEALRSLKRRLARVVFGHLHTDHQTRNQPCQPAAA

SEQ ID NO: 51136 - protein, 418 aa, unidentified
MNVKARRTKKQVNVENQAINLLSKEELNKKIEVVEKELRSYTWRELEANGKFAKNDKLSFITDDMLIVGCDIGSENHYIRAIDVRGRELSRGAFEFSNTSEVFENAKAWVLALAAKHDKKQIVLGLESTGHYWFALAAWMISNGISVVQVNPYAVKQSKEIEDNSQLKDDRKDPKLIANLVKDGNYGMPYLPEKVYADMRRLSMFRDQLTEDRIRNINRLHRELKIYFPEYMDAFGKIDGAFTLEVLKVSAIPSDITALGAEGIKNIWHNEKLRGRGYSRANEIVSYAEKSVGLTDGIDAGREAVKWYAEQILKLVACSSGKHKGQTKISHRGRKRLRYWLFQAAKSAVSHADEFKQLHEYYTTRTNNPLKKMQSLVVIACKILRVIYTILKTGTTYDPQKLLEDIKRPTASQTPMAA

SEQ ID NO: 51137 - protein, 346 aa, unidentified
MMIIGCDFHPSWEQVAWLDTETGETGERRLVHADGDAERFYRQLPTPVLIGMEATGNSHWLVDLVSELGHELWVGDAAQIRASYVRQQKTDKRDAAHILKLLVEGRFPRIWMASSEVRDLRQLLVHRYKLVIIRARVKNELQHLCLNKGVQRQRKLWTKAGQQVLRELPLKPWAGRRREDLLGLMAMLDQQIKPLDEAVKAEAQRDKMALLLQTQPGVGPITALAYVLTMGDVGRFPRGKQVASYLGLIPREHSSGGRQHLGAISKQGNRMLRMLLVEAATTAVRLDPGFRKEYLHRCHRKPKAVAKVAAARKLAVRLYWMLRTNVAYPEVVRIESSPRVRLVGEH

SEQ ID NO: 51138 - protein, 402 aa, unidentified
MTYDYVIGMDACKYFHHACVLDIDGTQVLSKRINQNEQSLRALFSAFSAYDHKVLVVVDQPNNIGRLTVAVAQDIGIDVRYLPGLAMRQLSRIHAGNAKTDIRDAYIIAHAAKNLPESLRSVDRVEEAFLQLKVLNGIDEDLARSYTRLINHIRSALVGCYPQFEQALRGQIIHRKWVLHLLARYGGPTKIKRLGKAKAAAFARRYKARNPEPVLDAIFAAISEQTVTIAGAHYAEMGVAMSAKDALLKLEHRQQIEKEVIELINDIPHTQFLLSMPGIGPKTAAQILMTAGDMSDFPSAGHLASYAGLSPRTNQSGTSIMSNSLNRAGNKKLKNALWQSSFASIRFHERSRQFYERKRREGKRHNAAVVALARRRLNVLYAMMRNHEHYHDPAPSQEDLAA

SEQ ID NO: 51139 - protein, 288 aa, unidentified
MLGLDVGKSSHWACLIDRDGEVLASAPVRNREAELDALFASAPAGTLVVVDQFRNIGSLAVRRARAAGLGVAYLPGLAASRAAGLFAGEAKTDERDAAVIARTALGVLDSLSGVPGRGEALEAARALSSQRDHVVACATRDKNRLRAVLLESCPALEAAVDLSDRRWLELLTVPGIGPRTAAQLAVSVDIGRFPDHDHLASYCGIAPRVRSSGTSVRSVRASRRGDARLKSLLIFSCNSLVRSSGRYGEYYRACRARGMGHGRALKAVARKRLRAIYAVMRDRVPYRE

SEQ ID NO: 51140 - protein, 395 aa, unidentified
MFIVGIDVAKRSHEVCMITSDGQTVQRPFSIRNNCTGYNLMLEKIRKHTNIKSQIVFAMESTAHYWLALFTRLRKDGYHVILLNPIQTSAMRDMFIRKIKTDAKDSFIIAELIRFGRYAESNVAQDRLLALKELCRNRFYLVDMAGDLKRKLIALIDRVFPEYEAQFDTIFCKSSVALLKKYPTPQKLSNAHLDKLTELLWNSSNGHFGEWKARELRELARNSFGVEDCDGAYSTLILLMLDQIQSLSGKADALEKEIFRLFQSFDTTVTTIPGVGPIIGAVILSEVGDISRFSSADKLAAYIGVDPSVNQSGEFQAAHAHMSKRGSPYLRRCIWMASQVAVQRDPMFRAYYEKKAAEGLKYMTIIGHVTRKMTAVVFAILRDHKVYEPVLPTAA

SEQ ID NO: 51141 - protein, 350 aa, unidentified
MLIIGCDYHPSFQQIAFVDTSSGELSERRLFHREEAEQFYGKLKEQSVPVRVGMEASGHARWFERMLRDLQFELWIGNAAEIRAKRVRRQKTDRQDAQLLLRLLMEDRFPRIWVADAENRDLRQLLWHRHRLVQMRTRVMNQLHVVALNEGLRRKKALWRQAGRQELESLALAPWANRRRQDLLDLLDQLTPKIQQLTQALEEEVEKRPVTRRLMTHPGVGPLTALAFELVIGTPERFHCGKQIASYVGLVPSEESSGNRRQLGHISKQGNALLRYLLVEAAQVTIRTQAQWRSRFFHLAMRRGRKIAKVAMARKLAVHLYWMWRQGCDYGHLQKLGSHAGEPGNPYGVR

SEQ ID NO: 51142 - protein, 361 aa, unidentified
MKRITIGLDIAKSVFQVHGEDSSGKIVLQKRLRRSQVLAFFAGLEPALIGIEACGSAHYWGRELRALGHDVRLIPAAYVKPFVRRNKIGARDAAAICMAVGRPDMRFVAIKSVESQASRGLERSRELLVRQHTQLMNSVRSQLAELGIVAAPGRRGFAELSQLVAVSDERIPAMLLSVLSLMLQQIDQLRVASAAIEAKIMAVAKADPAMRRLATIPGIGGLTAHAIVTAIGDGKQFASSRDFAAWCGLTPRGASSGLKRRQGGISRQGDIRLRKLLALGASTIIRSARSRADRATQWQRGILARRPVKVAVLAQAAKTARIAWAVLTAGTTYRQPAAAAYTQPVWRGARAVKPAGRRLRR

SEQ ID NO: 51143 - protein, 359 aa, unidentified
MDKITRVGVDLAKNVMQIHAVGVNERVVTRKAISREHFVSWFARIEPCLVAMEACSTAHYWARRLRALGHEVRLIPPQFAAPYRKGGTQVKNDALDAEAICEAASRPHMRFVPIKSSAQQSVLVLHRMRTGFVEERTALVNRMRGLLGEFGVFVPQGIEQLRKHFIERIEDGTSELDGPARQALMRGWAQWQTLDAEIAWLERQIGEHAGHNPDAKRCMQMCGVGPLTASAAVATIVDARQFRNGRQMAAWLGTVPKQNSSGGKQRLGRITKQGSDYLRTLLFQGARSALLHAHRRNDRLSRWIVQLQARIGYYKALVAVANKHARILWAVLARGEKFDPSHQPVRAVEPIQQADTTQP

SEQ ID NO: 51144 - protein, 334 aa, unidentified
MDKPAVAGVEVSAEVLVLAFDNGQLRLSEFPNTAAGHQQMLRFLRKDCAQVRVCMESTGLYGLDAALALHQQPGIEIMVANPRSVRHFGCAMMQRSKTDPIDARLLAEYARRMPFQPWQPPSRKGRQLCALSRAIHQLTEMNAMQKNRLHAAGATDTTPKIVVRELERSLANQQRSIQRLTREARQLIASDPQLQKRFDLLLSFPGIAETSALQLLGELVLLSPDFNVRQWVAYAGLDPRQYSSGKSVEKKVRISKVGNRHLRRALFMPALVAVRRDPQFRTYYRQLLAQGKFKMVALVAAMRKLLHGIYGVFQSLQPFDAEKLFMLPIAAKIS

SEQ ID NO: 51145 - protein, 406 aa, unidentified
MNAVGIDVSKGKSTVTIRRPGDVVVMKPRDFKHTQSSINELISTIHALEGETKVCMEHTGRYYEPVASCLSEAGIFVSAVNPFLIKSFGNESIRAPKTDKADSVKIARFALDRWAKLPQYNHMDDTRNILKTMNRQFSYYMDQKTSMKNNLIGLLDQTFPGANAFFDSPVRSDGSQKWVDFVDTYWHVDCVRKKSLKSFSDHFQSWCKHKGYIYNADKAKFIYEKASDIIAVLPKNDATKNLIRQSVSLLNITSATIESLRQQMDQTAQLLPEYPVVMSMDGVGHSLGPQLMAEIGDVTRFTHRGALTAFAGVDPGKEESGQKIRKGVPTSKKGSPHLRKTLFLIVDGIFMRESYGNPVYEFMAKKRAEGKPYYVYMTAGANKFLRIYYGRVKEYLSSLETTDKQI

SEQ ID NO: 51146 - protein, 437 aa, unidentified
MTYVGVDWSDSFHIVYVTDETGDSLAAFKIEHTPEGVESLFLKVKEHAKDPASVLFALETPKGLLSSAILDAGFTLYPINPKAVDRYRDRYKVSGKKDDYFDAMVLANILRTDRQNHRALVPDSLLTRELRAYTEGYQALVKTQTRLTNQITSCLKNYYPVVLGIFGKIDQSITLNFLSKFPTPDSFHRGSKAKFENILKKNRYPGAKEKMLEIYALSKKPQFEIEEPIARANSLLLLSLVRQMKETLSSLKEFELKIAELLEQHPDKEVFSSLPGSGNITTAKLISNFGDNRERYGKVSCVQADAGTCPVTIGSGKSLRVSFRYSCRKPFRSMMTQFAFSSLQKSEWAKQRYDKYRQNNSKDHNLALRCLANAWLEIIFPMWRDRKPYDVEKHLIGVFKEQGIFSKDVKAPVFVSKPMIARNYRGSPPQVNLIGLT

SEQ ID NO: 51147 - protein, 458 aa, unidentified
MRTIGIELAVASAHKAIVIDDHGHYVTRLLTVSARAGDLDNLLARARQGAASPELQAVMEPTGMAWFPIATYLLRKEVTVYLVSGQQVKDFRRFLKKHAKSDRVDARILASLPQVNPDGIHRLRIPDAPTLACQRGCREMSRLSKQITAISNRLDAIDGFAWPGLRDLVFPDHLSPAARWFREHWYAPQQVLAAGAETIRQQWLDSKADPADSGDWALPLVELAQQVVLLYGTDALAVDYTGLQAEICRQQASLAALEDQHHTVRLKTVHPLYRQIHPSRNLETIRGVGQDSAAVYASLIGDPQRFATTELFRGWTGMVPNSKQSGSSESKGLHITKAGPNLIKKYAYLDADVARQWDPQIAAIYYDQMVHRGKHHVQAVCTCATHLLDRVFAVLRDNRPYECRDVDGSVVGSTEARRIVLQQYTVPEDVRKRTTKGTRRSTADQRAERAQLRGSSPQ

SEQ ID NO: 51148 - protein, 323 aa, unidentified
MSRFVGVDVAKNTFDVATHLPNGKHKTKAKLANDSKGFKEFEAWLQKQVEPSALIVMEATSIYHLELAEFIYNKGYRVCVVNPATTHAYADSELRRIKTDKSDAKLIADFAREKNEKLQLWAPEPLKYRQLKALVRRLDDLQEMERMERNRLDVSDEKVKASINSVLHHIEKEIAETHKAIKNHIDDDPDMREMRDLIVTIDGIGEKTIERLLAELGDLRKYDDPRKLVAAAGLNPKLHDSGKLKGRSTISKIGSVSVRAGLYMPGLVALQHNEAIKAMKDRLKANGKAPKQIICAAMRKLLHFVYGVLKSGQPYDPKIALAR

SEQ ID NO: 51149 - protein, 305 aa, unidentified
MTTYIGIDVSKLLLDIHHNGQAAQIPNTEKAIRAYLKSLPDDTMLVCESSGGYEATLITQAHAQRRPIARINARQVRDFAKAKGRLAKTDTLDARIITEFAQAFHPTPLCPADPLQIELSALVKLRSHILNQITQNNNLQETLSDKNILRILASTVAALKKQEVKIRNLIVATIKRSPSLTSNVNRLQEVQGFGLVTAFSLLSFMPELGTLSDTQAASLAGVAPFNHDSGQFRGQRHIRGGRSHLRSALYMAALVASRYNPILKPLYQRLLAAGKPKKLALTVLMRKLILLANRILKNPQFSLVS

SEQ ID NO: 51150 - protein, 327 aa, unidentified
MDQRILGIDVSKDTLDVVLWDERGWRHQVFANTPEGFVRLSHWLTKQEAGFVHACLEATGQYGEGVAEYLYAAGHAVSVVNPFRIKRYGESKLHRNKTDKADASLIAEFCLKENPPLWQPLPEHVKQLRQMVRRLDDLQRNYQQESNRLQSGVNNEWVVADLKDHLQELHMRIQALKAAIQQFVTETPELKHQVDLLVSIPGIGKLTAARLLAEIGDIHSFEDAPQLAAYAGLNPKGARSGSSVKKKTRISKEGRAFLRYILYMPALVARRCNPIIQAFCARLAQKKLPEMAIIAAAMRKLLHLVFGVLKNQQAFDPFFLQRKVFAS

SEQ ID NO: 51151 - protein, 343 aa, unidentified
MQTITTVGLDIAKSVFQVHCVDADGEVVLRRQLKRRYVLAFFQKLPPCLVGIEACASSHHWSRELQALGHTVRLMPPAYVKPYVKRHKNDAADAEAICEAVTRPNMRFVPTKTPEQQSCLMLHRTRHLFIRQQTAVINSIRAHLAEFGIVAPVGRNGMEQLLEVVADAKDTRLPEIARACVAALGTQLLALKAQILAFDRRIMAWHRSNETSKRLDEIPGVGPALATALVACIADPKAFRSGRDFSAWIGLVPKQNSSGGKEKLGSISKQGDRYLRSLFTAGALAVIRYAKIHGTKHRPWLTALLARRPTKVAAIALANKIARMVWAMMTRGERYKEPVALAA

SEQ ID NO: 51152 - protein, 358 aa, unidentified
MQRNKISFKGQKIFIGIDVHKRNWDVAIAPAVGNVKRHTQKASAKELFDFLKKHYPDGDYLAVYESGFSGYSTYYALKEVGIECMVIHAADVPTTQYEEVMKTDSIDSVKLVRSLKAGLLRGIYIREKENIDDRSVVRIRKTIQKQLAGYKTRVKHLLYCNGVSFPERFEKPRSHWSMAFIKWLKEDVTLLSSTRNSLDLLIRQVETIRMTLLEATKMVRSLSQTERYKSKFDLLMTVPGIGVTVSMCILTEVYDVRRFHNEKQFAAYLGLIPTSHSSGDKVAHGEKTFRGNKLLGPMIVEAAWISVFKDAGLASLYLHYKERMKPQEAIVRIARKLSNIIFAVLKNEKEYVPYQTGK

SEQ ID NO: 51153 - protein, 316 aa, unidentified
MDEILRFVGIDVSKDHLDVHVRPDDQQRRFEYDADGLTDLVKMQTELRPNLIVIEATGGYEQRVVATLAAQQLPVVVVNARRVRDFAKATGQLAKTDRLDAAVLSDFGEKLRPQLRTLPDESREELKALLVRRRQLVDMMTAEKNRQSTAPKRIRRHIQTHIDWLQKQLAEIDEDLAGTIQQSPMWKAKDEILQSTPGIGPTTSTTMLAALPELGSLNRHTIAALVGVAPMNQDSGKFRGRRAIQVGRHSVRTILFMSTLVATKHNPVIRAFYQRLLAAGKPKMVAITACMRKLLTILNAMLKTNSHWNSEHAKTC

SEQ ID NO: 51154 - protein, 384 aa, unidentified
MNKHSMIFIGLDTHKEFHEVAYCEEQRGATPVHYGRIPSSKVSVKKLLRHFESKYPGATLHVVYEAGPCGYWIYRLITSLGHCCYVVAPSLIPKKPGERIKTDRRDALKLVRSLKSEDLTPIYVPEPEDEAVRDLSRAREAAMKDLKEGKYQLKALLLRNNIRYEGTANWSKKHLRWLTELILPHPAQQIVLQEQLQTIEERIRRLERLDNELTHHVHQWRYYPVVKAIQAMRGVRLLVAVGMIAELGDLHRFDHPRKLMAYLGLVPSEQSSGGKRHLGAITKAGNGRARRLLIEGAHSYRYPANVSTEMQLRQEGLPKDIVDIAWKAQLRLCKRYQRMSKKSKHYNLIITAIAREMAAYIWAIAKEVVLTPVNPKLRLSRVPA

SEQ ID NO: 51155 - protein, 347 aa, unidentified
MIIIGCDLHTRFQQIAMLDTETGEVVEKRLEHEKGEAKRFYQGLEPPVLVGIESTGYTLWFAEMLNELGHELAVGDAAKIRASETRKQKHDRRDAGHILELLAEGKFPRLWLPSVEEREVRVLLEHRHQLVQLRTRAKNGLQALALNQGLRRRGGLWTAAGLKRLESLPVGEGTKWRRQDLLRLLHQLDAWVDDLDERLRAEVARRPAAQRLMTHPGVGPLTALATVLILGPAERFAEVRQVTSYVGLIPAEESTGGRQRFGHLTKQGSRLLRFLLVEAGQSASRLDPGLKRTYKRLTFRKGRSIAKVAIARKLIIRLYIMLRDQIDYAEFCRRGSHAGMLGEVALA

SEQ ID NO: 51156 - protein, 354 aa, unidentified
MNNITFSNSSFFVGIDTHLKNWKVTIRNSGLELKTFSMNPSPDELYKYLTTHYPEGTYFIVYEAGFCGFWPQRKFNELGVNCIIVNPADVPSSGKEKVVKTDPNDSRKLARELENGSLKAIYVPDINHEQLRSLMRLRFRLVQNQTRIKNRIKMLLYNYGIIIPKEHITNSRWSGYFIHWLKSIKLNSTAGQFTLDNLLLQLEQSRENLKQVLKQLREESKQEIISSVISSLVSVPGIAFITAMSLYTEIIDIKRFNSLDQLASFVGLVPSVYSSGETDYTRGISFRHNKFLRPLIVEAAWTAVKTDPALTFKYKELIKTMAKQKAIIRIAKKLLRRIRHVWINQDRYVKALVA

SEQ ID NO: 51157 - protein, 416 aa, unidentified
MNAVGIDVSSRKSTVAVLRPLGEVVCLPFDVTHDIAGLASLAEKLKALDGETRVVMEHTGRYYEAVAKALHEAGLFVCAVNPLLIKEYGANSLRRVKTDKADAVKIARYALDNWADLRDFTPMDAIRYDLKTLNRQFQLASKQRTASANNLIALLEQSFPGIRKCFDSPVRSDGTQKWVDFAHSFWHVDCVRKQPFPAFCERYRKWCKRHAYLFKLSNAEEVYALAKRAVVLTPKSKVVKVLVQEAANQLISISRSVEVYRAEMDRLAAMLPEYPVVMAMYGVGKSYGPQLMAEIGDVRRFERKQALVAFAGIDPMPNQSGDKNVRSNKSSKRGSPYLRKTLFNVIRTYLQCAPQDEPVFQFLNRKRAEGKPFYVYMLAAANKFLRRYYAKLRDYFASLDTLQSVDPIPATLKASL

SEQ ID NO: 51158 - protein, 355 aa, unidentified
MESTEYIGMDVHKDAIAVAVMNSAGKVVMESVLETKAATILQFIRGLRGNLLVTFEEGTWAAWLYDLLKPYVTKVTVCNPRKNALLRSGNKGDRIDAQKLAELLRHGSLSAVYHGERGLRTLRELSRSYLTISKDLTRVMNRLKALYRSWGIACSGTQVYAPRHRAEWLNRIKEAGVRSRAEFTYHQLDGLQALRQAVRRELLAESRKHRATKLLRQIPGIGPIRAALVVGLLQTPDRFRTKRQLWAYCGLAIETRGSGEYCYVEGKLRRSQKPVALRGLNKNHNHDLKWIFKSAAVRASSSAGPLHEFYESLLAKGMKPAMARLTLARKIAAIILIVWKKGARFNGEYLKPQAA

SEQ ID NO: 51159 - protein, 438 aa, unidentified
MSNKVIFNLDDLFISVGIDVGADFSWMSIALPNQQFVGKPYKILHNSIDSLTTAVSKIKEAEELYSLESRIFLESTGIYHYPLFCYLRDKGFNCSVINPIITKNSTNINIRKVHNDRFDSKKAALVGLKPDLKVSLMPSDLALNCRNLCREYYDLMDNRSAYVNKLQGELRMVFPQYLGIFSKVTINTSLTLLETYTSPSAFLKADKQEIIDIIKSTARFGITYAQNKYNAIIQAATDANQFGYIIDSNIKRIRLYISFIRKYDEEINNILESLHELVDANEDADFVKQIHLIETFKGAGFLSAVSIMGEIGDFSAFSKPKQLFAYFGLDPAVKQSGKFEGTKVQMSKRGSAIARRVIHTLTLQSISISRNGEAKNPVLREYYLKKCDSKPKLVAMGAVSHKVCNMIFAILRDNKPFKIIAPQEHIKQYNAAKCDIAA

SEQ ID NO: 51160 - protein, 359 aa, unidentified
MIAVGVDVHKRQCTVAIQRKDGELRLFGPLENTREGWQELLDQLPAQAEIALEVSTSGYFAMSVLEEAGWGERAHWVHTAGMETLRKQKHDRLDAKRLARKLAVSHQEPLPEAWFPPPEIRELRLRARQRCWLAVLRTQVKNRLQSLLQMHGRRAPVSDLFGSAGRRWLAGEGLPEVTRRSVDQLLRVHDFLVEEIGKAEQFLRALDGQFPELARLRTIPGIGPILAPVIWSEIGRLERFRSARALVNYTGLVPSLYESGEVSIQGGITRQGSTWLRWALVAAANGAVLGVNEFARRYRGLRRRKIAPVAKAAVARSLGSCVYGVLKSGRDYDPSHRMRRSKVHCKSLGAGQPEVAIGH

SEQ ID NO: 51161 - protein, 424 aa, unidentified
MKFKMQDKQNQLIERISDKHLVVGVDIAQQLHVARAVNFRGIVVGDPLAFENNEDGFASLLKWMDKLQRLNKLDAAIVGMEPTGHYWINLSKWLFKQGIEVVTVNPHLVKRNKENRDNTQSKSDKKDALVIADMVKNGYYAFVRNTSESFEILRVLMSNRDVVVKRLVSTINQLNRWVDIVFPELRQVFKDITGKGAIATLRLFPSPMELRSLKPHDVVSGWKSIMKRQPGLKKAQLLLQLARKSVGTRQALEAYKFHLEQLLEEYDLAVLQLERVEQEVKDVLKQIPFAKKLLAIKGISEISLAGILGEAGDLSGFSHGNSLLRHAGLHLAEASSGKWKGQIVISKRGRSRLRRFLYLATMSLVMNNTEFRAIHTHNVKVKKMKKMKSIMKLVGKLARIFVGIARRNESYCADKVQPITELVA

SEQ ID NO: 51162 - protein, 342 aa, unidentified
MQIATIGLDIAKNVFQVHGIDAAEKVVVRKQLRRGQMLAFFKTLPPCLVGMEACATSHYWARELTKLGHQVRLMPAKDVKAYVKRNKNDAADAEAICEAVRRPTMRFVQIKSVKQQGQLMLHRARDLLMRQRTQLINALRAHMAELGIVAAQGREGVKELLKIIASEQDARLPVDAHASLVVLAAGLRALQTMIGSIEKRIVAQHRSNDASKRLRSIPGIGIVGATAIAATVPDPKAFRSGRDFAAWIGLVPRQDSTGGKQKLGPISKQGDQYLRRILVVGAHAVLKRARQQPEKYLWLTRLLARKPFRVVAVALANKMARIAWALLAKGDTYRVPVLAAAA

SEQ ID NO: 51163 - protein, 399 aa, unidentified
MLAVGIDISKSKSVAAILNQDGSMHTSPFEFHHTQPELDAFIKYILNSNQSATILMENTGHYHYPVLKAFREAGLPVCMVNAYQIKKFGDMDLRKAKTDKKDAVRIARYALEKSYSLVPYTSMEQKYEDLRFLARQYNQRMLTLKTNKVFLLNLLDETMPGITNILPLTTRTPETSLSVLFINRFKSYDRIKKMGKDRFLDAFEKIARKSRNRQTKTYGLAIYETALYNITTRGENEYTLGAQDQCLELVCESQKAADSIILKMQTLAETLPEYAVLRSMAGVGDRLGPLILAEIGDIRRFHSGKALNAYAGNDAPPYQSGTFESHNRHISKRGNAALRKYCFEVMQALKLTQPQDDPVYLFLLKKEQEGKPYNVAKMAGVNKFLRIYYARAMETLKQQ

SEQ ID NO: 51164 - protein, 320 aa, unidentified
MMTQNDLVVVGIDVAKDKVDACIRRFKLRQTFPNNPQGRRKLIVWLRKYQVGKAVMEASGGYEREWRNVLHNAGIEVRIVDPRRVRNFALSAGRLAKNDPIDAEMIAWFAETFSQAPGQIPDASREELAGLAKARKALMDVKIRLQAQNEHAAPEPARKAHARILKSLAAEIDKLEIAISAKVKATPEFAERAEIIQSVPGLAQTTSAILIAGMPELGQVSDEVAAALVGLAPYDDDSGKRRGERHIKGGRRWVRNALYMPCLGAATQNNPVLRVFYQRLIANGKEPKVAIVACMRKLIIILNTMLARRQKWNPGAHAIA

SEQ ID NO: 51165 - protein, 453 aa, unidentified
MSKRAKKAPVRGVSPVPVLEPNAAGVDIGATEIYIAVPGDRDVQPVRRFGTFTEDLIGAAEWLKRCRIGTVAMESTGVYWIPLFQILEARGFKVFLVNPRHVKHVPGRKSDVCDCQWLQYLHAVGLLRASFRPEQQVCAVRSLLRYRESLVQMAAVHLQHMQKALDQMNLQLHHVISDLSGKTGMAILDAILGGERDPRKLAALRDGRIQADAKTIAKSLVGDYRREHLFTLRQSVAAYRHYQGLLGACDVEIEQMLGEFSDAGPGAPALAEPDGRRKPRRNELKFNLRGHLYRIFGVDLTAVPGINAAIAHTLLAEVGRDLSAFPNAAAFASWMGLCPDNRVSGGKVLGSRTRKVNHRLARALRLAAQSLFRSQTWLGQYFRRMRAKLGAPKAITAAAHKLARILFHLLTTRQPYDESVFAQREVQNNQRMQHRLRQQAQKYGFQLVEIKAP

SEQ ID NO: 51166 - protein, 436 aa, unidentified
MRGCRCSMIMGFTKPIEHFNLQRKKVITMNTLYVGIDVSSKSNVVYLMLPNGDKHSNFSVANSHEGSTLLVKKIYSALTSHSLDTVLIGLEATSVYGVNLVYFLREDATLAPFNRKIHVLNPKQVKKFHDTYNDLPKNDYVDSFVIADCLRFGRINKEVYMGDYRYKALQNLTRARFFAVQNLVKEKQRFMNVLFKKYSTMTQEKVFSDAFSTTALAVYDEFESAEALANMDLHELTDFIIEKGKNRFPDPDAVAKAIQKAARSSYRLPKTVNDSVNQVLSISITSMKALESQIKEFDKAIKALMELLPNVLISIPGIGPVYSAGIMAEIGDINRFDNQASLAKYAGLAWKQHQSGGFEAEVTRLIPSGNRFLKYYLCEAAFSLVRCDKEYSDFYHLKYKEVNRCQHKRALALTARKFVRLVFRLLKDNRLYCPAK

SEQ ID NO: 51167 - protein, 405 aa, unidentified
MGIYVGIDWAEAHHDVCVLDEAGTVLGKRRIAEGLEGVGQLHALLADHAQEPDQVVVGIETDRGLLVGALLAAGYQVYAINPLAASRYRERHGTSGAKSDPGDAKVLAELVRTDRHNHRPVAGDSELAASLQVLARAHQSLIWNRQRLINQLRSNLREYYPAALAAFGTELAHPVALGVLDAAPTPAIGRTLSRAKLVAILRRAGRERGLEEKAAAIQAQLRARQLAAPTLVSAAYGKSVASMVRIVRELNAQLASLEAELRPSFEKHPDAEIYRSLPGLGIVLGARVLSEFGDDRTRFAHPKARKNYAGSSPITRASGTRRVVLARMARNRRLADACHQWAFCALTSSVGARDYYHRLRQRGKTHHQALRALANRLVGILHGCLDHRQTYCEDLAWPSSLMVAA

SEQ ID NO: 51168 - protein, 355 aa, unidentified
MKKRDKYMGMDVHQATTVTCVMDAEGKTVLETTVATEAGTLLRLMEGINGPLHVTFEEGTQAGWLYEVVRGYAKEVIVCDPRRNRLLEEGSKGDKPDARKLAQLLRAGLLRSVYHGHEEATRKLKQLVRAYENLSDDTQRTMVRIKAVYRSRGIACRGQEAYQPTQRKQWLEKLSEPGARQRMEWLYEELEQLAPLRRRAKQAVIREGGKHRAVALLRTIPQVGPLRSALIVATVDTPHRFRTKRQLWSYSGLAVVTHMSSEYQIQEDRVIRSRKPIATRGLNRNCNHRMKDVFIGAATGGAQIEPYRTYLERLEQTGMRAEMARLTLARKIAAVALSIWKKGEVFDPKKLNWTT

SEQ ID NO: 51169 - protein, 347 aa, unidentified
MPRECKSRGAHNRVGGTDHDQEVTAFCARLPAPVRVAYEAGPTGFELARALAAAGVACVVAAPGKIERPAQDRVKTDRRDAERLVRLLMIGGLHPVRVPSGEEEALRDLVRAREDIRGDLMRSRHRLGKLLLRHDVRYDDTASAWTTAHRAWLSRVDLGERAAQATLLDYLGAIDALVIRRDTIERMIAELVPHSPWAEQVARLRCLRGIDTLSAVGLCAEIGDFSRFDRPGKLASYLGLVPSERSSGQTRRQGAITKSGSRHARRLLVEAAWHYRRPPRRGTTLQRRHEGQPAQVLAISWKAQQRLHHLWRRLDSERGKRKTIVAVAVARHLAGFCWAITTTTPET

SEQ ID NO: 51170 - protein, 341 aa, unidentified
MEVYVGLDLSRKRLDWQAVDEQRRRLGEGAITPDREGLARLVLQLGSEVVGVIESMNGARFVHDQLELAGWDVRIANAERVKGLAPLACKTDKIDARVLAELGALGLVPEIWLPDPRVRAERELARFRMHLVKQRTMLKNRIHQTLIAYGVPCPVADLFGVRGRRLLDGAELPAAWRASTEASLRLLEQLQAEIDACVGELRRQNLEHPYVPLLVTAPGIGPILGYTIASELGDIGRFATPAKLVGYTGLCPRVYQSGERDRRGRLAKNGPNYLRWALIEAAVHAGRSVWYRDLYQRTRARAGRQRGAAVAAITIARKLAEAIWWMLTRKQRFAPAGADSL

SEQ ID NO: 51171 - protein, 343 aa, unidentified
MEAKRYIGIDLHRNCFTACLRLESGREYLKEWKLEDMGKFTAKLRPTDQVAVEVTGNTRLFHDAVAPHVERVVAVNASQFKVITHSVKKTDPNDARNLALYLAKDLLPEVRMKDKTQAQIASLTQTRDTMVKLRTALKNKVNNLCSAHGVNLNKESLASEKGLKAVLEMHFDLLVNLELKIIVEQIRSLNKSIAELEETIGQEGHKLEGHKNLTSIKGIGGLSGGILLSIIGDISDFADEGKLAAYFGIVPRVSNSNETEHSGRITKRGTKLGRTTLIQCALIAQRYSPYLKTYYEKMKSRRGTGKAIVALARKFLGIIYRTLKNKWVFADFPNFVLAAEATA

SEQ ID NO: 51172 - protein, 461 aa, unidentified
MTNLRLKTKKSRKKSRRVTATKLPRSLGKINLHAAGIDVGAIEHYVAVPEGCDKDIVRTFGTFTVDLEALADWFDKCNIQKIAMESTGVYWIPVFEILESRGFEVKLVEPGKLKSVPGRKTDVLDCQWIQQLHTYGLLQGSVVPIESISIFRSYMRQRAMLIDCAAKHVLHMQKALMQMNIQLHHVISDITGTTGLRIIDAILKGERDPQKLSKLRDPRCKKDGHTIALALEGHWREDHLFVLEQSVKLYQFYHGLLDELDQELENYLKKFEDKSDGQVLPPSPKPKAGSNAPRFDMCNQLYKMSGIDLTKIDGISGHSALQLISEIGIDMSLWPTEKHFASWLCLCPGNKKTGGRLITGKSRVSANRAAAVLRMAAQSLSRADCALGAFYRRMKYRLGAPKAITAAAHKLSKIVYNMLKYGSQYIDVGAEYYENEYRQRVLKNLTKRASQFDLRLVPVEA

SEQ ID NO: 51173 - protein, 382 aa, unidentified
MQHATKNALPAAGPGHRTAGLDWARDDHALAVVDASGQVVERFTVVHTAAGLRDLVRRLGKVGAREVAIERPDGPVVDALLGAGLTVVVISPNQLKNLRSRYGSAGNKDDRFDAFVLADTLRTDRARLRPLVPDSPATVALRAACRARKDLVGHRIALANQLRAHLQRAFPGAVGLFADIDSTINLRFLARFDCQERADWLSPKRIGAWLDSVGYCGRVAPATLHARLTAAPRGATGAEGAAQAHVTRAFLTALSTLVEQIKVLSEQIDEQLALHADAHIFTSLPRAGTVRAARLLAEVGDCRARFPTPESLACLAGVAPSTRQSGKHRAVGFRWAADKQLPRPRLALRDLALLAERHALRPRSASRPPGAPPPRPPEGGLT

SEQ ID NO: 51174 - protein, 428 aa, unidentified
MLPLLDPDPPAIFQPQRFIGMDIDKRTVVVIGLDPKQKTVIGPVRISLDRFEGWCLANLKSDDAVVMEASVNTWHLYDLILPLVGSVTVAHPLMVRLITAARVKTDKEDAYKLARLLQAEMVPEVWVPPHHVRELRALVAHRKRLISQRTQARNRLHAVLHRHNLVPPKATPFAACYREWWLELKLDPCEKLRVRQDLTLLDTLGPLITEVETELIQLSQATEWAEAATYLVQLPGLGIVSAMIILSAIGDITRFAAAEKLVGYAGLGASVHSSGQTHQTGGITKEGRRELRTALVESAWSAVEHHPHWKARFDKLAGRMGKKKAIVAIARKLLVTVWHVLFKREVDRQAVPEKVALKLIIWSRKLKPEGRHGQSTAEFVRSRLDRLGLGAELEEVGWPSTPKLHLPPSSLRYDGSLTTVPTQMVASS

SEQ ID NO: 51175 - protein, 380 aa, unidentified
MRPLWICQKGSPRGKALSFVSRKPQRPKPKGNPMNKVMAGIDLHSNNAMVGLLDQAGRRLAHQKMECELKEIVRFLAPYKGRLESVAVESTYNWYWLVDGLKAQGYPVVLANPAKIDQYSGIKHADDKNDAFFLAELSRLKILPTGYVYDPVLRPVRDLLRRRMSLVHPRTSLMLSFKSLYTRTTGRGMKLSQLKGMTVAQARALYEHPANQLIAQVHKGHIEGWSKSIEKIEEVVLKASSQLPYYPKLKTLPGVGIVLGLTITMEVGEIGRFAEAGHFASYCRTVDSQRLSNNKKKGDNNQKCGNKYLAWAFVGAAHFARRSDDLCRRWYDRKAAKTSTVIATKALACKLAKAAWYLMAEGSEYDAKRVFPELAVKAQK

SEQ ID NO: 51176 - protein, 343 aa, unidentified
MPHYVGLDVSQKATAIRVVGEQGQRLWRGVCATDPAAISARLLRYAGVDAKVGVETGSMTPWLVHGLRSAGLDVQCLDARRVKAALQMRLNKTDENDAEGLAQVMRTGWYRAVHVKSLDAHRARALLGARAQLVGMTTRLSNMIRGVLKTFGLLPGAGRGLRFDRKVEALLEGVPELALIVRPLLATWRQLREQIAVFDKAVQQQVRTDPICRLLMTVPGIGALSSLMYVSTVEDPGRFSRSRAVGAHLGLTPRRYQSGETDRSGHISRCGDGLARTLMYEAAIVILHRVKRSLYLKDWAAAIERRSGSGKARVALARKLSVILHSVWRSGEPFRWVPQTAAA

SEQ ID NO: 51177 - protein, 438 aa, unidentified
MSNKVIFNLDELFISVGIDVGADFSWMSIALPNQQFVGKPYKILHNSIDSLTTAVSKIKEAEELYSLESRIFLESTGIYHSPLFCYLRDKGFNCSVINPIITKNSTNINIRKVHNDRFDSKKAALVGLKPDLKVSLMPSDLAPNCRNLCREYYDLMDNRSAYVNKLQGELCMAFPQYLDIFSKVTINTSLTLLETYTSPSAFLEADRQEIIDIIRSTARFGLTYAQNKYNAIVQAATDANQFGYIINSNIKRIRLYISFIRKYDEEINRILESLHELVDANEDADFVKQIHLIETFKGAGFLSAVSIMGEIGDFSAFSKPKQLFAYFGLDPAVKQSGKFEGTKVQMSKRGSAIARRVIHMLTLQSISISRNGEAKNPVFREYYLKKCDSKPKLVAMGAVSHKVCNMIFAILRDNKPFKIIAPQEHIKQYNAAKCDIAA

SEQ ID NO: 51178 - protein, 328 aa, unidentified
MGIDVAKATFDFCLLSRSGACLWRGQFSNDARAIERFFHQLRAGGWKPEQIHFALEATGVYGQRLIAALHQAGLAVSVLNPAQVKYFALSVLRRTKNDTVDAEIIARFCRERKPLATRALRPIETQLKLLVHERESRVVEQTREHNRAKQDPYQIELPKLISRQRQQRLKQLQKELAQLDAEIDSLIANDQRLKTQSQLLCSIPGIAKLTAAKLLSELAGKEFQSARQLGAYAGLTPAECRSGYSLYGKTRISKIGNALLRKALYMPAAVARRWCKPLQPWIAILQSRKLHDLAIRGAIMRKLLHIAFGVLKHQKPFNPMLASIPKTV

SEQ ID NO: 51179 - protein, 286 aa, unidentified
MSLPSPLCVGIDVSKATLDLAASSAIEQFSVCNDADGFDLIIAELRKRDVELVLMEATGGLEAAVACALQAAGFEIAIVNPRQARDFARAMGYLAKTDRIDAKALAQMAEVINRHPERDRFIRALPDAERQVLNAMVVRRRQLIAMQVAERNRLYLAHPQSRKSINIIIKALEDELTRVDDDMKNHIGNHFRELSERLSSIKGIGTMTIAALLAEVPELGKLTRREISALVGVAPVNRDSGTMRGRRTIFGGRAGVRTALYNGCTGFKAWCRSPSAPVKWADGDMS

SEQ ID NO: 51180 - protein, 336 aa, unidentified
MQITTIGIDLAKHVFQLHGVGSDGSVILRRRLRRSQMIAFFAQLPPCLVGMEACATAHHWARELSELGHKVKLMPAHYVKAYVKRGKNDAADAEAICEAVTRPTMRFVAVKTKEQQAVLVMHRTRELLVRQRTQVINALRGLLGEFGIAESQGIWHVGRLRAHLVEDTVPEPGRQILVLLVEQFDGLEKRIERVDLEIRAWHRTNQVSKRLAKIPGVGPLIATAIVATVSDASLFRSGREFAAWLGLVPRQKSTGGKQRLGRITRQGDAYIRRLLIIGAQSALQRSKEIKENAWAQGLLCRCPRLKVAVALANKTARIAWALMAKGETYRRAAASA

SEQ ID NO: 51181 - protein, 379 aa, unidentified
MDVHSTNYTLCAMEPTIGSEDRIFGEVQVAPDYKEVICFIESLKMKLGLNDDYSIECGYEAGCLGYTLYHQLANAGIKCVILAPTTMLTQQGQRVKTDKRDARLIAHCLCYGGYHPVYIPTEEDDTVKEFIRMRDDIKQAAKVIKQQINAFLLRHDCRYTGTKWTIKHITWLNKLDLEPMYRETLNEYMATYEVLTTKIEGYDKRIEEIADEARYQEKAEKLGCFLGIRTHTALSLIVETGDFKRFAKGNIYAAYLGLAPGERSSSTNVNRLGISKAGNTHLRCLLIESAKGICKGAIGHKSKELRSRQRGQSAEVIVYADKANRRLRSKYYRMIRHGKKKNVAVAAVARELACFIWGMMTGNIGTTGEGTSEPTVSQG

SEQ ID NO: 51182 - protein, 336 aa, unidentified
MTIIRVGLDTSKHVFQIHGVDENEKPVLRRQLRRSEVEKFFAKLPPTRIGIEACGASHHWARLLRGLGHEVLLIPPQYIKAYVKRGKNDAIDAEAICEAMSRPTMRFVPVKTVEQQAALTMLGVRDLLVKQRTMLINAVRGHAAEFGVTAAKGPKQVAELLERLASDEGVPALAREMIGVLASQLNGLDIKLKAIETRLMAWHRQDQTSQCLATIPGIGPIGGVSFALKVPDPRVFRSSRHFAAWIGITPRDNSTAGRPRLGKISREGDEDLRRLLVLGATAVIQQAKPGRASPWLLGLLAKKSKKIAAVALANKMARIVWAMMVSGETYRRPAQA

SEQ ID NO: 51183 - protein, 366 aa, unidentified
MKKISTVAKRGNEISKEPKLTIGLDLGDRSSHYCILDEAGSVLLEHSLPTTPKGIHQVFSRIPRSRIALETGTHSPWVSRLLTQSGHEVIVAHARNVRLIGESRRKDDRIDARTLARLARIDPQLLSPVQHRSAEAQIHLTVIRARAGLVSARTALVNAARGLVNSYGQRLRKCGTQQASRDMAAGLSAELRDALEPLLREVESLNERIKEYDRRIEEMAKQTFPEVALLQQVKGVGELIALTYVLTIEDPHRFRKSRDVGCFLGLRPGRKNSGQSEPQMHISKEGDRYLRTLMVQGAHYILGPFGEDSDLRRWGRKLAERGGKNAKKRAVIAVARKLAVLLHRLWVSGDVYEPLRNSQKAVRAVA

SEQ ID NO: 51184 - protein, 338 aa, unidentified
MYYTGIDLHKKTSFITTIDTAGKIVTRANLQNVEEDILAYFGNLGGETKIVIESMASWYWLYDLLTAEGFEVAISNPVKTKAIASAKIKNDKLDSHMLAQLLRADLIATVHVSSLETRKLKELLRHRSRLVRDATRMKNRIHMLLMKNNFRSPFSDLFGVKGLRYLEEIDLPDYHRQQVETYLLLYQKLREQIEPLTKRVRALAKENHTAQLLMTIPGIGPITAMFIIAEVDDISRFRSYRNLASYAGLVPCLDASAGKEKRGRITKQGSRYLRTALVEAAQAAARMKNCRLNIFFRRRIVKSGYQKAIVATAHKILQYAFYVWKNQTPYRETYPVCA

SEQ ID NO: 51185 - protein, 410 aa, unidentified
MGNVAGIDVHKKMLAVVIRVESEDKVEYLKRKFGTTANEVVHLASWLTQQNVLEAALESTAEYWRPVWNGLEAHLKLHLCNPLQVKARRGRKQDFRDAQRLADRWHSGDLEESFVPGAEQRSWRWLTRSRVQLRRLIGAARSRVECLLEQGGIQLTSVVTDPFGVSGWAMLKLLAKGERDVKILVGEARGQLKKKEAELTQALVGKLNPTHRLVLQQSLEQVELLRRQIEEINQALKEAMLPHTAALVRLVKIPGVDLAAAQELLAEIGPGAVTFPSGGQFASWVGVCSGSNESAGVTYSRRSAKGNRYLRRLLCQIAWAAIRTKDTFYGSLFRRLSPRLGAKGAAWAVAHRIGKVIWLLLHEEVEYRELGPAPQRPKSLVKKLQRLQADFARAGMDLQSVLGQCSPAVA

SEQ ID NO: 51186 - protein, 343 aa, unidentified
MLADDVEFVIGVDTHKQTHTAAVVDRVGGVREILELRAEAAGYRRVLAAATRHEGRRVWAVEGTGSYGAGLSCFLLEAGEVVVEIDRPARPARRNGAKSDALDAVRAAREALAREHLSEPRRRGDCEAVRVLVGTRNGAVVARTKALNHLQALVVTAPEGLRCRLVGFSNAQLAKRCSRMRVCDDQSIELQATVRALRACARRVLACGEEADELERHLERVLRDCVPELLDEPGVGPISAAAIYVAWSHAGRVRNDAAFAALAGVAPISASSGQTVRHRLNRGGDRQLNRALHTIVLSRLIYHAETKTYAQRRLAEGKTTREIRRCLKRHLARRVYKLLEHKT

SEQ ID NO: 51187 - protein, 374 aa, unidentified
MPRQSERAQVSKTDGQLEAPRRRPNLQNPNSWQSPSSNRTARKDASGRPTPPTIERSQPMHVGIDVSKSHLDAHVHETGLAFRVTNDHAGIEQLISKLSGLQLERIVLEATGQYEQAAFVALSLHRLPVAVVNPRTTHNFAKATNRLAKTDQVDAACLAEFAAVLKPRITPLPDEDAVELDYLVTRRRQLVDQLVAEKNRRAGPAVLRLGPDSRAKRSVEEHIVWLEKEIAGFDEQIRRLIHNTPAWKQKDDLLQSVPGVGPKTSANLLAHLPELGTLDRKQIAALAGLAPYNADSGYRSAPRHIRGGRASVRTALYMATVTAVTHNRTLQAFHRRLLAAGKAGQVAITACMRKLLTILNAIIRDNRPWADANP

SEQ ID NO: 51188 - protein, 364 aa, unidentified
MKRKVYVGMDVHKETIQIAYLTSNSKEILKEQQIKHNEVQIKKFIKKLKTEWNEIYCCYEAGVTGYPLYRYLKSLGVNCILVAPGKIPRQNTDKIKTDKRDAIKLARLMRSGELESIHVPSEEDEAVRDYLRSRDSLRLDLGRNRQRLMKFLLRKDIKYSTTKYWTVSHYKWLNNLHFNNEILQETFNDYYSRVRVQEENLKSMDKKIQEIAESEPYREKVGILRCFRGVDYLTAMFLLCEVNDFKRFKTAGSFMSFLGLVPGEYSSGSKRKQTGITKTGSPRLRRILTEAAWQHRFPGTGSKIITARRSGQPALVVALSEKASLRLHKKFRNLQLRGKTPQVMITAVSRELSGFLWAAMNLVA

SEQ ID NO: 51189 - protein, 400 aa, unidentified
MLSIGIDVSKGTSTVCGMKPGGEIVYTPFEVQHTREGMSELVSLLRGSGEEVRAVLESTGSYHCPVVTALLENGIFVSVVNSLRMKRFCSQSIRKVKTDRIDAMQIALYGLAYWQELQPARLPEDTYRELQLLARQYYQMTSLLIKAKVDFNAICDQILPGMQELMSDHAGRHKLSDFVLRYRHTTHILEMGETRFRKDYCKWAEKKGYRNCERMAALIFATAQNGIPVLPNAPSTQIVITEAIRVLHTVEASRDAILTQMQALAKTLPEYSLVREMPCIGDTLAPRLIAEIGDVRRFHSKRALIAYAGIDAPPYQSGKFCANNRHISKRGNRYLRKTGYEVMQSYVMHKPANDPIFTFIEKKRSEGKCGKLAMVAGLNKFLRIYYGKVTELYRSLPAIE

SEQ ID NO: 51190 - protein, 412 aa, unidentified
MKLFVGIDVSSQDLKVCIMDAGGDTLQAFTVLNNYHGACHLRDQILAQADRIKPSEIHIGLESTSVYSWHPAMFLHEDKLLSERHTKVFTINPKLISKFKEAYVDLDKNDRIDAWIIADRLRFGRLPMTVVAQEQYIALQRLTRMRFHLVHNLTREKQYFLQHLFYKCSAFSAEVESSAFGHAITELLLEKYSLDEISSMDVADLADYLKDKGRNRFPDPEGVARCIQKAARASYRLSKVVEDSIDIILGTSIEAIRSTQKQIKELDKAIERIIAGLPGENVLKTIPGIGPIYSAGIIAEIGDIHRFDDQAALAKYAGLTWRKNQSGKFEAEETSRIKSGNRFLRYYLVEAANLVKNRDAEFGEYYRKKYNEVTKHQHKRALVLTARKLVRLVDVLLRNDQVYTPRRKVTNA

SEQ ID NO: 51191 - protein, 524 aa, unidentified
MAASRTRKRSTSRRPSPSPILGKPQGQLHPRVQRAGPEHFGIVCFDPAKARSKFLLADFYGRVLIPPTWVAHNQPELDAAVDQIRQAFTTFQLQDGLVAIERTGRYHRLVQRTFASAGFETRIIHPFVTKQYRQPVDPNNKTDDTDLAAMHRATLTGCALLEATRDEAWTTLQLVARHRRDLVQKGAALNCQIRDHLEAALPGFAACFGQDKFWDSAIPWHLLQHFPSAQSLRDAGVTTLGQSLHAADIRFQQRTLQKVVDWAHQAAPGDIAAAQHLRIALALFDDRKQKTRQILALERELAQRLARTPYILLLSTPGINVVSAADFAGEAGPIEHYANAKCLTGRAGLRPSRYQSDKVDKANGPLPHICNRALRAAILSIADNLIMNNHHFNVLVQQWESQGKDPRHSHVKIGMRFCRIAFQMVAGKQVFRHPCIQGRHYIIDKLNAFHREHDTDMAQVLSDLQAAVGQVPTREHAAEAKPLAEELQKIQEGHRRGPQMLGDILPLVLARLGVPVVQSVESGE

SEQ ID NO: 51192 - protein, 410 aa, unidentified
MKLFIGIDSSQKNNQCCIVDHNGNKVSELRVSNDLTGAQKMQSLLEHKASELYVTELKAATEASSMYDFHILEFLSGSQTLTKYNLKLYRFNPRLIKAFKQSLKIRDKTDPNDAYAIAEYLRFQSEKAEEYRAKLDHLPLQRLTRFRCHLVSQLVRERNYFLNQLFLKFSAFSKVKPFSNTFGATALAVIEEFMTPDAIANADDEELIQFVIKHGKNQFPNPEEIVKELKHVARESYRLRPQLAESVHRILCLSLSNIRALKSSLKELDDTISKQLNAFSITLTSIKGIGTVYAAGIFAEIGDINCFSSESQIARLAGLAWIRHQSGNFEAETRRLDKQSNKYLRYYLVEAADSLRRHNPEFSAYYQKKYAEVTKNQHKRALVLTARKLVRLVDYLLRTNKLYQPNIILT

SEQ ID NO: 51193 - protein, 415 aa, unidentified
MLKIVHPICCGIDVHKTFVVATIAFTDIKSVTTYKTQRFSTFTKDLIRLQSWLTENQCVPVCMESTGKYWLPVYNALEGSSRIVLAHPKYVKAIRGKKTDKKDSIWIADLFKHDLVTGSFIPPPAIRELRDLLRYKAKLTETINREKNRIQNILTVSNIMLSSVVSDTFGKSGSAILSHLLEHPSVKTEELLPLLHGSVRKKKDEITLALDGKISTPQRTKMGLCLDHLYYLQTSLSKIHAVAESLALPYQSALSLIETVPGIRRPSALVILSEIGADMSVFPSDKHLCSWAGLAPTNDQSAGKKKSVHISRAGNYLKPLLVQCALAAIKCKEASVFKDRYERLSRRRGHKRALIAIARMMLTALWHMLSSGEVFNSSQWQHRTKRAIPPPPAESIAIEMLRSLGYTVERFSESA

SEQ ID NO: 51194 - protein, 421 aa, unidentified
MEEITEEPGRLTERVAALDIGKASLTACIRVPHEDKPGARRQEVRTYATTTPALLDLRDWLTCQGVTLVVMEATSAYWKPPFYLLEDDIACQVVNARDVKNVPGRPKTDKLDAVWLCKLAERGMLRASFIPSRPQRQLRDLTRYRRTLTQERTREKQRAEKLLEDAQIKLSVVISDIFGASGRAMLDALIAGQASPHELAALARGKMRAKTSALQEALTGHFTGHHAFLLGMMLDRIDALTAQIATLTTAIEQAIAPLAAQVAQLDEIPGIGVTAAQDLLAEIGADMSRFPTPGHLVSWAKFAPRARQSAGRAKAATTGQGNPWLGGTLGEAATSAARTKTFLASRYKRIARRRGKNRALVAVGNSLLVIAWHLLSDPAAHFTDLGPDWHDRLAPLRRKRQLIACSPSLRMSMTATFSVAT

SEQ ID NO: 51195 - protein, 377 aa, unidentified
MKDFNLYLGLDVHAETISAVVVDGEGVERNLGVFANRRSSIENLVKKVGAKERIRAVYEAGPTGYKLYWMLSYLGVECRVAAPSLIPKKPGERVKTDRRDARKLARYHRSGDLSYVWVPDESHEALRELVRAREAAKRDERRARQRVKSLLLRHGVHRPEGVGSWTMKYKEWLKRLKFGLAALEATLADYVHEVDRQELRVLRLDGAIDEAVEQAPASFREVVQALQSLRGVRKVTAVGVAAEVGPFSRFRHPQELMGYSGTVPSEYSTGGPGKAKRGAITKTGNALLRRLVVESAWSYRHRPALRGELKKRQEGQRAEVVEIAWRAQVRLCGRYRRLVASGKPKQKVVTAVARELLGFMWNIGTEVERQLDTKAAA

SEQ ID NO: 51196 - protein, 381 aa, unidentified
MGKKRKQAMSSAEAQIGNVVGIDPHKHTLSAAVVDQRGGLLGCRHFPVSAKGHQALETWVLSLGPVLRWGIEGASGLGRHTALYLLTRAQDVRDVCPNRTAERARNRRQGKSDTLDAERIARELLAHPDLPLAFKRSQQAARPDQVVELLGLWHQARRSMVKSQQHLLNEAEDMLQAMPEAIRDRLPASKAVWPRLRALTTLSDEMSGEDWDAPTALRLRLLGEHARALSELEQREEEICCEMAKLVKQTGSTLDQLCGISTRSAAELLVEVGDPCRFTDGGFARFNGTAPLPASSAEGDDEPVRHRLNRGGNRRVNAVLHRMAVTQLRCEPRAQAIFNEARRNGHTKKEAMRVLKRQLSNVVHRRMLSDLQSRSDMAAAA

SEQ ID NO: 51197 - protein, 337 aa, unidentified
MNFSFTFFQYQFMKKIIIGIDISSKTLDICLQKEGSEEHFTIANQVKAIHGFFKKLSGQQVVLAMENTGRYNWQLYEALPKYDFEVYVLSALHLKKSIGLVRGKNDKVDAQRICKFIQKNQDECTIWKPTSTNIQKMKVLLTERNARIKMKRQLLGQQSDYKLMNTIGLEKQLTKMNQGLIESIQQQIEKLEAEIEKIIQADESIKEQAKQIRSVPGVGPVTCWTMIAKTEGFTAITEPRKMACYCGIVPFDHQSGTSVRRQPKVSTYADKSMKSILHLAAMSAIRLDNKFREYYRRKVAEGKNKMSVLNAVRNKIVHTIFALIKNQATYQDHLVLS

SEQ ID NO: 51198 - protein, 414 aa, unidentified
MDNSLTPRFVGIDLHKHFAVVAAVNAQQRLVLPPTRPIDLDEFPAWASTHLYPTDVVVLEATSNAWWLYDLLAPRVQRVVVANPLQVKWIAHAAVKTDKHDAIRLAKLLAANLIPEVWVPPRHVRELRALLAHRRALVKQRTAVKNRLHSILHRQALKLPSGDPFAAHNRTWWLALDLSPTERLRLRQDLDTLEHVEKQLADLDSELARLSNQSPWNLAMPFLIQLPGLALLSAMTVLAAIGDITRFPTAKHLVGYAGLGTRIHDSGETSSEGHISKEGRRDLRRILIEAAWIAVNTHPYWKAEFERLCRHKPQGVAIVAIARKLLVVIWHVLTERAADHHADPVMVACKLMRWSWELTEEQRGGLTSRQFVRYGLLRLRLGNELTTFTYGGMPRRLASVEEMLARFPDLAESS

SEQ ID NO: 51199 - protein, 400 aa, unidentified
MRAVFGIDVSKASSAVAILVNGEKVHGYTMSNDAIGFARLLGDLRTVHKPEIIFEATGVYSRRLQTFLEDNGYAYTRLNPLEAKKQLDSLRVRKTDQIDAEKLAQSQFVLNRKPTYVQEEVYQELRDLSRFYQNLTEDIVRAKNRLHKVLQVTFPEIETVLSKPTGEQYWNLVTAFPCKDFVLDLSKDELLESIRQSTSKRISDKRVAYLAEKLIALANQSYCAVKKTSPMLEEVRYYTKELLRLSGQRQAVLDEMVELAQPLPEYDILLSIPGIAETTATSIIGELGDIRRFQSANQINAFIGIDLRHYESGNFLAKEHITKRGNPYARKILFKCIHNIASASHTNPCHIADFYEKRKRQSQTTSTKPHTIASIHRLIRTMYYLITHNKLYDYRSTQNQ

SEQ ID NO: 51200 - protein, 402 aa, unidentified
MRFVGIDVGAERHTIAIVDESGVVILKATAFTEDSAGYGRLLELLGTATDCLVAMEATGHYWRNLYAALVTAGFAVALINPLRTSRFAEEELQRTKTDAIDALGIARFAAQKRPTITQLPEAALQELRELVRLKGQVLQQLGDRVRQLHRAVDLVFPEFTRHVRTLDSELATAILERYPTAAALRTVSARKLARLCYDGSHHVGEARARALIVAARQSVGAHHGEPYQLQVRYACEDIDLLRRRLRALEKDIEQRLEQIEVGKLLTTIDGIGPQTAACIIAEVGDPARFHSSRALASYVGVVPRLHHSGKRRFSTSAKVPLGNARLRRALWMPALTAVQHNPWLRAYYYRLREAGKRPKVALIAVIRKLLSAVYSIAKHRRPFVLAPIFSPVAGGAVVPTAR

SEQ ID NO: 51201 - protein, 358 aa, unidentified
MRIIGCDLHARQQTIAMLDTGTGELEEKTLGHEGETVREFYSALSGPILVGIEATGSMQWFLELMEELGIECRVGHPAKIRKAETRKQKHDRRDARLLLTLLAENRFPTIWMPSSEQRDLRTLLRHRHQWVRLRSRVQHTLQSMALNHGLRRGRSLWSQAGQGELRALPLAPHASERRKALMTLYPRLQESIAELDRQVSEQTQQRTDARRLMTHPGVGPVTALATEVFLGDPKRFSDGKALASYIGMIPSEHSSGRRQRLGAMSKQGNALLRYLWCEAAMHAVERDPELKRFYRRKLVQKGLGKARVAAARKLGIRLWIMMRDEIDYQEFCRRGKARQESGSVRAGMPAINSGPAQQ

SEQ ID NO: 51202 - protein, 343 aa, unidentified
MCTEKISTKSVKINNDKYEYYIAIDYSQRNMAIATIRNDGNKPRVIDVDSDIDHLKAYLISLKGRKIVTIEETTSTHWLYVELFEYAEKILVCDPYRNSLLSDGPKTDKLDASNLCKLLRSGLLKEVYHSLDKKYELRQLVSEYEQLVKFGVRVKNEKSAIYRSMGKSYQKKEDIGDDTLAWIITQKDKRIDLYEKQKKEYDKMFSKKISHDTELKHLKDVTGIGTIGAVKILATVIDAKRFKNEGNYLSYCGLVKYQKMSGGRNYGQKKTRYSRRLKSVYKTAAMSVINGNSPLREYYDSLLKRGLSEENARNQLSRRIAIITYGILKTGTKYNPYKWRESK

SEQ ID NO: 51203 - protein, 451 aa, unidentified
MPKDRTRSKPSGLPIIHPFAAGIDIGSRFHVVAVSPDLCDEPVQTFQAFTSDLQRMADWLVATGTKTVVMESTGVYWVAAYEVLESRGLEVILANAREARAVPGRKSDVNDAQWLQRLHACGLLRASFRPGRDIAELRAYLRSREKHTDYAAAHIQHMQKALTFMNLQLHHVIASITGVTGMRIIRAIVAGERDPARLAAMRDVRCKESLETIRKALVGNYQPEHIFALKQALAAYDFYQQCIDDCDVEIERAVAILNIAQPIPETPLPKAKHRSKMPSDPNFDVRTAMYQLAGTDLTQIHGIGPFLALRLIGECGTDLSRWPTAKHFTSWLTLSPGCKISGGKVLSSHTRKTSSRITVALRLAAVTVGRSNTALGAFYRRLAGRIGNAKAVTATARKIAVLFYNAMRYGMDYRDPGADHYEQQYRDRVIKQLHRRAAQFGYSLQPQDSPA

SEQ ID NO: 51204 - protein, 381 aa, unidentified
MSRSLVALDQDSTIIAVVELSQSSWLVAGVLPGIERQPRKKLEPSAERLLGLLHRWRDEAVRAGRNITRIALAFEAGRDGFWLARWLNARGVEAYVIHPSSVAVSREHRRAKTDRLDTELLKRAFLGWLRGERGHCSMARVPTIAEEDAKRPNRERECLVGERTRIVNRMKGTLARLGIRNFKPTLRKAADRLATLHTPEGMPLPPNVLAELQRAMARLGFVVSQIREIEQARQKRLEQQPETGPHAMVRQLSRVVGVGIETADMLVHEVLSRPMRDRKAVARYAGLTGSPDESGTKRREQGLARAGNARVRRGMIQLAWRFLRFQKDSALALWYRARTADSRVGTRKTMIVALARKLMIALWRFVTTGETLEGVVLRPAG

SEQ ID NO: 51205 - protein, 335 aa, unidentified
MSYSLFVGVDIAATTATAAWMRPGEKVCRPVMIEQTPEGYTNLERKLRATGAAPIEVLVVMEATGSYWITLATRLVQAGFQVSVINPAQAHHFAKALLKRAKTDAIDAQTLTQLAMMLRPAPWTPPPQIYYELQQRLAQRDALLDLQQQVRNQLHALEQLPEVIATVRERFESLLATFAAQLGTVEAEIMEVWQQDATWATAAQRLQSIKGIGWVTAAWTLVTTLNFTTCDTVEGLTAYAGLAPMPRQSGTSVWHRPTIGHTGNGRLRTAFYMATLSAAQHNPLIKAFYTRLRTAGKPEKVARCAAARKLLHIAWAVVTKAQDFDPNYAQKMHRA

SEQ ID NO: 51206 - protein, 342 aa, unidentified
MRQLGSVRHTPEQIAKLAEKLAKGGRRLSFCYEAGPCGYGLHRQLTDLGHDCIVVAPSLIPMKVGDRVKTDRRDAVMLAKLHRSGDLTAVWVPDSAHEAVRDLIRARATAVRVLGKARQHLQGFLLRHGRVYAGKRGWTLAYRRWLTTVRFDHPAQQVVLQDYIHAVTDAEARVERLTRQIEDLLPHWSMAPVVEAVQAMRGVAFIVAVTVVAEVGDFSRFDNPRQLMAYLGLVPSEHSSGATVRRGGITKAGNALARRALIEGAWTYRMQARVSRKLHDRLENLPQAIRDIAWKAQVRLCARFRRLAATGKARVVVTTAIAREMVGFLWAIARQVQVAPAA

SEQ ID NO: 51207 - protein, 337 aa, unidentified
MEYFAGLDVSMAETHVCVVTGSGAVIHNAKVPSTPADIAAELAQVPTCRRVVFETGRMAPMLYHGLSQLGLPVVCVESRQAYQALKLLATHKTDRNDARGLAHLARTGFFKPVHVKSLSAHAVRSLIIARKKLVGQRVTLENQIRGLAVVFGVRLPRALSPAFIRQALQASEGIPGLSAAMRGLVAARAAVLAAVVAIDADIRRMARASDACRRLMSIPGVGQLTALAFTAAVDDPGRFRRSRDIGAYLGLVPRRYQSGEIDYTGSISKCGDRRVRTLLYEAANVMLTRYKGPLKLKDWAIAIAKRSTMRKARIALARRLAIIMHAMLRHGTEFKPA

SEQ ID NO: 51208 - protein, 368 aa, unidentified
MGASVLYVGLDVHKMSMDVAIAASGGEVRHYGRIGGDLEALDKVVRKLQSTGAGLRFAYEAGPCGYQVYRHLTGQGYPCLVAAPSLIPRRPGDRLKNDRRDAVTLARLFRAGELTAVKVPEPEDEAMRDLTRAREDAKSVERRAKQRTAAFLLRHGHRFSGKTTWGRGHWRWLQGLCLEHPAQQIVLQEYLDAVAEAAARVQRLTAQIRELIPQWRQAPFVRAYQALRGVSLIVAATMAAEIGDLGRFANPKELMAHLGLVPSEHSSGATVRQGRITKTGNGHARRVLVEAAWAYRLRARMTQALHRRQEGLSQTVREIAWKAQLRLCARYRRLFARGKNKPMIATAIARELAAFLWAIGQAVQTATA

SEQ ID NO: 51209 - protein, 361 aa, unidentified
MESTKLIDRTKYIGMDVHKETVSIAVMNSTGKLVMECIIETKTATILQFIQGLRGDLHVTFEEGTWAAWLYDLLKPHVTKIVVCDPRRNALLKEGNKSDKVDARKLVELLRAGLLRPVYHGENGLRTLKELSRSYLTISKDLTRVMNRLKALYRGWGICCEGATVYAPHHRSEWLGKITEAGVRRRAEFFYQQLDALQALRQQVRRDLLAESRNHSARKLLRQIPSIGPIRAALLIALIQTPHRFRTKRQLWAYSGLAIETHDSAQYRYVAGQLQRSKKPQQLRGLNRNHNHDLKAIFKGAATKAGSGAGPFHDFYQALLTKGMRPSMARLTLARKIAAITLIVWKKGAHFDVEQLKPQAA

SEQ ID NO: 51210 - protein, 320 aa, unidentified
MAIIGVDVSKLSLVAVRTSSTGIVKESFEIQNTEVEIGTWLDKLQSKHKYLLVASEATAEYHNILAKACLAKAIKFRLLNPILTKQFNRATIRKRKTDLTDALIIAKLAIQGEGSIVTPASLSPAKVVHRTAIRLVKVEQTLESMCRRFSESLPEEKAVNQQLLDCMQLLKTSCEVLRSRARESTDPKLTKLLMSIPGVGERIVVTLINEIENIHRFPSPKSLVAYAGLDPRVRQSGTSLKRNTHVTKRGSIYLRRDLYIAATIAARWDSEVHEYCEKKLGEGKRYREAMMACSRKLLNRVYAVWKRGTPYERRLATTGT

SEQ ID NO: 51211 - protein, 308 aa, unidentified
MELFVGIDVSKESLDVCVRPATIRKRFGNTDEGRVELARLLAEMQPSLVLLEASGGYEIPVVEVLALRDLKVVVINPRQVRDFAKATGRLAKTDPIDAETIARFAEVIRPEVRPLKDMDAQRLQAVIARRRQLVQMLVEEKNRLQIAPSWTRPDIEAHIAWLTHCIEKAGKDISTLIKKAPLWREKEDLLKTFKGIGPVNACTLLARLPELGHLNRKKIAALAGLAPMNRDSGKYRGRRTIFGGRADVRSALYMASLSAIRHNPIIKAFYERLIHAGKLRKVALTACMHKILIILNAMMRTNTPWCAR

SEQ ID NO: 51212 - protein, 443 aa, unidentified
MHRVSGAEPQIVGLAPQTTRMTEETDTMKTYILRDPKTVEPQSAPRRLRDPSGRPPHAAAPRPGPALFIGLDVHNDSIAVSLAPSESPEVRRYGIIGGQHDDVLKLLKKLQAAHPGAALKFCYEAGPRGYPLCRFIRAHGAECIIVAPSKVPRQPGDRVKTDRRDADQLARLWRAGELTGIYVPDPQDEAVRDLIRARYQVQKQQHRARQQLKMFLLRQNLRYAGTKPWTAAHLRFLATVKLSFGEQQFVFQEMVNVITEAGQRLARYEKEIESGVEGWRWQPVVRALMSLRGVALLTGATLVAELGDLNRFASAPQLMSYLGLCPGEHTSGETRKQGGITKLGNGIARKAMIEAAWNNRTPARISRTVLARQEGLPKAVTEAAWNAQTRLHQRYKHLTGVGRKKSQVAAAALGRELAGFVWAIGRMVKPRATQTENVKPPAA

SEQ ID NO: 51213 - protein, 371 aa, unidentified
MLWTAPLHRHVRAMKVGAVKAPTIQRSQSCRQSRQSVWTAKSIFQVHGVDADGQVVIRRKLKRRYVLAFFQKVPSCLIGMEACATSHHWSRELQALGHRVRLMPPAYVRPYVKRQKNDAADAEAICEAVARANMRFVETKTTEQQSCLVLHRTRHLFIRQQTSLINAIRAHLAEFGIVAPVGGKGVEQLLDALANAREQRIPALARCCIAALGTQLRALKAQILEFDRQIMRWHRSHETSKRLDEVPGVGPALATALVASIAGPKAFRSGRDFSAWIGLVPRQHSSGGKDRLGSISKQGDRYLRSRFMAGALAVIRYAKIYGSRHRPWLTALLARRPTKVAAIALANKLARMVWAMMSRGERYREPVALAA

SEQ ID NO: 51214 - protein, 430 aa, unidentified
MGLVVLTTMHLEPDDQPMPYDWFVGIDWGSQQHQVCVLDRARRRVGERVVDHDGASLSQLAAWLWTVSAGQPQRVAVAIEVPRGAMVEGLIERGFHVFALNPKQLARFRDRHTMSGAKDDRRDARVLADAVRTDQPSFRRLQLEDPQFLRLRDLSRAEETLLADFRRSANRLGDQLHRFYPQMLTLCSGADESWLWDLIDLAPTPGHAALLSAEQVQRVLKAHRIRRVTATEVLTCLQVSALPVAPGVAEAAQAHCAFLLPCLRVLAEQLQACSRQVSALLRTLAETPGEDEGPSDVALVLSLPGVGRKITAWLFAEAAQPLAERAYQALRTHGGVAPVTRQSGQRRVVVMRRGCNPRLRHALYHMARVAMQRDAHLKSVYTALRATGQLHGQALRTIGDRLLRILMAMLRDRTCYDASRIRREPVVQMG

SEQ ID NO: 51215 - protein, 366 aa, unidentified
MLYLGIDQHHKQITISLRDGEGNVIQRRQVSTRPEKTRAFLEELARQSGEDGFMAILEVCGFNDWLIELLEEYRCKEIVLIHPDKRSKRKTDRRDAGKLSELLWLNGERLRMGMKPQGLRRVVIPTADDQADRQLTALRKRTAQQRTRTINKIKNILRRHNLTWEQPTKTFQTKLVRVWLAQIDLPPIDRMEMTHLLVQWNMYEQQIKQTQKSIEERFPQNESACQLSTAPGVSAYSALTIASRIGSIDRFASPRSLANYFGITPGCRNSGEATNRLGSITKEGSSMVRFILGQLVLHVLKQDPWMRDWYRRIRRRRGSKIARVAVMRRLVTIFWHMLKHNESYHVGGPPRLRLKKTRRTEAKMTQ

SEQ ID NO: 51216 - protein, 336 aa, unidentified
MCWSVGILSDHSVLKKFRQDPDAAALYKFLSSNYPNATFHSVYEAGFSGFWLHHRLTDFGIHNIVVNPADVPTMVKEKLRKTDAVDCAKLARELRSGTLKGIYVPGARALEMRSLIRLRKSIVKDSTREKNRIKSLLHFHGIAIPEEFTKHSTGNWSKRFLAWLKTAELATEYGRKALDMHIEQLTRLREMLLEKTRVIRTLSRTEAFAEPLRLITSVPGIGVTTGISLLTEIDNIERFKNAEHLASYIGLVPMCHSSGEKQGVGGITIRKHAALRSYLIEAAWVAIRKDPTMTMAYAEYRKRMNAQKSIVKIARKLVNRIYFVMKHKQEYVPCVV

SEQ ID NO: 51217 - protein, 330 aa, unidentified
MKAFIGIDVGKEKLDISWLRDVVKSKKKTKIFKNNPKGYQELVAWLIKNTNLEAQDIVITTEPTGVYSEPLMYFLYEQGFILLHVNPGKAKQYASSLGLVHKTDKSDATMLARYGHDQQHSLLSWQPEPVEARELKVMTRRLEALEQDLRREENRYEAVGFSGASTRVTQSIEDMIAVLKTEMGKLKNDIDEHIDRHPQLKKNRQLLQSIKGVGEVISRMMVSLMACKQFKNAKQLACYLGLIPKLNESGKRAGKTTLSKEGPGYIRAKLYMAAVVAVQHNPDIKAQNKRLVEQGKTSSRVRLLPHPSHRTVRTGLVYGSCILLSLRLIF

SEQ ID NO: 51218 - protein, 346 aa, unidentified
MRFYTRPHKHYCGIDLHARTMSVCILDVQGSILLERNIPTAPDEFLRLITPFREDLVVAVECVFCWYWLADLCAAESIAFVLGHALYMRAIHGAKAKNDRIDAFKIASLLRGGNMPESYVYPAAMRSTRDLLRRRLYLVRERGFLLAHVQNTHHQNNLTGPSGRLASKCNRTGVAERFADECVRKTVEVDLSVVEHLDTVITELELYLTRTTKEHDAHNFHLLRSIPGVGKVLAMTILYEVHDIARFPSVQDFASYARLIRCARESAGKRSGTSGSKIGNAHLKWAISEAAVLMLRHADIDRLRNRLQRKHGKGKAMGVLTHKLGRTIYYMLLRKKPFNMERFLAA

SEQ ID NO: 51219 - protein, 334 aa, unidentified
MENIALIGIDLGKNSFHIHCQDHRGKAVYRKKFTRPKLIEFLATCPATTIAMEACGGSHFMARKLEELGHFPKLISPQFVRPFVKSNKNDFVDAEAICEAASRPSMRFVQPRTESQQAMRALHRVRESLVQDKVKTTNQMHAFLLEFGISVPRGAAVISRLSTLLEDSSLPLYLSQLLLKLQQHYHYLVEQIKDLESQLKRKLDEDEVGQRLLSIPCVGTLTASTISTEIGDGKQYASSRDFAAATGLVPRQYSTGGRTTLLGISKRGNKKIRTLLVQYARVFIQKLEHQSGKLADWVRELLCRKSNFVVTCALANKLARIAWALTARQQTYEA

SEQ ID NO: 51220 - protein, 391 aa, unidentified
MIYVGIDVAKGKHDCFITNSDGEVLFKAFTITNNLDGFNDLYQKIETVMKDITKVKVGLEATGHYSYNLLGYLIDKGLPTYVINPLHTNLYRKSLSLRQTKTDKVDARTIASMLMSDVNLKSYSDISYHNEELKSLTRYRFDKVKERAKLKSSVSRLICILFPELEKLVPTLHMASVYALLSEFPGAKHIATAHLTRLTNLLSEASKGRYGKDTAITFRDAARASIGSNMPAKSLELKHTIKLIQELDSEIDEIENEIKIIMDEINSPILSIPGINYRMGAMIIAEIGDFNRFDSPDKILAYAGFSPSTYQSGQQDSAYAHMEKRGSRYLRYALYNATKYVCHWDPTFAAYLAKKRAEGKHYNVAISHAVKKLVRVIYHLEKTKQQYIKAA

SEQ ID NO: 51221 - protein, 348 aa, unidentified
MAYFVGLDVSVKETSVCVVDDAGKVILEQKVPTEPDTIIALLTSLGATYGRIGIEAGPLSQWLVNALTAAELPVICVETRHMKALLTAQQINKTDRNDARGIAQMMRVGLFKPVHVKTLVAQEQRMLLTSRKLLQRKLLDVESDLRGTLRNFGLKVGVVSGGRYEARVRELVAGFPRLTAIAEPLLIVRRIMRQQLAVLHKMLLDTVRDDPVCRRLMTAPGVGAVVALTYRATVDQPQRFVHSRAVGAHVGLTPKRYQSGEIDYDGGVSKCGDALLRTMLYEAAHSLLTHNRKWSWLKAWGVRVAQRRGMRRAIVAVARRLAVILHRMWVDGSEFRWSKDSTPVPAVA

SEQ ID NO: 51222 - protein, 368 aa, unidentified
MKQVTTYVGIDAHKKDLFIAMLIGQEKTPVTWQVANEPQAVRRLVRKLEREAPGPVSVFYEAGPCGYALQRQVTTSRVSCDVIAPALIPRKPGDRVKTNRRDARKLVELGRAGLLTAVQPPTPEDEAVRDLARARDDAREDLQRCRHRLGKLLLRRGLHYAGRNWTRAHRQWVDGLVWTHVAERAVVDDYLLAIDHTEARLLELDARLAEMAEREPYREPVGWLRCFRGIDTLTAMLILAELHDFRRFASAPALMAYLGLVPGEDSSGEKHRRGRITRTGNALVRRLLVETAWHYQHRPSVGVALTRRRKGQPGRVIAIADKAQQRLCRRFRKLAAEHKPAPKIAVAIARELAGFLWAALQPAPAAVT

SEQ ID NO: 51223 - protein, 373 aa, unidentified
MFHFTTLFIGMDVHKESFSLCYYDMMANQFKHSTKVGPNVSYIVNYVNELRRLYGQDAEVLCGYEAGCLGFTLYHQLQAHGIPCIVMAPTTVMKEGSKRVKTDKKDAAQLAKALAFRSYQPVHIPTAEDEQVKEYIRMRTDHKVALKKIKQQILAFCLRHDFRYTEGSSNWTQKHVRWLRSLNPDGLYAEILTEYLLTYEKLVVQIERYDARIEQLGQSDSYQEKVSRLSCFIGIKTLTALSIVTEIGDFNRFATAQHFASYLGLTPSENSSGDKERRGAITKAGNSHVRRLLIEAAQSLAKGTIGYKSKELKRRQSGNRVEVIAYADKANERLRRRYRTLVLGKNKKQNVAKIAIARELSGFIWGMMTGRIA

SEQ ID NO: 51224 - protein, 345 aa, unidentified
MKEIKVLGIDLAKDVFQLHGTDAKGNRVLTKRLSRGKLIEFMANVTPCLVGIESCGGAHYWGRVFEEHGHTVKIMSPQFVKPYVKSNKNDARDAEAIAEAVTRPNMRFVPKKTMGQQDVLLLHRARELAIKQRTAHGNQIRGLLAEYGIVVAKGLYHLYELPKILEKEEKKLSIDSKEIFLHLYEQLKMYAAQVDYYEKKIHSNAATDPRCVAVQEIEGIGPITASAIVATIGDASAFKNGREVSAWLGLVPKQHSSGNKIVLGTITKRGDRYVRKLLVHGARAVVKTCDNKTDRKNQWVADKKQRCGYNKAAVALANKNARVIWALLATGECYRKAAPIEARVI

SEQ ID NO: 51225 - protein, 411 aa, unidentified
MDLLLREVPGDRLVVAIDPGKVSNRVWLTSGERGVIGEPVSLPVLRDGVEELARLIGDSGVEGLPVIGIEATGALHRAWAAEVERRWPGSLRLFAPSETQAARAQLGSRRFKTDDRDCAALVWLLRQGAGRSSTPSAVEALLGAVRHRRQLVAARKVLQQRLHDQLNALCPGLSAPQGHGRALELEDPSGRAVLAYAATFAGRPPTARSLQARAAGRLTDANARYWAGRWKRLLAPPSDAELRADRLGRDLQRWHALREDIALLEVQLAELLVQTDGQILTTMPGVATVRASAFAAHTLPIERWPTPEHLFSATGLAPATYQSASVTRRGRISRQGLAEHRDALMGIAWGLARNSDAFRERDREYRSRGFRPIQARVALARHACRLCWRLLHSQQPYDDQRYDRARHRRGR

SEQ ID NO: 51226 - protein, 361 aa, unidentified
MKKPAQHLIAEVLRRQAKVEITIGIDLGDVWSHYCTLNQDGLVVDRGRFRTTPKAIEKWFTDVSPARVAMEAGTHSIWISEQLQELGHEVIVANVRELRAISHSDRKSDQVDAEKLARYARLDPNILRPIAHRTVAQQEALTLIRARALLVRLRTAAVNAVRGLTKSCGFRMPASATTCFAQRSLAVMPPGLAQALGPVLQQIAEMTVKIKQYDRQIQQLGQTEYPETQALLKVHGVGHLTALTFVLTLGSKERFGRSRDVGCYLGLRPRRSQSGDHDPQLGITHAGNAYLRSLLIECSNHILRPHGRDSALRQWGLHLAARGGKQAKSKAVVAVARKLAVLLHRLWTTQEVYMPFYEQAA

SEQ ID NO: 51227 - protein, 351 aa, unidentified
MLIIGCDYHPSVQQIAFVDSETGETGERRLLHKDGEAERFYRDLKLRGISVRVGIEATGHARWFERLLAELGFELWIGDPAQIKAARVRKQKTDRQDAQLLLKLLVEERFPRIWIPSPENRDVRQLLWHRHRLVQMRTRVMNQLQAVAMNEGVRRKKALWSKSGRAQLESFVLSPWASRRRQDLLEVLDRLNPTIDELSTAVEQEAKKRPEVLRLMTHPGVGALTGLAFVLIIGSAERFACGKQIGSYLGLIPCEDSSANRQRLGHISKQGNTLLRFLLVEAAQAAVRGDAEWRRKFVHLAMRRDPRIAKVAMARKLAVSLFWMWRKEWNYEQLKRFGSHAGQSEFVHGVK

SEQ ID NO: 51228 - protein, 379 aa, unidentified
MMPQQRRFRYIGLDVHRATIAVAIAEDDGSPPTSYGSIANEPAAIRKLMLRLGQPKDDVEVQLTVAYEAGPTGYVVQRQLSSLGVECAVVAPSLIPVRPGDKVKTDRRDALKLARLLRSGDLTPIWVPDAAHEALRNLVRARADAKADELRAKHRLSKFLLRQGRLQPPPKTRSWSRRYLHWLRQLQFEHVADHIVFADYLAVVAAATERVARLEVALRTSAQSSTQAHLIQALQAFRGIGFLSAVTIVAEAGSLRRFRTAPQFMAYAGTVPSESSTGSRQRRGHITKTGNSLLRHVLGEAAHHARHAPNLSDDLKRRQRQLPTAVVEHAWRAQLRLHTRYRQLCARVGPYRALTAIARELGGFIWGTAQLIDEVPAAA

SEQ ID NO: 51229 - protein, 342 aa, unidentified
MTNTLVGLDTAKSVFQLHIVDAAGGVTRRKLRRDELIPFFERHARCRIVMEACGAAHHWGRRLTALGHEVNLIAPEVVKPFVKRGRKNDAADAAAICEAAARPNIKFVPIKSPDQQAILALHTARSLLVKQQTMIVNAVRGLASEFGLTAPQGIGKMDELKAAVKGNDDLLDAARSVLDTLFQQLTSLSKQIEALEVRIVLHARTNETARRLATIPGVGPTTSSLLAATIADISVFPSARHFAAWLGLVPRQFSTGGKTRLGRITKAGNSEIRRLLVLGATSMVRRAEHWRSALGQWVRSALGRRPTRLVTVALANKMARIAWALMSHNEIYRPTKPMSAAT

SEQ ID NO: 51230 - protein, 344 aa, unidentified
MGEVITIGLDIAKSVFQAHGVDGAGAVVIRKRLSRAKVLVFFADLPACLIGIEACPSAHHWGRELEALGHTVRLMPPSYVKAYLKRSKNDANDAAAICEAVTRPSMRFVALKTKEQQASLMLHRTRQMLVRQRTMLINAMRGHLAELGIVSAKGRNGTGELLRIITDGADGRIPPVARGILGVLARQYSAIGAEIGSIQKGILAWHRSCEASRRLEEIPGIGPIVATALVAEIGDWKAFGSGRNLAAWIGLVPKQHTTGGKDRLGGITKQGNRYLRWLLVTGAMAVIRYAQKHGTHKRPWLGRLMERRPTKVAAVALANKIARVAWAIMVHGDRYKEPELQAAA

SEQ ID NO: 51231 - protein, 343 aa, unidentified
MDIIATIGLDLAKSVFQIHAIDSSGDVIVRRALRRAQLLDFFRKLSPCLVGMEACASAHFWARHIRACGHDVRIIPPIYVKAYVKRSKTDAADAEAICEAVTRPTMRFVPIKTPEQQAAGMVLKTRDLLVRQRSQTANAFRAHMSELGVVAAAGMASLAKLAGAIRDPEYRDIPEFARQALLEMVEQIDTLSVRIERLDRDILTCVKEDETARRLTTIPGVGPIIAATVRAAVHDAHGFRTGRDFAAWTGLAPRAHSSGGKERLGSISKRGNRQLRTLLIVGATSIIKLGKRGVNLPLWLTGLILRKPYKLVAVALANKMARIIWALLTKGGVYKKSPVAIAA

SEQ ID NO: 51232 - protein, 347 aa, unidentified
MKKVVAGMDLHSNNVVIGVLDLDGQRVATGKVPCELPAVEKFLAPFKVRLEQVAVESTYNWYWLVDGLQALKYPVVLANPAAMDQYSGLKHADDTNDAFFLAELLRLKILPTGHIYDAQLRPVRDLLRRRLTLVQQRTALMLSFKSLYTRTTGGELTLGELKALAVKEAQALYKHPANQLIAGLQIQHLEQLNASIAKIEKAVLDSARELPYYAKLATLPGVGKILGMTITMEVGDIQRFAGPGNFASYCRTVAAERISNRKPKGENNAKCGNKYLAWAFVEAANFARRYDEQCRKWYDRKEAKTSKVIATKVLACKLAKAAWHLMAEGVDYDPKRVFGPPATPLKT

SEQ ID NO: 51233 - protein, 536 aa, unidentified
MLEQRSTGQTYTRDAYADISLAVMHKLAERPAPARRHSSSRKLVNNCAAGDNFAGGRPAPARTRSRVCNPKRIEGRLPAEPEALAPTSNRKTPQEGHHISLVDSRAKRRKNRRQQRQTMNDSQQWKQYPGFGALDWASEKHSVIVVDQAGKVIEDFEIEHSALGWKKFREKLQAYGSIPFAIETSQGAAVEQLLEAGMIVYPLNPKSARAYRDRKAPSGVKDDRLDAWSFADALRVDGQGWKALRPEEPLIKELRLVCRDEVTLIEQRTALILQLRHALAEYYPAALEAFKDWTSVSAWMFVQRFPSPELLAKAGKRQWQKFLHARRLWGSDKGPRRMEIFAHATELSGSAPTAKAKSLLALSLVQMLFVLEKQLAVYRQRIEELFARHPDHDLFGSLPGAGAKIAPRLLAEIGDERDRFQGDAQNLQCLGGTAPVTMRSGKYRHCHRRWACDKHLRHAIHLFAEQSLTRCAWAQIYYEHHRKKDRSHSDALRRLGHRWLKIIHKMWIERTPYDPELHHRNQLQHGSWIFQLKACE

SEQ ID NO: 51234 - protein, 337 aa, unidentified
MQMPKYFVGIDIASDSFTVAIHQVRVKPATLSNCGEGFEELPRWLKANGVNSSNAIICMEATGVYTEYLCYFLHSKGFSVAVEAPQKVRRAFCNDLHKNDSIDSMRIAEYACRFHDQLPLWTPSQEIVEQVKALLAAREQLTGHLVANRNALKAIERKYVKTPLAEKVYLSSMEHIKEQIRLIDKELKNLISNHPTISRATSLMTGIPGVGTLLACNILVATQGFTRPLNARQLASHIGICPFERQSGASVHRRPRYRRYGPERLRKLLYLAALSLRTHNEAFKRYFLRKVEEGKSKRLVLNNIANRLLRIMTAVLKTQTPFIKGFKSLNPTLLCNA

SEQ ID NO: 51235 - protein, 346 aa, unidentified
MNATTVAIDLAKDVFELAVADSSGRIVRRERLTRFRFGRFVDNLPVCRIVMEACSGSHCWARRFQAAGHTVVLLPAQYVRPYRRRNKTDRADCEALLEAVKNPEILPVSVKSPEQQAVQALHRLRSQWMATRTARINVLRGLLREFGLVIPLGATTALKQFPEAIDDAAVPAFLRPLLLSMLEEIRTLTARVVEVERQLDDATADDPAVQTLRSVSGIGLLTATALRASASDARNFRNGRHLASWIGLTPREHSSGSHRNLGGISKRGDVYVRMLLIHGARSVMLRANQLARTGHALNPLQRWALDLAARVGHNKAAVGLANKLARIAWAVWYHQTDFNPDRAVAA

SEQ ID NO: 51236 - protein, 353 aa, unidentified
MEEKYVGLDVHQSMTVGAVHDGGGRSVMETVVKTEANAVGDFLRGLSGRIHVTFEEGTHAAWLYEVIRPLVAEVIVCDPRRNKLIEDGNKGDKIDAHKLAELLRGGHVKSVYHGASAMRTLKELVHNYDALVDDTTRVMNRIKAVYRGRGISSSGRDVYRKLNRESWLKRLPEGGLRQRTEFLYQELDTLSQIRQDAKRVMLIEARRHAPYRLVKTIPGLGPIRVAQILAAIGLPERFRTKRQLWTYCGFAVVTRSSADYELVGGKVQRRKTRTVTRGLNWNFNRRMKEVFKAAAITGMQREPFQSYYAGLITKGMREELARVTLARKIVAITLKVWKKGEAFDAAKLKPATT

SEQ ID NO: 51237 - protein, 335 aa, unidentified
MNYIGLDVHYRTSSICILNKNGKKIKQQTIRGGWSKLLEELQDAPKPFAICFEATCGYGHLYDRLSKVARRVVMAHPGKLRLIFRSARKNDRVDAEKLAKLLYLDEVPAAHVPSTNVRQWRELIEFRRRRVDKQTACKNQLRCLIRSHDMKAPRGLWTKNGLAWLASQQWPTASSQVRCEMLLDDYETNATQIKKITRVLDEIGKKHPGVSLLRTIPGVGARTSETIMAYIDDPQRFARSSQAACYFGLIPRQDASGGVNRLGHITKQGPPTARKYLVEAAWQAVRRSPKVRARYERILQDQPRRRKIALVAVARWLVQCMQAMLTTGEVWREAA

SEQ ID NO: 51238 - protein, 345 aa, unidentified
MHIASIGIDLGKTTFHLVALGERNKVLLRKKFSRPQLLAYTANLPASLVGLEACAGAHFLGTALREQGHQVRLIPAQFVKPYRKSNKNDFLDAEAIAEAVTKQNMRFAQLKTQEQLDWQAMHRVRDRLVRRRTALINEIRGFLLERGITFAAQPIHLRKNLPTVIEDAEQNLSPRLRWLLDRMWQEWKQTETEIQAITDEIERISNEDARCRQLRQIPGFGPLVSTATVAAIGNGSAFRRGRDFAAWVGVVPRQYSTGGKQKLYGISKRGNVYLRRMLIHGARSVLFRVKYDTGGFGQWVRRLAQRAPHNKVVVAIANKLARIAWAVLSSGQDYRHQPLQQRAAA

SEQ ID NO: 51239 - protein, 372 aa, unidentified
MTLFFGCDAHKHYSVFVAMDENGKKTKPVRIPHDLDSYRRFLAQLPEHSDIALEATGHWYWIVDEMERAQHIPHLTDALEAKKRVGKTHKSDPIDAGGLSLLLRCGTLPEVWIPPAPLRDQRELLRTRMALRDLRTALKHRIGASIDRYNLHSQSFSDLFGLRGREYLSTCLAKLPPVTASMIVVQLDALDQLEIKIEALEKRIRTEIACTPAVQRLMTLPGVDETLGPVLAFEIGDVARFSRAECLASYAGLVPRLISSGDHVRHGRTPGKKINPFLKWAFVEAAVCSLHPSGPRYAHVKSLFARLAPTKGFGRAVVAVARHLAEASFWVLSKNQDYRPPQPQRMVPRQHAGHPTAAHGDFVVTLDSSNNG

SEQ ID NO: 51240 - protein, 360 aa, unidentified
MKLGQEVVARSVVGGVDTHKDLHVAAVVDEQDRVVGSQCFAATRHGDKQMLAWMRSFGQLRRIGVEATGTYGAGLLRYMQSAGVEVLEVTTPDKHDRRKRGKNDDLDAQNAAHAAFTGRRAVTPKSRDGMIESLRVLKACRKTAVAARRVALQMIQNTIVSAPDELRETLRKMTRMQLVRTLAAWRPDLSDYRNLVSAYRITLKSLGRRYLELHDEIADLDTMIIGIIDELAPALVARNSIGHGCAGQLLLTAGDNSERLRSEASFAALCGVSPVPASSGKIIRHRLNRGGDRAANSALHIIAIGRLRTDPRTQAYMAKRIAEGHSKLEVIRCLKRYIAREVFALISHRRREINQIRLSA

SEQ ID NO: 51241 - protein, 419 aa, unidentified
MKPQAREAFAAFVGLDWADAKHDICLQAAGTKHREFLVLEHRPEAIDAWVQTLRTRFNGQPVAVCLELNKGPIVSALRAYDFLVLFPVNPFTLAKYREAFTPSHAKDDPTDAELQVELLLTHRDKLTPLSPQSPTMRALAQLVEHRRRLVGDKVRLTNRLTSALKNYFPHVLQWFQDKDTAIFCDFLSHWPTLKAAQLARRTTLERFFQAHHVRSVDVITTRIEAIKSAVALTTDDGVITPNALLVQALVAQLRVTLQVIADFDTAIAQRAQEHPDFALFEALPGAGAVFAPRLLVAFGEQRERYASAEELQKYAGIAPVTERSGKKSWVHWRLQCPKFLRQTFVEWAAESTRHSFWAQVYYQQQREKGKAHQVAVRALAFKWLRILYRCWQDRTPYDESMYLQALKRRSAPLLHHLAK

SEQ ID NO: 51242 - protein, 342 aa, unidentified
MNIPVRIGMDTSKSVFQLHGVDENEVVVVRRQFRRAEMIRYFERLPPVLVAIESCGSSHHWGRLLQSFGHEVKLIPPQYVKAYVKRGKNDAADAEALCEAVTRPSMRFVPVKSKERQAACMLMTVRERLVSVKSQLSNAFRSYAAEFGIVGPAGRQNVAALIKRVLEDDSLPEMARDLFRLQADEYAAVQARLAKIEAKLMKWHREDDISRRIATIPGVGPIGSSMLSMKAPPPETFRSGRDFAAWLGLTPKDHSTGGRQRLGGITKAGDSMLRSTLIVGATALLRHVRKGRHKPTPWLASLLERKPPKLVAVALANKFARIAWRLMISGGVYNQPVATMPT

SEQ ID NO: 51243 - protein, 346 aa, unidentified
MNKRDEGGVEVSAERLLVGLQREGAARARREFPNTPEGHEALVRWLEASGRTVRVVMEATGLYGLDLALRLDAAPGVEVMVANPRAVRHFAIALMKRSKNDPIDTEVLVEFAQRMPFQRWVRPSPAAMALHALARRLESLTQMHAAEKNRLHAAQLSLALPVAVVRDLKRSLRGLERALQRLTRQAVQVIGQDPDLNLRYQLLLSACGIGPTSAVQILAQLAVLSAELDVRQWVAQAGLDPRQYSSGSSVHKKTRISKTGNRHLRRALYMPALVAIRHEPHLRAFYLHLVARGKAKMQALVAVMRKLLHAIFGMFKHQQPFDGTRLFALPGEPLLPHLDFSTAEAA

SEQ ID NO: 51244 - protein, 339 aa, unidentified
MNGTSKFFIGVDVSKPYFDATLITVVNHTKQGLVTARFDNTTEGIKGFDKWLSRNKVLLADTLLVIENTGIYHRLLWSYCTAKQLPLHIGNAAHIKWSFGIARGKNDKIDSLRLCNYAFKEADTLKATAPLDPVLLQLKDLMTARGKLLSQMNSTKTYLKELKNVSDKAVIEILQKAHKQAIDGMAASFKLLEKAIKKLVQDSEAIQKNYDLLITVPGIGHLTAVYIICCTNNFAGKINGKQLACYAGVVPFEHSSGISIKGRNKVHPMANKELKKMLHLCALTAIQHSPEFKGYYERKKAEGKNGMSVLNAIRNKIVLRAVAVVNNQRKYVPNYQKAA

SEQ ID NO: 51245 - protein, 340 aa, unidentified
MDAIIIGIDIAKSVFQLHAETCSGQVVWRKRLRREELEGFLAKQAPALIGMEACGSAHHWGRVLRALGHEVRLMHAKYVKPYVKRGKSDLRDAEAICEAVQRPNMRFVPIKSIEQQTARALERARDLLMKQRTQLTNATRGLLAELGIVASVGLRGFKTLAARIDAGDPAIPGALLTALTPLVEQWRALHTSIEALETRIVAQAKSDERMRRLQTIPSVGPIIAHALVSAIGDPRRFATARDCAAWIGLTPLTNNSAEKTRIGHISRQGDHSLRRLLVLGAANLARQAKAKPNPANRWLHGISARRPFKVATVAQAAKTARIAWALLCSGETYRATVPAV

SEQ ID NO: 51246 - protein, 334 aa, unidentified
MAQITTVGIDLAKKVFTLHAVDIAGKQELRRTVRREQLVEVVASLPPCLIGMEACSGAHEWARQFEKFGHRVKLMAPQFVAPYRKSGKNDGNDAEAICEAVGRPNMRFVPVKSVEQQALLALHRVRRGFIVERTAIINRLRGLMSEFGVVLPLRSVTIRRQAAQAAEGLPELARRAVNDLLEHLRVLDARLETYDRELEAQARQCEPAQRLMKIRGIGAISALAIVATIGNGREFKNGRQFAAWIGLVPSQHSTGGKSRLGHITRKGDAYLRALLFQGARSVLHSAEGRADRISRWSLALQDRRGYYRTLVAIANKNARIAWALLAKGASFRPA

SEQ ID NO: 51247 - protein, 357 aa, unidentified
MESQEVKYVGVDCGKKSIEVVRINSENSLERRQFSTTESGINNLLQWLTLNDIVGLEAGSQSFRIAKSILNKGVQVIVLNPGNLATIYQSLKKTDKEDSLKIARLIQRHPIEELPTVPIPNDEEEDNRRLCSEHENWTKQLTQGKNRLHSLFTQAGLTQITKKHLRTKVSREASVTLLYDRYQKEAERILKVLDLVELNLKLIEEEIQEALKKNKAYVQTIMSMPGIGMITSLAIMSYMGDCKRFSSAKQAAYYAGLVPRVDISGDTVRYGRIINRGCHSIRRVIVQAAWSLVRCQHGGKVKEFYQRLYLKKGAKKSIIATSRKMIEVLYVMIRTGKLFDSMPENILNRKLTQYGLM

SEQ ID NO: 51248 - protein, 359 aa, unidentified
MTHPGQTTKEGVHIVVIIGIDPHKGSHTAAALGSGAEVLAQLRVPANKAMLSHLLHWASAWPERTWAVEGASGLGLLLAQQLVNAGESVVDVPATLAARARLLHTGHGRKTDALDAVSVATVAMHSRGLHQVIREDHATLLRLLADRRDELTQERRRAVNRLHRLLRDLRAGGAPTELGAEDAVALLTTIRPVTAVEHERKGMARALVADVRRLDRDLRINRKRCAEAVAASGSTLPQIFGISDVLAAKILGHTGDITRFATAQHYASYTGTAPVEASSGDIRRHRLCRAGNRSLNNALHLAARVQVMHPGLGQEHYRRKVSEHKSSREALRSLKRQLAKVVYRVLRADHDRLVAQRLT

SEQ ID NO: 51249 - protein, 306 aa, unidentified
MTLWIGIDVSKATLAVHVLPTRQFLSVPNTGEGHASLCAVLKGQAVGNLLLEATGGYERAVMRALAAAEVPVTRINPRRARAFATALGKTAKTDPIDAALLARMAELVCAPGVAPEPEREVLRELVQRREQLVQQRDDERRRLPQACTPLVRDDLAAHIGQLRLRIRHLDKAIVHAQQHLDDQLSRKLQAIAGIGQVTAASLMAYLPELGRLDRRQIAALAGLAPYNVDSGQHAGKRRIRGGRAAIRRVLYMACWSVIRKQADFKARYQRLRQQGKAAKVAITACMRVLLIRLNAMVREQTEWRTS

SEQ ID NO: 51250 - protein, 326 aa, unidentified
MIYVGIDVAKDKHDCCILGPDTEELFPVFTIRNNSDGYGELFHKIESVSKDKSQIKIGLEATGHYSYNILGSLLDHGYHTFVINPLHTNLYRKGQSLRKTKTDKVDARSIAEMLVTDKTLKPYTGTSYHSEELKSLTRYRFELVKERAKLKTSVSRLVNILFPELESLVPTLNMNSVYRLLQELPGAYFIASSNLTHLKALLADASKGHYGREKAIEIRETAKSSIGSLMPAKSMELRQTIRRIDTLTSDIKEVEQSIQKIMDECGSPITTIPGIKYRMGAMILAEIGDFARFSNADQVLAYAGLSPSTYQSGQLISSYARMETWL

SEQ ID NO: 51251 - protein, 428 aa, unidentified
MLKINPLSTLYVGIDVSSKSNYVCALDFYKNKYINSSFANNQPGAEELAKKILECLKEHPDLNTIVAALESTSVYSIHIANFLSSCEELMHFKPYVFVLNPKCTANYKKSYIGLGKSDPIDAFIIADYARAGNIETEPWRGSQFLALKRLTRHRLHLVECMTREKTYLVSNLYLKFSELQMLEGDDQPFCDIYGATSSSVLTEYLSPEEIIDSSEEDLISFLAQKSRNRIKDISKTAELLRKAARDSYRLDKALYEPLNVSIASSFNCIETFKKEIKLIDIAIEREIRGLNPNAFIILQSIDGIGPVFAGGIVAEIGDISAFHSSDALAKYAGLMWKSNQSGDFDGEDTPMSKAGNRYLRYYLGEAANSMRKHNAEYGAYYRKKYNEVPKHQHKRALALTSRKFVRLVYGLLARNQLYSGVSLDTSNE

SEQ ID NO: 51252 - protein, 326 aa, unidentified
MQGKSLRERSAESRVYVGIDVCKDRLDVHVHPLGRRLQVANSRDGLKRLKRQLSGLAVELVVMEATGKFHRLAHRNLHAAGFAVAIVNPLRSRLFAEAVGALAKTDAVDARLLAILGESLAPAAQPPAPEHMEALGELVTARQAATAEATALAHRHGASATTFLKAELKRRLASLKRHIARLEAEIARRIASDPELARRYAIVASIPGIGPVAAATLIVGLSELGMCSNKAAALLAGLAPIAADSGERSGERHIRGGRAPVRCVLYMAGLTASRCNPDLAAFYRRLRAAGKKPKVALTAVMRKLLVLANTLICQDRLWQPKPPIHA

SEQ ID NO: 51253 - protein, 459 aa, unidentified
MYTIGLDLAVEATHKAVVTDEQGRFVTPVLSLHTQPGELDQLLTRARNGLQERELRVVMEPTGMAWFPVAVYLVRHNVTVYLVNSQEVADLRRYYKRHAKSDRIDARVLARLPLVNPEHLHRLHLPSAKALACQRSCKQLDRLSTHMIAIQNRVQAIDRFAWPGLGEQVKALPFAPAARWMRAHWYDPQRVLEAGAAKIREQWQGSSEAADSAGEWIEALVDLAAEVVALYGAENQYLDFAQLQAEVCREQEWLATLAQQHQALRKQTVRPLYRQIHPSRNLETLKGVGQDSAAVYASFIGNAKRFGSTRMFRGWSGMVPGSAQSADSEAKGLHITQAGPDLVKKFAYLDAEIARRWDPQMAAIYYDQLVNKGKHHKQAVCACATHLLDRVLIVLREDKAYELRDVDGTEVAVEQAQAIIAQRYTVPQEARRRTTKRYRQERAEHQAEQNSKGKVVQAW

SEQ ID NO: 51254 - protein, 346 aa, unidentified
MLHAGLDLGRKRLDFCLLDESGEQVEVGAAPPDADGLRSLARRLARHDQPVRAAIESMNGARFVHDQLELAGWQVEIADALKVKGLAPLACKTDRIDAWVLAELSRRDLVPAIWLPDPSVRAERERARFRLHLVRHRSSLKQRVHAVLLAHGKPCPVSDLFGVAGRALLERLALPEPWAGTVAASLRLIDELDLQIATGEAELRRLGADHHYVPLLMTVPGIGWVLAYTIAAEIGDIDRFGSPRKLAGYSGLCPRVYQSGESDRRGPLAKQGPKYLRWALVEAAVHASTHPAYRERYQRTKTRLGKQRGAKVAQVDLARRLAEAIWHMLTRNQPFAPAGATDPLTA

SEQ ID NO: 51255 - protein, 412 aa, unidentified
MEQIHDRVAGLDVHRDQVAVCVRTPGPRGGAQTDKARFDTTTGGLAALAAWLAERDVTLAAMEATGVYWKPVYYALEDRFQLWLCNAHHVKNVPGRKTDMSDAEWLADVAAHGMVRPSFVPPLPIRELRELTRYRKTQVDARAAEIARLEKVLQDAGIKLTSVASKVLTQSGREMIEALIAGERDPKALAELAKGKLRPKIPQLTAALRGHFGAHHAVVAARILAHLDFLDDAIAVLDGQIAVRVAGDYQSAARLLGDVPGLERRSVEVIIAETGAGMSRFPSPAHLASWAGLCPGNHESAGKRRKVATTPGNPWLRRTLIESARAAARTKDSYFGAQYRQIARRRGPNKAAVAVAHSLLDVIWHLLTTGEVFADLGADYFTSRQDKEHQTQRLVRQLEKLGYTVQLAATAT

SEQ ID NO: 51256 - protein, 378 aa, unidentified
MIVFRHNNQMKGKSPVGTITMGVDLAKQVFSVSELDGGGRIRQRRDLKRDAFRAWLVQLPPGTVVAMEACSGAHHWARRCLEHGLVPRLMAAQFVKPFRKSQGNKNDRNDAEAIATAARQGNMRFVAVKMVDQQARLSWHRVREGYKGEALAISNRLRGLLAEFGVVVARSDHALRRALGDEVVRQQLPAMLHRLLDDLQQHWQQVRERIAACDTTIAAHARADVRSRRAQQILGVGPLTADAVVATIGDGRDFKQGRQLSAWLGLTPTQHSSGGKQRPGEISRRGDSYLRTLLIQGARSSLHRANVVARDTATAEQIWIRDLAQRLPFGKVLVAIANKHARQLWAILARSEDYDADAWLRHPMVQRPASSRNRTMAA

SEQ ID NO: 51257 - protein, 351 aa, unidentified
MSRQSTPSPIATIGIDIGKYTFHLVGLDHPGAIVLQLKTSREQLERRLANLPRCLIGMEACSGAHHIGRQLAALGHDVKLVPAQYVKPFLKGHKNDYRDAEAIAEAVQRPTMSFVTIKTPAQMDLLALHRVRSRLVSLRTGVINQIRGFLIERGITVRQRPAPLRKALCDLLSSNPPALSPRIVRLIADLSKDWRRLDDRIATVSTEIEALVEEDEPCQRLMTVPGIGPIISSAVVAAIGDGASFKQGRDFGAWLGLVPRQESTGDRTILGKISKRGNKYLRTLFVQAAHVILARRPSAAMRGLWPWIAQASKRLHRNMLAIALANKLARIAWAVLARGREYQPRIMPHAA

SEQ ID NO: 51258 - protein, 413 aa, unidentified
MAQETFAWFVGVDWGSERHQACILDVQGTIAGERAFPHSGAGLTELGDWLLSIAGAVSVVTVAIEVPHGPVVDSLIDRGFVVHAINPKQLDRLRDRFSVAGAKDDRRDAYVLADGVRTDRPLFRRLHVADPRLIELRAWSRLAEELQEERRRLSNRVHQQLWRYYPQMQKLTDDLAAPWFLELWTIAPTPAKARQIRKSTVEQLLKRHRIRRVDAETVLLTLREPAINVAEGVAEAASIHMRSLVARLRVVNPELREAEGKLDKLCMAIGETEAASGECLQRQDIMILKSMPGIGRINLAALLCEGSGPLSSRDYQALRTLCGAAPVTKRSGKSHIVIMRYAAHVRLRNTVYHWARVATQHDPKSRSRYAALRQRGHSHGRALRGVADRLLGLACVLLQRQTLFDPHFAQPTT

SEQ ID NO: 51259 - protein, 345 aa, unidentified
MPIVGGLDIHRKQITFDYLDTGTGQVRRGQVSPADREHLRAWLARFAGREDVAFALEGCAGWRYVAEELAAAGITAHLAEPADTAFARGRKRHAKTDKTDARHLRMLLAEGRLPECWIPPRHILECRAVLELYNDLRRERTAWAQRIHAVLFHQGAPALGEGALRTERGVAELRAAAAAHLSPAGQLQVATAVEVIDALEARLHVVRHQLLDAARHLAGAKALAARLYGVGPVTALAITCWLGGAGRFSSSRQAVRFAGLDITVSSSDRKGPPGKLSRQGPPVLRWAVYEAGKAHARTSAPDHGYYAAVKDRKNSKRACLSEARKILRQAHHIRAELGDDALAVA

SEQ ID NO: 51260 - protein, 313 aa, unidentified
MSQNNPNILYVGVDVAKSSLELHLDGRCHSLSNDSKGHAQLLKLLRPYSQAQLVCEATGGYEQPFVKVLQAALIPVSIIEAGRIRHYARAQGQRAKTDPIDAALITAFAVAIQPPPTPAPTPQQQKLADLSTRRRQLIHSRVAEANRAEHYTDPLCCRQSRQYLQLLERQIEACDQAILKLIAGDSQLAHKAHRLETIPGVGPVVAATVLAEMPELGRLSTQSAAALAGVAPYNRDSGNVSAPRHIGGGRVVVRNALYMAALSAVKHDRILKAFYQRLCAAGKKPKVALTACMRKLIILMNRLLKNDHFQLSN

SEQ ID NO: 51261 - protein, 324 aa, unidentified
MAELFVGIDVAKAELVVAQGPSGAVSTVTNDETGVRALAAMLTQAAPTLIVLEATGGYELLSVTMLAAAGLPVVVVNPRQVRDFAKALGQLAKTDRIDARVIALFGERVRPPVRPLVDDAVRELDALLTRRRQLLEMRQAERNRLAQVVGQGQRQRTVKQSLKNHIAYLERELAITDSDLGRMIRESPVWREKDDLLQSVPGIGPIVAQTLLAELPELGRLNRRAIAKLVGVAPLNRDSGTWRGQRTIQSGRTTVRAVLYMAALVAARRNPLIRAFYQRLVAAGKPKKLALIACMRKLLTIINHLVRTGQRWRVQPLLPSPTNR

SEQ ID NO: 51262 - protein, 352 aa, unidentified
MGESWSSRPYIFSEPEQLLGLLKPAFVQGRATEEEAMGERSVFVGIDVAKAQLDLAQRPEGPRLSAANTESGIATVVAHLRRVKPTMIVVEATGGLERPLVRAVVDAALPVVVVNPRHVRDFAKATGQLAKTDALDAQVLARFAQAVRPALRPVPDAPTQELAALIARRRQVVEMLTAEKNRLEGTPKRVQKRIQVHLNWLTTELARADDDLDQAIRTSPIWREQEDLLQSVPGVGPVVTRTLLAELPELGTLNRKQIAALVGVAPLNRDSGTLRGKRMVWGGRAQVRAVLYMGALVAARFNPVLRMFYQRLRAAGKAKKVALTACMRKLLIILNAMMKHRTPWRPEMAQCA

SEQ ID NO: 51263 - protein, 345 aa, unidentified
MDQQHYVGLDVSLETTSICVIDQDSAVVWRGKCSTEPDAICRTVRARAPALVRVGLETGQMSNWLTLGLRRKGLPVVCLDARHAKAALSLQVNKTDANDAYGLAQVVRTGWFREIAIKSMDAQTLRLLLTARAQLVSQRQAIANNIRGLLKTFGHVIRRGSKGPFAIRVREAIEGNAALSAIVEPLLMAWQALRDQAAVYDREITMKAKSDAAARRLMSVPGVGVVVALAYKAVIDDPARFKRSTSVGAYIGLTPRRYQSGEVDRAGHISKCGDSLLRSYLFEAANVLLTRHPKPCTLKTWGLALAARIGVRRAKVAVARKLAVIMHRVWGDDRNFDWGEAPAAP

SEQ ID NO: 51264 - protein, 353 aa, unidentified
MTLYIGVDFHPHQQTAAWCDTETGETETLDLFHDLEKIKEFYASFNQPAIVGIEASSRALWFENMLDSTNHTLLVGDAYKIRKRAESRHKNDRRDAELILDLLLRDKFPAIWRRSKEQNQILDILRLRVKIVGQRTAIYNRLQALAHTVGLPKGKMRNVSFQNRLKSAELDEAGELQRAHLFSLLEAFNRHIAELEQWLGSKSDSDPQVHLLMTQKGVGYLTALALVNTLGDVSRFERVPKQVTNFIGYDSMDQSSAGKRRFGGISKAGSPLVRFMIGQAAQTAIRYDPKLKSFHKRLARRKPKAVAKTATARKLLVKLSIMLRDNISAEEFDKRGSAVGNARWSARPEMTVG

SEQ ID NO: 51265 - protein, 359 aa, unidentified
MAKPRKLVGLDVHAAGVAAAVLDVETGELGAFSLPGDVVEVTEFCSVLPRPVRATYEAGPTGYALARELERRGVGCLVCAPGKIPRAPGDRVKTDRRDAEHLVRLLLAGKLHAVRVPGPAEEGLRDLVRAREDVRVDLMRARHRLSKLLLRHGLRFEARAWTARHAQWLAQVELAEPTAQATLLDYRGAVDGLVHRRDGLDRAITQSVATSDWAPQAGRLRCLRGIDVLSAAGLCCEVGDFARFERAGQLASFVGLVPSEDSTGERKRRGAITKTGSRHARRLLVEAAWHYRKPPRTGPVLEARQSGQPAAAVAISWSAQQRLHRTWRRLEQRGKPRNIVAVAVARELAGFCWSIARTE

SEQ ID NO: 51266 - protein, 455 aa, unidentified
MAKKGKKTKPMPEHMLIIHPHAAGIDVGAEEHWVCVPADRDAQPVQKFSAFTCDLHRLADWLTACRITTVVMESTGVYWIPLFQILEARGFAVALVNARHVKHVPGRPKTDRLDCRWLHKLHTYGLLAPSFRPPEDICRLRSLLRHRENLIRMTVKHIQHMQKSLDQMNLHLHHVISDITGVTGLRIIRALVAGERDPRTLATYRDYRIKSSEDTIAKALEGDYRPEHVFTLTQSLELYDFTQQQIAACDQEIERLLSTFNSLVDPDEHPLPPPTTAHRQPQRNEPAFDLRTHLYRITGVDLTQVPGLQAPTIHIILAEVGLHMHKWPTDKHFASWLGLCPDNQISGGKVLSTGSRRVQNRASRALRMAAQSLRTSPSYLGAFYRRMRSKLGPAKATTATAHKLAKIIYHMLQEQTPYRERGAEHYMHKDQERAIRQLRKQAKHLGFDLVPQTST

SEQ ID NO: 51267 - protein, 343 aa, unidentified
MKELKHVLGVDVAQKELVVTLGKMYEDFSISLYAYKVFRNSESGFIALTNWIERLLKDKAPQVHYVMEATGIYHQKFAYYLDDNGSKVSVVLPNRISNYIRTLELKTITDKTCSEAIARFGLERKLDYWKKPKDIYRELQQLTRERDQIVNERVVVKNQLHAEQSEAKPNLRSLERLESRIKFLNSQEKEIKVDIAEIVKNDSRLKSEIERMTSVPGIGALTAVIILAETNSFELIRNKKQLVSYVGLDVKEKQSGTSVKGKPKISKRGNKSIRKAMHFPALVAVKRDDYYRDSYARLVSKHGIKMKALVSVQRKLLELAYILYKNKTVYNKQYKNSVQTQMD

SEQ ID NO: 51268 - protein, 417 aa, unidentified
MKKNSKSPMKKEQKAKRAKAQRPVQRAPKEVLAELVEKLRGTLEVKATWASQPEASPRSELSPNLDRLTVGVDLGDQWSHYCILGLQGETLSEGQLQTREAEVAEFFQALPPARVVMEVGTHSPWVQEVIAGEGHEVLVANPRLMEGSKRCKRKNDRIDAKKLARLGRVDPQSLHPIRHRSREVREDLVVLRAREALVAARTELINATRGLVKSMGTRLPKCSSPSFGQKVRDAIPEKVREALLPLVQFADALSDSIQSYDQKIEELGSEKYGHTKLLRQVKGVGPITALAYVLTLENPEHFAKSRDVGPYLGLVPKQEDSGESQPQLGISKTGDTMLRKLLVQSAHYILGPFGPDSDLRSYGQRLCERGGKNAKKRAAVAVARKLAVLLHRLWVSGEVYEPLGYASSRAIVQPAAA

SEQ ID NO: 51269 - protein, 345 aa, unidentified
MKITTVGIDLAKALFQVHGVDERGKAMLRKQLKRKDVLSFFANLEPCLIGMEACASAHYWARKLSELGHTVRLMAPQFVKPYVKTNKNDRNDAEAICEAVARPNMRFVPVKMPEQQAVLALHRARQGFVKSRTAQANQIRGLLGEFGIVIPKGIGHIARRLPEILEDGENGLPAMMRQLIERLGEQLKALDQQVGEMQRQITLWHRQNEQSRKLEDIAGIGPITASAYVASVGDAKSFKNARQVSAWLGMVPRHEGTGGKATLGKISKRGDVYLRTMLIHGARSVIAQLERKPDQASPWLKRLLARRNKNIAAVALAAKNARIAWALLAHERRFEPDYVAIRPGA

SEQ ID NO: 51270 - protein, 455 aa, unidentified
MSSKKGFSEFPVVHPNAAGIDIGATFHVVAVSPNCDSTPVRQFQSFTTDLHKLSQWLREVGVKSVAMESTGIYWIPVFEILEADGFEVILVNAREVKQVPGRKTDYNDAQWLQKLHQFGLLRASFRPSEHIASLRAYLRHRERLIEYSAAHIQHMQKALMQMNLQLHHVVSDITGVTGMKIIRDIINGERCAARLATHRDIRCLKSEETIAAALTGNYRDEHIFALKQAVELYDFYQERISECDKQLEQAMAKLNQKKVTPDVPLPKARHRTKQHNEPDFAVRSALYTLTGLDLTQINGLGPYTALRLIGECGDDMSKWATEKHFVSWLSLSPGNKVSGGKILSSKTRRTKNRATTLLRIAAVNVGKTETALGAFYRRLAGRVGKAKAVTATARKLAVLFYSIMKHGKTYVEPGAEYYETQYRNRVLLNLKKRAKRLGYELIANPAPKTLCAEVS

SEQ ID NO: 51271 - protein, 406 aa, unidentified
MEVLYPRCAGLDIHKDTVVAGVRCVSKPQRREVRTFGTTTRELNALAEWLASNDCTHVAMEATGVYWRPVWHVLEGRFELVLANAQHIRNVPGRKTDVNDATWIADLLAHGLIRSSFVPPSRIQELRDLTRTRKQLVREIAQHTLRIQKTLEDANIKVASVLSNVIGTSGRAMLAAIISGEEDPERLADLAVGTARRKKADLVEALRGRVTPHHREMLKLHLHLIAALQNALATLDVSAGKLLAPIQERAALLTTMPGVSDIVAQVIVAEIGVDMSRFPTAGHLISWAGLCPRNDESAGKRRSTRVRHAGTWLKTTLVTAAWAAVHKNKSYLQAQFLRIKSRRGAKKAILAVAASMLTACYHMLRDGVEYRDLGPAHFDRRDRTKTIHRLMRRLEDLGCRVQLHAA

SEQ ID NO: 51272 - protein, 407 aa, unidentified
MASSVNENWSAKALWKVPELWKNQKTVFPQLLGPSVHTSHNAGCCGPSSNTTFLLLPRLTVGVDLGDQRSHFCILGLQGETLSEGQLQTREAEVAEFLQAIAPARVVMEVGTHSAWMQEIIAGEGHEVVVANPRLMEGSKRRKRKNDRIDAKKLARLGRVDPQSLHPIRHRSREVRQDLVVLRAREALVAARTELINATRGLVKSMGTRLPKCSSPSFGQKVKDVIPEKVREALLPLVQLADALSDCIRSYDQKIEELGSEKYGHTKLLRQVKGVGPITALAYVLTLENPEHFAKSREVGPYLGLVPKQEDSGESQPQLGISKTGDTMVRKLLVGSAHYILGPFGPDTDLRRYGLRLCERGGKNAKKRAAVAVARKLAVLLHRLWVSGEVYEPLGYASSRAIVQPAA

SEQ ID NO: 51273 - protein, 392 aa, unidentified
MVVSVGVDVSKDKHDCFILSSEGEVLADVFTIPNNLDGFRFLLRRIRDCTHAQDKIKVGLEATGHYSYNLLGFFLDNGLPTYVLNPLRTNLYRKSLSLRKTKTDRVDARTIASMLLSDAGLKPYTDTAYHNEELKSLTRYRFDKVKERAKLKSSIARLVCILFPELEKLVPSLHIASVYALLEEFPGAKQIAAAHLTRLKALLETASKGRYKRDMALEIRDAARNSIGSWMPAKSLELQHTIRLIRELDVEIAEIEEQIQSIMDELHSPITTIPGVGFRMAAMILAEVGDFTRFDSPDKLLAYAGMSPSTYQSGQLKNCYPHMEKRGSRYLRYALYNAAKYVCHWDPTFAAYLAKKRAEGKHYNVALSHAAKKLVRLIFAMEKSRQPYCSAA

SEQ ID NO: 51274 - protein, 362 aa, unidentified
MTQSTTVVAFDQHAATTVAAVLPPGHRTPALHTLSSETPAILRFIERLRRQGPVDCCYEAGPCGFELQRALSTRDVPCDVIAPALIPRRAGDRIKTDRRDAGHLAVLYRAGALTAIHIPDEQEEAARDLLRCREDFRADLLRARHRLSKFLLRHGRRFTATKQAWSTRHDAWLRAQTWSIPALDQTHRAYLRAVDEVVARLDDVDTQLRDLLTLEPLRPRVQRLRCFRGIDDLTALTIAAELGDPRRFATAPRLMAYVGLVPSEHSSGTKRAQGRITKTGNAHLRRVLVESAWHYRHHPFVSAAVRARQRGAPAAAIAHAWSAQHRLHRRYARLAARGKRKQHIVTVVARELTGFIWAVLTQ

SEQ ID NO: 51275 - protein, 368 aa, unidentified
MIYSVGCDIAKDEFTACLLTYELTTQNSNVHSRKTFKNNLSGAKAFIKWIARQTKGSSAQIRCTMEATGIYHETLALHVVEKAIHIHLSVVLPSKAKSYLASRGLRSKTDKIDAYGLALMGSERKLDHWKGIDPFWRELRQLTRTRANLQHQITELSNQLHAQTHSGIQIAEVQKTLKKLIKTLRRERKRLGELIEKHLASRPELSERMDMVDSIPGIGRQTIAIILAETLGFENFTSSSQLMSFSGYDVIINQSGKHIGKEKISKKGSPHIRAAMFMPASTIVRTKPKPLYAFYSRLLSKHGIKMKAHVAVQKKLLSYMYTLWNKQQYYDPARITEQQNLHQKRIAPPYIDGEATVDTSFALAHDVL

SEQ ID NO: 51276 - protein, 429 aa, unidentified
MTPASSTTGIVWVAIDVAKVAHQVLVESPDGRRRAMRVANTARDLERLVRYLRALSAPCTIAFEPTGDYHRAVMHRLGLAGFALRQVSSLAVARTRDALYNSWDKNDPKDAQVILHLLKTGTTQRFVDPLVSGHHDLQEMANTYQQVSLRKVRLQHAIVTHHLPLYFPEAERYLHSSRAVWFTDVLRLTPCPAAVRRYTKAAFIAAAREQVGGHKTDKTRWLADFYDTAATSIALPVQEDSAAIRMFRVVLEEYQQLCRRRKALEQEIIERVTGHPDFDRLQTVPGIGPILALLILAEAGDLRRFGHVRQFLKFCGFDLCTEQSGQFRGTTHLSKRGNARLRYACWMAGAVAVRMQQNSFRRKFEDYVRPDPLNKDRRRKAYTAVAAKMARVVYAVVTSGHDYRRFPEATRPGGRIPSPRAVEASSTTS

SEQ ID NO: 51277 - protein, 362 aa, unidentified
MGKTEKTRRLCVGVDLHKTQFTVSALTEDGEVVLQEEYRTTPDGYSEFIEEMHRYEEEDGCSIELAVETTGNARFFKNQMEKEFFDVTVVNTNKFKVITYSTKKTDANDALTLAMYLQKEMLPEAHLCSQTSEEIRRMLKTRRILVQSSVKIKNQIHGMLLGYGIETNAAQFQSKRKRQDLINDLADHDYSEFTASSLEVMLNILDGLEGQIKDVEAQIEKMVEDNEDVELLKTIPGVGKIGAATIASYTEDLERFDGDFKRFAAYIGIVPSVHNSNETVHLGHITKHGPQELRTAFVQVALGMIRLSSKTGDWRLMREYQRMKKEKGSGRAIIAMTRKVARIVFVMLEKREEFNPKLMLSK

SEQ ID NO: 51278 - protein, 324 aa, unidentified
MTDAVLGIDVSKNTFDTNLGAGTKARSKSFANSPAGWHHLIAWLGEHKIGQVHACLEATGRHGLGIALALHEAGHVVSIVNPAQIRDFARTKLGRNKTDQVDAVHIREYAELFKPRPWTPPSPAMRRLCELQTIRAGTVAGLTEWKNRRRSGIMDDLALSLAKTTIQHFTSQLEAVDQAIAETIDNDVELSAKRDLLVSVNGVGEALAGIVLAELPGPDILGSSAAVTAYAGLNPQQHQSGISVNRPVRISKIGNAVLRTALYMPALSAMRYNPAVAALVDRLKAQGRLKGKQIVIAAMRKLLVLCLGVLKTGKEFDPAMAMGK

SEQ ID NO: 51279 - protein, 313 aa, unidentified
MSELSMVGVDLAKRVFQLHGVADDGAVVFRKKLTRPQFKRFLGETPACMIVFEACASAHHWGRTAIQLGHEVRLIAPAHVKPFVKRHKSDVIDAEAITEAAMRPSMRFVSVKSEEQQIQAVAFRTRELLVRQRTQLINAFKAHLAEFGIVINKGPRGLAKLDDDLPEIVEAVPTDIKPLIELYARQMQTMPGIGPISAHAIQAYCPPMGQFRKGRDFAAWLGLVPRQNSTGGKVRLGRVTKMGQRDIRRLLITGAMAVITAFERREHQGDSWLAKMLKKRPRIVAAVALANCMARRLWAMLSKEENYEIRGAT

SEQ ID NO: 51280 - protein, 341 aa, unidentified
MKKFIRTAIDLGKSYFQVHGLESEGGQSISRKMKRSKMREFYEQIEPCRVGMEACGSGHYWARELVAMGHEVVLIPPAYIKPYIKRGKNDAVDAAAICEAMSRPGMRFVPIKSADQQAVLMLHKTREMFVKQRTMSVNALRGHLAEFGIIVAKGIGRVDELLALAQSDTELPQIAKSAVAGLAQHLEGLDQSIEAVGDEIARAHKQNPTSRLLDEIPGIGVLIASVIASSVPDPSVFKTGRDFAAWLGLTPRQNSSGGKEKLGSITKQGNRYIRKMLVVGATSVMRVAGKRKGALADWINALQAKKPKRVAAVALANKLARICWAIMSTGEGFRVDTYVKA

SEQ ID NO: 51281 - protein, 354 aa, unidentified
MNSTQVFEKRKIAVAIGIDLAKDHCDVVAYNADNKVCFSKANMSFPKLMEWLANAHPAVVLMESCKGCHVRARDIADLGHDARLVKGADVKALRNVCQKNDIRDADYIARLLYVPGTKFVFVKNQRQQSLQFLQNEYKSFQELRIQVGNQIHAGLEEFGCPARKSTAFIQSRMVAHLEKNAELIPEAVMASFLRRREMWLNLFEQEEGAKKRMEEIAKTDDDAKRIMTIPGVGAQTAVGMLVHIGGDIGRFKNSGQFAASIGLVPKQNSTGGNTTLNGITKCGPKRLRANLVQCGQVILMHADKLKGNFGDWVRKLRDSGKKRGVIACAIAAKLARIIYRLMKDKVDYTPVPSR

SEQ ID NO: 51282 - protein, 354 aa, unidentified
MTSTKYIGLDVHTESISMAVRNAAGKIVMESVIETKASTILQSIHGLQGDLQVTFEEGTWAAWLYDLLRPHVSSLVCDPRRNALLKDGNKSDRIDARKLAELLYLDKLHPIYHGEHGLRTLKELVRSYLTLTKDLGRVMTRVKAIYRSWSIPCTGKQVYALRHRSEWLAKINEPAVRRRAEFYFEQLDALRTLRQQARRELLAESKKHPAWKRLCQIPSLGPIRAAVLMGIVQTPYRFRTKRPLWKYIGFGIEIHSSADHRWVHGQLQRSRKRVSVRGLNQNCNHDLKNLFKGAAIVASGKPGPFQEFYAALLAKGMRPEMARLTLARKIATIALIVWKKGVCFDANHLKPQTA

SEQ ID NO: 51283 - protein, 325 aa, unidentified
MRIIGCDLHARQQALAMLETTTGEMVAMTLKHEGDNVREFYSKLPRPVRVGIEATGSMQWFVNLMEELGIECQVGHPANIRAAEPRKQKHDRRDADLILKLLVENRFPKIWLPSKEQQDLRALLRHRHQWVRIRTRIQNALQAIALANGLRRGPALWSQDGQKTIALLPLAPHAAYRRSELQAMYAKFGKEVEKLNQRVEEQACERPGARLLMTHPGVGPITALATEVFLGDAARFADSKALASYVGMIPSEYSSGERQRFGGLSNKAIRCCGFSGVRRRYTRYAGIRSCNVSTAANWSRKAWKNACRRGSQTRDPAVDHVAGRD

SEQ ID NO: 51284 - protein, 364 aa, unidentified
MKIIGCDFHPSFQQIAMVDTESGETTERRLLHGDGEAQQFYESLSGPVLVGIETSGNTLWFERLLEKLGHQLLIGDATAIRAAAPRHQRCDPRDARNVLQLLLEKRFPTIWVPTLAERDLRQLLKHRHTLVQMRTRAKNQLQHIAMNQGMQKKRQLWSKAGLEQLKSLALEPWTKRRRDDLLKILEQMDSHIAELSKAVAAEAQHWPQAVLLMSHPGVGPIVALATVLTLGEVSRFARGKQVASYLGLIPREDSSGEHRRLGSITKQGNSFMRFLLVQAGMSAARGDAELGRVYKRLAQRKHHGVAKVAVARRLVLRLYWMLRTNRRYPEVVRMQGSSSHPVAEVKADRLSEHPASRGGTNPGR

SEQ ID NO: 51285 - protein, 345 aa, unidentified
MDHFAGLDVSVKETSVCIVDDTGRMVREVKVASEPEALLPVLTNPLYRFKRIGLEAGPLSQWLFSTLAETGLPMICVETRHMRAVLQAQINKTDRNDARGIAQMMRVGLYRPVHVKTLRSQKLRMLLTHRKLLQSKAIAIDNDLRGTLRNFGLKVGVVGALKFEVRIRELVESLPDLAELVEPLLIVRRTLREQIGILHGRLLAVVRHDDVCRRLMTVPGVGPVVALTYRATVDVPARFRNSKAVGAAFGLTPSRYQSGEINRTGAISRCGDEMMRAMLYEAAHIMLVRLAKWSWLKAWAMKIARHRGIKKAIVALARRLAVIMHRIWVDGTEFRWTREQAVAAA

SEQ ID NO: 51286 - protein, 323 aa, unidentified
MRKHITVCAGIDTGKYKLDVAIDGSLEEFQIDNTADGHAALSVWLKRHKVNRVGIEASGGYEQDVVAHLRRDGFVVVVFQPAQVRAYARFLLQKAKNDKIDATLIAACTAAIKKIHAPPDDRLAPFAARMTLIEQLTDQVACSKCYREGCRERQIQQFWKAEIARLNKLLRAELKDLAAAIRQHRDLAERLDLIESVDGVGLKTAVAILVRMPEIGRVTREQAAALAGLAPFDDDSSMHSGIRHIGGGRERLRGSLYNAALAAAFHWNPQLIALYKRLTRVGKPHKLVLIACARKLLIFVNTVVERGTPWTSTAPPLVIGKVA

SEQ ID NO: 51287 - protein, 343 aa, unidentified
MGDVITIGLDIAKSVFQIHGVDADGTVVIRKRVSRAKVLEFFAAVPRCLVGIEACPSAHYWSRKLEVLGHTVKLMPPSYVKAYLKRGKNDANDAAAICEAVTRPSMRLVSTKSEQQQSGLMLHHSRRLLVRQRTMLSNAIRGHMAELGIISAKGRNGTAELLEIIANAKDNCIPAAARFSLEVLARQYIAIATEIGVLEKRIHAWHRSCEESRRLEEIPGVGPIVATALIAEVGDWKAFASARSLAAWIGLVPKQHSTGGKERLGGISKQGNRYLRWLLVAGAMAVIRYARRHGTKRLWLTRMMERRPIKVAAVALANKIARMAWAIIVRGERFREPRLLLAA

SEQ ID NO: 51288 - protein, 309 aa, unidentified
MENIIVGIDVSKDRLDVAIRPTAEIFAVERNAKGLEALAAKLKGLSVHLIALEATGGFETVVTATLSSLGFPVVVVNPAQVRNFAKAIGLRAKTDTIDAGVIAHFAEATNPEVRVLPDGRTQILSDLVARRRQIVEMIGAERQREKRASKNLKKSITRLLKALEKELSSVDADIDDAVRGSPAWKDKEDLLASVPGVGPAIARTLIADLPELGSLNRKQIAALAGLAPFTRQSGQWRGRSFIGGGRQAVRTVLFMGAMVAKRHNPTLKAFFDRLVTAGKPKMAALIAVARKLLTILNAIARDQKPWKIA

SEQ ID NO: 51289 - protein, 343 aa, unidentified
MNSMNYVGLDIHKKSISCCVRQADGTIIQEGTIPATRDALDNWTKQLPQPWTAGMEATLFTGWIYDHLVSAGAMVKVAHPAMLQAIAAGKKKNDRVDARKIADLLRCDYFPECHMAPREIRDRRRVLRYRNLLVRQAVQMKNKVSGLLMEAGVPYNPEMPPSMPELLRLSRSTVEALTGMQRQLIRTLESDALLAARVERLASIPGVGRVVALTWALEMGDISRFASVKKAVSYCGLCGAEKSSGGKTERTPISKQRNKHLQTTLIEAAKLAPRWNGRSTRRGSEWPATRPDGRARNGKCNRDVEQRDLPGLAVWGLGKRRETSRGLHLWVSRLAGKSKLNLR

SEQ ID NO: 51290 - protein, 414 aa, unidentified
MNRMTDPPVHVTGGVDTHADVHVAAAVCTTSHRLLGTAEFETTPAGYVQLLAWLLSFGLLDAVGIEGTGTYGAGLARFLAAEGVRLVEVDRPDRAARRLQGKSDPVDAEAAARAVLSGRAKGTPKSRDGIIEAIRVLQIVYRSAVRDRTAATNRFQALVVSAPADIRADLQQQPPQQRIERARRWRDRDGDDTAARATRQALRELARRIHLLDEQATRIEAELDELTEQAAPGLRDLVGVGVHTAARLLVAVGDNPERIHSEAAFAHLCGVAPIRASSGKTTRHRLNRGGDRSANHALWQIVMVRRLYDERTRAYVARRTAEGLSDREITRCLKRYVAREVHRALTRPLPLAPRGAELRRLRQQAGLPMRLVAEPFDITVQRLSRIERGITRNPNLQTRIHAWLTETNTTHMAA

SEQ ID NO: 51291 - protein, 467 aa, unidentified
MVDYTKPAFYCGLDIHKYELAVAIYCKDDSQSELLKTNIFQVDTNGLNNFWNLVKKYKPDGFAMEATGIYHHVIYKFLLNQREKVDWAFKLVVVNPADASGISNKQKFDRIDAENLAKYLSMGLLQSGEPVIEIIEDLKAIFRMALRIEKDRTALKNRIKKTLDRAGIRPKGLNLNREWVKEFLHYFLEASTSLGECVKHIEANIEVLPAHRYKIFKNIKNFIPYFDFKLSIGQRSMVRQDLIELAFKTARKSLLAVEIDNLILERPGLRQQAYNLATIPGISPFSAVWILSEIGNIRQFPSVERFISYCGCTPRIVSSAGKIYSAHISRHSNSFLRTIFYNAAIVVCNLVKKSSTLKDYAIHTMDRKKSTSTTLAYCIVAAKVAKISYAVLRDGVAFNPNFGSSFDKRINSKNTSHFSLTDRNLIRRTRNALKRVGDMQELGFIGDHASELAEQLDLALQGKNFSD

SEQ ID NO: 51292 - protein, 356 aa, unidentified
MMYIGVDLHKTQFTVFFRTNKKWRSYGTNEVGIKGFIADIRKLGCLESACVGVESTGNTRYFKKELEKRGISVKVINTHKFKVINESVKKTDKHDAQTIAEFLEKDMIPEARLCSEYSENLRRLLRVRRNLVRMTVMIKNQIHGALTSAGIEDGKATLQSKRGRQEILNALDTMKLGLEVHSLVGIIDDLSAHVKKIESEIEKKVSDDGVIELLQTIPGCGKITAWTIRAYTDDVRRFKSAKHYAAFAGLVPWVQNSNDTIRHGKITKRGPEELRTAFVQLVMGMNRLSHTQEYRIMAKYRTMKKHKGAGKAIIATARKMSKMVWHMLTYNEPFNPDLMTDAKLDRVIREMRSTSA

SEQ ID NO: 51293 - protein, 321 aa, unidentified
MNDSNTTDSRSNGLFWGVDVASTKLDLACHDEAEVVSFENSADGIGQLVKHVRHEPLALLVVEATGGYEVPLVATLQEAGLPVVRINPRQLRAFATAVGELAKTDTIDARLIARFAHDVRPALRPLASKEQRFFASLAARRRQLVALRTAERNRRKKVAEPQLHASIDAVLEEQIAHLDRQLAELIAADPEQRQRDRILQSVAGVATVTSHVLLADLPELGQLEHKQIAKLVGVAPLNRDSGKFRGRRTIVAGRRSVRTALYMASITATRFNPQIRQFYQRLRQAGKPFKVAITACMRKLLTILNARIRDNTTWRKNTMNT

SEQ ID NO: 51294 - protein, 392 aa, unidentified
MVVSVGIDVSKDKHDCFIVSAEGEVLADVFTVPNNMDGFHCLLQRIRDCTAPQDKIKVGLEATGHYSYNLLGFLLDNGLTTCVLNPLRTNLYRKSLSLRKTKTDRVDARTIATMLLSDVGLKPYTSTAYHNEELKSLTRYRFDKVKERAKLKSSVSRLVCILFPELEKLVPTLHMVSVYALLEEFPSARKVAAAHLTRLKALLETASKGRYKRDMALEIRDTARNSIGSWMPAKSLELQHTIRLIRELDNEIAEIEGQIQAIMEELHSPITTIPGLGFRMAAMILAEVGDFSRFDSPDKLLAYAGMSPSTYQSGQLKNCYPHMEKRGSRYLRYALYNATKYVCHWDPAFADYLAKKRAEGKHYNVALSHAAKKLVRLIFAMERSQKPYLPTS

SEQ ID NO: 51295 - protein, 353 aa, unidentified
MSEQLNATIAVIGIDIGKNSFHVVGLNARGSIVLRQKWSRSQVEARLANLPPCLIGMEACVGAHHLSRKLKTFGHDARLMPAKYVRPYSKGQKNDFRDAEAIAEAVQRPTMKFVATKTADQLDLQALHRVRERLVSQRTGIINQIRAFLLERGVAVRQGLRFLRAELPRILATPSDVLSPRMVRVIEGLSEDWRRLDERVDHLSSEIGAVARQDAGCERLMSVPGIGPIISSAMVAAIGTGDVFSKGRDFAAWLGLVPKQISTGDRTILGKISKRGNRYLRVLFVQAAWVVLIKPKTWERHGLKPWIEAAKRRLHRNVLAIALANKLARIAWSVLAHGRNFEARKIDEVAQPV

SEQ ID NO: 51296 - protein, 350 aa, unidentified
MSMLAELVEVVIGVDTHSQTHTAAVVDARTGGVLARATVPADPDGYAELVTLAEQHSGLRAWAMEGTGGYGAGLARHLAAADELVVELDRPKRPARRAGAKSDPIDAERAARDALARTQLAQPKTGPERAALQMRLTARRAAVEAATAAVRQLLAMVITSPEPVRGRFRGQTTRAMITTAARMRPGARSGDIEVTTALTVLHDLARRIRFLETEALDHEKAIRTIVRSWRPDLLELTGVGPIVAAAVLTAWSHPGRCRNDAAFAMLAGAAPIPASSGKTVRYRLNRSGDRQLDRALHTVVLTRLQRDEPTRTYADRRRAEGKTDREIKRCLKRYIARELYRRLESPPLAA

SEQ ID NO: 51297 - protein, 343 aa, unidentified
MQSISTIGLDIAKSVFQVHGVDAAGQVVIRRQLRRRHVLAFFQKLPPCLVGIEACASSHHWSRELQALGHAVRLMPPAYVKPYVKRQKNDSTDAEAICEAVTRPNMRFVPTKTVEQQSCLMLHRARHLFIRQQTAVINSIRAYLAEFGIVAPVGRRGVEQLLEVVADRADHRLPEIARVCLAALGSQLRALKAQILEFDRRIIAWHRSSATSRRLDAIPGVGPALATALVASVADARAFRSGRDFSAWVGLVPKQNSSGGKDRLGSISKQGDRYLRSLFTAGALAVIRYARIHGTDHRPWLTRLLARRPTKVAAIALANKLARMAWAMMARGERYNEPAALAA

SEQ ID NO: 51298 - protein, 416 aa, unidentified
MNAAGIDVSSRKSTVAVLRPFGEMVRVPFEVNHSAEGLASLVQQLKGIEGETRVVMEHTGRYYEAVANVLHEAGFFVSAVNPLLIKEYGGNSLRRVKTDKADAVKIARYALDNWADLRDYTPMDRIRYDLKTLNRQFHLASKQKTATSNNLIALLEQSFPGVRKCFDSPVRSDGTQKWVDFSHDFWHADCVRKHSLAAFTERYRKWCKRHGYHFRQGTAQQVYDLAKSVVVLVPKSDLTKVLVQEAANQLTTISKSVETYRAEMDHLASQLPEYPVVMGMYGVGDSLGPQLLAEIGDVRRFERKQSLVAFAGVDPMPNQSGEKNVRSNKSSKRGSPYLRKALFNVMICYLQKAPADEPVFQFLDRKRAEGKPYYVYMTAGANKFLRHYYGKVMEYLSTLEDLPPVDMDSTGLPKHP

SEQ ID NO: 51299 - protein, 361 aa, unidentified
MFDYVTAIGLDVHARSISACAFDPMTGEVTRARFGYDPASVAEWVLGFESPKAVYESGPTGFHLCRALRALGPDCAAGAVSKMHRPAADRGRKNDRRDAEWLARLLACRNVVEAWVPDDRTEAARDLSRALEDARDDLQRARQRMSKFLLRHGLVFDETTPAGRRRSNWTEAYWRWARSIEFGEADDAAAYEHYMDAVERCAEAKRELERKVEEAAARPGWAPVVDALCLVKGIDVASAFLLAAEAGDFSRFPTAPSFASWCGLAPRSARAARRSRAAGSPAPVTATSGARWSRRPGTSRCRRGTPRSRGRATGSRRPCRGTPRSATAACRTGGTPCPRRGRGRAWRTARRPARWPAGSGR

SEQ ID NO: 51300 - protein, 429 aa, unidentified
MSPAVMIGMDPHKRSVTIEVLDRKERVLHRGRYAFDRDGYRQLLTVARRWPQRTWAIEGCNGTGRPVAQRLVADGETVLDVPAKLAARVRVFDSGNGRKTDPADAHSVAVVGWRTSGLIQVRLDEQTVVLRLLCDRRDELARTRTQTVNRLHRLLAELIPGGAPRFLSALQAKAMLAVVRPTDVAGRTRRQLAADLITEISVLDRKLKASDVRLREVVTATGSGLIRLYGIGPAGAARLLGDVGDAARFADRDQFASWNGTAPLDASSGEQRRHRLSRAGNRRINRVLHIMAIVQIRHDTEGRAYYRRRLAEGKTPMEALRCLKRRLSNVVHRQMAADAAKASPGGQAGATTNSSAAGPIPTAGTSEQPQPGPATQPTGQVATEIPATAAAPRRGRPRPARNPALTGGRRGSRVKGGPKGPSRSDAKRP

SEQ ID NO: 51301 - protein, 402 aa, unidentified
MNCVGIDVSKGKSMIAVMRPFGEVVVSPFEVRHTASELNELAKLLKSLDGETRVVMESTGNYHTPVAWLLHDAGLYVSVVNAMLVHDYGNNSLRRAKTDKKDAVKLANYGLDHWLTLPRYVPEEDIRLLLKNCYRQYQQSSKVQTMLKNSLISLLDAVFPEVNRLFSSPPRADGREKWVDFVSAFWHCRCVSELSLKSFSTKYQKWCRKHGYNFSQEKAREIHAKAGSCIGVMPQNDTTRLLVEQAVMQLQTTSAALAALKQEMQSLAASLPEYPVVMKMFGVGPTLGPQLMAEIGDVRRFHSKKALVAFAGIDAPPCQSGQMDIRSRSISKRGSAALRRTLFLVMGVYLQSAPLDEPVYQFMDKKRSEGKPYKVYMMASANKFLRIYYASVTAYLNTLTRI

SEQ ID NO: 51302 - protein, 372 aa, unidentified
MNNNKSNEGISGNGSNQASVANNGNRVLKLGLDMHYRQITVAMQEDGGRIKAAGKMRHADFLNRVGKKLEESWEIHSCYEAGACGYWLHRHLEQMGVKNLVVVPKAMGRGSKKQKTDKRDSGELCDSLDRYLRGQDKALSIVGVPTEDQEQNRALIRYHRQIMADRGRCEARGKGLLCAQGIEVHGRWWQGDGWIEVQHNPRLKDWMKEQLIGWRNKILSTDEEQSALRERIAALAPAILPKGVGAYSAAVLEFEMRGFERFKNRRQVGSMTGLCPGIHLSDGRGKEGSINRCGIGIVRWTLVEMVWRLMKWQPQYPPVRRLALGLVKSKRAKKRLAVQAARRLAIDLWRLSTGQTTPEKLGLMMHCTHPEK

SEQ ID NO: 51303 - protein, 320 aa, unidentified
MQSILDLGADVDSRYVVIACAAHSFVPQRIANERQAILAWLRNIPRPSRLGMEATGGYHELLAELAHKAGLEVFVINPRDLRRYAQGIGRRGKTDRIDAEVIARYVAKEHAELHTYILPSKDQRALARLMKRRAKLVVIKGTLMQSLRGLPGVQQQLKDVLARLEQLIVGVEALMQHALQRVPAAQQAADQISTIPGFGPVGSICLGHSFTRVPYSNGDAVIAHTGLDPRPEDSGKKRGRRRLSKRGPAEERRVLFNCARSAARTKLWRPYYEAQLAKGLSATAATVILARKMVRVAFALYKHNQPFDPARFAAHALQTP

SEQ ID NO: 51304 - protein, 409 aa, unidentified
MELLIPRCAGMDVHQATVVVTVRAPGDPGERRSVTETFGTMTPDLLALREWLQAQGVTHVALESTGVYWKPVYYVLEDAFTLLLINMHELKRVPGRKTDVKDSEWLAQLLECGLLKASFVPPPAIRDLRDLTRYRVQQVRDQAQETNRLHKVLEDAGVKLSTVVSDVMGVSGRAMLAALLEGKSDPVALADLARGRLRSKLPALQRALQGRFRPHHAFLLRQILSKIDFLEETIAHLTEEIDTRIRPFEPMLTALDTIPGVNRIAAISIVAETGGDMTRFPSAGHLCSWGAMCPGQNESAGKRRSGKTRKGNVYLRRTLIQSALTATRKRDCALQTRYHRVKRQRGHKKAVVAVGHQILEIAYYVMRDGVAYHELGSDYFVRRDRERTKRRSIQQLEALGYRVTLDDAA

SEQ ID NO: 51305 - protein, 355 aa, unidentified
MLIIGVDFHPEFKQIAWVDTETGEFQEQRLQHGEPGERFYRALAVAGRQVRVGMEASGHARWFERLLAELQFELWIGDAARIQSKRGRKQKTDRQDAQHILKLMLKDDFPKIWVPSWENRDLRQLLWHRHRMMQARTRIMNQLQAVALNEGLRCKKRLWRAGGRQQLEAFRLAPWASRRRHDLLELLDRLNPTIAELSQAIEQEAEKCPQAQRLMTHPGVGALTALAFVLIIGNTERFQCGKQIASYLGLVPLEKSSGNRRRLGHITKQGSSMLRFLLVEAAQVTVRSLPEWRSQYFRLMIRRGRKTAKVAMARRLAIRLYWMWRQGLNYEQLKSSVRTQDSPDIAMVCSRTPSN

SEQ ID NO: 51306 - protein, 376 aa, unidentified
MMEKLRFLGLDVHAETITVAVAEADGEVRSLGTIANREESIRKLIRKLGPVEHLRACYEAGPTGFVVYWQLTQLGVKCDVVAPSLVPKKPGDRVKTDRRDALKLARSHRSDDLTAVWVPDEGSEALRDLVRAREAAKQDQLRAKHRLTKFLLRTGQRPPLGVKAWTEKYVEWVQQVRYTHPAQEATLLDCLNEVQHMEERVKRLEQSIVEVIQLAPAPMQEVVRGLQALRGIAHISAVTIAVELGNITSRFERARDLMGYSGVFPSEDSSGERIRRGGITKSGNAHLRRIVVESAWSYRYRPAIGARLRKRQEGLPAEITEIAWKAQNRLHKRYMTLMARGKEQRKTMTAVARELLGFIWAIGIKAEASCKQQLAA

SEQ ID NO: 51307 - protein, 429 aa, unidentified
MDEVDDVELLVERVAALDLGKAVLEACVRVPHPQRLGRRMQELRGYGTTTAQLLAMVAWLRHWHVQRVVMESTSTYWKGVYYLLEAEGFDCWLVNAREVKNVPGRAKTDRADAVWLAKVAERGMCRPSLVQPPEIRRLRDLTRYRRALVQDRTREQQRVEKLLEDAQIKISSVLSDLHGASGRSMMHALIAGERDPRTLARLAKSGARKKTDQLEEALRGFFTDHHATILTMMLDNSDRIGDQIAALDALIEDAISPFSRQATRLADIVGVNTVAAAELIAETGVDMTRFPSAAHLVSWAKFCPQTHQSAGKSTSKGRGKGNPWLAGTLGRIAFANSRADTFLGTRYRRLARRRGKQKAIVATGNSVLTVIYHLLSDPDAKFCDLGPGYYESRINKHRRARDLATQLQTLTGQHIAIRDGKAVITDTVA

SEQ ID NO: 51308 - protein, 427 aa, unidentified
MGYRVAGIDVHKRMLAVVVADVAVETEYVFERRLIGTTPDQLRTLAAWFIECEVEEVVMESTAQYWRPVWEALERDWQSVRRLRPDAAPTAGALHLAQAQSNHGPRGRKKDVPDAERLVKRLVAHELILSFVPDVTQRLWPTVTRRKFQLTCNRVQLRNRLECLLEEMHLKVSSLVSDLLGLSARRMLRAVGSGATDPAVVAALGSPRLHATPDQLRDALGACTDLHPVYRRLLTLTLDELDGLETHIHQLDEELAQLLREHQAAVQRLAAVPGLGVDSAQQIIAEVGPTAATFATAKRLASWVGACPGHDESAGVNHSRRSPNGNRQMRRLLNQAANAAVKTKGSIFELVYRRLVVRLGHAQAIGAVAHRLCRLVWKLLHDDVAYEERGPAVTKARAQRRAAKMIRELRSLGYQVARAQAPASSPV

SEQ ID NO: 51309 - protein, 412 aa, unidentified
MSLPVGDAVCYVGIDWAAASHSVCVLDPDGERRAEFTVEHSAAGFAELARRLGRFGEAGDVPAAIERPDGRLVDALLQAGHPVVPVSPNAIKTWRESEVASGAKSDAGDAYVIADYLRCRARRLTPAVPYSVETKALRTVVRTRDDLVDMRVAATNQLSALLDTHWPGAKAIFADVESPIALAFLTRYPTAAHAERLGEKRLAAFCAKHGYSGRRTASQLLTRLRAAPAGTTDATVCEALRDAVLALVTVLTALGGALKDLARSVAATLGEHPDSEIFTSLPRSGQINAAQMLAEWGDARQAYDGPDSVAALAGATPVTKASGKHRAVHFRWACNKRFRLAVTTFADNSRHASPWAAKVYADARARGHDHPHAIRVLARAWIRVIWRCWVDGVPYDPDRHGAASRLTTQEAA

SEQ ID NO: 51310 - protein, 342 aa, unidentified
MEAKRYIGIDLHRDCFTACLRLENGREYLKAWKLEDMAKFTAKLRPTDEVAVEVTGNTRLFHDAVAPHVGRMVAVNPSQFKVITHSVKKTDPNDARNLALYLAKDLLPEVRMKDKTQAQIASLTQTRDTMVKLRTALKNKVNNICSAHGVNLNKESLASEKGLKAVLEMQFEMLVNLELQIIIEQIRSLNQSVAKLEETIGKEGQKLEGHKNLTSIKGIGGLGAGILLSIIGDIRDFADEGKLAAYFGIVPRVSNSNESEHSGRITKRGSKLGRTTLVQCALIAQRYSPYLKNYYEKKKSRGTGKAIIALARKFLGIIYRTLKNKWVFEDFPNFVLAEPATA

SEQ ID NO: 51311 - protein, 424 aa, unidentified
MKVTYQTCCGVDVHKSFLVATIVKTTGGIEPSYQKKRFSTFNNSILEFKQWLLDNHCHDVCMESTGKYWVPVFNLLEDKINVVIANPKWVKAVKGNKDDTKDSKWIGDLFRLGLVKGSYIPCKKVRILREYTRYRYKLVSCRSSEKNRYQNALTVCNVALDSIVSDIFGKSSTSIIDYLLEQSGTSINHEEIASKLLRSLKSKEDAVIESVEGYQMTDAQKYRMRLVRAHMDYITAEINDVDKMIENMISSNPDFENAVQFLCTIPGVKRDSAITIISEIGTDMSQFSSSKRLCCWAGLTPGSNESAGKKKSVRITRAGVYLKPALVQCAHAAVKSDKSPYYKKKYESLVKRRGKKRAIIAIARMILTAIYQMLSTGEQWNPSDLYKIDMPVALVEKQKAKAIKQAKKLLQREGLLPPDEPLAS

SEQ ID NO: 51312 - protein, 341 aa, unidentified
MMPRSTAIKKGKATASSMFAALDLHKTSIQAVMKDGSGGMVKEGKLQRNAESVISFLGNTNATIVMESGYNHQHICDLLREKGYSVKVAHPFMVKAIAYASVKTDRVDARVLADLLRANMIPECYVPTMEVREVRDLSRRRHYFVSERTRFKNKIHAELDRRWIDCSSSLFTAKGREYLRSLNIEAVNDYLDAIEFLNRKISELDREIEAAAGSDRYARLLITIPGVSHYSALLISAEIADINRFPDEEHLCSYARLAPAVRQSADKRYLTPNRRGSGMLNWILIQCAHTHVRTCNSSITRHYNKLRERKGVKVATVAAARKLLCAVYFMLKEDRPFRMDG

SEQ ID NO: 51313 - protein, 426 aa, unidentified
MNTQNTNFIPTAEFAAYVGLDWGDQKHALAWTADPATTAPQTGTLVNSPEALHAWLQELGQRFAGRPVALAVETSRGPLIHLFGAYPWLTVYPIHPATSARYRTAFKPSGAKDDLPDALLLLELVRDLRHKLRPLQMPEAATRQLAMLVELRRDLVDRRTQVLLQLMALLKSYFPQAVELVGQDLTTDLALAFLRRWPDPLALKAARPGTLKRFYYQHSVRSEALVTQRLALLPQLRPLTTEEAVLLPARLHLAALLEQLRTFAKHIDLVEQKTHTLFREHSEAYLFRELPGAGKALQPRLLVAFGEERSLYPDPGSLQKYGGLAPVVERSGRQAWVHWRWHAPRFLRQTFVEWAGQTVVYSAWAKEYYQHMKAKGKNHHVILRALAFKWVRILWKCWQTRTPYDEARYLKQLLARRSPHAIQLNP

SEQ ID NO: 51314 - protein, 343 aa, unidentified
MNITITGLDLAKSVFHVVCFNNQFKEVKKRMLRRSQVLHFFTQLPSCRVAMEACASSHYWGRELRALGHDVKLIPPQHVKPYLRGNKNDYNDARAIAEASTRPGMPFVAIKSTEEQDMQAIHRMRSQCIRDRTALSNSTRGLLGEFGIALPKGLATLRKRIHGILEDADNGLSDRFRKLLARRYDQFVALDDHIAFYTNEWEILSQQDEACQRLQTIPGFGPVISSAFRSVIGDGRAYDRGRDASASLGRVPRQHSSGGKNVLLGISKRGDRYLRSQLVHGARAVVIQAARKDDPLSKWINRIREERGWNKAVVATANKMARIGWAILRHNTIYQPASEQSMH

SEQ ID NO: 51315 - protein, 343 aa, unidentified
METAVTIGLDLAKSVFQVHGVDASGAVVIRRRLTRAKLLDFFRKLSPCLVGMEACAASHYWGRELRKLGHDARLMPPSYVKPYVKRQKNDAADAEAICEAVTRPTMRFVEIKTPEQQSVLVLHRVRQMLTRQRTQLSNAIRGHMGEHGLVAPVGRSGLARLIAIICKDDDDRLPADIRISLRFLVEQFDLVNVQILENDRCIRTNARATETGRRLMEIPGVGPVLASAIVAAVPDPKAFKCGRNLAAWIGLVPKQNSSGGKQRLGGITKQGDRYLRQLLVIGSLAVIRCAHRHGTKRPWLVQLLARRSPKVAAVAYANKMARMIWAMMISGEHYREPRIVAAD

SEQ ID NO: 51316 - protein, 482 aa, unidentified
MKKRNIFQNRSQQLLALFEKAGNRLKMMCVPIDYAKKDHIVMFCNGYGDIVRKPFSVKNTLEGVKYLIDQVMRSCRQRRIKKEYVFFGGEDANSYAENFANALRAKGFLVANVNAHDAKKQRETLQASTDRIDLMGIATMLLNLRAKCSPAQDGIYRNLRTLVRHRKKLVGMKTEVKNRVHTQVDRLFPGFLNEKKSGINPFSESSLVLMQDRFSAKQIRRRKQATLIKILKRCATPDAENVAAKLHSYAAQVITTPDEYVATLQLSLQHHIKHYRCLKENIDQLISEIALVLAQTQGAFLTSIKGVGIVLAAGVSSEIGNPFEQKPLNNLTSYCGIIPRVKQSGGVEGHTHTGRVSKRSNHLLKDYVVQSAFHIGLWGPEPLLQDYKRREAAGQHADFGIGRRFLRMGMCLMRSGQVYLPPKLRSPKAQMHERAAYYLTMWPLLRDKWKKAHAHQMAFAEDQPLGQWRQMVQELYDIKLKL

SEQ ID NO: 51317 - protein, 382 aa, unidentified
MGKRGVARSSVLITEALAGNVVGSDPHKRTVTTTVLDGRGGVLGTAHHKVSGDGHRAMEAWVRSFGPVVRWGVEGAASWGRHTAMFLCARGYDVRDVCPNRTHERGRARQQGKSDALDAERIARETLAHPLLPLAFKRSSAGEAGADVDHELLTLWHGARRSVLKSRQHLVNEAEFLFDALPETLRRRLPDTKAVRPRLAAAARLTRRKTLDPATTLRLALLREAHAAIVALDGKEREVTRQLRVLVRASGSTLGQLCGLSTRSVAELLVEVGDPRRFTEGGFARFNGTAPLPASTAEGPDEPVRHRWNPGGNRRVNAVLHRMAVTQLRCEPRAQAIFADARRRGHSKKEARRILKRHLSDVIYRRMIRDQAALEDPAAGAA

SEQ ID NO: 51318 - protein, 367 aa, unidentified
MEKSSKVFVGMDVHKESIDITLAEQGGAVHRLGQIGGDRASLLKMVRKQQSRARELVFVYEAGPCGFWIYREVTALGHVCMVVSPALVPRRAGDHVKTDRRDSERLASLARADELAAIHVPDIRDEAIRDLVRGRDDAVIAQRRVRQQLKALLLRNDIRYVGRTSWTGAHRRWLSELKLPEPAQQIAFEEYVDAIAVATGRIERLVRAIETEVRTWRFAPVVAALQAMRGIQFVHAVTLVAELGDLTRFGSARQLMGYLGLVPREDSSGEHRRQGSITKAGNSYARRALIEAAWAYRHPARVTRIIASRQTGLPKAACDIAWRAQLRLSAKYRRLNARHLNHNKIVVALARELSGFVWAIGQSVQPH

SEQ ID NO: 51319 - protein, 331 aa, unidentified
MHFSHFIGVDISKASLDVAIYPATDKKSDFMHIENTTKGLREMMSWLKQRGIKPKEMVVCAEHTGAYTNQLIDFTHKKGIALSLNSPLDIKRSMGIARGKNDFVDAARIAEYAYTKREKLRLYEKPGESIMTLQYLLTERRQYMRQRTALLNFKSALAEYETSAARSRNEAAISNLSKLIKKTEDQMLSIVCDSPELKHSYELISSVMGIGLINALNTIVYTNNFQSFDSPRKYACYIGVAPFDHTSGTSVRGKTQVSKICRTQQKSELSMAARSAIIHDPGLRKYYQRKMKEKGGGREMHGVVLNAVKFKLILRMFAVVKSGVPYKVLNY

SEQ ID NO: 51320 - protein, 342 aa, unidentified
MDHSAGLDVSVKETSICIVDDAGRIVREVKVASEPEALLSVLKNPGYHFKRIGLEAGPMSQWLYSALAEAGLPVICVETRHMRAVLKAQINKTDRNDARGMAQMMRVGLYRPVHVKTLRSQKLRMLLTHRKLLQSKAIAIENDLRGTLRNFGLKVGMVGKVKFEARIKELIGNLPDLALLVEPLLIVRRVLREQLVILHSRLLAIVRDDEVCGRLMTTPGVGPVVALTYRATVDVPARFRKSKAVGAVFGLTCSKYQSGETDRSGRISRCGDEMMRVMLYEAAQSMLRSKKWSWLKAWAMQIARRRGMKKAIVALARRLAVIMHRIWVDGTEFQWTREAAVA

SEQ ID NO: 51321 - protein, 321 aa, unidentified
MPDGEVTQQRLENDPTRLEQFLADLPRGTRIAIEASRTWGWFVDLVERLGHHAVLSNPKQTKAIAAARLKNDRVDAERLALLLRGDLLPTVWIPPAPLREARKLVRHRVSLVWVRTEIKTRLLALRSRRHLQPTSSQRWLTVRGRRELAELPLDAIPSTGRADCLALLRVLDEQIRRLDHELVHRWGDDPRVPRLRTIPGIGPFTASLLILELGDIQRFPSAKHLASYVGLTPRVRASANRVRMGRISQEGNRLLRWALVVAATHAARRPGPLRAWFRAVQQRTGMKIARVALARRFAEIVYQIWKQDLDFVTLVRSGVRG

SEQ ID NO: 51322 - protein, 341 aa, unidentified
MNNVAIAAIDLGKRSFHLHAQDEHGHELYRKKFNRTGLTRHLANLNPCTVVMEACGGAHFMAQHVATLGHSAKLIAPHLVRPYVKSNKNDFADAEAICEAATRPTMRFVPPKTQDQQALAMLNSTRDAFVKDRTATVNRIHAALLEVGVSLAPGFKSINELETWLEEASFSDAIKRILRCLHEHFKYLNEQVKSLDKRVESQAAEDDLACRLMTMPCVGPITSSVLAAELGDGRQFKCGRGYSASIGLVPKQHSTGNKTVLLGISKRGDRNQRRLLIQCARVYLMQLDRQKGWLANWVRQLLTHHHSNHVVCALANKLARIAWAIAAHHTEFDAGPTAMNA

SEQ ID NO: 51323 - protein, 316 aa, unidentified
MTTNSVVVGVDVAKDRLDVAVRPSGEVWSEANDETGITTLVGRLRPLRPALIVCEATGGFERAAIAALAAAGFPVVVANPRQVRDFARATGQLAKTDQLDAAILALFAERVRPTPRPLPDAAAQLLDAVLTRRRQLLEMLVAEKNRLGFAPKPLHRGIQAHIRWLERQLDDVAKELAGLIEASPVWRAKDDLLQSVPGVGPIVSSTLLGELPELGTLSHKQIAALVGVAPLARDSGTLRGKRQVWGGRASVRTALFMAAMCGRRWNPTLKVFYERLKAAGKPTKVALIACARKLLTILNAMVRDQSRWTSNVQYSC

SEQ ID NO: 51324 - protein, 314 aa, unidentified
MAEEKVYVGIDVSKARLDIAVEPLERFWQADNNGAGIASLTKRLGGLKPTLIVVESTGGYEANLVEALCSANLPVARVNPGRVRKFAQGMNWLAKTDKIDARLLARFGEKANPRLTQLPSEDEKRLVALVKRRKQVLDMLVAEQNRLEHANSDVLVYIQDSLSMLQSQLDELEEAIQSHINQTPDLKKKRDLLTTAPGVGKVTASTLTAQLPELGSCDRKQIAALVGVAPFSHDSGKMRGRRFIRGGRPPIRSVLYMAALSAIRFNPVIRTFYNRLISSGKPFKVVLVACMRKLLSILNAMIRNQQAWKPCLSS

SEQ ID NO: 51325 - protein, 449 aa, unidentified
MHGAHIGGQRAAAFFKLVADLDPRRVLLVGIDVAKATWFVVVSDLTGVVVADGVRLVADRAGLAELERVIAELRCRLAAELVVVGIEAAGHQHQSLTAHLADRDGLHVRLLNPGAVAAIRKQQGNRRRKTDWLDAAAVCELLARGEGTLVHLDASMAASLRPLWSGRKDLVDTRSRLRQQAGALVDCLWPGFSAADKQAGVSPVLCDLFKTKAGRVIAGLLADGWTPARFTAAPTPQLQAIFAARGCRLTRPLASRLRARAAGALPAHPAATAGKAAALAGMLGVLDGIDAEVERLEARMAPLLAATEGAKLTQIRGVGVVTASGFVAFVGRTDRWAEWSKVWRAAGLDPARSQSGAKDARLGISREGSAWGRRALLDLAAAVCRQPGRWGDGFRARTTQGRKPAKVALAATGNSIGRTCFALMRSGADYDPAWETKRTRSSKVGDQAA

SEQ ID NO: 51326 - protein, 362 aa, unidentified
MNYVGVDIHKKYSVLCAVDERGRKLREARIEGNSGCGFAQFFASLEGPSKAVVEACWNWGLVHDELEEIEQVEEVVLAHPYKTRLIADAQIKTDRLDAYALSTLLRGNLVARAHVPRRETRMRKNLLRQRLYWARLRTMLRNRIHALLDRQRSLELPQCSDIFGVRGLSFLRRLELPETDAALLREQLALHDLIAQQMKAQEKRIGLEFGSEAMHRQLLSVPGIGPTLAAVIACEVDSIERFSSAEKLCAYAGVVPTTHSSGGKTRHGQLLPFCNKWLRWALIEASWVAIGCSPYFGALYKQHRARGKKANSAVLIVARRMCRIIWQLLHEKRDFEKRPLRPNFNFPGCSVVRLTAGTAARP

SEQ ID NO: 51327 - protein, 422 aa, unidentified
MLEETHDNQEIIGRVAALDIGKAELVCCIRVPSSSKSGKRLQEVATYQTMTRSLLALADRLGELGVTRVVMEATSDYWKAPFYLLEAEGFETWLVNAKDVKHLPGRPKTDKLDAVWLCKVAERQMLRPSFVPPPEIRRLRDLTRYRVDLVVARTAEKQRVEKLLEDAQIKLSVVASDIFGVSGRDMMAALIAGQRDPKALAQLARRRMRAKLGLLEEAFVGHFTDHHAFLLAKMLGRVDQLSADIAELEAKIEAEIAPFAAAADQLDEITGVGHTAAQVIIAEIGTDMGRFPTPAHLTSWARYAPGVKQSAGRTKGKNATGHGNPYLARVLGEAALAAGRTDTFLGERYRRIARRRGKKKAIVAVGRSILIIIWHLLADPDARFHDLGADFYDTRINPERRKRNHIRQLEALGYKVTLQPAA

SEQ ID NO: 51328 - protein, 354 aa, unidentified
MSKVKKLCFQGETIFCGLDVHKTNWKVNLRIRDMELANFSQDPDAVLLSNYLKKNYPQAAVEVVYEAGFCGFEAQRSLTRSGLKCIVVNAADVPASDKERKRKDDKRDARKLSRELAEGSLQGIYIPDKQMEHARSLVRQRHRLVQDQTRCKNRIKHLLLFSGLQIKDTKEHWSKKYIKELQELVCENQSLKTAIKIAIDQYLQLRNILKEATLAIRTLSKQPLFAPVQKWLQSICGVGLINGMVIQTEVQDIHRFKTLDRFCDYAGLVPDIYSTNDKITVRGITHRRNEFLREAIVESSWMLIRKDPAMLMKYNTYRNRMNQNKAIVRVGKHLLSRIRYVWGKQKEYEKGIVQ

SEQ ID NO: 51329 - protein, 387 aa, unidentified
MKNNSNSKKQPRGFEEWTSPKLAALQEAWRQKQGTEEKLTIGLDLGDRQSNYGVLDQSGEVIGRGQVVTQSQPLEVWLGQMPPSRVVIEVGTHSPWVSRLVKQTGHEVVVANARRVKLISESSRKNDRVDAEMLARLGRVDVQLLSPIQHRSKQGQADLIGVRVRAELVELRTSAVNAVRGFVKSFGQRMPKCDAGVMNRSHAKEVDEAIRGEMELVLEVVEKLNEVIAKADGELKKVNAERYEKETAKLEQVTGVGTLTALTYVLTLEDAGRFRRSRDVGSYVGLRPKSSQSGERDPEMRISKEGDVYLRKLLVQCAQYILSKRGPDTDLKQWGLRIASKGKKKAKRRAVVAVARKLSVLLHRLWVSGEVYEPLRQRQRRQHSVAA

SEQ ID NO: 51330 - protein, 427 aa, unidentified
MAATSTVELRVSVDVGARRHHVAIGLSSGEVLEEFSIAHQPDGFTHFFTRIETHRHSHPGPVAVAMEGYNGYARPLDQLIQARGYRLYNINNLKLARFKEIFPGAAKTDRLDARKGLELFQLREHLPVAKAVLQEVGVVPAANVRLKRLTRRRRRLVNERVRVLNTLQADLQAVCPGLLEITGEVGNQWFLHFLVSADTLPQLTRLRKTTLLKIPCVGRAYARIIQDWQPRAQWSPEVEWVGAMIQEDAQRVLDLDAQITALETTMHHVAQASTIASTLASIPGFGPICTAELAGEIGTVTRFPHEGSLSLYLGMATLDNSSGIRQGSKPPKQVNTRAKATMMIAVDRHRKSVPESQRYYEKKRQAGKSHNQAIRALGRHLCRIIYKLLKDERPYEIRTVEEDTTGHVAARSLPVGQLRRAKKLAHA

SEQ ID NO: 51331 - protein, 367 aa, unidentified
MKQQTSATSETQIKDRMIIDFTGKLIYVGIDVHQKDYQVAKVHDGICLGNHRMAANSDLLIKHLLSHYPGAEFKCVYESCAWGFNLQRRLTAAGMQCMVVHAADVSTSDKERKRKTDKVDALKLARTLAAGELKGIHVPDETLQKERNLIRYRARLMRDLNRSKNRIKSLLKYQGIEVPAQYAKNNWSRNFLIWIEEQASKDELLADTLLLMLDQMKLLRQLLLKTEKKLRELRKGKYASKVKLATSVPGIGPTTAMLFLLEAGDINRFKGFDALNDFIGFCPDTASSGETDRDRGITTRRHKQLRSALIEAAWQAIRLDPALMNSYQELTKRMKGVHAIIRIARKLLRRLRAVLLTGIEYQKGVVA

SEQ ID NO: 51332 - protein, 468 aa, unidentified
MKTTKNRSGKHRKPGPGRRRKFRKGQLEPLRIRPDAAGIDVAAAELFVAVPPEKDTEPVRRFDSFTRDLHALADWLVRCGVRTVAMESTGVYWIPVFQILEERGFEVCLVNAQHLRNVPGRKTDVSDCQWIQQVPSLGLLNASFRPAQQVCAVRSLLRHREGLVQMASQQVLLMQKALDQMNLQLHHVLSDITGVSGLAILDALLAGERDPTQLAARRERQVKASAATIARALEGDYRPEHLFALQQSLTLYRFLQGQIGECSEKIQRELQSWESRVDPGEPPLPPAAKKIRAEGLTPEAAHTLREQSYRILGVDLTRVEGINGQFLQVFLSEVGPDLRSFRGAAAFASWLKLCPNREISGGKVLKSKTGKNGSRMAKAFRMAANALLKSESALGVCFRRLRAKLGAPKAITAMAHKIARIVYHLVTTGEVFDPTVLLQQQEQQRLYRESRVRKEAAHLGYKLVPAHA

SEQ ID NO: 51333 - protein, 383 aa, unidentified
MKSVCGLDVHKDSVYLCILSEFGELIEKVFGVLTYQLEEMRDLMLHHHVVEVSMESTSVYWIPIWRVLSPHFKLNLANPYFIKQLPGRKSDVKDAQWIAECTMKELIRGSFVPPETIQQLRQYDRRIFDLNEEIVRKLSKLDAVLQRCNIRLSNYVSNVDSKSYKAVVRAISQGITAPEELVKLIHGRIINHHGIDAITASLKGVVSLAEIDMISQLRDELDMAEAHKEKCQARMLEICEREFPEELKRLQTIPGIKERAATSLIAEIGTDMNKFETANHLASWSGLKPRNDESNKKIKSRSITHGNVYLRKTIIECAWAASRTKGCFFSRFSYHQTQVRKKNKMKVLVAVARKMLIAVWYVLHDNTIYIDFTTDRKTSRTKG

SEQ ID NO: 51334 - protein, 363 aa, unidentified
MLSVAKPLVTNKEETSMRFYTKQHPFYCGIDLHARTMYVCILDQAGETLLHRHMQATPEALLKAIAPYRDQIVLAAECMFTWYWLADLCAEHGIPFVLGHALSMKAIHGGKAKNDQIDAHKIAVLLRGGMLPQASVSPAEMRATRDLLRRRMHLARTRGELLAHVQNTNSQYNLPAIGKKIAYKTNRDGVAERCADPAVHKSIEVDLALITYDDALLRDVERTIVKTAKHHDAQTLYLLQTVPGIGKILSLVLLYEIHQIDRFPRVQDFASSCRLVKCAKESAGKRSGTSGTTIGNAHLKWAFSEAAVLFLRDNPAGQKFLARLEKKQSKGKALTILAHKLARAVYYMLQHKTAFDMPKFLNS

SEQ ID NO: 51335 - protein, 387 aa, unidentified
MTVQLQISTFVPRHYEIFAGLDVDKHSIAVTFTDHTKLLKSLRLPYSSEHLLNYARKHFPDRRLAFVYEAGPTGFGLYDDLRASGHPCLVVAPSMVPTAPGQRVKTNRLDSRKLSEGLRGGQLRSIHVPSPTYRQLRHLVQLRDTHVRQLTATKCRIKALLLYEGIAFPEAPAGGQWSARVLRQLEALPCAEAVRFKVNHLIGTLHFHFLSAAAVQKQIRRFCQNDPELRQVIGLLTSLPGVGWIVAAHLIARLGDWREITNVRQIAAFLGLVSSEHSTGDQENRGAITRSGDSRLRNKLIQSAWTTIGKDPELRAFYRRIYQRHPKKVAARKAIVAVARKLTTRIYAVLKQQRPFVLRPDSSSAPLTAEETAGPRGRLDTAQNEQK

SEQ ID NO: 51336 - protein, 373 aa, unidentified
MSTTPVQFCPMLAIAVEMSGATWLVGSCAGTKLRRKAVSDEAPLVRMRSLLAEVETALKRFGAGEHTRVVVAYEAGQEGFWLVRELRARGIEAEVIDPVSLKVDRRGKRAKTDRLDVEALARALYAWMAGDTTALRMVRVPSKEDEDNREWQRERDRLTSERRSCLDRIGKKLRTHGIWRWDRVALTQGTLRCADGTPLGRMLQETLRMELDRVEKAEARLDVLNAQVAELTDAAHSRIERLALLRGIGEIGGRGLALKLYWRDFNNRRQVGACTGLVSLAYDSGTMRQDQGISKQGDPSLRALLVEVSWLWLKHQPTSAISAWFRRRTEGQGKRHKRSMIVAVARRLAIALWRYLKDGVVPEGATFKAGRAI

SEQ ID NO: 51337 - protein, 402 aa, unidentified
MNCVGIDVSKGKSMIAVMRPFGEVVVSPFEVRHTASELSKLAGLLKSLDGETRVVMESTGNYHAPVAWLLHDAGLYVSVVNAMLVHDYGNNSLRRGKTDKKDAVKLANYGLDHWLTLPRYVPEEDTRLMLKTCYRQYQQYSKVQTMLKNNLISLLDTTFPDANRLFTSPPRTDGSEKWVDFVAAFWHCECVCGLSEKAFAAKYQKWCRKHGYHFSEDKALDIYASACGHFGVMPKTDTAKLLVEQAIFQLRATSAALAALKQEMQSLAASLPEYPVVMEMFGVGPTLGPQLMAEIGDVRRFHSKKALVAFAGIDAPPYQSGQMDVRSRSISKRGSAALRRTLFLVMGVYLQSAPMGEPVYQFMDKKRSEGKPYRVYMMASANKFLRIYYASVKAYLDSLEHD

SEQ ID NO: 51338 - protein, 412 aa, unidentified
METVFERVGALDVHKAQVTACVRVPGPEGRVAELAEFSTTVQGLLGLRDWLAAHRVTHVAMEATGVYWQPLWHILEDEFELTLCNARHVKQVPGRKTDVSDAQWLCQLMEAGLLRASFVPPKAQRQLRALTRYRKTQIAERQREANRLHKALEDTNVKLDCVASDILGASGRAMIDALVAGTTDPEVLADLAKGRLRQKLPALREALEGRFEDHHAVLIGAILAHLDFLDEQIDRLSAAIAERMELDPQTAAGVTLAATITGVATRTAEVLVAEIGTDMSIFPSARHLASWAGQCPGNDQSAGKRRSGRTRKGPKWLGIALQEAALAATRAKGSYLWALYRRLRPRLGHGRALGAVKHSMITAYWHMFTTGQTYTDLGGDYFERRDPERLTRRLIGRLQALGNTVTVTPDPA

SEQ ID NO: 51339 - protein, 388 aa, unidentified
MIQVDDLSRSLIAFEQISTLVIVVELSQSSWLAAGVVPGIERRPLKKLDPDPTALLHLVEGWRDRATKAGRAITRTVLAFESGRDGFWLARWLRVHGVETFVMHSTSVAVSREPRRAKTDRLDTEMLIRVFLGWLRGEPRHCKMVAIPTLEEEDARRPSREREILVGERTRIINRMKAALVRLGIRGFKPGLLTAPQKLDALRTPEETPIPPNMLDEMRRDMARLAWVREQINAIEQARLERLERAPATGRHAMVRMLARVIGVGVETADMLVQEVLSRNLRDRRAVARYAGLTGSPDESGSKRREQGLSKAGNARVRRGLIQLAWRFLRFQKDSALAQWYRGRTEDAAGKRKKTMIVALARKLLIALWRLATIGEIPVGVALRSAVA

SEQ ID NO: 51340 - protein, 337 aa, unidentified
MKRYVGVDLHRTQFTVCTLDETGRQSRRKWKIEQLPAFVAQLQSEDELAVEATGTTARFYEAVVEQVKRVVVVNPHQFKVISESVIKTDDKDAEALALFLSKGLLPEVRMKNREQRELQHLAETRDLLVKQRSALKAKINNLLAANGIYLKREALSSRKGLEAVLTASVSVLVKTELGILVDQIHSLSSSISEVEKLLDEEGQKLPGHANLTSIKGIGTLSAIILLTAVGNVRDFADEGKLAAYLGLVPKVQNSNETERSGGITKRGNKLARTALVQCGLVAQRYSPYLKRFYERIKSRRGGGKAKIALARKLVKIVYDTLKNNWVFADFPSFTLAA

SEQ ID NO: 51341 - protein, 402 aa, unidentified
MISVGIDVSKGKSTVCILKPNEDFVCKPFELLHNKEDLELLDELLQKLDGEVKVVMEATGIYNLPILTFLVEKGYFVSVINPCVMKKYARNNNFRNVKTDKRDSVTIANYGIEKWFKLQKYECSEVVYAELKLLGRRYRSYMEMHVKALLELTHVLDYVMPGIKNLFNSWTESNNRDKLCDFVERFWHYDLITAMSCDEFVKAYNDWAKEKKYHQSNSKAVQVYELASNGISTLSSSLPSTKMLVLEAIKTLRAIDDSLFTILSRMKELAKSLPEYSTVRAMGGVGDVLASKLIAEIGDVRRLHSAKALIAWAGIDPPPYESGQFVGTNRRISKKGSSTLRKTGYEVMRVLKSHQAPKDCTVYNYILKKEAEGKSKKQAKIAGLNKFLRIYYARVMEVYQAA

SEQ ID NO: 51342 - protein, 414 aa, unidentified
MAERYVVAGIDVHKKMLAVVVAEVRVGEMEFQRRRFGTTSSQLREFAEWLRQQGVAEAVMESTAQYWRPVWLALEGSCELHLAQARSNGARRGRKSDFRDAERLVHRFIADELVLSFVPAEEQRGWRWLTRTRYVLVRERNRVQNQIEGLLEDAQIKLSSKITDLLGASGRRILQALADPNRGALDPQKLANLGDEHLRASREELQDALDGRWLPRHRLLLGMHLDRVYVLDKQIEELYAEIGKAMQTHQEAVSRLSGVPGFGPDSALQTIAEVGPQAATFPSPEQMSSWVGCCPGQQESGGHSTSERSPKGNRTMRRLLDQAAHAAVKKKGSFFQHLYRRLVLKLGEQKAIWAVAHRLCRLVWKILHEGVSYIEKGLLSGDPKTLKRRQRRLAAEFRKLGFHVTFTPLTPAKA

SEQ ID NO: 51343 - protein, 503 aa, unidentified
MLLFVGDDWAEDHHDVELQDETGRRLERGRLPEGMAGISRLHAMVGRHAGDAQDVQVVVGIETDRGMWVQALVAAGYQVYPVNPLQAARFRERLGVSGAKSDPADAHTLADVVRTERHQLRPIAGDSDTAAAVKVAARAHKSLVWERTRHLARLRHALLDFFPAALDAFDDLDAPDVLELLGKAPDPDTAARLSAAQVRAALKRARRRDVDAKTERILAVLRAPQLRQPAPVTAAYAATVQAQAAILTTLNTQIQAMQAQVDAHFGQHPDVEIYRSQPGLGVILGARVLAEFGDDPDRYADAKARKNYAGTSPITRQSGKMRLVRARYVHNDRLVDALNYQAFAALRASPGARAYYDRQRARGVSHHAALRQLANRLVGILHGCLKTHTCYDEATAWPEQATGARQQAAQGPQRHHTRTPTARSTPRRVVRTYCLRVSDTPLPRRFMPAVHQYQAGPEASLHTIQRRSTTWYLTTNHHGMSTATPFGRATDQGRDQQKRRSPP

SEQ ID NO: 51344 - protein, 412 aa, unidentified
MPDDQSLPNLSNLSWEVYVAFKIFRKNCCGLDVHKTWIYACMGITDTNGRTEYKQARFSSFTKGLQELADWIAKYDCNDVCMESTGKFWIPVFNILEKTCWVTLAYPKYTKPQKGNKTDHKDAKWICDLYMCDMVNPSFIPPPDIRQLRDLMRYRSKLTNIMTSEKNRALNCLTVSNLKLDDVFSDVFGKSSRSVIRYILEHPGETFQVAPFIDRRCKHPVEEIQAVIDGTISHQQAVKLRECLQHLDELEVHKTNVEKEILCLVQQYPYQLELLQTVPGFSGNIMTAIALISEIGADMSVFPSAKHLISWAGCCPRNDQSSKKVKSTRIPRAGVYLKPLLVQVAIQPFTANADKLSAAGALEIRCQICDGRFLSMWAALFIFLGCPLPPCPKNLHVHNGRIVILASVAWIF

SEQ ID NO: 51345 - protein, 344 aa, unidentified
MGEVITIGLDIAKSVFQVHGVDANGTVVIRKKLSRAKVLEFFSSLPSCVVGIEACPTAHHWGRKLEAQGHRIRLMPPSYVKAYVKRSKNDANDAAAICEAVTRPSMRFVPTKSEQQQSALMLHRSRQLLVRQRTMLSNAIRGHLAELGIISAKGRNGTAELIEVIANEKDDRVPITARLSLAVLARQYAAIATEIAALEKHIHAWHRLCEESRRLEEIPGVGPIVATALVAEVGDWTVFSSGRSLAAWIGLVPRQHSTGGKERLGGISKQGNRHLRWLLVSGAMAVIRYARRHGTKRLWLIRLMGRRPTKVAAVALANKIARIAWAMMVRGERFKEPKLLSAAA

SEQ ID NO: 51346 - protein, 416 aa, unidentified
MSGDISAFVGVDWASATHYAYALDADGRKLGHRSFPHSGEGLAELANWIRSTTGHDPDPLAIGIEVPHGPVVEGLMDAGFLVHAINPKQLDRLRDRFTMAGAKDDRLDAFVLADALRTDRKLYRFLEPMHPTVIELREWSRMTEDLSAERNRLANRFRHQCWRYYPQVLELAEDCSRAWVLDLWELIPTPAKARTVRAATVAKQLKQSKVKKWTAETLLAQLRRTPIVVAAGIAKACVAHCKLILARLRLVMDQAKNAMKQLERLCSAVAELPPPTESVGEQCRAPEILRSMPGVGPIVLAALLSEGHDAIMRRDAQALRALAGVVPVTRRTGKQYLVVMRQACPHRLRTAVYHWARVAVLHDFHSRDRYSALRKRGHSHARALRSVGSRLIGVACAMLQTGELFDGDRTPQAATA

SEQ ID NO: 51347 - protein, 422 aa, unidentified
MRILEPLQIFILEESVMLNAVGIDVSKERSTVAVLQPGGVIVHKPFDVPHKSRNLHDLAQYLGSLEGDTRVVMESTGRYHEPIRNVLFKAGLFVCTVNPHLIKNYGYNTIRKVKTDSADAKKIARYTLDNWAELREYTSMDTTRTQLKTLNSQFSFFMKQKTAAKTNLIALLDTTYPGVNKLFDSPVRADGSEKWVDFAYSFWHVDCVRKAGITAFTDRYKRFCKHHGYEFQEAKANAIYKDSKELIATLPKEAVYKELIQESIRQLNLLSENVEHIRKTMNELASTLPEYNTVMSMYGVGPTFGPQLMAEIGDISKFQHREALTAYAGVDPGKNDSGQEVHNSSHASKCGPSRLRHTLFQIMTTMLQTGGKEDDAVSSFLFKKKAENKPYLVYMTAGANKFLRVYYGKVKECLRNQEQAEE

SEQ ID NO: 51348 - protein, 346 aa, unidentified
MDQIIRIGMDTSKHFFQLHGVDAAERPVLRRKLRRNDVLAFFAKLPPTMIGMEACGASHFWARELRKQGHEVKLIAPQHVKAYVKRNKNDGRDAEALCEAMSRPTMQFVAVKSEEQQAALMLLGLRAQLIARRTQLSNAIRGYAAEFGLTTARGLDKIEPLLSRIAQDETVPALARELFVLQGKEYVRLQEELKAIDAKLLAWHRADACSRRLAQIPGVGPIGATALVMKAPDPRAFASGRDFAAWLGLTPKDHSTAGKTRLGKITRAGDEALRSILVAGATAVIQQARRGRGSSSSWLTALLARKPPKLAAVALANKTARIAWKLMVSGDSYNGARMPATSASAA

SEQ ID NO: 51349 - protein, 354 aa, unidentified
MNNDKYIALDLHQATTVTSVLNAAGRELDSRIIPTTAQAIVSYLEEFSGPLHVTFEEGTLAAWVYDLLQGRVAELVVCDPRHNAQLKEGSKTDRHDAHRLADLLRTGMLRPVYHGCRSVRPLQELAHCYETLGEDTTRTMNRIKALFRRRGIDCAGRGVYALKQRASWLEKLEAGANRLRGELLYAQLDQVRRLRRQARRALLEESRKHLVSARLRAIPGLGPLRVARLIAYLQTPHRFRNRRKLWGYVGLGLVTFESSEYRLVQGRIVRRAQPAKIRGLNRNHQPRLKEIFKSAALTAIRQPGPFKDYYEVRRQAGRDPALLRLTVARKLAALVLSLWKKGGHYRAAGVHPQV

SEQ ID NO: 51350 - protein, 378 aa, unidentified
MRFYNREHKFYCGVDLHARTMYLCILDHGGSIVLHKEVPCEPAAFLEAIAPYRDGLVVACECLFCWYWLADLCHAENIAFVLGHALYMKAIHGGKAKDDKIDSRKIAQLLRGGNLPIAYAYPKGLRETRDLLRRRMYLVHKRAEVVAHVVNTNSQYNLPPFGKKLIYARNRQTLKIAERFDDASVRKSIELNLRLLDSLDDLIGDVELYLERTVKVDDADTFYRLRSIPGVGKILALVLLYEIHDIHRFASAGAFLSYARLIRPLKTSAGKVTAGGGAKIGNAHLKWVFSEAACLLARESDQAKRFLARKEKKHGKPKALGILAARLGRSVYHMLRQKKAFDPIRFWNGEPGVTPAKLKKSAVKRPRRAKGSRCVLEA

SEQ ID NO: 51351 - protein, 357 aa, unidentified
MLAQVNQVDFKGQRFFIGIDVHKKNWSVTIRTKGIELQTFVMNPSPDELFQHLRRRYPGGSYHSVYEAGFCGFWIHRKLKDLGITNIVVNAADIPTKRKERENKRDRIDSRKLARELASGSLEAIWVPEAYQESLRSLSRLRHKQAMHRTRLKNRTKGHLHMNGISIPNRSELSPWSGRFIQWLRTLHFAYEPSQDYLNECLEELTDIKKQIAKSLRLLRRHSNSGEVKIIVHDLLMSIPGIGFITAMTFYAEIMDPRRFPSLDEMACYIGLVPFTVGSGDKEKNYGLTMRHNEYLRNLLIEAAWVAVRIDPALTLAYSLLVKRMSKQEAIIRIAKKLLNRIRCIWIKRQPYVTAVC

SEQ ID NO: 51352 - protein, 346 aa, unidentified
MLHVGMDLSRTRLDVCVEDEEGTIVEEAAWPPDADGLAHLVRDLAVYGQPVMAVIESMNGARFVHDTLELAGWQVEIADAQKVKGLAPLACKTDRIDARVLAELSRRDLVPAIWLPTPSVRAERELARWRLHLVRHRTALKNRVHASLIAFGKPCPVSDLFGVAGRELLDRLALPEPWRGDVEAALRLVDSLDDQIHELEEELRRDGIEHPWMRLLMTVPGIGWVLAYTIAAEIGDVSRFASAKKLVAYSGLVPWVYQSGGKDHRGSLTKNGPKYLRWALIEAATHAARHPAYAEHYQRTAKRLGRQRGKKVARIEVARKLAQAIWHMLTNGETFQPYIEPAKKAA

SEQ ID NO: 51353 - protein, 404 aa, unidentified
MEVYLGIDWGESSHAVVFVDGEGKELCRKKVEHSVNGFGEIDDLRRGLGVTKEECVVGVETAHNLIIDWLLGYGYSQVYVIPPNVTRSRQRSYRQSGAKTDESDGYLIGNLLRTERHRMIQWRPDSELTQRLRAKVRLRSQLVVDRTAHYNQLRQTLLRYYPAALEPFGLNSRIALDFVQRYPTPAAAGKLKYSEFESFAKGHRYPANGIAGAYAKLGVEQPTALPITVETYQEEAVLLAQLLSEVKGHIGRIERSIAELFSQHADREIFASLPGVGEHLAPALLVKFGDDRERFPDAGAIQALAGTAPVTSQSGKSRSVRFRQACDHEFRTYMYQWAALSIKYSPWAATYYAQARQRGLSHNHTCRALGNRWLKILWKLWQNRECYDQDRHLAKTLYFRQKSH

SEQ ID NO: 51354 - protein, 387 aa, unidentified
MTKNKGRVVGLDVHPDSFAGAVVEGSDPAQARVLSTSTRVQLEQLERWALRHTSTEDRLVLEASGNAFAVAKRLRMIGRKVEILDSHCAGRVGKVYCANDRVDAVKIARIYLSALSPIVWQPDAKTLERREVFSAYQAVVKESTRAKQQLRSMLNEHCVRLEKGFRLCHPKAITRLLALREWTPARTMLLQQSHGSLVAARARRTLLRRHMAQEIVADDALMRLSRLCGINLVTLYGVVSAVGDVHRFTHSKKLVAYFGLNPSVSQSGNFEGSGALRRHGRAALRALLIQSGKKLLEVANPLQKWGLAVAARRGRNKAAVAVARKLCVAVWHVLMGHVIGALERLDTLETKLSKFATEIGPAALAALGYNNKADFVQKKLYVLRSYP

SEQ ID NO: 51355 - protein, 417 aa, unidentified
MKNIIMVPNTLILGIDIAKENHYGQFIVNGEYIKKPFLIKNTKESFDCLLKMMEELTQEYETVHTLVGMEPTGHYWKNIAYYLKNKGISLCLVNPYHVNKTKELEDNSPTKNDKKDARVIARLIYQGQYLTCMFDDELYVNLRIASNNRQDLKKQLIKEKVRLIALLDEYFPELKRLFADILGKSSLALLKNCPFPKDIKSFGIEKVTNIFKEATKNRVGIKKATLVYEAAENSIGVPVGLDGARYRLNLIIRNLENLQKEITDIEIMMHDYLLETGYAEYILSIKGIGIVSAASFLAEIGDISKYDDYRQIQKVAGLNLKETSSGMKKGKTKISKRGRPNLRSILYQVALVMIAKNDAFNEIYKHFTNREKNQLTGKQAIVALSIRVIKVIYALCTKKETYSHEKVHGLKSCQKAA

SEQ ID NO: 51356 - protein, 375 aa, unidentified
MKEKVRFLGLDVHAETIAVAVGEPDGSIRSLGTIANRADSILKLVKKLGPAEQLKACYEAGPTGYVLYWQLAELGVKCDVIAPTLVPMKAGDRVKTDRRDAERLVRSFRSGDLTAVWVPDAGSEALRDLVRAREAAKQDQLRARHRLSKFLLRTGQRPAAGLKAWTQLYMGWLRQLRFEQVAQESTRLDYLHEVEHMAERVVRLEQAIAEAVKLASPEIQEVVKDLQALRGIAQISAVTIAAELGNITRFESARQLMGYSGVVPRENSSGQRIQRGSITKTGNAHLRRIAVEAAWSYRLRPGVGPGLRKRQEDVPEELKEIAWKAQHRLHKRYSRLAAAGKDQRKIIIAVGRELLGFIWAIGTKAETAARQPMAA

SEQ ID NO: 51357 - protein, 310 aa, unidentified
MNIQPGFVGCDISKNHLDIFDEALSRPERIANEAAALAPLIERWKDKEVLVLFEATGPYDACLRRALTAAAIPFARVNPARARDFARATGRLAKTDAIDARMLAAMARALRPDCAPAPSPEREALARLHKRRDQLVLMRKQERTRLAAIDDPVIVEDVEAHIAWLSTRIDRIERQTRALIENNAHLTEDQRLLRSVPGIGPVVAATLIALMPELGTRSPKTIAALAGLAPFNVDSGQFRGKRVIKGGRRRVREALYMAAITTIRSKHRFARIYKAMIDAGKPPKVALIAIARRILITANAILRERKPFQP

SEQ ID NO: 51358 - protein, 352 aa, unidentified
MTTDGKPDEETEMPLYGGIDLHANNSVVVLLNEQDQVIYQKRLPNHLPTILEPLSRHQREIEGVVVESTYNWYWLVDGLMEVGYRVHLANPAAIQQYSGLKYTDDHSDARWLAHLLRLGVLPEGYIYPKGERAVRDLLRKRAHLVRQHTANVLSVQNIMARNTGARCSVKRMQALTKQDLTTLLAEEAQVLAVTSSLVVLDCLRQQIKTLEKTIHTGLHHTPAYEQLLTVPGIGTILAQTIRLETGAISRFPTVGHYASYCRCVDSTKISNGKRKGTGNVKNGNPYLAWAYMEAAQFALRFQPAAQRFYQRKLAQSRNNTILARKAVAHKLARACYYIMRDLVPFEAAKAFG

SEQ ID NO: 51359 - protein, 412 aa, unidentified
MDVFCGIDWAEDHHDIALADRDGKLLARRRISDDAAGLASLLALLAEHGDIPEDPVPVAIETPRGLLTACLRATGRPVYPINPRAVARYRDRHSVSGRKSDHGDSFVLAGVLRTDMHAHRPLPADSELAQAIAVLARAQQDAVWDRTTAHNKLRSHLREYFPGFLAAFAGARDGILRPEARTILAAAPTPAAAGRLTLAQLRALLRKAGRQRGIDKEAQRLRETFHAGQMRQLPLVEQAMGRQALALLGQLDAACTAAADLEHAAAESFNLHPDAGIITSFPGLGPLAGARVLAEIGDDRSRFQDAKGLKAYAGAAPITRASGKTRSVTHRKIKNNRLAAAGYTWAFSALTASPGARAHYDRRRDTGDGHPAAQRNLFGRLLGCLHKCLATGQHYDENTAFPDIQKKPSQAA

SEQ ID NO: 51360 - protein, 341 aa, unidentified
MKHEMHVLGIDIAKRVFHAVGMDDRGNIVYRKRLSRHDLIPCIAKLPPVRIGIEACGGAHYWARRFRAHGHEVKLMAPQFVKPYVKSNKNDSRDAEAIAEAVTRPTMRFVPIKDVAQQDLQALHRVRERLIGERTALVNEVHGLLHEYGIVIPKGVAKFRQAVVGKLESAKDKLTPLSQELFWKLVDEFALLEKQLAYYQEKLDTVATTHPECQRLMTIPGIGPLTATALVAAISDASAFKNGRQFAAWLGLVPRQHTTGGKERLLGISKRGDTYLRKLLVHGARATIRWVGRKTDRRSQWVRQLLERHGKNRTAVAVANKNARIVWALLTSHQDYQPATS

SEQ ID NO: 51361 - protein, 343 aa, unidentified
MKLMRIGVDLAKNVFQIHGVDRHEQPVWRQRLSRERWLQTVLEKIEPGCEIGMESCSGAHHWARQLQARGFRVRLIAPQFVKPYVKSNKNDANDAEAICEAMSRPSMRFVAVKTIEQQDIQATHRIRAGLIEQRTAKANQIRGLIAEYGLVAPKELLMLRRAIPCWLEEADNGLTVRFRRLLDGLWGDLRTLDERVGELDSEISAIAASEPTAVRLQQLRGVGPMIATALVAAIGDARQFANGRQLAASLGLTPRQHSSGGKDRLLGISKRGDAYLRTLMIHGARSALRTAKFKDDRLSQWAVRLAERSHPNVAAIALANKTARMAWAMLRNGTDYQPDRAAA

SEQ ID NO: 51362 - protein, 420 aa, unidentified
MRNAGIHANSLLEVRRMYNAVGIDVSKSKSTVAVLQPGGTVIRKPFDISHTSQNLNELADYLSSLDGTTKIVMECTGRYHEPMVKALSEAGLFVSIVNPHLIKNFGNNSLRKVKSDPADARKIARYTLDNWTELRQYSGMDNTRTQLKTLNSQFSFFMKQKVAAKANLIALLDNTYPGVNKLFDSPPREDGSEKWVDYAYSFWHVDCVRRIGLKTFTERYRAFCRKHHYIFQPDKPEKLFHASKELVAVFPKEKTYKLLIQQSIQQLNLASGHVERLRQEMNALASTLPEYSTVMGIYGVGKTYGPQLIAEIGDVSRFTHREALTAFAGVDPGVDESGQHKSKSNRASKVGSARLRKTLFQIMTTLLQNAPEDDPVYRFLDKKRAQGKPYYVYMTAGANKFLRIYYGKVKECLRNLEQTE

SEQ ID NO: 51363 - protein, 409 aa, unidentified
MRIIGLDIHRAFAEAVAWDDGKLKRLGRVDMRRPLLEAFAKKLSKDEVVVVEATGNAASVAAVIAPHVKKVVIANPKQVRVIAHAKIKTDTIDASVLAQLYASGFLPEVWIPDEPTQALRRQVTRRNQIVRQRSRLKNIIQSILHSHLIPSCPHADLCGASGRTWLFHQVLPEDERLAVERHLREFDRLGDDLKIIERDLARSALGDEGVKRLMTIPGVDMVVALAIVAAIGDVGRFEQSQKLVSYLGLNPSVRQSGPGPAYHGRITKQGRGHARGMLVEAAWAAARAPGPLRAFFLRVRARRGQHVAAVATARKLAVLIWHLLSKGESYVWARPALHARKLRDLELKAGYKAARGQRGAAHAYNIKSHRDQERRWVEQAETAYTRFVSGWNPRGPKRVRTGAATEVRR

SEQ ID NO: 51364 - protein, 407 aa, unidentified
MRGRFRESELVETPPCMLILPTHLVKPFGDSLQSDWAPGTAAAVPGASGRDRMPPWERAPSVSLVRPLLGSCPEQMMGSKSRMQGKDRSEQETKTKSTVGIDVCKLWLDIHILPSEEAFRVPNTKAGSKEIIRRLAHHDVQLIAIEATGKWHRDLHRNLVDHGYSVRVVNPLRARLFAEAMGLLAKTDRLDARMLAIFAGSLTETRPPAPEIIEALKELVQARGSAIEEQTSLINQFKSATTVFLRRQLKLRLTQIAKHIKALETESLKRINADPGLARRYDILVSIPGFGDVVAMTLLAWLSELGSCNDKQIATLCGLAPWPDESSDRVGARHIRGGRQIVRNILYLAAITAKTFNPSMKPLFQRLTANGKAKKLALVAVARKLIVLANTLVRADRLWQTEAPKCA

SEQ ID NO: 51365 - protein, 350 aa, unidentified
MVVIGADVHKRTHTFVAVDEVGRKLGEKVVAAAGSGHAEAVMWARERFGVELVWAIEDCRHLSARLERDLLAADQKVVRVPPKLMALTRKSARTRGKSDPIDALAVARAFLREPELPVASHDAVSRELKLLVDRREDLVAQRTSTINRLLWRVHELDPARAPKPASLDLAMHRDLLSQWLATQPGLVAELARDELVDITRLTETINALAKRIGERVRAVAPNLLAMPGCGELTAAKLIGETAGVTRFKSEAAFARHSGVAPIPVWSGNTAGRVRMTRSGNRQLNAALHRIAITQIRLDGLGRTYYRKRLAAGDSSTEALRCLKRRLARVVFHHLHTDDQNQHQPCQPAAA

SEQ ID NO: 51366 - protein, 430 aa, unidentified
MDQAEPVGAGSVESFGSLTHFGGFDWAMNEHQFAMVDREGKVLMNLRFADDAEGWASLREAIAPYPRLGVAIETSTGPAVERLLELGVVLYPMNPKAAERFRDRKAPSGVKSDFLDAWCFADALRTDGHGWRQLRQSDPLTMELRILCRDQISLIGQRTALVLQLKAALHEYYPVALEAFDDWTKQGPWEFVLQFPDPHRLASASKHKWEKFLHTHKLYRPETAAKRLELFKKAKAFASPSQAVTSAKTLLAVSLAKSLCTLADQLEMYRKRIGELFNNHPDRDCFGSLPGAGEKIAPRLLAELGSDRARFESHESLQMYAGTAPRTRQSGNSSVTCIRWLCNKTLRNTVHHWANLSRPGCAWAEAYYQQKKKSGMSHAAALRCLGQRWLKILWKMWQTRTTYDEALHTRNQIKHGSWVITLKQSPATAG

SEQ ID NO: 51367 - protein, 440 aa, unidentified
MRKRPEIAFPNAAGIDIGGSSHFVAVPPDRAEASVREFGVYTADLQALADWLEQCAVDTVAMESTGVYWIALYELLERRGFKVHLVNTRHVKNVPGRKSDVLDCQWLQQLMSFGLLAGAYRPADEVCVLRAVMRHRDALLREQARQIQRMQKALVQMNLQLGEVLADAVGFTGQAIIRAIVAGERDPQRLAKLRNHRVRADEAQIAKALHGNWREEHLFALEQSLALFDAYQAQLSGCDAKLESLLGRMARHSATPTGKPRAKSPAKNAPKFDLRSALYQWCGVDLTRIDGLEVTTVLKVLAEIGTDMTRFPSVKHFCSWMGLCPGTKISGGKRLSGRTTPSINRAKLALKMAAANLVRSQSALGAYYRRLCARMDKPRAITATAHKLARLIYLMLTRGEQYVDRGEAYYEERHKQRVIASLRRKAATFGMQLTPSPAQP

SEQ ID NO: 51368 - protein, 353 aa, unidentified
MERENMPAAAMVADEVDAVIGVDTHTDTHTAVLTDSLGGRLAEVSVSADPPGYAYLIEWAGTHRRGRGSGLVWAVEGARSHALVAAGQRVIEAPKPPRARRRSGGKSDSADALAAARAVLAAAHLVDPRADGAREELRILLVTRRHYTDTRTATINLIKSLILTADETLRGQLRGLSTAQQLRALAALSPTLAPAGHLQRHTELVVLATHARSVATSLRDNNKRLTAAVTATMPALLAEYGVGPVTAAILLTTWSHPGRFRNEAAYASLGGISPIPASSGRTTRHRLNRGGDRTLNSALHIIVNTRWRDDPDTITYINRRRADGKTDPEIRRILKRYTARHLYRIMQKNTPTT

SEQ ID NO: 51369 - protein, 331 aa, unidentified
MTNAAVSPAAGELADDLIGIDVAKAKFDWNIHGSSVSHSAGNDPAGFDALWLDLRERRIKLIVVEATGGLEQPLIGFLVGQGLPVARVNPRAARDFARSQGHLAKTDAIDAKALSHYAHTLAHKADQTGVRFEPVSEQIEALQVLVVRRRQLLDMRTAELNRRAGAMRVLRKSIDAVILTLNQQIAALNDDIGRHLKEHFKELDGRLESIQGVGQNTCAAMIAFMPELGQVNNRRAAKLAGLAPLNNDSGKQRGKRSIWGGRSLVRCALYMATLTAIQHNAVIKAFYARLVSAGKPKKVAMTACAHKLLRILNAMARTGQTWNPEIHGLPA

SEQ ID NO: 51370 - protein, 367 aa, unidentified
MKKVNTAATKQSRNISRQKLTIGLDLGDRNSWYCVLDETGGIQLEQRVRTTAKALQEVFGAMPRSRIALEIGTHSPWISRLLGELGHEVIVANARKVRLIGESRKKDDRLDAQTLARLARIDPELLYPVKHRSAQAQADLTLIRARAGLVRARTGLVNAARGLAKSYGERLRGCNVRNMNPEKAESLSPELQAALEPLLNAIESLSERIVEYNEGIEKLAQESYPQVALLKQIKGVGTLIALTFLLTLEDPHRFGKSRDVGGYLGLQPGRRNSGQSEPQLHISKEGDPYLRTLLVQGAQHILGPFGIDCDLRRWGLKLAERGGRNGKKRAIVATARKLAVLLHHLWVSGEVYEPLHNSSRLTVAAAA

SEQ ID NO: 51371 - protein, 353 aa, unidentified
MANPMVNLTIGVDLGDRYSELYGVDAAGACVETGRIRTTVAGLEQWFGGRPPARVVLEAGTHSPWASRVLPRLGHEVLVANPRKLRGLYENDSKDDRVDAEYLARVGRLDPALLKPITHRGEAAQADLAVLSSRDVLVRARTLLINHTRGVVKALGGRLPRCSAEAFARRVGPHVPPAVRPALAPVLEQLQQLTTTIRGFDRAVEHRCAQSYPETARLRQVTGVGPVTALAYVVVLDDPTRFRRSRAVGAYLGLRPRRSQSGEQDPQLRITKAGNPFLRRLVVQAAHYILGPHGPDCDLRRHGERIAARGGKNAKKRAVIAVARKLAVLLHHLWISGAVYEPLRHRPALAQAS

SEQ ID NO: 51372 - protein, 348 aa, unidentified
MVADELDYVVGVDTHRDEHVLAVVVAPVGAVVARRAVAANAGGYAQALRFADSYASGRRVWAVEGAGHYGAALARFLSGHGETVLEAGRSPRGERRLQGKDDGLDAVRAARAALGHQLASPRAGQRREALRLLLVARRSAVDVRRETLVQLRSVIVTSPDRLRDELRRLPVQRLLDRCSRLRRPKTATPDELAARLVLRTLARRIEAATVEASELEREILTHVRALAPQLLDEPGVGPIVAAQLLVAWSHRGRVRSEAAFARLAGVAPVPASSGQTTRQRLSRGGDRQLNRALHTVILHRRQHDPATKEYIARRVAEGKTRRDATRLLKRYLARHLYRVLDNQAPNMA

SEQ ID NO: 51373 - protein, 343 aa, unidentified
MNKMIIGIDVSKNDLDVAFWQNDKSFFLGKYPNNQNGFQTIYQDVETKRQKYNADTVLVVMEPTGGYEQHFAYFSFNKGWGVSLPNPGNVRSWIKGIGKRAKTDKQDAMLLAQFGAIQQPLLWKPLPDEVAELESILDRVDDLNEMLHSEQNRLESQQNRQVCHEVSQKSIQDNISYFEKQIKILDDAIKNHIDTHTHFKEQVKNLKTVPGVGNKISPHLLVAMHRFCVLTDGNGTNKAIVAYYGLDPQPHESGKSIYKKKSVSRQGDRHIRHLLYMGALGGIRGNNPLQAFYQRLLGKGKKAKVAIVASARKIIVWCWAIFRQGCSFDFSRFGYVGIVNSFV

SEQ ID NO: 51374 - protein, 430 aa, unidentified
MQKNYSTQNEKIERITEHTLVIGVDIAKERHYARMVNWRKQEGQKGKNFKNNKTGYEKFIGWVNKGIKQSGASDVVVAMEPTGTYYFVFEEYLEKQGIEVVIVNGRDVRRTSEIMGNESSKNDPRDALIIAQLTVDGRYGPSTRPKEGVYAELRELSSLRDLLATDDTRHKNRLHNQLSQLFPEYQKYQKRGFSLGMLAALKHFGTLEALIQAGPDGIHQLWKEQHIKNYGQKKAHALYTLARQSIGIKRNSLAAAHKLRILINNYEANQQALAETEEKLQQQLEQLPQAQQLMDIPGIGPVIAGTFLAEIGDIQNYNSPKQIQKLAGYAITSKSSGKHNGKETSSKMGRKLLKTILYKAGIVVISTNKAFRQIYDYYTIERKKPLIKMKAVIAISCKLIRVFYAMLKNGTAFDEKKMLNDIHRPQTKTA

SEQ ID NO: 51375 - protein, 421 aa, unidentified
MFSDTDLIVGVDVHRRTNVTQMMDGQGDVVDSGRCFANNGTGTRQLARHLARLTDSGGFAAIHIAAEATNNYWLPFFCQLSQSAQLASWPVELYPFNPRVVHNFKKALGDIEKTDDLDAAVTAERLRFGKELPRPFKMDELYLPLRALTRYRYHLVQELVRVKSYCLSQVYLKATNYSDKGKKPFSDVFGATSQAVLREFATLDTIANMPFDELVEWIDVKGKRRFPNPEENARKLQQVAHDSYLLPQEWAEVIHDIIALNLRHMTLLGNLIQRVETAITQQMQSIPNTLETIPGIGPVLSAGIIAEIGDLARFDYNEAKVASFAGLKWPRSKSADFEAEDTKMSRSGNRFLRYYLCEAAQMVRMHAPEYRDYYDRKYKEVRKHQHKRAIVLTARKLVRLVVRLLTTNEPYRLRRVSSDKS

SEQ ID NO: 51376 - protein, 357 aa, unidentified
MRAQGKRLDFSKQDFYIGIDVHKRSWAVTLRSNNIVLKTFSMNPNPKELFDFMNKRYPNGTYNSVYEAGFSGYSMHRELEDLGFNNIIVSPSEIPTTGKEKLTKTDEVDSRKLARELEKGTINGIYIPSLLQQEMRSLSRLRHQQVKKQTRIKNQIKSYLDFYGHKLPKNCEMQHWSRRFIEHLRTLEFSYDIGKEQLDIYIEELLIIRNRILQILILMKKYYRQYELYYIIDLLRTVPGVGFTVATTLCSEIMDIKRFSNNEKFASYIGLVPSTMSSGEKKKVLGLSFQFNRYLRSLIIESAWVAIRKDPALTLAYNNFLIRLSAQEAIIRIAKKLLNRIYYVLKNENEYIYSVVQ

SEQ ID NO: 51377 - protein, 332 aa, unidentified
MSVYVGIDVHRKRSQVAVIDQDGEVLANRNVPNGVKPILGVIGGLPAGTPAAFEAAFGWGWLEALLEDYGFEPHLVHPLQCKAIASARLKNDKVDAAILAQLLRADLLPEAWIAPPPVRELRALVRHRIQLVRLRTLLRNRIHAILADHGQDRPAGCWSGPGREWLAALELPAASRAVIEDDLALIDALQVPVDRLDWELHQRAKADPRVKVLTRLPGVGPFTALVILAETGDVSRFGSARKLAAWAGLTPTVRGSDRTVRHGHISKQGSAWLRWILCEAAQTAKRHPDFAASYQAIARRRGKKIATTAIARKLLTRAYHLLTDASSGGEPR

SEQ ID NO: 51378 - protein, 362 aa, unidentified
MTKSTTIIAFDQHAATTVAAVLLSGQRTPALHTLTSDIPIILRFVERLRRAGEVQCCYEAGPCGFELQRAFTTHHIPCEVIAPALIPRRPGDRVKTDRRDAGQLAVLYRAGALTAIHIPTEQEEAARDLLRCREDIRADLLRARHRLSHFLLRHGRRFTLTKRAWTKRHAAWLQAQRWPLPALEQTHRAYVRAVDEAMDRLHAVDTELRDLLTLAPLRARVERLRCFRGIDALTALTIAAELGDPRRFPNAPSLMAFTGLIPSEHSSGAKQARGPITNTGHAHLRRVLVEAARQYRHHAFLGPSLQQRQRGAPAAAIDSAWRAQRRLHRRYRCLAARGKPKQHIVTAVARELTGFLWAALIQ

SEQ ID NO: 51379 - protein, 426 aa, unidentified
MRFIGLDVHKDFCEVAVVEEDACWSGPRVHSTPEDLEVFGQSLGPDDQVVLEATGGALAIARILEPHVGRVVMANPMAVRAIASAKAKTDRLDARTLAKLLAAGFLPAVWLGDERTRLLRRLVSRHAQLVRQRTRAKNQIHAVLQRTLKGRPPASDLFGKRGRAWLGDQDLPADERETVQASLRHVEFLNTELNLVDRTIAEQVLSWPEVRRIMTIPGMGATAAAGVIAAIGDISRFPSPRHLVGYLGLDARVRQSGSAPARHGGISKQGSSEARHLLVEAAWAALRTPGPLRAFGERIRARRGANIATVAVARKLAILCWHLLTREEDYAFARPSLVREKIRRLELAAGAPNRNGYRNPVRVFATPEQRRLEREVGDQAEKAYRRFVKDFRSTGKKGAGAATGARISLARKGQAARQEQAPDPAL

SEQ ID NO: 51380 - protein, 349 aa, unidentified
MGEVSTIGIDIAKSVFQVHGVDTDGAVVIRKRIGRTKILKFFTDLPRCLVGMEACATAHHWARELKRLGHDVRLMPPTYVKAYVKRSKNDAADAAAICEAVTRPSMRFVPNKSTAQQSALMLHRTRDLLIRQRTQLINALRAHLAELGLVAAKGREGLHQLVTIVMESCEEKLLSDARFACQAIVMQLHAAQTQINGLDKRIIQTHRVNADSKRLNAIPGFGVILSTAVVATMTDPKAFKTGREFAAWIGLVPRQNSTGGKERLGSISKQGDRYLRRLFVLGAIAIVGTARMRPEKYPWVIKLLTRRPAKVVAVALANKMARVAWAVLAKGESYRAPTRPGNAAIAAAA

SEQ ID NO: 51381 - protein, 389 aa, unidentified
MKIYVGIDIAKLNHFAAAISSDGEIILEPFKFTNDADGFQLLVSKLESFDKNSIIIGLESTAHYGDNLVRYLVAELYQVCVLNPIKTCQMRKNNIRKTKTDKVDTYVIAKTLMMQDDLRFVSFYDLDMMDLKALGRFRQKTIKQRTRLKIQLTTYVDQVFPEIQYFFKSGLHQNAVYALLKEAPSPKEISSMHMTHLANLLKVNSHGHFTKEQAKELRVLAQKSVGANDSAISIQITQTIQQIELLDSQLDKIEAEMTDIMKFNDSVIMTIPGIGYINGGMILGEIGDIHRFSNPNKLLAFAGLDPSVYQSGNFQAKTTRMSKRGSRVLRYALVNAAWNVVKNNATFKAYYDAKRAEGRSHYNALGHCAGKLVRVIWKMLTDELEFNLE

SEQ ID NO: 51382 - protein, 312 aa, unidentified
MFEGKVVHEEETANHQNAIMSLIRHLEKDYGIDGSRMLICAEHTGQYTFPLACACKAAECKLWLENPAEIKYSSGIQRGKNDKVDAKRIAVYASRFQDKVQYYERPSEDIERLKQLESERSLYVTDLAKYKGQLKDQREYMPTALYERKVKRLTALMENLEQAIQAITNEMDEVITSCPVLSRQMELLMSIDGVGRVVATNMIITTEAFTRFDDPRKFNCYAGVAPFSYSSGTSQQSKARVSHRADKVMKRLLHMAAVAVTHRNGGELKKYYDRKVAEGKNKMSVINALRAKIVARMFAVIKRNELYKPILS

SEQ ID NO: 51383 - protein, 407 aa, unidentified
MNLNVGIDVSKLKLDYCGMDSNKQVCFQGEVTNTPKGAGHIRDEILKRSQQADQIIIGMEATSVYNFHPTLFFEQDDRLNQLNVTVVTLNPKVTHRYSKLFDDDKTDTVDAFHIADFLRIGRYQVPVTRDEKHIALQRLTRERYHLVHQINDCKNHFLNNLYYKVNTIDTVLPTSVFGSTMLSILSDEKYSLDDLVQIPLSALTDELNHLSHGRFGDAKSVARALKKAIRSSYRLSKTVADSVDQVLAMYANQLRMLNQQLKLLNKSISDLCSVISGADSLQSIPGIGPVYAAGLLAEIGQIDRFPNDASLAGYAGLSWQRSQSGNHERQLTPRTKSGNQYLRYYLVEAANSVRRYDPTYARYYQKKFREVPKYQHRRACVLTARKLVRLIINLLTEHKLYTPPKLV

SEQ ID NO: 51384 - protein, 355 aa, unidentified
MTSTKYIGLDVHKESISIAVMNSVGKFVMESVIETKASTILQFIDGLRGDVRVTFEEGTWAAWLYDLLKPHVTEVLVCNPRKAALLKDGSKGDRIDARKLAELLYMNKLATVYHGEHGLRTMKELARSYLTITKDLTRVMNRLKALYRSWGIPCAGNEVYAPGHRAEWLGKISEAGVRRRAEHYYQQLDVLRLLRQEVRRDFLVEAKKHKAWKLLRQIPGIGPIRAAVLIALIQTPHRFRTKRQLWTYSGLGLETHDSAQFHAVEGQLQRSRKPATVRGLNKDHNHDLKDIFKGAATRVSSRSGPFRDFYENLLAKGRKPAMARLTLARKIAAITLIVWKKEVRFDANYLKQQAA

SEQ ID NO: 51385 - protein, 459 aa, unidentified
MYTIGLDLAVQATHKAVVTDEQGGFITPVLTLRTQPGELDQLLTRARNGKQETALRVVMEPTGMAWFPIAVYLVRHDVAVYLVNSQEVADLRRYYKRYAKSDRIDARVLARLPLVNPEKLHRLHLPTAKALACQRSCKQLDRLSTHINAIQNRVQAIDRFAWPGLEDRVFADPFAPPARWMRAHWYDPCRVLEAGAATIREQWQASGEATDSAGAWCEALVDQAAEIVTLYGAENHYLDFAQLQAEVGREQDWLATLEQQHQTLRKKVVRPLYRHIHPSRNLETLKGVGQDSAAVYASFIGEAKRFSSTRVFRGWSGMVPDSVQSADSEAKGLHITQAGPDLIKKFAYLDAEIARRWDPQMAAIYYDQVINKGKHHKQAVCACATHLLDRVLVVLREDKAYELRDVDGTKVSVEQAQAIIAERYTVSQEARQRTTKRHRKARAERQAERNSKGKGAEAW

SEQ ID NO: 51386 - protein, 431 aa, unidentified
MSHRLHVGIDFSQKRADCCLLFPNGQPLELHQAFGNSPAGYSLAKHLLLDAMDSYQFEGIDVSGEATGYHWLPFFLQLAADPDLEPHDLKLFLLNPRWVAWFKKCFAQDDKSDQKDPYYIAERTRTHPPRVAWSPQMDLLPLRFYTRFRFHLVQNLAREKCYFSAFLFLKASAYRHLQPFSDVFGVTSRLVLTQLPSLDELAELPVQALTDYLYELSGHHLRDPGDNARQLQHVARESFPLDATLALPVQRILELTLEHIRFLEGQIHQVEAWIAAELASHPAILQLMTTPGVGPVFASGIGAEIGDLQRFLQGAKWDKRRRRYRPRNLRDAEDAVAKIAGLWWPRSGSGDFEAEDRRMAKSGNRYLRYYFIQGADRMRHHIPDYAAFYARKYREAAKHQHKRALVLTARKSVGLMVGLLHRNEPYRSKED

SEQ ID NO: 51387 - protein, 414 aa, unidentified
MNRRNIVLKRTSVKNVVVIGVDVGKFWHFTCAFLPSGEFTKPFKFFNNAYGFAEFIGFITRLKSTLQRDVIVGIESTGHYWENLAYFLDSKGVKLVQVNPAHTKKSKELLDNTPNKADPKDSIVIADLVAQGKFLSLILPKGDYAELRMLTKARARVVKELTSLANAINYIIDMVFPELTQIFPDVTSKTVLYLLSNYPRPSDLLTISLEELTKQLRKVSRGQARKEKIEQLYKAASNSVGITQGNEQVALILEPYLSKVQALTNYELKLEKVITGIVARLPETKYLLSMKGIGVITVATMLGETGDLRLYNNAWEVIKLAGLNLYRLSSGKYQGQVKITKRGRPLLRWIFFFAALRQARCGMPLYNFYWRLRNNGVHKMKALIAVARKLLCIMFALVRDRREYVLEGSTSLAA

SEQ ID NO: 51388 - protein, 315 aa, unidentified
MDAIVVGIDVSKDRLDVHVRPKGEVFAVSRDAAGLEELAARLLPLDPRLVAVEATGGFETVVAASLGAAGLPLAIVNPMQVRAFAKALGKRAKTDPIDAAVIAHFVEATGIEARPLPDADTQMLADLIARRRQIIQMITAERQRQKRASERMKTSIDRLLKALQAGLSDIDADIDEAVRGSPAWREKEDLLSSVPGVGPVVARTLIAEMPELGTLPGRQVTALAGLAPHTRQSGKWRGESRIGGGRASVRTVLFPAALSAARHNPALQAFHQRLIAAGKPKMVAIIAVARKLLTILNAILRDKKPWQPADQEHSR

SEQ ID NO: 51389 - protein, 387 aa, unidentified
MSQTVAALTPAAVDYERTLVLAIEVSNKNWVLAAQVPGLPHTKAKRTIDPEAEALLAAIAGYRARAVATGRSIERVIAVYEAGWSGFWLARWLMRHGVEVYVVQPSSVPVDRRMRRAKSDGIDSELLLRTLLAWLRGEPRVCSMVPVPDEADEDARRCVRERTELISERVGLTNRIGAILATLGVSGYNPLLRNRGRRLAELRTALGEPLPANAHAKIKRLLARLELVLTQIAELERERDAVVETEASDRASEMIQQLTALRGIGVQSATVLVREAFVRRFANGKALGSYAGLASSPYSSGEIDREQGIGKAGNRRVRTVMVELAWLWTRYQPGAAQVCWFRERVGSTGRRVRKIMVVALARKLLIALWRFVIDGVLPEGVVLKPAA

SEQ ID NO: 51390 - protein, 446 aa, unidentified
MIMGKAKIAKATIDLVRPNAAGIDIASEVHYVSVPDNRDSPSVRKFGSFTEDLHKMAQWLKQCNIETVAMESTGIYWVQPYLILEEYGFEVYLVNARHIKNVSGRKSDVQDCQWIRQLHSYGLLNRSFQPESLTRELRAYMRHRKHLVESTANQILHMQKAFEQMNIKLHDVISDITGQSGMLMIKAILEGERDANTLAQLANGRIKATQEQIVKSLTGVWREEHLFELKQAFDLYQYLNLKIIECDAQITNVLTRLVDNNSSDDIKRHKRSHKNSFHFDGTKYLKQILGIDVTRIYGISEITATEIISEVGTDMSKWSTEKHFVSWLNLAPNNRITGGKILKPKKTNKRNKAGQAFMMAASTLKNSEHWLGAFYRSIRARRGTGIAVKATARKMSLIFYKMLKDKIEFDPLSIDTYNQYFKERRIKSIEKQAHALGLKLVPKFVS

SEQ ID NO: 51391 - protein, 321 aa, unidentified
MSLFNLGLDVAKSKLDCALRLPDGKFKSKVVENTSIGFNALTEWLEKHGATSTHVCMEATGVYWEAVAEYLAAKGMTVSVVNPAQIKAFGQSQLVRTKTDKVDARLIARFCAERHPAPWQAPTASEQALRAMVLRLDSLQVMRTQESNRLEVARDAVKLGIASHIEWLDKEIKALATKIGKHMGGDDSLKGKQALLDSIPGLGERTIAILLAFYADLERFGNARQAAAFAGLDPRLHESGSSVKMKPRMSKVGHAFLRKALYMPAMVALYKTAWGIRFRERLAAAGKPPKLIIGAMMRKLIHVAFGVLKSGKNFDPTLHGC

SEQ ID NO: 51392 - protein, 366 aa, unidentified
MSSVALCAGPVHLGLDTSKNTIAVGILRPGEVVPDVELISSDEASVRRLIGRFADRGGLRVCYEAGPTGFGLYRLLSSMGVACEVVEPALVPRAPADRVKTDRRDARRLARLHRAGELVAIRVPTEAEEAVRDLCRARAALVGDRTRARHRLSKFLLRHDRVWREGAWTIKHEQWLSAQRFTDPALRVTYGHYRAVLAAREAELAALSGEVAGYYDHGPFTEAVARLAAYRGVDRLGALTLASEVGDWRRFAHARAFMGFTGLVPSEYSSGESVHRGHITKAGNSHLRTQLIESAWAYQHRPSLGATLRRRQSGLDPATVARSWAAQQRLCARFQRLAHRKTSHNVVTVALARELAGFCWAEMTSS

SEQ ID NO: 51393 - protein, 361 aa, unidentified
MRAAKPLVPPLKYVVGIDIAKSSFVACFGQVDGHQQVLFGKETTFENTLGGFASLLSWVARQQTAAVPLWFVVEATGVYYEELAYFLADQQQLLSVLLPNKVKHFARSTELKSKTDQLDARLLCRLGLERALPAWQPPTPALRQLRALARERQVLTKQGAQLKARVHAYQHSYQPDSRTLARLAAQQQLLLQQLAALDQDLTELLAAEPELARKLQQLTSIPGIGLTTAIIVVAETSGFALVENERQLASYAGLDVVQRQSGLSSHATRISKRGNTRLRTALYLPALSSLRYNPRQIAFYARLRSRHPSGKPGVIAVMRKLLVLCYSLWKNDQAYNPDYPTAHQSGQEIAPATEVSRGYTG

SEQ ID NO: 51394 - protein, 352 aa, unidentified
MIVLGADMHKRSHTVAAVSAATGEVRDEKTVQVGVKGFAALLIWARDLGSERVWALEDCRHVSGAFERFLVGRGERVLRVPTKLMADVRRGARERGKSDSIDALAVARAALREGVQKLPVAQLDGPELDLRLLVDHRERLVRQRVALNSTLQWHLHDLWPELELPGSSLFYGKWAPRIARRLARAEQTMRVRIARDELRRIRELTQTIRALEHEIAGLVAQIAPQLLNEPGFGPLTAGKLVGEIAGAGRFSTDAKLARAAGVAPIPVSSGKTNRHRLDRGGNRQINAAIHRVAVTRARCQAETIDYVERKKSEGKTQREAIRCLKRHLARRIWRLLQPPHPETETTPPTSIS

SEQ ID NO: 51395 - protein, 363 aa, unidentified
MLYLGIDLHRKQMTVNLRSEDGEPILRRQVSTWGDEPQKFLADVQRRAGSDGVVVILEVCGFHDWLLELLPQSGCREIVLIQPTKKSSRKTDRRDANQLGELLWVNRARLLAGRKVQGLRRVVPPQPAERENRRLTQLRCNLTGDLTRTINRVRYILRRLNIEQHCPTKGVQTQKAKSWLKTLALPALDRLEMDQLLSRWTALAQQRDQLDRRVVERAALDPRVALLRTTPGASHYTALALACRIGDIGRFPTPRSLGNYWGLTPRCGSSGETERLGSITKEGSTLARYLLGQIVLHVLRKDAGTREWFRRIKKRRGAKIARVAVMRRLTVVFWHMLSKQQTYKIAASSVGPQRRMKSTAENV

SEQ ID NO: 51396 - protein, 412 aa, unidentified
MKRIHQRCCGIDVHKATLTGCVRVHGRGGKLNQEIRSFGTTSDELLSLHDWLIAHHVTHVAMEATGVYWKPVYYMLEQAFTVLLVNPADVKRMPGRKTDVSDCAWLAQLLENGLLRPSFIPPRAIRELRDLVRYRSQLKHDHTRVANRLHKVLQDADLKLSSVMSDILGVSGRQILRQLAAGHSDPAALAELARGRLRAKLPALRQALTGRFSEHHAFLISQALAELDNLEESMSALAARIEQHLVPFAQELELLSTIPGVKRVAATAILSEIGTSMSCFPSTGHLDSWAGMAPGNHESAGKRRRAKARKGNRWLRTILVECGQAAGKARNTALAAIYRRMIIREGRKHAAFVVGRHILNIAYHLLAARTTYRELGPSHFEQRRAEQLKRRCLDQLRTLGYQATLTQLQKAA

SEQ ID NO: 51397 - protein, 357 aa, unidentified
MVEALSEAKSSECGVTNPYRRTEHCGKIHECRCDKGVGVIGIDISKDYLITSRGRARKYENNKRGYEEILKMKPCAIVLEPTGVYAIRPCQYFKEKGIKVLQVSPNVLSREKEFRGKKTDFYDAEKLENMVDKAKEYEYNPLRELVTLYLFLKDIEVKYKNRLKRALFLVSDNDKINKDRLERLAKGDFTQEELYQLEYTPIVLEEIKVLAKTLLETQEKLEEVRRMIEEQVPQDHVLLTIPAVGRLAAGIIIGIVGDVKRFPRPESFVAYCGLDPVVERSGKVVVSKGISKRGNKYLRSLFYFLAGRNYSRNPTLLKFYESHKDRLQGKKLYTALARKLARIVWSVWYNNRPYEPK

SEQ ID NO: 51398 - protein, 354 aa, unidentified
MNEHSTVNSSQTIGVDLGDRTSELCVLDAKGEVARRLRMATTAEAVQRTFEGLAACTVVMEAGTHSPWMSRLLQARGHEVVVANPRKVRLIGASISKDDQRDAELLARLGRVDVKLLAPIQHRGAEVQRDRALLQVRGTLVQMRSMLINQVRGLAKSHGQRVPKCSAESFPKHARATLEAELFLGQALLLEHIETLTESVRGLDRRLERMCTQDYPETLRLRQITGVGPITSLTFVLSLETPSRFRSSRSVGAYLGLRPKRRDSGERRPELRITKAGDSELRQLLVQCAHYILGPFGPDCDLRRFGERLIAQGGKRAKKRARVAVARKLAVLLHALWRSGERYEPLRHASAFAA

SEQ ID NO: 51399 - protein, 411 aa, unidentified
MERVYERCCGLDVHKGSVTACVHVPRREGGRGELVESFTTMTADLLALRDWLQGLGVTHVAMEATGVYWKPVWYLLEDDFELLLCNAGHVKNVPGRKTDVSDAQWLCQLLEHGLLRSSFVPPKPIRELRDLTRYRKTLIRERQREANRLHKVLEDAGIKLACVASDVLGVSGRAMIEALVAGEGDPSVLAELARGRLRAKLPALQRALEGRFSAHHALLCSHILAHLDYLDEAVESLSEEIDSRTRPFARELEQLDTITGVGKRAAESILAELGPDMSRFPSHRHCARWARLSPGNDESAGKRRSGKTGQGNPWLREILIECARAAARSKDTYLKAQYLHLRRRRGDSKAIVAVAHSILVSAYHILKNGEPYRDLGFDHFQRRERPDHIVRRLTRQLEQLGHHVTLEPLAG

SEQ ID NO: 51400 - protein, 362 aa, unidentified
MSKTEERKRLCVGVDLHKTQFTVSALTEDGEVVFREEYRTTPDGYSEFIEEMHRYEEEDGCSIELAVETTGNARFFKNQMEKEFFDVTVVNTNKFKVITYSTKKTDANDALTLAMYLQKEMLPEAHLCSQTSEEIRRMLKTRRILVQSSVKIKNQIHGMLLGYGIETNAAQFQSKRKRQELMNDLANHYYSDFTASSLEVMLNILDVLAEQIKDVEAQIENMVEDNEDVELLKTIPGVGKIGAATIASYTEDLERFDGDFKRFASYIGIVPSVHNSNETVHLGRITKHGPQELRTAFVQVALGMIRLSKQTSNWRLIEDYRRKKTDKGSGRAIIAMTRKIAKIVFVMLENREPFNPELMLSK

SEQ ID NO: 51401 - protein, 341 aa, unidentified
MPNNVYVGVDIAQAKFDAAVWQGATGTALQTFRNDTDGFAQLAERLTVLAPAPDTQIVLVLEPTGGYELALVAFAYDQGWQVCLPNPKQVRDFAKGSGRRAKTDAQDALLLAQFGAEQKPEPQAELPAAIQELLELLHRREDLQQLKRSESNRLLGLQQRPHPTKAVSASLERTIVALEAELAAIEQAIAELLTQHPDLKGEAKRLRSVPGIGERNVLPILVLFYRWRARTSGRGTPKGLVAFVGLDPQPYESGRSVHKRATISKMGDRSVRRYLYLGALGGVHGKNALRTFYRRLVSRGKAKRLALVAAAHKILIWAWAVFSQGVDFDPSRFPQEDPAAI

SEQ ID NO: 51402 - protein, 421 aa, unidentified
MTPTSHDTFAAFIGIDWADAKHDLCLQAAGTAQRERFQLEHTPEALDAWATTLRTRFNGQPVAVCLELDKGPLVSALRTDDFLVLFPINPLTLARYREAFTPSRAKDDPTDAELQLELLLTHRDKLQPLQPQSPTMRALAQLVEHRRRVVGDKVRITNRLTSALKNYFPQVLQWFQDKDTRIFCDFLSRWPTLKAAQLARRSTLETFFRDHHVRTADVLATRMHAIKTATPLTTDEGVIAPNALLVQTLVSQLRVTLDAIEAFDHAIAQRAQHHPDFPLFQALPGAGPVFASRLLVAFGEQRERYASAAALQKYAGIAPVTERSGKKAWVHWRLQCPKFLRQTFVEWTAESIRHSFWAQVYYQQQRDKGNTHQAAVRALAFKWIRILYRCWQERTPYDESTYLQALTRRGSSLLQNLAKVS

SEQ ID NO: 51403 - protein, 382 aa, unidentified
MTMTRTTESTAVTRETAPALLLAFELGQRTWKLGFSRGIGERPWMRTVAAGAVEAVAAEIAAAKRRWQLPAETRVTSCYDAGRDGFWLHRWLIAQGITNVVVDSASIEVSQRAKRMKTDRLDLAGLLNLLARYLWGDRRVWRVVRVPTVAQEDARHWHRERETLQRDRTRIINRIKGLLATLGVRCAVSARFLDDVARTRRWDGQPIPPGAQARLRQQWTLLQSVTQTLATHQQRGTQELEAAAARAMTRLERLRAIGVMGARVLSTELFAWRDIRHARELGALVGLVPARYQSGETTCDLGITRAGNAHVRRISVQLAWVWIQHQPDSALTQWYRRRFGGGSPRLRRVGIVALARKLLVALWRYVDRDVLPDGARLKPLVA

SEQ ID NO: 51404 - protein, 437 aa, unidentified
MMLAIWRRPIPSPFAGERDIALRRSRITIALVLAALLFSLGPATATSELRGTGDLGIVVERAAGSIVIVDTTRRIALGRVEGLGDLDVGMEETAICVIDREGKVVLETMVTTDPDAILKVLKPYLSKLRRAGHEAGSLSPWLQVELKQRGVPAICLEAWHARAALSAMRNKTDKADARGIAHIMRAGWFREVHVKSEESYRLRLLLTQRRNLKRKFLDIENAIRHSIKTFGLRIGRVGRGQFEARVRELVADDSLVAGLTDCMLRARAALWQEYPRLHEVVVAIVRRDELCRRFMRIPGVGPISALAFKTAIDDPHRFRHSKTVGACLGLTSRRWQSGSSIDVQGHISRAGDGDVRHPLYEAANGMLTRYRGFCSLKAWGLKIAKTRGYKRACGAVARKLAVIMHAMWRDGSEFRFKEPKPPVGRTSTTPKLIGAAA

SEQ ID NO: 51405 - protein, 372 aa, unidentified
MGHHTEAFVGIDTSKLRNAVAIADSGRGGEVRYLGEFPATEAAIQKLVAKLAAKYRHLTFCYEAGPTGYGLYRLLKSLSHECLVVAPSLIPKKAGDRVKTNRRDAVSLAKLLRAGELTAVWVPDERHEAMRDLSRARQAVKKDLQGKRQQISSLMLRLGRIYPGKTTWGPAHMRWLISQKLEHREQRIAFEELLEGIRQESERMERLEGAIREVVPEWSLAEVVAALQAMRGIDLIAAVGVLAEIGDLSRFQNPRELMGYLGLVPTENSTGDKVKRGGITKAGNGRARRILVEAAWSYRYPPRVSRDKQPKVEAAPRRAREIAWKAQTRLCGRFRSLERKGKRRTVIVTAIARELSAFIWAINRELMPLRQA

SEQ ID NO: 51406 - protein, 346 aa, unidentified
MTILEDTRVITGGVDTHADMHVAAALDPLGGLLGVREFPATAAGYADLLGWLSGFGDLALAGVEGTGSYGAGLARYLAAAGIRVVEVDRADRQDRHRQGKSDPLDAVSAARAALSGRAAGEPKGRDGAVEAIRALMVAKRSARNERTQAINQARALIVTGPDDLRARFAGHSAAALAEAIAALRPRPGDAAQYAVRVALRELGRRVEFLDAQLERLDDLIVPLVTARAPGLLSLYGVGPDTAAMLLVAAGDHPQRLRSEAAWAHLCGVAPVPASSGKVRRHRLNRGGNREANHALWRIVITRMSAHPATRAYIERRTKEGLSKKEIIRCLKRYVAREVYHHLRAGD

SEQ ID NO: 51407 - protein, 362 aa, unidentified
MEYFAGLDVSIEETAICVVGDDGKVLLETEVPTEPELIAEALERFAGRLRRVGHEAGSVSPWLHAGLIELGLPAVCLETRHVRAALSAQRNKTDAADALGIAHIMRTGWFRQAHIKTEECYRIRLLLVQRRNLKRKFLDIENAIRHSLKVFGIRLGKVGRGSMAKAVREAVADDAMTAGLMDCMLRARAALWEEYLILHKLVTQLAMRDELCRRFMAIPGVGPVTALSFKSAIDDPTRFRRSRNVAAYFGLTSRRWQSGSSIDVKGRISKAGDPDVRRALYEAASAMLTRFKGRDTIKTWGLKLAKTKCHAKARVAVARKLAIVMHAMWRDGTFYVGDPDVEAHEIDTAYAAKMQRLSYARS

SEQ ID NO: 51408 - protein, 420 aa, unidentified
MTVDLERGYKRRELCGPNQYLNLLLRSVLMIYVGIDVAKDKHDCFITNSDGEVLFQVFTIQNNRDGFDDLFAKILSISSDLSNIKVGLEATGHYSYNLLGYLINKGLPTFVINPLHTNLYRKSLSLRKTKTDKVDARTIAMMLMSDVNLKSYSDTSYHNEELKSLTRYRFDKVQERAQLKQSVSRLVTILFPELEKLVPTLHIASVYALLSELPSAGKIASCHLTHLTKLLENASKGRYSREKAIEIRKAARVSIGSNMPAKSLELRHTLKLIAELDSEISEIESEIKRIMDQISSPILTIPGISYRMGAMILAEIGDFSRFDSPDKILAYAGASPSTYQSGQLESSYSHMEKRGSRYLRFALINAAKYVCHWDETFGAYLQKKISEGKHYNVAITHATKKLVRLIYAMEKSGKPYIKTA

SEQ ID NO: 51409 - protein, 369 aa, unidentified
MGKHSEVFVAFDVAKKKHAVAIAEGGRQGEVRFLGDVENSPLPIERTIKRLATRYDLLHVCFEAGPTGYGLYRQVQALGHDCLVVAPALIPKRAGERIKTNRRDAVTLARLHRAGELTGVWAPDPAHEAVRDLVRARGAAADDLRRKRQQLLSFLLRHSRIYSAGGHWTLAHRRWLAGQKFDHAAQQIVFQEGIDAIEDSLQRLRRLEKQLALIAPEWSMAPVVEAYQAMRGASFLVAVTFAAEIGDVRRFDTPRQLMSFLGLVPAESSTGDTIRRKGLTLAGNRRARRALVEAAWTYRYPARVSETLRARLEGLPKPVRDIAWKAQVRLCARFRRLSATGKKLPIVVAAIAREMAAFLWAIGREVAPA

SEQ ID NO: 51410 - protein, 371 aa, unidentified
MTNLKHTPSDSVLVAIDVSQRRNDVLIETPGVSRHRRLVVLNNRVEHDRFIDRLRDIGRPVIVGFEATGNYHRPLAYRLLQAGFELRLVSSVALARTREALHNGWDKNDPKDAQVILHMLKIGATQTYCDPICSGINDIQELSKTHEVISKAKTELWHRLLTHYLPLYFPEIARFAGNSRSDWFLAFLEQFPTPAGITVLAKEHFIDQAWDVVGRKVSKARLLGDIYETARSSIGLPVAIDSPAVTMFRLIIAEGRSLIRQRDAIEQQAHTALADNVDYRRLRQIPGIGPIIAMTILAEAGDLRRFRHHRQFLKFCGLDLATHQSGQFRGQTKLSKFGNASSARVLDRGAGRHSTARKRLQSQIRALHCTR

SEQ ID NO: 51411 - protein, 358 aa, unidentified
MLKAENHSEEGENMNIRTIGIDLGKTVFHLIGMDTDGTIVMRKRLSRPQLLAYMANVPQSLVGMEASCGAHYLGRELRKSGHDVRLIPAQYVRPFVKSQKNDYADAEAIAEAVQRPTMRFVPIKTDEQLDVQALHRVRDRLVERRTCLINQFRAFLLERGITVRTGREALRHELPALLVSAEQQLSGRMYHLLERMVEEWNEIDKQIEQVSGEIEAVAKADDACQRLLTIPGIGPLGATAMIAAIGNGAAFSKGREFATWLGLVPQQHSTGGKPKLLGISKRGNEYLRRLLVHGARSVVTRVKRDKLPFGGWITDLEKRAHRNVVLVAVANKLARIAWAVLSRCTRFTNNPQPMTTAA

SEQ ID NO: 51412 - protein, 343 aa, unidentified
MNTYIGVDLHKDYSFFTAMNRDGKIMAPQRKIVNQKTEILDYLSQFENPKVTLEATLNWYWLVDLLQDYNYDVTLAHPKKAKAIASAKIKSDKISSKILADLLRSDLIPTCYIPDREKRTLRDFLRHRTVLVSIRTSLKNRIHAVLRNFNFHCPYTDLFGKSGRAWLKQVPLQTYYQTILDNFLTLIDAVKPKIDEVTKIIKKLAEDNPQAHLLDEIPGIDYYSALLILLEIGDIKRFPDHRHFCSYIGIVPSSHRSGDIDYTGRITKEGNSWLRWIIIEAAQKSQININNPYHSLFLKISNKKGPAIAKVAVSRRIATAIYYMLSKNEHFKLSKSLRSQITG

SEQ ID NO: 51413 - protein, 426 aa, unidentified
MDKEKYNRVIEFRQIKQEIRGSKEYLIVGIDVAKERNHAFFGTARGETLFKGLVFENSREGFERLLFQTKAVKTQHHLKKVLFGLEPTANYHKPLGEYLIKNNHLVVLVSGNAVKNNRELLDGRWDKHDLKDAANVADLISQGKILFYDHPCLALRELRSLLSLKRKLKKQEQGYKIRIRNHLVAQYFPEFDRYWGYGEGWAIVRGCLNPSEIAGMKCEQFTRLAASANGGIAQRRRLRTIWEKANISIGCASTEATDFEAQVMVDGLKQVREVIRLTETKIKDRCNWFSEYNCLLSIPGFGPDISAKTLAAIGNPFRFENASQVLKLAGLDLSAQRSGKRSDAVIPALSKKGKADLRYALYQAALIASTRNRTFIAYFTNKLKGREREKGIKTKMRVKLSAKLLIIAWTIMKRKEPFNPEYLTLN

SEQ ID NO: 51414 - protein, 342 aa, unidentified
MEKITIIGLDLAKSVFQVHAITEDGHVAVRRALRRSQVLEFFRHIEPCLVGMEACGSAHYWANAIGEFGHTVRLMPPAYVKPYVKRNKTDAADAEAICEAVTRPTMRFVPVKSPEEQAAGMVLKTRELLVRQRSQTANAMRGHLAELGIIAATGMTSIAKLTAILRDDQDGRLPHSAKAALLELADQIERLTKRIEVLDSKIIAAVKADDAARRLTTIPGVGPIIAATVRAAVQDPAAFRTGRDLAAWIGITPTANSSGGKERLGKISKRGNKQLRTLLIVGATSILKQARRGSKLPGWVVSLMARRPYKVAAVALANKMARTIWALLVKGGTYQAPAMAKA

SEQ ID NO: 51415 - protein, 345 aa, unidentified
MITIGVDPHKSSHTAVALDETGQVLAELRVQVDRGTGRRLRRWAERWPERIWAIEGANGLGHLLAQQLVAAGEVVLDVPATLAARARQLDRGHGRKTDGIDAQTVAWVAQRTPALRRVTAEDHAGVLRLLSDRRDELVAERRRVVNRLHRLLRDLRPGGAPIELSATVAARLLGATRPHGAANVERKAMARQLVADLRRLDRALADNRHRCAAAVTASGTTLTKVFGISDVLAAKILGHTGDVARFGTADRFASYTGTAPVEVSSGELTRHRLTRSGNRSLNNALHLAARVQVLHPGPGREYYQRKLAAHKSSTEALRSLKRQLAKVAYRHMVADRARRPLSSLT

SEQ ID NO: 51416 - protein, 356 aa, unidentified
MNNISKLDFTGQHLYIGMDVHKKSWSVCIMTDHFEHKTFTQPPDVGVLVSYLKRNFPGATYRAVYEAGFSGFWTHDRLREYGVDCIIANPADVPTKDKERAGKTDAIDCRKLARCLRSGELEGIYVPSRTAVEDRSLLRTRRSMVKKQTRCKNQITSLLAFYGIHIPEDLARSRWSRKFINWIDEIRMERASGNYSLKVYLDELSHIRRILADLNRNILTLSKTADYQANALLLRTVPGISTLTAMTFLTELNSINRFSSLDRLASYVGLIPNTNSSGEKDNTTGITNRRNPALRGILIESSWVAVRKDPALMMAFNRLSNHMTKTKAIVHIARKLLNRVRYVLKNQKEYVPAVVQ

SEQ ID NO: 51417 - protein, 334 aa, unidentified
MSLKLLAIDLGKRSFHIFGIDGEGVIISRKIGRSKLAETVRELAPETVAMEACASAHYWGRCFLAFDCRVLLINARFVKPFVKGSKNDAADAEGIYEAAQRPTMRFVPVKSTDQQDLQSLHRARDRIVCARTALINHTRGLLGEYGVVLPQGAWRFLEQARDAVAAAEFSDLARGLFNDMLKELDTLDLRIAQLDRQLAAICRTNEACHRLSKLPGVGPVVATALVAAVDDGRHFRSGRELAAWIGLVPRQYTTGGKPRLGGIGSRANHYLRRQMIHGARSVMFRLAKHDDRRSEWLKGLAARRGFNRTVVALANKTARTAWALLTRKEDYVAA

SEQ ID NO: 51418 - protein, 468 aa, unidentified
MCRISFQAQISVTSSTHTNLCKSKPCLYLLDIQSMSIYFLTLFQGGLLMLKIVHPVCCGMDVHKKFVVATIATTDLKNVTTYVKKRFATFNSDLRGLEAWLLKNDCTEVCMESTGKYWIPIHNVLEGNCHVVVANPKYVAAIKGQKTDDKDSAWIADLFKFGIVPASFIPPKPIRMLRELFRYRFKLVGHRASEKNRLQNALTVSNIALGSVVTDTFGKSSSAIIEYILSCDTFDPEFCKTLLQKSLKNKADEVIQSIIGYELSSDQSTKMKVCRKHFDYITECVDVLDEKIASLAMPYQDYINLAVTLPGVKEQSASFIIAEIGNDMTVFHSSKHLCSWAGLTPQNNESAGKKKSVHVSRAGVYLKPLLVQCANAAIKDSKNPYFKIKYDCIKKRRGHKRAIIAIARMILTCLYHMFLKKEAFNPSDTNYSDIPEVLYEKHKQQYITNAIKLLEREGCKIIPPSATA

SEQ ID NO: 51419 - protein, 310 aa, unidentified
MEQICVGIDVAKDRLDVHVRPSGEAFTVTRDHEGLSALTDRLNAIGPSLIVMEATGGFEVTVAAALSAARLPLAVVNPRQIRDFARATGQLAKTDALDAAVIAHFGEAVRPQARPLRDAQAQELAELVGRRRQVIEMMVAERNRRRLLRSDRLRQRIDRHLANLGKELTEIERDLDETIRGTPAWRENEELLSSVPGVGNTTARSLIADLPELGTLGRKAIAALVGLAPFNRDSGTWRGRRTILGGRANVRTALYMATLVASRHNPIIASFYARLRAAGKPAKLALTACMRKLLTILNAVLRDRRPWQNA

SEQ ID NO: 51420 - protein, 383 aa, unidentified
MRAVCGLDVHKDSVYLCILCDTGEIFENVYGVLTHQLKDMCRTMKAHCVTEVTMESTAVYWIPIWRVLEPHFHLKLVNPYFIKQLPGRKSDVKDAQWIAECTLKDLVRGSFVPPERIQQLRQYDRRIFDIDAEIVRKLSKLDAVLQRCNIRLSNYVSNTDTKSYKDVVDELCKGVTAPEELIKKVHGRIVNKHGRETILASLTGVVSEAEKDAMRQLRAEISLAEEHKQECQDKMLNICKTYYPKELKRLMTIPGIKERAATSLIAEIGVDMTKFQTAAHLASWSGLKPRNDVSNGKYKSRRITHGNVFLRKTIIECAWAASRTKDCFFSRFSYRLTQVCKKNKLKVLVAVARKLLIAVWHVLHDDKDYVDFNPDCKAPATNG

SEQ ID NO: 51421 - protein, 401 aa, unidentified
MIDKEAPILAFDVSKGSSHCQGYLSFGKPSSKPTKAAHSRSGMAAAEGISETLERKTGRKPKVVMESTGVYSKPVIRWAESLGLEVYLVSPLESAKVRKSRVRPTKTDALDCGVIAEVAYTRSLRRATPKSSLYSQLYSLSRRRAAIAERLVASKNQYRKSLDAVWPLFDEACDPFSGYAMWAVGKYRHPEALTKAKEGSVEKALEKAKIRTGAISKAAIASKLIAYAKEAMSGCSPNDGEVDALMSALSDVKRDMKALGEATEKLIALAKELPHFALIASIDGAGDALAALLCAEIGEPSRFSCRNGIVAYAGLDPTILQSGRNDGLHYSITRKGNAFLRKYLYLAVENMIISKADNAITRFYSKKKSSGLCQKAAATAACRKLLVAIWGMLRSGSLFER

SEQ ID NO: 51422 - protein, 351 aa, unidentified
MSLTEDAELIIGVGTHMDTHTAAICDARGRAVSQLQVPATTAGYVQLLTWVRAAAGDRQVIWAVEGTRHYGLGLARHLASHGQQVSETGCSRHIGKRRAGKSDPIDAVRAAREPLARPWPAQMRADGDREALRLLMIDRDNAVQSAKTARTALAAVLVTAPAPLREQLRPLPRERRAKECAALTCPAGADRQTRVLHQALIRLGQRIAALAGEAAGLEAQITQIAGDMAPGLVAAEPGLGALSAAQILLSWSHAGRIHSEAAFGMLSGTAPVPVSSGRTDRHRPSRLGDRQLNRAIHVIAVTRMRCHPATIAYVQRRRAEGKTDNEIRRCIKRYLARHLYRTLSNGIPSNA

SEQ ID NO: 51423 - protein, 315 aa, unidentified
MTSTQVFVGVDISKAQLDLALRPEGQFSVPNNEAGFAQVLEHLNAVHPTLVVLEATGGLELPLTGVLAAAGVPVVVVNPRQVRDFAKATGRLAKTDALDAQMLAHFAEVMRPEPRPLPDEQTQALAAILARRRQLVEMLTAEKNRLGTAGKPVRKSLRTHIAWLERELSHTDRGLAQTIRESPVWRETEALVRSTPGVGPVVTTTLLATLPELGTLTGKQIAALVGVAPLNRDSGTWRGKRTVWGGRAQIRAVLYMAALVAARCNPVIRACYQRLRAAGKAKKVVLTACMRKLLIVLNAMLKHRTPWRAELVQCA

SEQ ID NO: 51424 - protein, 427 aa, unidentified
MLDNQRLHTRIVKMNFVGIDVAKTFHVVSIVDENETRVINKAFRIENAIDGFGKLLKVLDSISLNKDDFILGLEATGIYGENLLEFLKSKGYNIKLLNPFQTSRYREQRTMKKVKNDSIDSLVIAYLLNDGKYSSGYVTDDEYQSLRTLYRNRASIQADMKEVKKRILTQITVTFPEFEGFINPFSVSGLALLEKYPTAQHYKHSSVDRIMKLFRHIQGNNFNESKALKLLALSRESIYSGKAKDARAIAIRSSIRLLKMYLSELDIIEAEVLSLLDDKATSTTVNELDNEIKKNDTLIENLKTIPGVADKTIAAVLSECGDLTRFPTIPKFIGYLGLFPTENSSGKSKIVGHLSKRGSSLVKHALYMSATSCLIHNPQMKQLYDTKRSQGKSKKEAIVAVSRKLATIIYSIFKYNTPYNPNRVFTN

SEQ ID NO: 51425 - protein, 426 aa, unidentified
MRIVHQESAGIDIGAKQFFVSTKDKVVKSFYTFTSDIISLGNYLKSKKVESVAMEATGVYWYVIYEILEEKFGIDVWLVDGRQTKQVPGRKTDVKDCQWIQELHSYGLLNRCHVTTGDLKSLRTYQRLREDHIETSSMHINHMQKALTIMNIRLKEVLSQIHGKSGLSMIEAMLDGERNRDKLLSLCHISVKKNKSELILKALEGHYTEEGIFTLKQAYQGYEFYQNRLEECDKKISEILNKINENDPLSTGKRKAIRHHKPDVDNLGGHLLKIFGNHDATVISGVTDYSWLRLLGEIGIDLSKWKTEKHFTSWLGLSPGQHHSGKMRRNKKKGRPKAGQIFRMIAFGLLNSKDVALGAFGRKLRAKKGAALAIKAVARKLATQYWRLMVKGKDYVERGVKEYEKQVYRSKVKALKRLNKELNINY

SEQ ID NO: 51426 - protein, 340 aa, unidentified
MSEVFVGVDVSQAQLDVSLRPAGTLLSYPNTATGIEQLIQTLGPLCPTLIVMEATGGLERDLIAQLHAQSLPGVVVNPRQIRDFARSVGRLAKTDQLDAAILSRYAEAIRPPVRQLTDDLQQQLRAWVERRRTVSDMLVAEQHRLQRTRDVDVRSDIEVHIEYLKGCRTFQDTQLETLLAQPAFAAVATQLQDIPGVGRILTATLLTHLPELGKVNRKEIAALVGVAPYNRDSGKMRGVRRIWGGRPEIRPVLYMATVASLRVNPTIRAKYDRLVAEGKPKKVVLTACMRSLLVMINAMCRTHAPWCPPALAAWCAASRRRAPQAALTTLRLLSSGLPQA

SEQ ID NO: 51427 - protein, 339 aa, unidentified
MTLYCGIDLHANNSVIAVQDEHDQIHYEKRLPNDLPTILSALEPYRPDLFGCVVESTYNWYWLVDGLMDAGYGRVHLANPSAIRQYEGLKHSDDKHDAFFLAQLLILGILPQGYIYPKKDRPVRDLARKRMFLVKHKTAHILSLQSLIARCSGQRISSNQLRTFTSEDLQQLLKEQHLVLSAQANLDSISFLKQQIHRLEKVIKNKLKLSQAFNGLLTVPGIGHILAMTIMREVGDIGRFAKVGNFTSYCRCAPTQRLSAGKSKGSGNRKNGNRYLSWAFSEAAQMSRRYNQRFRRYHDRKAAQTNTIVAARALSNKLARVCYYIMRDQVVFNEQLILH

SEQ ID NO: 51428 - protein, 341 aa, unidentified
MGQVSTIGLDLAKSIFQVHGADASGAVVFRKRLRRSQVRPFLAAQPPCTVAMEACGSAHYWAREIGMLGHAVRLIPPAYVKPFVKRQKNNATDAEAICEAAQRPTMRFVAPKSEQTQAAALVFRARDLLVRQRTQVINALRGHLFEFGIVVAKGPAHVPQLVQAVANPDEPLPEIARPVLQILIDTLHRLDEQIADLDREIVQRAKADETAHRLMTIPGIGPVTAVALTALAPPAQTFRRGRDFAAWVGLTPLQHSTGGKQKLGATSKMGERTLRRLLIIGASAVLRWAARHGAPAGSWIARMLACKPPMLVRVALANKMARMVWALMAKGGTYQAPAARA

SEQ ID NO: 51429 - protein, 459 aa, unidentified
MKSQAAKKGPKDKQESKKTSGKSTPGKWEEMNRKQRREIMRQMQSEDLNLEVVHPHAAGIDIGNASHYVAVPPSRDPQPVRCFGCTTAELKTMAEWLKQCGIRTVAMQSTGVYWIAVYEILEEAGLEVYLVNARETKNLPGRKTDVQESQWLMKLHTYGLLRNSFRPSQEIRILRTYWRQRQDLVRSTGRHIQRMQKALTQMNIQLANVISDISGVTGQAILKAILDGQRDPRELAAYRDCRVEASEEEIAQALEGNWQEDQLFVLRQEQAGYEFCQKQITECDQQLAQYLARLEDRTQGATLPEETRKGRRKKKKGNPQFNLREELFRMTGVDLTQIDGIDVMTAMTVVSEVGWDMSKWKTENHFVSWLKLSPDNQISGGKVIGKGRMPTNNRATTVLKNGGHYFTGERQLFRGAVPPISDSAGASGGDQGDGRQTRPARLPHAALRNEICKPRSRVL

SEQ ID NO: 51430 - protein, 337 aa, unidentified
MKFSGIDLHSNNSVVLISNEADRIVYQKRLPNDLAQILAALEPHRDELVGVVIESTYNWYWLVDGLMEAGYRVHLANPSGIRKYEGLKYSGDVTDAAYLAHLLRLGLLAEGYIYPREERGARDLARKRLQLVRYRTAQILSIEGILMRQTGARMKSESIKGLTAEQVEEFGFAPDVAMAMEANRAVSQTLGQQIEALEHRLQERVCLRAEFKLLKTVPGIGETLATTIMLETGTIARFAGVGNFSSYCRCVDSLRESNGKKKGEGNTKNGNKYLAWAFVEAANFAVRYCPQAKSFYEHKKRKTNGIVAIKALAHKLARACYHMLREQKPFEVNRCFA

SEQ ID NO: 51431 - protein, 451 aa, unidentified
MNNEPEIVLDDEHELVIERVAAIDVAKASGKVCMRMPHPSRPDRRMSKVRDVDATTRAVTELADDLLGEGIERVTVESTSDYWRIWFYLLEAAGLRVQLVNARDVKNVPGRPKTDKLDAVWLAKLTEKGLLRPSFVPPAPIRQLRDYTRFRVDLTRERARCWQRMEKLLEDALIKVSAVVSRMDSMSVRDMLEALIAGERDPRRLAGLARGKMRPKYKALVEALSGRFDEHHAELARMLLDQIDALGAQISTLTTRIDELLAALIDTPGPAADGSVRDRDGEVELMVTGLDAAERLAEITGIGPVSAQVIIAEIGLDMARFPTAAHLVSWAKLSPRTIQSGAIQRSGKAGKGNPYLKGALGEAAAVAARTDTFLGERYRRIVKRRGKLKALVAVARSILVIVWNLLSDPTARFHDLGPDYYTRRIDTERRARNHLAQLAALGYRVTVEPAA

SEQ ID NO: 51432 - protein, 459 aa, unidentified
MRTIGVDLAVQGAHKAIVADERGHYITPVLKFYAEAEQLDRLITRACEGAEDLTLLVVMEPTGMAWFPIAVYMTRRHIPCWLVSSRQVADLRRFYKRHAKSDKIDVRILARLPLINPDKLRHLALPSAAALACQRGCKELDRLSVQATAIQNRLLAIDRFAWPGLERVFGDAFSPAACWFRRYWYNPVRVDQAGGTAIRQSWLASCCDEQDQGTWVDALLDVAAGVVRLYGSEGEYLDFELLQAEVRREQEHLTLLQRMHQQLRIETVRPLYRSIHPSRNLETIQGVGQDGAAVYTSFVGDASRFPSARCFRGWSGMVPNSKQSADSEAKGLSITQAGPKLIKKFAYLDADVARRYDPQIAAIYYDQMVHKGKHHNQAVCACATHLLDRVLAVMREDRPYELRDVDGTPVSAEQARAIIARRSVVPEEVRKRNRKRARREQADRRAEKKRVRESRPRVR

SEQ ID NO: 51433 - protein, 346 aa, unidentified
MNYIGIDVHKSICTAVVMNNDEKVIDQIIDFGTNDEGCSFIVNHYSPEDSYILFENLTTAHRVYHFFKDRGYRVEGLHTGHGCVTEISKTDFKTDLEDATKLARMCKDHFTGRREYSLAHFADIDSMKAKELCRVMNDCSEQRDRLNLRIQAYMDLFDIRLPKGLKNVYSNKAMAYLKSLNHPALTIMIEEMGSTMAHIETAREGLESLFKDNEDVRNLMSIKGIAIQTAATIYTVIDGIERFETPESLVSYFGLKITRHESGGDRDLHGHINKRGDPLVRKYLANVVVKHPMYYPDSDLAGFYKRKKEVMPHWKAVTAAMRKLVCIIWAMLTRHQVYRFSSPVKA

SEQ ID NO: 51434 - protein, 343 aa, unidentified
MKITTIGIDLAKNVLQIHGADANGTPVLRKQLKRNEIMKYFANLEPCVVGMEACGSAHYWARQLQSLGHDVKLISPQFVKPFVKTNKHDVADAEAICEAVSRPTMRFVPIKNVEQQAMLSLHRAREGFVSDRTATANRIRGLMAEYGLVIPQGIGHVRSRVPELIEDATNELPGMFRALIDRLLDHLKWLSQQIEAIETQIKVWHKNNADSQRLAEIPGIGPIIATALIATIGNARNFKNGRELAAWIGLVPKQHSTGGKQTLLGISKRGDGYLRKLLIHGARSLTYYAGKRISPDSWLSKLMARRHINVAVVAQANKTARTVWAILVHGREFRPDYALKAAA

SEQ ID NO: 51435 - protein, 399 aa, unidentified
MQSTDHSRHSQSAARSHDTSLFIALELSKSTWLIAASPPGSDRISKFQVAAGDASMLLSLFTRLKTQAERHCREPVKIVSIYEAGLDGFWVHRLLEANDVESHVVDAASIAVDRRCRRAKTDRIDVEKLLRTLMGWARGERRICSMVRPPSPAEEDERRLTRERGTLVTERVRHVNRIKGLLATQGILSFEPMLKNRRKRLEELRRWDGQPLPLRLKTELLRELDRLELVISQLAALEKERDRALQAARAASEEMAQRHTRPASSGKAGTHLLRLRGIGPEFASVLSLEAFYRSFGNRREIAAYSGLTPSPWKSGGIDVEQGISKAGNSRLRKTMIQLAWLWLRHQPGSALSRWFHLRTGDRRGKIRRITIVAVARKLLVALWRYVTQGLVPEGAELKA

SEQ ID NO: 51436 - protein, 431 aa, unidentified
MNYNQNKKIAQITSQTLIIGVDIAKFKHVARAQDFRGIEYGKPCYFENTKDGFQDFIKWITFIIQEQGMNKVIVGMEPTGHYWLNLAHILKENDIKFVAVNPLHVKKSKELDDNSPTKNDVKDAKVIAQLVKDGRYAEPTIPQGVYAELRVAKKIRDLLTEDLQTVQGQVHNWIDRYFPEFLTVFKKWEGKAALQFLKLCALPHELVKFSDQELLIHLRKTVKRGVGLGKIQQLKQAASKSIGLKQGASMAKLELKTLIDKYELIQMKFEELDSKIDTLIDQIPGVQQMLAIKGVGRDTVAGFFAEVGDLNEYSHPRQLIKLAGLSLKENTSGKHKGRTTITKRGRKKLRALLFRVCMILVAKNTAFKALHAYYTQRPENPLKKMQSLIALCNKLIRILFAIGKKQFEFSEEKMLQDIPHMRDLELVKKAA

SEQ ID NO: 51437 - protein, 488 aa, unidentified
MSDRKTKAPPPRPRPPDDLRRAARRAALDRRPAEDCARIAALPVRHEHAAGIDAGDASPWACVDATPDGSDRVREFPAHTAGLRQLAAWLQFCGVTTAALEATGAYGHVLFLTLLEAGLATIMIPPQFARQIKGRPKTDRRDCQWIQRLHSHGLLPGVSQPDAATQALRGYVRQRANLVRPSGQHIQRMQKALELMNLKLTKVLGDVTGVTGLKVVRAILAGQRDPRQLARLRDRRCGHTAAEMAQALDGRYRPEHLLELRCNLTMWEKYQEVIAVADTAIAAQLRSMRRQAELPPLPPRIRVRGRKAHDPGFDVRTALYYATGVDLTAIEGIDEVHALTLVSELGTDLSKWPTVKQFTSWLGLCPNWKKTGGKVQSSQTRRGKNRAARALRLAAWCLMRSQSYLGAYLRRQRSRLGAPKAITALAHKLARIVYNLLRYGVAYVRQTEAADAEQVRARLEKQLRRRAAELGFTVQPLAAPVPPAVEEQ

SEQ ID NO: 51438 - protein, 428 aa, unidentified
MADHLNNKPYRAWIAIDIAKDFNAVLSETNEGKRQHFRMANSAQDHVRFIDFLKSLPSPCIIGFEATGNYHRALGHRLVSEGFEVCFISSLASVRYREVMFNSWDKNDPKDAAVLLELLKQEITQRYVDPLIAGHHDLQELSKTYYQVTLSRTRLQHSILTHYLPLYFPEMGKWWNSTRSAWWTNYLLHFPIPSAVTKHSQETFCEIASPIVGRKVNKGAKLIELYETAQHSIGLPIEEDSLACKTFQIQLRRYQEINDCRTELEKTAQAVLANNPDSVILQSVPGIGPINALTILAEGGDLRRFNHHRQFLKYCGFDLAKNQSGNYRGQEHISKRGNARLRLALWMAVNTAITQPENSFQQKYNRYIKDAPQDKDLQRKARTAVAAKMARVVYGLVKSKQMYQGYYEKALPSGSIPLCRAGEAVRTS

SEQ ID NO: 51439 - protein, 419 aa, unidentified
MSFKILKNNCCGLDVHKTWIYACIGITDSNKRTEYKQARFSSFTKGLHELCDWLAKYNCFDVCMESTGKYWIPVFNILEKNNFWITLSHPKYTKPQKGNKTDRKDAKWICDLYMCGMIKPSFIPPADIRQLRDLVRYRFKLTCMITGEKNRAHNCLTVSNLKLDDVFSDIFGKSSRSITQQLLQHPGESFDVTPFVDSRCKTPIQEIQAAVDGAISVEQAVKLRQCLNHIDELETHKAEIEREIFRLSDKYEATLNLIRTIPGFDKNPMTAIQVLSEIGGDMSVFPTDKNLVSWAGCCPRNDQSNNKIKSTRISRAGYYFKPILVQIANALIKSKKHPEFSIRYRRIKARRGHKKAIIAICRMLLTAIWHILTDLKPYTPQGFLVSRPVNKEKFLTISQALNLLKQRGYNIKDDVVPTS

SEQ ID NO: 51440 - protein, 407 aa, unidentified
MQTRHARFCGIDVGKAKHVACVIEADGQVVLRSQSFLNDAAGYQQILVRLQQAGGPAQVLVGMEATGHYWYALHDFLTRHGYQVAVLNPIQTAQQARQGIRKSKTDRLDAHHIAILLKNGEYRPALIPGELAMTCRQLTRLRYAMVRQTSRIKQLIGSRLQPVWPEYEGLFTDLFAPTSRKLLAAAPTPADVLAMDPQTLADLIRLASRGKFAAGKAQEILSSAQDSIGMKRALDGARIGIRTLLTTLDAWRPIRQHLEAEIESLANQLPQYVLTLPGADPLRAVSLYGETDPIGHFASSDQLVAFAGLDPVVFQTGQYEAPRRHISKRGSPVLRQTLWLMAHAAVRQEGSLRDFWLRKREQGLHYLAAVTAAAAKLCRISWRVLTDQRDYVPEGCPAKRPCSTVKS

SEQ ID NO: 51441 - protein, 405 aa, unidentified
MEVVIERACGMDIHKDNITACILTSKGKDIQTFSTKTVHLLQLIDWIKQHECSHVAMESTGVFWKPIVNLLEAEGIEFLVVNAQHMKALPGRKTDVKDSEWIAKLLRHGLLKASFIPNRNQRELRELVRYRRSIIEERSRQHNRIQKVLEGANIKLGSVVSDIMGVSSRDMLRAIADGEDDPEKLASFARRTLKRKKDELELALQGYVNPHQRLMIKTILIHIDFLTEQVEVLDQEVATRVESFHEDVERLDSIPGIATRMAEQILAKIGTDIKKQFPSAAHLCSWAGLVPGHNESAGKKKSAKTTNGNKYLKSALVEAAHSVATSKNFLGAMYRRTAARKGKKRAAINVAHAMLKIAFYLLTRKETYIDLGEDYHDKQKQQSIANYAVRRLESLGYSVTIAANS

SEQ ID NO: 51442 - protein, 343 aa, unidentified
MKLHVIGIDLGKTVFHLVGLDSTGRVMIRKRCSRTQLLVFTANLQVQLIGMEACSGAHFLGRALHEQGHEVRLMPAQYVKPYVQTNKSDYLDAEAIAEAVQRPRMRFVPIKTEEQLDLQALHRVRERWVMRRTAIVNQIRSLLLERGLTLPKGRSHLDQQLPRILEDAELHLSDSFRVLLAQLKLELEQLAARIEEMDRVIQKTARENEACQRLTEIPGVGPVTATALIAAVGNASAFGKGRKLSAWMGIVPGEYTTGGKQKLLGISKRGNKYLRRLFIQGARSVLQQRHKQAPGLSEWLAQLLARTHQNVVVVALANKLVRMSWAVLCKNERYRAPVFAGTA

SEQ ID NO: 51443 - protein, 357 aa, unidentified
MRIIGIDLGKREAEFAEINDASKRIGGARFSADADGFMSLFGTIGEDGLPDESRKAKILIEAGGTTRWVAPLLRLLGHTVVVADTNYQPMYVDHRSKRKKTDRRDALTLAVAMLKGNYREAHERSEAEFVRVTNVYTRARLVRSRSRHCAAVRNTFLSFGIILKRCAPEKLPDAATKHLSRVIASAQFALKTELETVTTLNRKIARLDARLVKDAKGDVRIARLCTIPSVGTVTATTFVAVVDDPKRFGSGHELASHLGLVPSMSCSGDKQQVGGITKMGPKYLRTALVRASWGIWKSKTAESARLRSWAKRIAKRHGSKKLAVVALARKLAGVMLSMWKSEQDFRGPSAEESLVLE

SEQ ID NO: 51444 - protein, 335 aa, unidentified
MLYGAIDIHKSVFQAAVLDPETGELTQSRFAATREELGDWAMTWEGKLAAVAIEATTGWRWVARELQQRGFEVRLVDPGRASALQGRRRKPKTDRLDARWLALVLARQLLSECEAWLPPAEIQRLRDQTRLRKALAGERSGWAQRLHALLTQEGWPCARGRLLTGEGRRWVAALELDACVRAQVEVMLTMMAALEEQLERLESELRRFARADRRCQALETIFGVGPILACHLLAEIGDARRFRRARQLVRASGLDPTVEESADSRRRGRLSKQGSRHLRWALVEAANHSHRRGSPDHTLYRSAAARCGSGRARLTIARKIARRAFYVLNAEAALT

SEQ ID NO: 51445 - protein, 466 aa, unidentified
MPNETSANANKIAKKELARRLRSADPGLEIVHPNAAGIDVGNGSHYVAIRPDRDPEPVRRFACFTADLYRMAEWLRSCGVKTVAMQSTGVYWIPLYDILEEFGFEVFLVNARHTKNLPGRKSDVQESQWLLKLHTHELLNNSFQPSSDIRVLRTYWRLRAAHATGMATCIQRMQKSLTQMNIQLANVISDLSGTTGQAIVRAILNGERDPQKLAELRDWRIHATKEEIAKSLQGNWRPELLFIVRQQLEMYEAYQRQIAECDQQLQEHLASFASAPSTSGDRCNPPQSKKSKRYRYMPQFPLSNELMRISGIDLTQIDGVDAMTAQTLISEVGLDMNRWKTESHFASWLGLCPDNRISGDKVLSRGTRRVINRAATALRIAASTLIRSKTYLGAQYRRLRTKLGAPKAITAMAHRLARLVYRMLKYGQKYVDKGADYYEQRSRKQQINFVRKKAAQLGLQVTIAQS

SEQ ID NO: 51446 - protein, 376 aa, unidentified
MYRIIKIGLDVHSKTYTICAMEPLIGQEDRILAKLEVSADYKNIILFINDLKLKLGTDNEYDIECGYEAGCLGYSLYNQLTSCNVKCTILAPTTMLTPQGIRVKTDARDAHMIAQCLSYGGYRPVYIPTEEDNDVREYLRMRDDHKTSLKKIKQQINAFCLRYGHYYEGTKWTVTHISWLRKLDLSPLCRETLDEYMASYDEQTAKIERFDKRIEEIAEESKYQEKVKKLGCLLGIKTHTALSLIVETGDFNRFRKGNTYAAYLGLAPGERTSGEHVNRTGITKAGNTHLRRLLIEAARGICKGAVGHKSKELRSRQEGNPADVIAYADKANTRLRSRYYRYIRHGKNKHVAVAATARELACFVWGMMTDNIDIAA

SEQ ID NO: 51447 - protein, 358 aa, unidentified
MQSNKINFKGQNIFIGIDVHLNSWSVTTITPSGYKRQTSHRADAVELYAYLTKNFPGGIYHAVYESGFCGYSCCYELRELGIDCVIVHAADVPSTQKSRLSKTDSNDSMRLAMSLSNGELNTIYIPPKEVLGDRDILRYRSIVQKGMSRTRSRIKHLLHTNGVSYPQEFREPYRHWTRRFIKWLREDVRLLSGKRLELDFLLEDLEHQRSQLLKATGKVRELSRTSRYAEDYGNLISIPGIGLITAMTMLTEVTDIHRFSSQKKFMSYVGLIPVMKDSGETIRQNEITPRGNQRIRRMLIESAWSAVRYDAQMAAAFGAFCRRMKKNRAIVRIARILASRTYHILKTRTKYHTALCTA

SEQ ID NO: 51448 - protein, 318 aa, unidentified
MNTNTLQNINVGVDTGKSQLDIYIRPLDMYFTVPNTEKGISDAIKTIKKHKPQRVVIEATGRLKMPFILACDKAKLPYVIANPLRIKRFAGAIGQRAKNDRLDAALIAHYAERVQPELTKIKSENIRLMSDLVTRCNQLLTMQTMKKNRLQILPKNISSTITPILTALKNQIEKVEAKIAKLIDSCPEYQAKNTLLQSMPGVGKVLAASLISNVPELGYITNKQASSLIGVAPITRESGRFKGKRMIQGGRAQVRTVMYMAMMSAIQCNPVFKAAYERLLAAGKPKKVAIVACMRKMVVILNSMLRDGVMWDKDSVKN

SEQ ID NO: 51449 - protein, 458 aa, unidentified
MRTVGIDLSINGRHKAIVADESGRFITPLLTFHTDPSELDRLLARASVGAEAASLQVIMEPTGMAWFPIAVYLTQRALPVYVAQGQQVADLRRFYSRHAKSDLVDAQVLARLAGVNQEHLHRLILPPAEGFACQRACKQLDRLITHITSIGNRIQAIDRFAWPRLEQRVFSQPFSPAARWFREHWYHPGSVIQADAEAIRQAWVASQLDVHDPGEWSEALVKLAIDVLRLYGDDAAYLDFDQLQAEVAREQQVMHQLETMAHALRLKTMRPLYRQIHPDRRLETLFGVGQDSAAVYASLVSEPTRFSTSRAFRGWSGMVPSSRQSADSETQGLHITQAGPSLIKKFAYLDADVARQRDPQIAAIYYRQMVERGKHHKQAVCACATHMLDRVRAVLRDGRPYELRDVDGTPVTPEEARAIIAARYTVPPEVRQRRNKHKRRERADQQAERKQVRESHPS

SEQ ID NO: 51450 - protein, 307 aa, unidentified
MAHRKFANSRKGICSCLHWVEKRHGIRLDDVIFCAEDMGSYISEMAVCASDRTLTFNFSLISPLVIKYSMGIARGKTDRVDARRIAEYAITHYRKIALYLPAEKELCQLRTWLILRAHLAKQRVAKLVLLEKLDYKEKFADVSIQRSMLQEEIAYAETHMKTIEREMKELIAADSNICRNYKLLTSIKGVGPITAIVMLCSTLNFTKITDHRKFACYCGLAPFEHSSGTSVRGGCHTSSMANRDIKVQLNRSALIAIRCDPQLKAYYERKVAEGKHKFSVLNAVRAKIAARCFAVVRRGTPYVALQI

SEQ ID NO: 51451 - protein, 365 aa, unidentified
MAKVIKYIGLDVHKNSIAIAVADFGASNEVRYYGEIDNNNERLLKVLRSIAKDGACLSGVYEAGPCGYELQRFLSLNGIKCFVVAPSKIPRKSGDRIKNDKRDALNLARLHRAGELTSVYVPSPEDEALRDLVRAREDAQKALRQSKQQLGAFLLRHNLIFTGRSAWSKAFFNWLTGITMKHRAQQLTLQEYINTVEGCTSRVQRFTEQIAELVKESQLYSLIKSLQAMRGVSLIVAATTIAELGDLKRFESPAKLMAYLGLVPSESSSGPKVRRGPITKTGNSHVRKALIEGSHAYRLPSRIGRDLRKRQDGLSEEVRQIAWKAQVRLCKRYQQLAARGKHANVIKTAIAREMAAFFWAIAQHV

SEQ ID NO: 51452 - protein, 323 aa, unidentified
MNKYRETFGIDISKDVFDCYGSVQGHLQFNNTETGFKNFQAILSKDSLVVMEATGYYHYRFAQFLYHKKVYVSVVNPLSVKRFIQMKLAKVKTDKSDAKAICEYGLTQEVPLYTALTNVQSECLQLFRLMDNFLKKRTATKNKIHGEEVLGVPSNWVYRSLQRDKKHLDKELNGIEQKLLSLVKQDQQQQLSLLQSIPGIGLKTALFLIVVTDGFKKFETSSQLCSYVGITPTIRESGSSVRGRARISKVGNRKLRNLLFLCSFTACKHNKGCRELFQRITNKGKSKKLALIAVSNKLLKQAFAIAKSGHPYDPTFVSVFEVK

SEQ ID NO: 51453 - protein, 367 aa, unidentified
MSHIIYCGVDFHARQQTICCLKTETGELTSHELKHEDKQVLRQFYSALGGPVIVGLEASGYTPWFEQLLEELGHQVWLGDATEIRRRARRRQKNDRRDAELILELMCHDEFPRIHRPLPQSREILRMLRYRHKLVKLRTIVKNSLQALSIQAGLSLQARLFTRQGTQQLEALTLSPVMRHQRQQWLELLQELNQRITDAEGWLKQQALPDPRVSLLRTHPGVGLLSSLGIVHTLIPVSRFPNTRKVAAYGGFDPMERSSADKKRYLGISKAGSRLLRFLLIEATQTAVKADPELKRFYHRLVQRRGKPKAKVAVARKLLIRSFIMLRDEINYAEFQQRAIAARLAREFARPNVPVPLIGQPASPAKG

SEQ ID NO: 51454 - protein, 340 aa, unidentified
MSNVMTVGLDLAKTTFFAVALNHAGKRQWRKKLSRKKLLASFANSGPYKIAMEACASAHYWARVLGAMGHEVALLPPQHVKGYLRGQKNDYNDAEAIADACLVGRIRPVRPKSVEEQDRQSLLRLRRQLINEQTRLINQTRGLLGEYGQVVAQGRERFIRELPGLLEDAENGLSGPMRELIARQLTRYQQLREELAWYDKQLQQQVKEDELCQRLMRVPGFGPVASSLFRNWLGDGQQYHRGRDASAALGLVPRQHTSGDKPLLLGITKKGDKELRSVLIHGARAVLTHAHRKDDPLSRWVMQVRQLRGFNKAVVALANKLARIGWVIVARGETYRPRTV

SEQ ID NO: 51455 - protein, 343 aa, unidentified
MKIASIGIDIGKATFHLVALDEHGSIVIRKKFSRKALLAYSAKLTTSLIGMEACGGAHCLARLLRDQGHQVRLIPGQFVKRYREANKNDYLDAEAIAEAVTRKNLRFVPIKTDDQLDVQGLHRVRERLVHNRTEIINQIRGFLLERGVTFNRGPLSLRKEMPDLLEDAEQNLTPSLRTLLSHLWQEWQGLNSQIDRISAAIEEVAESDAACQRLRKIPGVGPLVSTATVAAIGNGAAFKRGRDFAAWLGLVPKQHSTGGKAKLLGITKRGNRYLRKLFVHGARAVLLRVKYDTGGFGQWVHRLAARAPRNKVIVAIANKLARIAWVVLASGNEYQHQPIAAAA

SEQ ID NO: 51456 - protein, 346 aa, unidentified
MGKSITDLSGVTTVGLDLAKHVFQVHGVDASGRVVVAKSIKRSKLLEFFASLPPCLVGLEACGSAHHWTRELIKLGHDARMMPPAYVKPYVRRQKNDAADAAAICEAVTRPSMRFVGVRSLENQAALMRHKAREMLVSQRTQLLNGLRGHLGEIGVIAAQGPRHARELAVLIEACDETIPIEVCEALAELVHQLHRLDEAIGRLDRTITKLAQRDETARRLMSIPGIGPITASAMAATVQDASSFAGPREFAAFLGLTPKQNSSGGKQRLGRISKMGNRYLRKLLVVGAHAVLFHRKPHTDALRSWAKKLIDKKPFKLVAVALANKMARIAFAVLRGKTTYREIPA

SEQ ID NO: 51457 - protein, 399 aa, unidentified
MKTTDRTAAMVGLDVHRRFSTVTARNAEGKIAWRQRLEHEDRDGLRRRLEDWPRGIPVILESSFGWEWMCEELEQAGLEPCLASSRKVAAWRDARGMAKSNRTDADLLSELGSQTDWWWQVWLPPREVRDRREWLRYRMSIVRLQTGLKNRVHAILHRHGILHDFADLFGAQGRRMLTRLANDAKNPRLRESGRATLKGYLQLLDQLRRQIAAVTRIIHRQLRETPEGKRLRGLPGVGPVLAHTILAEVGDFGRFRSAKHLASYSLLAPRAFDSGEDDEEAPKGRHVGHVGRRTLKWAWIEAAHGAVRRGGRFREVFDRYTDGGKRNRNRGYILVGHELCRTAYAISKKETEYRDDPPERPGSSKKKTASAQRNRRRSRTSQNSRPGTGQPDSGLVVVG

SEQ ID NO: 51458 - protein, 381 aa, unidentified
MQSIKTWVGVDVSAKTLAAKRRRRNEANDEGREFSNDAAGHRELLKWIGRGARVCMEATGVYHLQLALMLVAAGVDVMVINPRVAKDFGRALANRSKTDRIDAGTLLEYVDRMDFVGWKAPSAAVMELRELGRRLSELVHAGAEEKNRFHAKSVAAISRTVIRDVEAHVAQIDKRVKQIEKAAATIIRGDAELREQFDILTKIRGIARRSAILLLTELAVLDPTMTVKQVVGHAGLDPRAYESGSSVQKPPRISKAGNARLRAILYMPALTAIRHDRGARLFFAQLVARGKKKMQAIVAVMRKLLHGIWIVLQRREAFDSSVLFAASLAKAESSDSAAAANQPEPRQDHPKGRSEAEELRQQLDPGSAQATRSRRRRAKAA

SEQ ID NO: 51459 - protein, 320 aa, unidentified
MTNPKTDDIVGVDVCKAILDIHEWATGRAYAIPNTPTAIAQWLAGRVAPLRLALEPTNTYHRALGAAAHAAGHQVYLLDPYRLAHYRQGVGERVKADAQDAELLARYLAREAGTLRVWTPPGEGQQRFWQLLRRRATLVRARVQLQQSLTDLGELQAELDVLLAQYGRLIRQLDRALLAAAETLGWAAQVRHCQSIPGVGPLTALAMVATYHRGEFRRADAFIAFMGLDVRIRDSGQSRGRRKLTKKGDPELRRLLFNAAMQGRRNAHWEPYYLALRQRGLSSTAAFVALGRKLARLCFALLRTGTDFNPDLRLRACLAT

SEQ ID NO: 51460 - protein, 355 aa, unidentified
MNDEKYIGLDVHQATIVVAVMDSTGKLVMESILETEAATILQFFAGLRGTLSVTFEEGTWSVWLYDLLNPHVDKLVVCNPRKNALLKDGNKSDRIDARKLAELLRGNQLKPVYHGETGVRMLRELSRSYLTIVKDLSRVMNRLKAVYRSWAIPCAGRDVYYRRHRAQWLDKIREAGVRRRAERLYEQLDMLQHLRQQARRELLAESRKHAITAKLRQIPYLGPIRSALAVALIQTPHRFRSKRQLWAYSGLALETRISAEYRLVEGQVRRSKKLLSIRGLNKDHNHDLKGLFKGAATMASVRPGPFQDLYQAALAKGIKPTMARLTLARKIAAITLTLWKKGENFDAEKLKSQAA

SEQ ID NO: 51461 - protein, 299 aa, unidentified
MSEIITVGLDLAKNVFQAHGADVSGRAVLRKKLRRDQVLEFFGQLPACVVAMEASGGAHFWGREIGKLGHDVRLIPPAYVKPFVKRQKNDAADAEAICEAALRPTMRFVPVKSEQTQGAAMVFRVRELLIRQRTQAINSLRGHLAEFGEIVPQVAANASKLIALVKDPECTLPADALPTLKVLASTLTQLEEEITKLDAEIARRAKENDVARRLMTVPGIGPLIATAIATLAPPPETFRKARDFAAWLGLTPRQHSTGGKQRLGATTKMGERSLRRLLIIGANSVIIKRWTCRGLVPLL

SEQ ID NO: 51462 - protein, 344 aa, unidentified
MDHFAGMDVSVKETSLCILDDAGKILKEVKVASEPQALLKVLGNPAYRFKRIGLEAGPLSQWLFSALAEAELPVICVETRHMQAVLKAQINKTDRNDARGIAQMIRVGVYRPVHVKTLRSQKLRMLLTHRKLLQSKAIAIENDLRGTLRNFGLKVGMVGTVRFEARIQELVAAIPDLAALVEPLLVVRRALREQIVILHRRLLAIVRDDEVCRRLMTTPGVGPVVALSYRATVDVPARFRKSKSVGAVFGLTCSRYQSGEIDWSGRISRCGDEMMRVMLYEAAQSMLHSKKWSWLKAWAIQIARRRGMKKAIVALARRLAVIMHRIWVDGTEFRWTREPAAAAA

SEQ ID NO: 51463 - protein, 344 aa, unidentified
MPSIVGGFDIHRKQLTFDYLDTVAGEVRRGQITPADRGHLRSWLAQLENPQDAAFAAEACTGWRYVTEELARAGVQAHPAEPADTAAARGRKKRAKTDRADARLLRDLLAEGRLPECWIPPEHIVECRALLECYHDLRAEHTAWVQRIHATLFHQGAPPFQGLRQADGPGQLTALAREHLSPAGQAQIAVCLRVLAALEAELTAMRHRLLAAAAHLRGVKALTGAIYGVGPITGLALTCWLGGAGRFSSARKAVRFAGLDITVYSSGGKRSPGHLSRQGPPVLRWCAYEAGKVSAHATAPDHPYYAAVKDRAGGKRAALAEARKIIRRACHILTELGDDAFTTG

SEQ ID NO: 51464 - protein, 423 aa, unidentified
MNTSTLCVGADVHLKEITLRALDKLTEDEIIAPFNVPNNLPGAQSAASRLAEVATQLNYTRIEIGCEATGMLWIPFHRFLKTCQLLAPFDLQLVCFNPKLVADFKDALVLRGPKDDERDAFDVAARVQVGHWPDSYVPDDFWQGLRRLTRYRFKLSRILSQEKMRFQSYAFLKCSDWKRVEAFSDVFGATSAALLTEFTAAELHEMTHGQLADLIARHGRGHFYDPDATARTVRQALRTSYPIDYLMDEMITATLATCWEHIRATKRLMKRLDQHIARCIEPVPNPIITVKGLGPVITAGLLAEIVDISRFPEHKHLAQYFGISWTKRYSADSPTQDSRMTKVGNPYGRYYFIIGADKLRMFNLEYKAFYWRKYNEVPKHQHKRALVLTARKLVRLVYALLTKNVPYVRPQMTVDPEEADSLQ

SEQ ID NO: 51465 - protein, 348 aa, unidentified
MQVTTVGIDLAKNVFRLHGCDAQGRPVLRKQLARRQLLSFVANLPRCLVAMEACASAHYWAREIEKLGHQVRLISPRFVKPYVKANKNDASDAEAICEAASRPSMRFVAVKSTAQQEVQAVHRVRQQLVKTRTALVNQARGLLAEFGIVVAQGVGRLRRALPTILEDRENGLSGVMRELLGEIGERLRFIDDRLHKYDLTIQRLFRQDERCQRVAAVEGVGPLVATALVAAVGNATDFRSGRELAAYLGLVPRHRASGGRTVLLGISKRGDRYLRTLLIHGARSALLRIERQRSARAIWAARLKLRRGSNVAAVALANKNARVLWALLNRHQSYQPAPFPARVPQAGG

SEQ ID NO: 51466 - protein, 355 aa, unidentified
MSLPIEEREVILGVDTHLDVHVAVLIDVVDRVVATHSVPTTAIGYEQLIEWAGSFGQLSRAGVEGTGTYGAGLARHMRECGVQVLEINRSDRSRRRLRGKSDPTDAENAARAVLAGDAHAIPKAQSGVVEAMRAVNMARRSAVKAKTQAINQLRALLVTAPESIRTTLWRVKPEQCVVRCARLQSLGDTPLLKALTSTLRMLARRWMSLAKELRQLDTALDELTKRAGRRLLTRFGVGPQTAATLLVTAGDNPDRLRSEAALAALCGVSPLEASSGRTTRHRLNRGGDRAANNALWTISMVRMRSDPRTRAYVARRTTEGLSTKEIQRCLKRYIVRELYPLILADLADAARPNLT

SEQ ID NO: 51467 - protein, 318 aa, unidentified
MTETICVGIDVAKASLEIALGAQGTVMTYPNTPEGHDELTVTLANYAIDLVVLEATGGYEVPVACVLQTIGLAVAIVNPRQARDFAKAMGNLAKTDKIDAQVLAQLALVLSQRTDRDKIVRILPSAQQRVLQAMIARRRQLVVLSISERQRLGNCHPDIRESITLMISFIQEQLKVIESALSKHIKTYHRSKLDLLSTVKGVGPATIATLIADVPALGKLTRREISALIGVAPFNRDSGFFRGKRTIFGGRAMVRRMLYMATLTAIRFNPVLCAFYKRLTEAGKPNKVAIVACMRKLLVILNAMIKTNKPWDESFHTV

SEQ ID NO: 51468 - protein, 309 aa, unidentified
MEEILFTPYIGVGCGIDVHKDLIVATIQRGNEVVGTKEFDGFTVSLESLRDWCKDEGVTHIAMESTGVYWKPVFNILEDDFEVLLVNARHVKNVPVHKTDKKDSKWLSKLLVSGLLKGSFIPPRDIRDLRDLVRYKKKLVAHSASEKNRIIKILEDCNIKLSSVLSDVDGAVGRNIISALIDGESDVNQLMRFYHGKIKTPRSEFVKALQGKVSYHHRFMLQFHRDVIANDDAMLERLDAEIAKAVSDYEVELELLETIPGVGRDSAIGIISEIGVDMERFPDENHLSSYCGVSPGNNESAGKKKVQRP

SEQ ID NO: 51469 - protein, 363 aa, unidentified
MKNKTQPYNKKRKLNQPASGELEELVCLGIDQHAESLVVVEQVNACVPKAARKFTGSEEFFRWLEKRRKSARRVVVCYEAGPCGYWLCRKLWQLGIECIVVAPKKWAENGKTKTDARDARVLCERLFQWVEGKRKVFTLVRVPSEKQERRRALSRNRERMIKERKRLAQSGRGIGLQYQMRLRGQWWKGSRWIELASSLEELLGPIREVLLAIEKQIELLTRRLESFAAPKESRPSGLGALSEAVIASEVGDYRRFENRRGPGAFFGVVPGEDSSGGRRKQLPITKTGSATVRRYLVEAVWRMTRFQPGWHCWKKWQTRYEEAPKWRRNQIVVAMARQLIIDLWRLRTDRTTMEELGWTPAKT

SEQ ID NO: 51470 - protein, 453 aa, unidentified
MSKDAKKSKKKGELSKTVSMPLIHPNAAGIDIGDTFHTVAVPFGRDEVNVREFGAFTADLLSIVAWLKACQIETVAMESTGIYWKNLFSLLVKHGFEVYLVNAKHTRNVTGRKDDESDAQWIQKLHSCGLLKNCFLPDEQTEKLRTLVRHRKSLTNDSSRYVLRMEKALESMNIKIHTVISDITGKTGTAIIKAIISGERNPRSFLAFVDRRIKADDNTIIKSLEGNWRSEHLFLLQQCYNLYQHMQTQIDFCEKQIEEVLKAMTITPQGNQLNDSSKKTKKKKNKNHPRFNTQSHLKNIHGVDVMDIYGISETTALEILSETGRDLSKWADEKKFVKWLNLCPNNKITGGKLISSQLLKKKPNPAAQAFRMAGNALQKSNHWLGDYFRRMRSKGGQKYAIVAAARKLATIYYKMVRYKEPFTPFNLDEYHQKYKQAKIAYLEKTLRRLKQTA

SEQ ID NO: 51471 - protein, 369 aa, unidentified
MAELGEAFVGIDVAKLRNAIAVAEDGRIGEVRYLGEFDADEGSMRRLVQRLAGKQEKVTFCYEAGPTGYGLYRMIRSMGFECTVVAPSLIPRRPGDQVKTNRRDAIGLARLLRAGELTAVWVPDEGHEAMRDLVRGRGAAVETQRVHRQHITSFMLKHGRIFPRKRAWSMRYLRWLQEQRFDHPAHQIALQEMVEALRLASERIKRIEAAIEEFVPSWSLEPLVRSLQALRGVDLIVAVTFAAEVGDVTRFENPRQLMSYLGLVPSERSTGASVRRSGITKAGNSRVRHMLVESAWTYRHPPRIGVKKLYIHERVSPVVREIAWKAQSRLTARYRRLTATGKRTTVVCTAIARELASFMWSVGRVAQTI

SEQ ID NO: 51472 - protein, 447 aa, unidentified
MGNGSGVSRGDRNRNARLGRLRELVPPRHAIVGIDLADAKQMVVVTDHDSQVLARRTFWCKAWDLGVALDWAVEQAARAGFAGVSVACEPTGHRWRVLGELAAQRGMPFVCVQPLVVSWARRTEDLTADKTDEKDAVLIARLAGQLRCYPPEPVDETWGRLRHLGAYRERLTVDAVAQTQQIRDLLECVWPAALTAAAKPFRSRTWTRALAVVVDHDHGDLDRTRRLGLARFERLVRREIGRRGGQRPCMPIARRLFTALTDPAGVPALRAGALERIALTLADWHTTQARLDDVQTRMTGVLDQLGLTGLVTSIAGLSAVGAATILAQTGDLTHYPSARAVVKHAGLAPREKLSGPTPGAPSSPGRAVPGCGWPPTAPPGRRCAPTVSTPPATTTSPAGRPTRSNPPRPRPSSPPDCCASCMPWSPAGSAGTPTWPPTAPAADPQVR

SEQ ID NO: 51473 - protein, 389 aa, unidentified
MDREGHLVGERWTEHSGASITELITWLRDSGGAVPSAFAIAIEVPRGAIVETLTEHGFAVFSINPKQLDRFRDRYSPAGAKDDRRDAFVLADSLRTDLHCFHAVRLDEPAVIRLRDLSRLEDDIRDELRRLSNQLREQWHRFFPQLLTLCQSTDEPWVWDLFEVAPLPAQAARLSEKKIMKILVRHRIRRIGVRDVRAVLTAPPLQLAPGTAEAASEHAMLLLPRLRLLRQQRAKIATRLRKLLDELASPETVEEETKEHRDAEVLLSLPGVGRIVAATMLSEASQAIADRDYHGLRCYAGTAPITRQSGKKTVVLMRHGCNERLRNVLYHWARVSIICDARSRSHYAQLRAKGHSHGRSLRGIADRWLRVLIAMLKHRTLYDPSLPSV

SEQ ID NO: 51474 - protein, 346 aa, unidentified
MQYIAYDVHKRYTWGRAEDKAGRVLRQERIEHKPGAVRKFLAGLEAGSPVAVETVGNWYWMVDEIERAGFQPRLVNAGLAKVMMGQVNKTDKLDARGLNLLQRTGTLPTVWIPPAPLRDARELPRARMVLVGQRTQLKNRVHATLAKYGLQPPEVSDLFGVTGRRLLGELLDQLPPHSALVTRTTLEHLDHLEQAIAQLDARIGVTFHLTPEIQLLRTLPGVGPILSVVLAAEIGDIARFPTAERFAAYAGTVATVHASGGKQWGGRTRRNCNPYLKWALVEAANAVLLRPDTPANQHAVSLYRRLRARRGHGKAIVAVGRHLAEAAWWILRKEQAYRPPASSTRG

SEQ ID NO: 51475 - protein, 407 aa, unidentified
MISVGIDISKDKITVCALEQGSKIIWKPFDVSLNKTEVEELIEKLEKLKEEVKITMEATGKYHLPILYELKDRGYFVAVINPLKMKQYCRALNFRKAKNDKIDAKQIAEYGLMYWKDLEEHKVDEENYRVLKELNRNYQHYMDLRINQMNFIDQTIHQTFPGIKKLITHGSGDFSKDKLLDFLEKWWHKDLILEKTEEEFVEEYKTWAKEKRYHPNVNKAKSIYKLAEDSISTQPSHNSKIETNIREGINLIKQINQILNSILSQMIEISEPLEEYKEAKKFSGISEKLAVQIVAEFGDLSKFKNKKSLISFMGIDAPPYESGNFKSDQRKISKRGNAILRKVGYQAMKCMMSAKKPENEIYKYMIKKEKEGKAKKVCKFAGLNKFLRIYYARVMESKVQKQELKVA

SEQ ID NO: 51476 - protein, 398 aa, unidentified
MKTEDIQIFLGLDVGKTDHWACAVVQDGTKIWNKTLPNDETKLTAVYQKLLAQGQVLVVVDQPATIGALAVAVAQNLGIPVAYLPGLSMRRIADMYPGTAKTDEKDAFIIADAARTMPHTLRSIQVSDEDEATLGMLTGFDLDLARQITQTSNRIRGLFTQIHPPLERILGPWLEHDAVLEILATWPTPAQLKHAGKARIDAKLKKSGARRHTAWAVAIMDALDEQTVVVVGTDAAGLVIPHLARQLISLHAQRVDVATHLETMVEAHPLYPVLTSMPGVAVRTAAIIIAETSGKTFPSAAALSSYAGLAPTTRQSGTSIKSERVSHSGNKRLKRALFLSAFASIRFDPTSRDYYDRKRAQGKRHNQALIALAHRRLTVLFAMIRDGSLYDVPELKIA

SEQ ID NO: 51477 - protein, 343 aa, unidentified
MNLIRVGVDLAKNVFQVHGVDRGERAVWRRRLRREDWMKVLSERVEQGCEIGMEACGGAHHWARELQRRGYRVKLIAPQFVKPYVKSNKNDAADAEAICEAMGRPGMRFVPVKTVEQQDIQAMHRVRSGLIEQRTAKANQIRGLVAEYGLVAPRELVQLRRAVPRWLEDEGNGLTSTFRRLLRALRDDLAALDERVSELDREIEHLAQADPGAKRLMQLRGVGPMIATALVATVGNAQQFANGRQMSAALGLTPRQHSSGGKERLLGISKRGDAYLRTLLIHGARSVIRTARTKNDRLSQWVTHLAARRHPNLAAAALANKTTRIAWAMLRRGTDYQPDLMAG

SEQ ID NO: 51478 - protein, 478 aa, unidentified
MNKKQQNKRDELIKKLKGRKISDIEEIKNYQLQVLNPNAAAADISSTTIYVCIPAQKAIDLKIDFVRVFGCYTQDLLEIVELLKLCEVNTFAMESTSVYWIPLYDILTKNNIDVCLVNPKKYRMIPGRKNDTDDAIWLQTLHSYGLLQGSFHPEPQIKELRTLMRHRDTLVHESVRFVQRMQKCMIEMNLLLNNVLRDIMGETGINIIEDILNGERDPKKLAMHRNFRVKASEEEIVKSLQGIYKDDQLIVLRMNYEFYKFTWQQIRSLDQEVEKMLLKFPLKQEHDAKPETLKRSKTVHKNSPKLKTPLENYLFGMTGVDLTRIDGLGAQSVLQIVSEVGIDLTDFPTENHFASFLGLAPRTDISNGKVLRSKTARIKSTASLVFRKAVIGVINSKSSLGAFYKRLSGRIGKLQANVATARKIAILYYRMIVHGQDYVDIGEKAYKDKQEERKKYIFLKKAKEMKFQVIDANGEVLA

SEQ ID NO: 51479 - protein, 410 aa, unidentified
MLLFVGDDWAEAHHDIEIVDETGRRLIWARLPEGLAGISRFHELVADHLDPDAGPAQVLVGIETDRGPWVQALIAAGYTVYAINPFQASRYRDRHAASGAKSDPGDAHVLAEIVRLDRDHHRPVAGDSDVAEHVKAAARAHQSMIWSRQAQVNTLRSTLREFYPAALAAFPDLTSADALAVLSAAPSPEAGKRLTQSRVETLLAKAGRQRNLTKKASQIRVALNTDQLTARPGVVDAYTAAVSALVAVITVMVAQTEVLAGQVEQGFGRHPDVEIYRSQPGLGTILGARVLAEFGDDPNRYADAKARKNYSGMSPITRASGTKRVVLARHARNRRLGDALYQQAFCALTSSAGARAFYDRHRDRGATHHQALRALGNRLVGILHGCLRHHTRYDENSAWPALDNHDQQAA

SEQ ID NO: 51480 - protein, 343 aa, unidentified
MKLHVVGIDLGKTVFHLVGLDSTGRAVIRKKCSRTQLLAFTANLEVELIGMESCSGSHFLGRALREQGHQVRLMPAQYVKPYVQTNKSDFLDAEAIAEAVQRPRMRFVPIKTEEQLDLQALHRVRERWVMRRTAVVNQIRSLLLERGLTLPKGRRYVDRQLPRILEDGGLRLSGCFRVLLAQLKIELEQLTARIEEMDRVIQKTAKENEACQRLTEIPGVGPVTATALIAAVGNGSTFQKGRNLAAWMGIVPGEYSTGGKQKLLGISKRGNKYLRTLFIQGARSVLQQRDKQVPGLSSWLAQLLTRAHQNVVIVALANKLVRMAWAVLSKNERYRAPVLAVTT

SEQ ID NO: 51481 - protein, 404 aa, unidentified
MWYSGIDWADEHHDALVIDEKGQQMGSIRVHHNPQGLAALDAFLMQIIGSAPKEQMACIIETTHGLLIVHLLEAGWPVYPVNPRTVDRRRSASGAKTDLIDAYLLAKTGRADFADLRRLTPDSEKVAELKQLTRDQDSLIRTQTRLVNQLTACLKAYYPVALDLFSKLQQRSTLVFLQAYPTFETARAASLKELQQQLKHTRHPHPADAAASMVELLHQPQLQADVVLTRTKSRLMLALVSQLLPLIEQIADYNKEISTLFLTHEDHAIFESLPRAGQHLAPRLLAEIGDDRQRYQDASSLQSLGGTSPILYQSGMYSKAHRRLGCIKPLRNALHQFAWQSTQSEAWAKDYYQRKRTEGKSHTVAIRALSNVWVRIIFAMWTHRECYQTATFELAQQHHARRAA

SEQ ID NO: 51482 - protein, 338 aa, unidentified
MSAIKVIGIDLGKSTFHLVGHDYSGREQYRHKLSRRKLLQFISVHEPTLIAMEACCGAHWLARKCQEYGHQVKLIPPQYVKPYVKSHKNDFIDADAIAEAATRPRMRFVSPKTEQAQLGVVIRRIRTGYIRERTATMNRIGSILTEFGFSFPRGHANMKRLFQWLADTGQPVPSLLVFELRDQLSHYNDLNDKIKEQDKKLETLNRDNELFTILQTVPGIGPMTASCCLSSVSDPKDFSNGCNFAAWLGLVPFQYSTGGKPIMLGISKRGNKELRELFIHAARAVLWRDETAQRYFGSWLTDLKLRKPFNVALVALANKLARIAWSVMATKKPFEIRV

SEQ ID NO: 51483 - protein, 429 aa, unidentified
MNSDDLDVNRVRVFRQLKKEIRGSKDYLIVGIDIAKDKHNAFFGTAQGKTLWRRLVFDNSIEGFNKLRNQVEALKVEHDLKKVVFGMEPTANYHKPLGEHLIGWGEEVVLVSGNAVKHNRQLMDGRWDKHDTKDSANVADLISQGKCLYYDYPLIVLRDLRALLAFKRRLKKEEHSYKVRIRNNLLAKHFPEMDFYYKDTLEGLAIVRWSPDPRKIAGMGYEAFCRLVAPGKRAARKDSRLQAIWTKAHDSIGCEAGETFGLEAELMVSGLKEVRKTIKAVEAKNHEVCSRFSEYKYLLSIPGFGPDVASKVLGAIGNPFRFANGKQVLKMAGLDLSANRSGKTSNVATPVISKRGKADLRYALYQAALIASTRNKDFIDYYTNHLRGREREKGIKTKMRVKLAAKMLVMAWTLMKKRELFNPGYLTIK

SEQ ID NO: 51484 - protein, 300 aa, unidentified
MKDMMIGVDLAKNVFQIHGALRTGEVQFRKKLTRQQFTAFMARQAPCLIIFEACGGAHYWAREMKAPGHEVKLIAPQYVRPFVKRQKNDAADAEAIVIAARQAEMRFVGPKTVEQQSRAAVFRGRERLVHQRTADVNALRALLYEHGYVFPVGMRYLDRMTALVDDDTSDLPALIREECQDLLAQIAEKTARITERTAKLKALASQSDRARRLQTMPGVGPLTAIAVQAFGPDMAHFKTGRNFAAWLGLVPRQHSSGGKERLGRMTKAGQADIRRLLIIGAMSRLGWLGRHTIAQGNCPA

SEQ ID NO: 51485 - protein, 331 aa, unidentified
MHVIDGSDHVLTNRKLRRSEFLAFFENLPPSLIGMESCGAAHHWTRKLISLGHEVKLMTPQYVKPYVKCGKNDAVDAEAICEAVTRPTMRFVAVKSVDQQSVLMIHRTRSLLIRQRTMLVNAPRGHLAELGIVAPVGIERVGELVDRVLGHQGDRLAVPPLVRSIVETYARQIMIVTDEVKEPEKQLRDWHRTSEASRRLATIPGIGQIIATALAATVANPDAFPSGRSFAAWLGLTPRSNSSGGKERNGRITKAGDRTLRTLLVLGANSVIRRVTSGRETPLYGWVKRLIDTGKPPRLVTVALANKIARIAWAVMTGKAEYKPEKAALTF

SEQ ID NO: 51486 - protein, 344 aa, unidentified
MKPQQQYVGLDVSLEQTSVCVVDNAGTTIWRGKCSSTPESIHTVVAKHAPQAVRIGLETGQLSTWLFHELKARQLPVICIDARHAKAALSLQINKTDANDAHGIAQIVRVGWYREIAVKSMDSHAIRAMLVARAQLVTQKVKLMNCIRGLLKTFGIVLARAKGGRFEAMVRERIVNNPMLTTIIEPMLVLLLTTREQLAVFERLVRRRARADHDVRRLMTAPGVGALVALAYTTTIEDPARFKRSSSVAAYLGLTPRRYQSGEMDRAGHISHCGDAMLRAYLYEAANVMLRRSTRPSQVSMWGRALAARIGGRKALVAVARKLATVLHSMWLHRTEFRFEQGGA

SEQ ID NO: 51487 - protein, 345 aa, unidentified
MSEFYEGQQFLGMDLHRRRSVLVRMSETGEHLETTRILNDRDSLAEVMSRAGESPEVVLEATYGWYWAADALAELGATVHLAHPLGVKAFSYRRVKNDQRDAADLADLLRMGRLPHAWIAPPETRELRELVRHRAKLVAMRSQCKAHIHAGLAKNGIWVPMTDLFGVEGNLLLDKVTMPAPYQERIASLRRFIEAFDAEIDLFTILAQRRLTHDAGYTAIQQIPGIGPVLGAVFVAEIGDVHRFGKPAQLTCWAGLTPSHRESDTTVHRGRITKQGSRLVRWAAIESVKMLPKSSHIGAIRDKVADRRGNRNIGAVAAARRQLELVFYGLRDHHIRALHHPPRAA

SEQ ID NO: 51488 - protein, 329 aa, unidentified
MSEATQLKRFSQSPDPDALYAHLVRNYPEAEYHSVYEAGFCGFWIHYRLVGLGIHNIVVNPADVPTTTSEKLRKTDAVDSAKLARSLRAGELKGIYVPGSESLETRSLIRLRDSITKDQTRLKNRIKSHLRYLGIEIPEEFSGPGRCWNRRFVVWLKGAETGTAYGRQTLDFLVRQYEALRGQRLEMLRAVRALSRTERFEKPLENLMTVPGIGQLTGMSLLSEIDDIRRFKSADQLAAFIGMIPMCHSSGEREGVGDITVRRSARLRSVLVEASWVAVRQDPALSMAYGSYCKRMAPGKAIIKIARKLVNRIYFVMKRNQPYVKCVVA

SEQ ID NO: 51489 - protein, 355 aa, unidentified
MSSLEETRCQFNGSKADIKLGIDVHQDFYVVVEQVGGSNPKPAQRFGKEAFLHWAAKLKSQAGQVHAVYEACGFGFGLQRALSALGIQCQVVCPQKLDEQNRRVKTDGLDAKVLCLRLDRFVQGNHAALALVRVPSEEEEQLRAIHRQREQLVKARKQLEAQGRSLMVNHGIEPLKNWWKPRTFARLLVPEWMRELLSNTQPILFALQQKIGTLTVQLQSSATPKQPRGLGAMSSVIIDREIGDWHRFNNRRQVASYTGLCPGEYSSGNTRLQSCVTKHGNPRLRAALVELAWRLVRFQPNYKPIVKWRQILAQGALATGAARKKAIVAVARQLAVDLWRIRTGRVSAATLGLIN

SEQ ID NO: 51490 - protein, 366 aa, unidentified
MEKKIAYVGIDYHLNSLSIAVMIDGQKKLHDTIRLKNVDKIISKYMKKLSRDFEIRACYEASTNGYAFQRKMTNWGYRCDVIAPSLIPKKAGDRRKNDFRDARDLAQNFAAGMLSIVHSPSEDEEAVRSLVRCRAGFKDDAKRIKFKINSLLLSQDLRWPRSKWTFAHRKWLSEIQLSNPYLQEVLEEHLGHLHYMETRLKHLESQIEEIARSQIYSSSVKKLRAFKGIGTLAAMILISEITDFRRFATPRALMAFLGLIPSENSSGDKQRGGSITKSGNRRCRTQLIESMQHYVKSAHISLQMRCDLSQVDADTANRAIKCLKRLHKRYWALTLKGKNRPVALTAITREFVGFIWAVMQPDPLPA

SEQ ID NO: 51491 - protein, 412 aa, unidentified
MTAINQFTAHIGLDWADKKHDVCVQFNNGERVFHVIEHTPEALDTWLKALHKKVKGRIAVAIELKKGPVVFALQKYPFITVFPVHALSLARYRQTFWPSGAKDDPQDAELALELMLRYPKKIKAIEPDNADIRLLQQLVEQRRQLIEDKRRFVNRLINTLKQYYPQLLEWFSHRGSLLLCELIMRWPSLQQLKRARRDTIRNFLNAKGGRATVLTEQRVASIDNAIPLTTDPSVIEANALMATALAAQIKVVSEIIKTYDERIETLFDTLPDAELFKSLPGMGPCMGPRMLTALGDNRDRFNSAEEIQNYAGIAPVTERSGQKSWVHWRWQCAKFVRQTFVEWAAKTVNSSYWSRLYYQSLRKKGKSHQSAIRALAFKWIRIIYSCWKNRTCYNEAKYLLALEERKSPLLKP

SEQ ID NO: 51492 - protein, 318 aa, unidentified
MLNESFVGIDVSKDWLDVGWEPAQQSERLAHDEVAMVGLCERLVQERPCLIVLEATGGLETHLASALAAAGLPVAVVNPRQVRDYARACGRLAKTDRIDALVLAAFARAIRPQVRAPKDDETLELGALLARRRQLIDMRVQEKLRLERASPVQRDSIKEHIAWLTERIARLDTDLTHRLRSSSLWRDKEDLLKAIPGVGTITRVTLIALLPELGKLNRREIAALVGLAPFNRDSGQHRGERVIWGGRAQVRRVLYMASVAAIRSNPVIRAFYQRLRAQGKPGKVALVACMRKLLTIMNAMLKHNTPWNPNALDLEHSC

SEQ ID NO: 51493 - protein, 406 aa, unidentified
MFIGWDWATETHDVTVMDATGKRIDRWEFAHTEEGFTKTLARLGKHGAPADLPVMIETTRGLAVDRLLAAGHPVVPVHPNAFHAMRARWGASKAKTDAGDSMKLADYLRTDGHLLPRLEPTGQATMDLQALTRQRADHIEAKVAAVNQLAALLDMHWPGGKALFADLDSDIALDFLDCYPTPQAAAKLAPAKLEAWCKRRGYSGRRTGKELVERMRTAPSAASRLSEAVIAQLVRVQVQLVQGIRQTLRLLDKSIADAVETHPYAPLFATMPRIGKVNLGQIIGEVGPLLERAQSCEQLIAEAGVVPVTRASGKSRTVAFRFATNRRARVALTTFADNSRHGSEWAAKIYDDARARQKRHPHAVRILARAWLRVMWACLRDGTCYDPATHQTNNKINTIADTPLAA

SEQ ID NO: 51494 - protein, 342 aa, unidentified
MKATTIGIDLAKHLFQLHGVDQHGKTVLKRQLKRGQMISFFSNLPPSLIGMEACGSAHYWANKLQGLGHTVKLMAPQFVKPYVKTNKNDAADAEAICEAVTRPAMRFVPIKSSEQLAILALHRARQGFIKARTAQANQIRGLLAEYGFILPQGITHIGKHVPELLEDSENGLPGTFRHLLMRLHEHLKMLDKQVNELEDAIVRWHKDSAASQTLAQLPGIGPITASALVASIGNAKNFKNGRQLAAWLGLVPRQHSSGGKQNLLGISKRGDSYLRTLLIHGARAVLRVAERKESFSGSWLAGVMARRNPNVAAVAQANKTARIIWALLAHDRKYDAHYGMAA

SEQ ID NO: 51495 - protein, 344 aa, unidentified
MIQYKRIAIDTSKAVFTLHGVDESGRAVLRTNLRRAQIAPFFKKLPPTGIAMEACGGAHHWGRELTALGHEVRLIPPQYVKPFVKRAKNDRNDAEAICEAAGRPGIHCVPVKSAVQQAQGMVLKIRATLVDQRTVLVNTLRGHAAEFGVIAAKGISQVGPLLPAIEQETAIPSEARDMLDLPGEEIAHLDIRLKTLDARLAAAHKANPVSQRLAAIPGIGPVTALTLAAEAGPAAFASGRHLAAWAGLTPKEHSTGGKQRLGGISRAGNERLRQLLVLGATTVIKVATRPGNTLATAWLLALLQRKPRKLAAVALANKMARTVWAMMTSGAVYRRQPASAAVSA

SEQ ID NO: 51496 - protein, 342 aa, unidentified
MKVYGIDLSKEKFDVSYVITGEEKKRIVKNDFKGICSFLKQVEDNCILVAEHTGTYGDLLVHLCYQFQVKIALVSGYNIKHSLGLQRGKSDSKDAYRIRKYGERFTEELYLTEPKSESVKELKELYSLREQLSKNRTSLLLGMKTRKHGPSQSIVAHRSYQRAIMNVEIEIGSIEKEIEKIVQSDSDLKDNYKLITSIKGIGPVIANNLIIKTENFKRITTAKKAAAFAGVCPYPNSSGKTSMKSKTSHLADKKLKSLLFLAAKTAVAHNKEYSLYAERKKLEGKPYFLIMNNVSNKILRTVYGVVQSRKPYDINHICIDPRNIARPYLSFKDNQQNYFKLI

SEQ ID NO: 51497 - protein, 343 aa, unidentified
MQVIIGVDPHKASHTAVAIGDNEGELGAVKVRATRRQVAQLLSWAAPFEKRTWAIESAGGLGYLLSQQLVAAGETVVDVPATLASRVRVLGTGRSDKNDPNDARSVAIAALRAPALRSVEAADHAEVLRLLAKRNLDIGSHRTRVVCRLHAALAELAPGGISKELNASDAVALLARVQPASPVEQIRYDLAVELLDDVRRLDAQLKASHKRIRDAVRASGTSVTDLFGVGPTIACSLIGYTGDVTRFRNRDQFAAYNGTAPIEHSSAGRTVHRLSRRGNRRLNHAIHMAAVCQIRQTNSEGRAYFERRVAEGKTKKEALRVLKRHVSNAVYRQLLADAQRTRS

SEQ ID NO: 51498 - protein, 360 aa, unidentified
MKKSSKASQEGKVAKPEKSVGLDLGDRFIHYCVLNQEGEVMEEGRMQNSESVLDKHFAGESVMRIAMEAGTHSPWVSRLLKRLGHQVLVANPRKIRAITGSESKNDRNDAELLARFAAYDPKLLSPIEHRSQQRQQDLNLLCARSTLVRARTMIVNVVRGLVKSAGGRLPSCSTESFAKRVAGSIPTPLGEVCLPLLKQIGQLTAQIDRMDKQIEQLARKYSEISVLKTVPGVGPVVAACYVLTLDRPDVLGDNRQAGAFLGLRPRQSQSGDSDPQRRISKTGNSYLRSLLVQSAQYILGRFGPDSALRRWGLKLAASGGKRGKKRALVAVARKLAVMLHSMWRSRIPFQAFPQPATTAA

SEQ ID NO: 51499 - protein, 430 aa, unidentified
MKSNTQNAKIEAITEKTLVLGIDVGSETHYARAFDYRGIEYSKKPFKFSNTEAGFATFKEWILDLKERHEKDKVVPGMEPTGHYWFNLGKFLQDNEMKPVLVNPHHVKKSKELDDNNPTKNDRKDPKVIAGLVREGRYMIPYLPDGIDADLRTASNIRFQLQAELTRIQNRISRWFNIYFPEYKTVYGKPDAKSGMLILKAAPFPEDILTLGINGVNQIWRDAKLRAVGKARAKTLIEAAEHSVGSKEGAVSARMEIRMLLEDYESRNIRLQEVMTLIEGLVKQIPMAEKLLEIKGVGIRTVSGFLAEVGDISRFNNPKELQKLAGLALVENSSGKHKGETTISRRGRKRLRYLLFEVAMSLVAKNPEFRELHNYYTTRRLNPLKKMQSLMAIAAKLLRVFYAILTKGVGYDPKKMVNDIRRPAAYAQAA

SEQ ID NO: 51500 - protein, 334 aa, unidentified
MEQVTTVGIDLAKNVFSLHGVDGFGKTVLRRTVRRDRLVETVAGLPPCLIAMEACSGAHEWGRRFEQHGHTVKLMAPKFVAPYRKSDKNDGNDAEAVCEAVTRPSMRFVPVKSAEQQALLTLHRVRQGFVVERTAVINRLRGLLSEFGVVLPLRSVTVRRQAAQAAEALPELARGAIDDLLAQLRLLDERIDAYDAQIHAQARLSEPARRLMQIRGIGATTALAIVATVGNAREFKNGRQFAAWIGLVPSQYSTGGKPRLGHISKRGDAYLRNLLVQGARSVLQSAPMHQDRLSRWALELQARRGYYRTLVAIANKNARIAWALLAKDMALKMT

SEQ ID NO: 51501 - protein, 475 aa, unidentified
MNIKGTKKKNQVVTANIFEQQELLKKAEVIKENLTASTWRELETNGKFDKNKKLSFISDDMLILGCDVGSETHYVRAIDTRGRELSKSAYSFNNDYEGFQSAKEWAVKIAAEHDKSQIVLGLEPTGHYWFCLATWMIANGISVVQVNPYAVKQTKEVEDNSQLKDDRKDPKLIANLVKDGNFGMPYLPEKIYAELRRLSMFRDQLNEDRIRTINRMHREMKIYFPEYKEALGKVDGAFSLELLKEAPFPDELTALGEEGIRQIWHAAKLRGRGYSRAREILQYAKASVGIKDGSIASKAAVKWFVQKIMELDVELAVIENQINQKCQEIPHTGNVLEISGIGENTLSGILAEMGDISRFDDVKEIQKLSGLGLVACSSGKHKGETKISHRGRKRLRYWLFQAAKSAVAHAEEFKELHMYYTTRADNPLKKMQSLIVIACKLLRIIYTILNTGTFYDPKKMLMDIRRLEKKEAIVA

SEQ ID NO: 51502 - protein, 392 aa, unidentified
MIYVGIDVAKDKHDCFAMNSDGEILIENFSFLNNFDGFNLFFNSISQFNESFENIKVGLEATGHYSNNILNFLTSKGFNVFVINPLQTNLFRKGQSLRKTKTDKLDARFIATMLITDNLKPYSNLSYHISELKSLIRHRFRLVEERSKFKVSFSRLVTIIFPELEKIVWSISQNSVLYLLYELPSVKDISECNLKHLTYLLEKYSKGKYSRDKAIQIRELSRKSIGTISRSLSFELRQVIQTILFLQSQIDDIDKELKNLIGELNSPIMSIPGISYVTAAYILAEIGDINNFDSPAKLQAFAGLDPSTYQSGKFTSSNSKMVKRGSKYLRWALLTATRLVCMRDKTFNNYKNKKIAEGKHYFVALSHTSKKLIRVIYYLLKTNQSYQLSKVA

SEQ ID NO: 51503 - protein, 465 aa, unidentified
MPNTRKKHARLQRPPDPTAGLPPLNRHAAGIDVGSAEHDVAVPPDRSPEPVRRFASVTADLHALADWLHACHIDTVVMESTGVYWIPLFQILEARGFAVHLVNARHAKNLPGRNTDIADCQWLQKLHTFGLLNSSFRPTDDICVLRSYLRQRDTLISAAATCIQHRQKALTEMNVQLANVISDISGVTGLAILRALLAGERDPAMLAAFKDYRIKASTHTIAKSLEGNWREELLFHLRQSLELYECYQQKIAECDTQIEAHLLTFDRKIEGSAPPLPTPKRRPKKARRNEPHFDLHTQLYRISGVDLTRIDGIEVLTAQTLIAEIGLDMSRWKSEKHFASWLGLCPDNRISGGKVLTRGTRDVVNRAADALRLAAQNLLHSKSALGANYRRLRARLGAPKAITAMAHKLARLVYRMLKFGQQYVDKGIEHYEARFRQQRLQWLQRQARELNLQLVPNQPVPSPVS

SEQ ID NO: 51504 - protein, 383 aa, unidentified
MKEATRIGIDLAKNIFHLVGMDAGGRVVWRKALARRKLLEFLAQQRVAEVGMEACATAHYWGREIQKLGHRVKLIHPRFVTPYRKSDKNDFNDAEAVAEAMSRPTMRFVELKSLAQQDMQSLHQARRLLIKQRTQSANQLRGQLAEYGVIAPRGLSALRRAVAELSGEPQRVTPLMAALAAAGVELLAALESQRQELDRRIQQACRSAERCRRLTAIPGVGPLTATAAVAKVGNARQFPNARALGAFVGLVPSQHSSGGKTVVGGISKRGDRYLRTLLVHGARAALRTAAQHDDRLSRWATALKQKRGANTAAAALANKHARIIWKLLSTGAAFDPQRPTTAAERAPAAQAGASEKSAGPRLALRLEHGRKSRGFFSPSSKRQ

SEQ ID NO: 51505 - protein, 484 aa, unidentified
MKLTKQQKQQKRTALRSEPAAGWHSMNRKQRREMMRKIQAEDLNLKMVHPDAAGIDIGNESHYVAVPPGRDSVPVRCFGCTTAELKQMADWLKQCGIRTVALQSTGVYWIAVYDILEEAGLEVYLVNARETKNLPGRKSDVQESQWLMKLHTYGLLRNSFRPSREIRTMRTYWRQHNDLVQAAGQHIQRMQKALTQMNIQLANVLSDISGKSGQAIIHAILAGERDPYELAAMCEANVKASEEEIARALEGNWQEDLLFMLKQEQAGYEFCQQQMAECDERLYTYLQGRPDRSAGASLPREKRKGRREKRKKNRPQFDVREQLFRLTGTDLTRIDGIDVLTAMSVISEAGWDMSKWPDEDHFVGWLRLCPDNRVSGDRVIGKGRLPTHNRLSVAFRMAAQSLRESNTYLGAQFRRLRRRLEPAVAVKAMAAKLARLVYRMLRYGMQFVDRGAEVYEAAHRQREIHNLKRRAAHLGFQIIQVPAA

SEQ ID NO: 51506 - protein, 414 aa, unidentified
MALVRWVGRAIGLDVHRDFCVVAICEDGKVRSAGRVPSTPDGLGALAESLLATDRVALEVTGSCWEVARLLEPHVQRVIVVSPDDTGISSARAKTDKLDSRTLASLLWKGELDAVWMPDERCRILRRRLARREQLMRTRTRAKNEIQAVLQRRLQERPPLADLFGVKGRQWLAGLKLPVEERESVDAGLRHVAFMDTEIAAVDRLIAQQALLWPEIRRLMTVSGVNLVCAASFLAAIGEPSRFLTSRKMVAYLGLDPKVRQSGEAPARSGRISKRGSASARWALVEAAWSVVKQPGPLRAFYERLRARRGHGKAIVATARKLTVLFWCMLTRGEDYAHQRPALTNKKQRQLELTAGAPARTKAAAGIWSTNRAILHAERALAEQAEVSYKRMVTDQQAGRPSRKVGASATPERA

SEQ ID NO: 51507 - protein, 403 aa, unidentified
MNSVGIDISKGRSTIAVMRPFGEVVISPFEVRHTDSELSELARQLKSLNGETRVVMEATGNYHAPVAKLLHDAGLYVSVVNAKLVHVYGNNDLRRVKTDRKDAVKLANYGLDRWLTLPRYVPEDDTRLLLKNCYRQYRQYSKVQTVLKNNLISLLDTVFPNVNRLFSSPIRGDGSEKWVDFVAEFWHCRCVSEKSQKAFTSKYQRWCRKHGYNFSEEKAHTIHAEASGYIGVMPKSETTKLLVEQAVAQLRATSAALTALKHEMLALAAQLPEYPVVMGMFGVGPTLGPQLIAEIGDVRRFYSKKALVAYAGLDAPPNDSGDVTGKHKSMSKIGASSLRRTLFLVMSVYLQNAPLDEPIFRFMDKKRAEGKPYRVYMMASANKFLRIYYATVKAYLESLEHTA

SEQ ID NO: 51508 - protein, 349 aa, unidentified
MSMVCGLDLHRQQITFDALETASGEVWRGRVWQPDRERFRRWLCRDVARRANGQPVAMAVEGCTGWRYVVEEITAAGFEAHLAEPADTQAARGRKRHAKTDRSDARLLRELLQSGELPESWIPPTAVLEWRERVRLYKSLVDQRRVWIQRIHAELFQHGVAVPEAQIRSADTRDRLLSDEVDLTPAGRQRVRVGYSMLEATDVEAQSLKRELQRFGHRQPACRALVEANYGIGGLIAVAVWSELGDCRRFSRSEQVVRHTGLDVTVDSSDRHRAHGYLTRQGPPTLRWALFEAAMNASHRRSPDHAYYTTVKDRHDGKLAAIAVARQFARRCYHILRNLDPDIVYAMPA

SEQ ID NO: 51509 - protein, 417 aa, unidentified
MEEREKASPCRYVALDIHKYYSVVAGVDREGKEILSACRVEHVDLEDWLDKHLLRTDRVVIESTTNAWHVYDLLKPLVAEVLVANPIKVKQIACARVKTDKKDTFILARLLAANLVPTVWVPPTHVRELRQLVSHRRRMAGMHTQVVNRMHSVAHRHHLNHPKGKSFELKNTGWQRDESLSRLEKMQLELDMETREHLEKQIERMTRELGRMSHEEPWASEMLYLMQVPGCGVVTGMTILAAIGDITRFESPKALASYSGLTPGLEQSGVKLRGKGITKEGRRELRWVMVEVAWRAVKADPYWKKNFEELKRRMHPNQAIVAIARHLLTMVWYLLTRHEPYSHYSPERIAYKYLTWSWALGEKQRQGMTGPQFARYYLMRLGIGNELKRVALNPKFPYKLASVEEVLALWPELRPPE

SEQ ID NO: 51510 - protein, 351 aa, unidentified
MLIIGCDFHTRFQQIAMLDPTTGELVERRLEHETGEAEKFYASLPGPARVGVEATIGAQWFENVLSRYGHELWVGDAAEISAARVRKQKTDSRDALHILDLLVTNRFPRIWVPSPSERDVRQLLRHRHKLVRYRTSVMNQLHGLAMSQGLCRKKKLWSQRGRRELEALRLDPWASRRRQELLRLLDQLNPWIEDLDRAVQKEAERRPEAMHLMKQPGVGPITALAFVLTIGPVSRFQRSKQVVSYLGLNPREESSGGKQRLGSISKQGNSMLRYLLVQAAQTASQSDPELRRYYQRLKFRRGFSGVAKVAIARKLAVRLYWKLREAAQSLPPARMQGSPSYPMVDARPSIS

SEQ ID NO: 51511 - protein, 359 aa, unidentified
MTTEQRQQTMFIGIDVHKDTHTAVGVSPFGEKLFEITVGNYQSDFDQLRQKVELTKGSLSPYFGLEDCQGYGERLSSYLHDNGERILAVPSVMVDRQRQKETHPEKSDSLDAFGVAKVMMQNIDSLPAYTISEEAKKAKQIKEISIDREYIVEERTRIKNHLHNLLHRIYNSEYRVKYKDPFSLKALKHWSKSKPKCDQFLLRSMKRKIKRLIDIHYEILDLEKEMETLLNESYTIQTASGCGSIVAGMIIGEIGDINRFHSPGALAKYAGCSPRECSSGKNHRHRKTKGGNRRLNCAFHRMALSQISRSGNDLARTYFKRKILEGKSKQQALVCLRRQMVNIIWCMLKNKTNYNPRMN

SEQ ID NO: 51512 - protein, 418 aa, unidentified
MIPAVIERCAGIDVGKKFLVCCVAVGPAREEAVMETRKYGTTVGELMKLKAWLAECECTHVVMESTGVYWKPVFNILEEGFEVVLANSQEVKNRRGHKTDWKDSQWLAHLLRHGMIRPSFIPPRAIRELRDLTRRRKQMIRMGADERNRVQKVLEDANVKLGDVLTDVFGATGQAMLEALLEGKAQPEEIALLAKKRAKSKIAELQAALEEHRMSDHHRLLIRASMRHLAFLEQEIEELDQQIEKQIEQAAIGKEYQLLQTIPGIKGEASASILAEVGPNMSQFPTAANLNSWAGVCPGNNESAGKRKSGRTTKGNPWLRETLVQCAWSGSRTKGSAFQHRYERLSPKIKHKRAIVAVAHKLLTAVFHVLRTGTNYEPPRGEGLKPAYVKRIIRHHTRRIRNVRRWLPKPDAGETLPA

SEQ ID NO: 51513 - protein, 335 aa, unidentified
MKKFKIVIGIDISKNKLDVCIIEDPTSKQRNYFIVSNDKKGIDDIFKELKKYKVSDSELVFCFENTGVYGMHLCYALQQRNVSYSMVPAIEIKRARGLTRGKSDKTDSLDIALYAITHEHKLSYRKLPEYDLMKLRLLLTEREKLIKSISLFDSTKENEDFLPKEITRNILKINKQTIIALKKQLLAVEKNILTIIKENETIKQQYALATSVPGVGQQTAINLLVATRCFSTFENWRQLACYAGVAPFKYASGTSVHGKTKVSHMANKKLKSLLNMAALSAKKHDKQLKEYYERKIREGKNGMSVMNALRCKIISRVFAAIKRETPYVDFLKYST

SEQ ID NO: 51514 - protein, 458 aa, unidentified
MTNRDAKQRRQRNFKQMLTVINTNAAGIDIGAKEHYVAVAPERDEQPVRRFSAFTQDLHKLAQWLKQCGVTSVAMESTGVYWIPLYQLLQDYGFTVKLVNARHVKHVPGRKSDVQDCQWLQQLESFGLLTASFRPEAQICVLRSYMRQREQLIRSAARPVQQMQKALAEMNLKLQHVLSDITGVTGMAIIRAILRGEREPLKLAALKDRRIKSDASTIAKSLEGDYRAEHLFVLRQALELYDYYQQQIVECDEQIYQEMKRLESNSEVVPGASPRKRSCHNPFHFNAQSELQRVLGVDLTRINGISEATAQLILSELGPKLVTTWPSEAQFASWLGLCPNNEISGGKVLRRGTRKVVNRVANALRMCAESLLQSKSALGAYARRLRSRRDTRIAITATAHKLARLVYRTLKYGEEYMDQGQQLYEQKYQAAVLKSLNRTAQKLGYELVIRQPPPLVVP

SEQ ID NO: 51515 - protein, 355 aa, unidentified
MKRAYFIGMDTHCQFCEVAAINARGDVVERDRCDTTIPALLEVIERVPRPRQLVIEEGPLAGWLWRHLHMAVDRMVVSEPRRNRLIALDGDKDDDLDAEKLAQLLRGGFVKAVHQVETLERALLKQQVSLYHHRVRQRVREGLRISSLFRQHGVMIREKAFVAAEDRPALQARLPAAASFQEILPLLWSSYDAAVEHEELWRRRLVRLAKQEEVIQRFEALPGISWIRAATLYAYLDTPWRFRGKAALWKYLGIGLERKHSANGPEYLGVPTRAHRLLKGTILGAACSAVASGNNPFAELYGRWIEQGLSSKLARRNVARAQSATLWGLWKNGSAYRPDWVGVARVAGLATEVSR

SEQ ID NO: 51516 - protein, 350 aa, unidentified
MEIISFDSHKRYTLALVEEMGGKMIDESRIPHERGNIRNYLRRFTPGASVAVETIGNWYWIVDEIEQAGMVPKLVHARRAKLLMGNVNKTDRLDVRGLSCLQRTGSLPTVWIPPCDLRDKRDLPRTRMYLVNQRTRLKNRIHATFDKYGLGPFGVSDIFGKSGRKMIDERLKELPDHTRFATKLQLNQIDNLEKSADEFDKRIKKVFSETDDIRLLRTMPGIGFIFSLVILLEVGEVERFAGPGSLASYSGTAPRVHSSGGKTRYGSLRSDVNRYLKWAYLEAANVISISRKRKPYLFVNKLYSKIRARKGHAKAVGAVARHLAESTFWMLTKKEEYKERGALVVSPTGA

SEQ ID NO: 51517 - protein, 401 aa, unidentified
MTSVGIDVSKGKSTVCILKPYGEVIVSPYEVQHTEPDLRVLISRIKSIEGEVRIVMEATGAYHLPLLSSFKDVGFFVSVINPLAMKRYASTAIRKGKTDKMDAVRIANYGIDNWFKLVDYTLPDEVYAQLRLLGRQYTHYITIRIESKLALTDLLDRTMPGIKSLLSGKRSEEPTKDKLSDFVAEYWHFDNITKKSESQFIRSYCTWAKKKGYHASESKAKSIYALACNGIPTLPASTASTKMLILEAVRVLKEVNKTLESILTQMQELATTLPEYNTVRAMNGVGDVLAPRLIAEIGDVRRFHSGSALIAFAGIDSPPFQSGSFTGTQRKISKRGSSLLRKTGYEVMKCLKTVKPSQDNAVYLYMLKKEAEGKPKKVAKIAALNKFLRIYYARVSEVYSG

SEQ ID NO: 51518 - protein, 424 aa, unidentified
MQELEQVEEQDSEQLIERVAALDIGKATLVCCVRVPGENGKRVQQVSEHSTMTRSLGLLADRLVELGVTRVVMEATSDYWKPPFYLLEAHGLRVWLVNAKDVKHLPGRPKTDRLDAVWLCKVAERQMIRPSFVPPPPIRRLRDLTRYRVSLVSERTREKNRVEKLLEDAQIKLSAVVSDLFGVSGRAMLAALIAGERDPRALSELARGSMRGKISILTEALTGQVTGHHVFLLERMLRRIDALGADIAELEERIEAEVAPFADAVSRLDEIPGVGVTAAQIIIAEIGLDMSRFPTPAHLASWAKFAPGVKESAGRSKGNGSTGHGDPYLARVLGEAAVGASRTNTFLGERYRRIARRRGKKKAIVAVGRSILVIVWHLLAEEQAHFHDLGADFHDKRRGTEAVKRNHVRQLEALGYNVTLQPAA

SEQ ID NO: 51519 - protein, 348 aa, unidentified
MNSLHYIGFDVHKKSISFCVKTAAGEIVEEGVIPAERGALRQWASARPQPWRGAMEATLFSGWIYDTLKPYAEQLEMAHPAKMKAISAGKKKSDTLDARTIADLLRCNLLPACYVAPPRIRELRRLLRYRTLVVSEGVRMKNKMAGLLMETGALYVKEKLHRKKYFASLLEELEEVPESVIDLLRLSRGALEMFESTQKRLVRELLADPELAQRVERLMTIPAVGEITALTWALEVGDPQRFPSCSDAMSYCGLTAALKSSAGKQQRGPISKQRNHWLQTTLIEAAKPAPRWNPQLAALHARELERGHRNRATLAVARKLVVYLLAVDKSGQAFQLRVPSEGPTQKAA

SEQ ID NO: 51520 - protein, 350 aa, unidentified
MNATTVAVDLAKNVFELAVADAHWRVIERYRLTRGQFERWFANRQVGLVVMEACGSAHHWGRWLRGKAVAVKLLPARYVRPYVRRNKTDAADCLALLEAARAVDIVPVRVKSVEQQALQGLHRIRSGWVAARTARINTLRGLCREFGLVVPPGARTGLEQMARELADERSPIPALVRGTMKLLLEEIRLLEARIAGLERELAALAAQTEACRRLLTIPGVGLLTATAMVAAVGDIAGFKSARHFACWLGLTPREFSSGDTRRIGRISKCGDTYLRMLLVHGARAVLRSAVLAGRVGRPLDRLRQWALQVQRRTCHNKAAVALANKLARIVWATWRHGQDFQRREPLSLAA

SEQ ID NO: 51521 - protein, 347 aa, unidentified
MTGVENYAGIDVSLELSSVCVVDGQGKILREVKVASEPDALVEFFETLGFAVKRIGLEAGPLSQWLHAGLKRTGIETVLLETRHVKAALSAMTVKTDRKDARGIAQLIRMGWFRPVHAKSVDAQEIRALLIARKQLLGRLIDVELSIRGILRGFGLKVGPVTRKNFEARIRELVAGQATLERIATAMLSARSALKAEYGRLHKAVLAIVRDDAVCRRLMTVPGVGPLVAITYKSGIDDPHRIAKSKAAGALFGLTPKKYQSGEKDVTGGVTLAGDEIVRTALYEAANVLLSRITRFSKLKRWGMDVAKRRGSKRAKVALARKLAVILHRIWVDGTTYRWTEAKPIAA

SEQ ID NO: 51522 - protein, 456 aa, unidentified
MKTMNMNFKHNQLTLFFVADVHSQKHHFLVSIKETRTILKEFIVENSTTGFIQFITLVKLFSAKFRTQNVIFAFEPTSVYWMNFAYAFYQDISTSFLNKQILFVSPEIVAYQRKVDDPAGNKDDHKDPLTISKLVWDNKTSKAILLPEKIFNLRELTRQRNSLVKIRSSLKTQLRNKIIIIFPELLNIFSDILTASARYVISNFTTPENITKLPIQTFTQFLLKISKKKLSTHKIELLYSYAQSSLGIKGNKNGLISNIKYILEQIELYDKLISQIENEIEYYLKSIPQTLTQIKGISTILAASIIAEIFPISRFSNSSQLVKYAGIDPTHSTSGISLKKLSYIAKKGDVYLRLLIIQTAFSCINHNQYIKRYYTNLINYGHKPKRVAIVAVANKLLRIIFNLLKYNIKFDPSKIGMGPKKIVEVVPFKFKQNNFHSLEKAKTKFLLKEKASEKLF

SEQ ID NO: 51523 - protein, 385 aa, unidentified
MQDHKPEDQTAIRTDLGAIFVSLELSRSTWLVTSLSPGGGEKMSKHSVPGGDISGLLMLFSRLTERARKRAGEEFPIIAIQEAGLDGFWIHRALEQEGIESHIVDAASIMTSRRRRRAKTDRIDGEALLRALMAYKRGEPRVCAMVRVPTPEDEDRRRISRERNVLIAERVAHVNRIKGLLFSQGIRYEPLRRDRRARLEELRTGDGRVLPEHMKRQISRELDRLELLLAQIKAVEAERNTMLAKTNEANLAPAKMLMGFKGIGAEFAMTLWSEGLFRHFDNRRQVGAYAGFAPTPWQSGMTDREQGIAKSGNPRLRTTMIQLAWLWLRHQPDSLLSHWFQERVAGKGRRIRKIMITALARKLLVALWKYVTAGVVIERAVMKTA

SEQ ID NO: 51524 - protein, 381 aa, unidentified
MSSSSPSSIIWIGMDVHKDSVMLAVYVGDSKDPELVKPLPNDLRKLKRFFERWSRRGKIRACYEASGAGYVLHREITDWGYHCDIVAPSLIPVRPGDRRKHDRKDARQIGRLYRAGELVAIRIPSAAEEQVRDLVRCRQTFQREILRSRHYVTKFLARRGLVFRKGTNWTQKHRVWLGALLQDERLGPQDRSVFSEYLALLDYKISRREDLDDQIEKLAFSSAYKPLVDRLRSFRGIDTLAAMTLVTEIGDWRRFERPGQLMAYLGLVPREHSSGDRTLRGSITKAGNSRCRHVLVQAAWQYRTHPRLSIALKERQRGQPLEVIEHSWKAQHRLYKIYHRIGAKKSSLVAVVAVARELVGFLWAVMHDLEYQLPASLRDAA

SEQ ID NO: 51525 - protein, 329 aa, unidentified
MEIKEVIGIDVSKLTLDCCIHGSQELKTFKNDFDGIMRMIDWSLRKSGVDRENLLFVLEHTGLYSDYLVRLLDGEDYSMSIVSGLEIKRSLGITRGKDDRKDAKRIALYGYRRREESLPSQIPGSTLTRLKRLMSMRKKLVGQRAGHMATLREQKRVLEEDSLLFWVQEDIINLFGWRINDLEREMDKLLQGDVELKQMLALLTGIKGIGKVTARFMIVYTVGFTSFATWRKFASYCGIAPFPHTSGTSVRGRTKVSRLANREGKALLHQCSLSAVRYNPEMRAYYERRLEIGKSKMSTLNIIRNKLVARAFAVVARGTPYVNTMRYAS

SEQ ID NO: 51526 - protein, 343 aa, unidentified
MQTITTIGLDIAKSVFQVHGIDAAGRVVIRRQLKRRFVLSFFEKLPPCLVGIEACASSHHWSRELQALGHTVRLMPPAYVKPYVKRQKNDTTDAEAICEAVTRPNMRFVPTKTIEQQSCLMLHRARHLFIRQQTAVINSIRAYLAEFGIVAPVGRRGVEHLLEVVADVDDHRLPEVARMCLAALGSQLRALKAQILEFDRRIMAWHRSNATSKRLDAIPGVGPALATALVASIADPNAFRSGRDFSAWVGLVPKQNSSGGKDKLGSISKQGDRYLRSLFTAGALAVIRYAKIHGTRHRPWLTALLARRPTKVAAIALANKLARMAWAMMARNERYKEPAALTA

SEQ ID NO: 51527 - protein, 357 aa, unidentified
MAEGTLVGIDLHARSAVAGVLDQVSGELRIERVPAASELLVEWLRLLPQPVRVGYEAGPTGYELARACARAGIGCIVAAPGKIPRAPGDRVKTDRRDAERLVRLLRLEELTAVRVPDELEEAARDLVRAREDARADLMRARHRLSKLLLRHGLVWPGSAWTLAHERWLRSLSFAPRPLLLAFDESYGAVAQAKARRDALDRAIAETAADERFAAVVARLCCLRGVSTLTAFALTVELGDWHRFRPGRLGAFLGLVPSESSSGERRRQGAITKTGNSHARRLLVEAAWHQRRPLRPSLALSGRRSGQPAAVRAQAEAAARRLHQRWWDLERRGKRRTIVAVAVARELAGHCQQLATMD

SEQ ID NO: 51528 - protein, 414 aa, unidentified
MKLTITCGIDWAEDHHDVALVDETGKLVAKQRIKDDADGFRQLLALLAEAGDCAQAPIPVAVETARGLLFACLRTTGRKVYSINPMAVARYRERHRSARAKSDHADAMTLADILRTDADVHRPLPADSELVRANAVLARAQQDTVWNRAQLNNQLRSHLKQYYPAALAAFAVRGVGLDSRETRAVLAVAPDPHTAARLTRAQLRAALRRSGRQRNIEVWAERLRTIFTGDYLHQPPLIEQAMGRQTLALVAQLDAACRAADDLAEAAAEAFATHPDAEILGSFPGIGPLTGARVLAEIGDDRTRFADARALKAYAGSAPVTIASGKSHLVRHRRVKNQRLAAAGYVWIFGALPSPQVKAEYDRRRDLGDRHTAAMRNVFNRFLGCLYHCPQTGQKFDPGKAFPAASTAPVRLAA

SEQ ID NO: 51529 - protein, 361 aa, unidentified
MSRRETAITTIAHPEPIRVTVGVDTHGEVHVACAINQLGRHLAITRVATTPRGYRALLDWARSLGEVDDWGVEGTGCYGAGLVRFLAAQGQLVWEVNRPDRQARRQRGKSDPVDAEAAARAVQAGQATAIPKAGDHLVEMVRGLRVARTTAAKARTQAANALRALVVTAPAELREQLRDLPAAQLASTAARLRPGPIVTTTAATKLALRLLGERYQALDGELARVDAELDRLTTQAAPELRQLFGVGPEIAGALLVAAGDNPLRLRSEAAFSMLCGASPIPASSGKTVRHRLNRGGNRQANTALYRIVVVRLRWHQPTRDYLARRTTQGLSKKEIIRCLKRYIAREVFAALQAPTLPAQAA

SEQ ID NO: 51530 - protein, 442 aa, unidentified
MEKVISFKEVNSAAAGIDIGSEKVFVSVDGTEVESFGTTTAEYKRCATYLQQNSIKRVAMEATGVYWIGLYTMLESSQIKVSLVNPRQTMQKKGSKTDVRDCRWIQKLFAAGLLKESFVPEGVLFEIRMLVREREDIIDMGSTYVNKMQRCLELMNIKLANVINQIQGASGMRMIKAILQGERDPQALLLLCDEKIKKNKGELVLESLEGNYNTTWLFMLEQNVELWERHQAQVKKVDARIEVLLDQLLESKGVVENVAVEKRKAVRHHKPQIDMLQERMAKLFGVDLTSISGINSYTLLRLIGETGMDMSRFPTVEQFLSWAGLAPGHHQSGKKSKWVKKAPCNKAGQIFKETAMSLENSKNIAIGAFVRRLKPKRGAAVAYKAGGRKLAAAFYHTLTQGKAYVEYGVKKYEEQQEKREMVLIKKLAKKHHVEIIEKQQVA

SEQ ID NO: 51531 - protein, 309 aa, unidentified
MKQNVVYIGIDVAKAHLDVAWAQTVRRFSNERSGHAALVRWIKQSTTPVQLICEASGGYEQALLESLEKSEVKVTLVQAVRVRQYARAAGILAKTDKIDAKVLAAFGSAIKPQPTPPLSVEQKRLRQYEAQRRHLSRILVAEENRLAQLSCAELRTLSRSLMSKIKNQIGTLDRRIGELIAQDQTLCEKAQKLTAISGVGERTAALLLAQMPELGQLNRRQAAALAGLAPFNHDSGSVRGKRAIFGGRPALRSGLYMAALSAARFNPILSSFYQRLRAKGKPHKLALTAVMRKLLLALNQTLNPLPCST

SEQ ID NO: 51532 - protein, 364 aa, unidentified
MFIERTSVGLDVHARSIAAAAIDGVTGELVKRRLAPAHDAVLEWMTRLPGPVAATYEAGPTGFGLARAIRASGVRCEVAAPSKIRRAAGERVKTDARDAVLLARLLRMDEIVSVRVPTVTQEAARDLVRAREDTRLDLMRARHRISKLLLRHGHVYYGGKAWTGAHERWLRGIRFDPAGEGGGTRAAFDADLEAVDFAVARRDRLERAIGQLAADSEFTPVVARLCCLRGVSTLTGLALAVEIGDWTRFTGAGIGAYLGLVPSEHSSGEARRQGGITKTGNPHARRLLIEAAWHHKPRYVVGATMRRRWDAAPPAARTRGHEGNQRLHHRWTRLAARNKTHTVANTAIARELAGWCWSLATLTD

SEQ ID NO: 51533 - protein, 342 aa, unidentified
MEEVVTIGLDIAKSVFQVHGVNSAGDAVLRRQLKRARMLPFFAKLPPCLIGIEACNNSHYWARELSALGHDVKLMPAQYVKPYVKRQKNDAADAEAICEAVTRPTMRFVAVKSPEQQSLMMLHRVRLMLNRQRTQISNAIRAHISEFGVVAPVGRLGVERLLEVVEDEDDYRIPVDARVCLKMLAAQLAVVKQQVLENDRRVLASARRTELGRRLMEIPGIGPLLASAFVASVADPTVFKTGRDLAAWIGLVPKQNSSGGKDRLGSITRAGNRYLRQMLVVGAMAVIRYAERHGTKRPWLVELLARRPAKVAAVALANKNARMVWALMTSGERYREPQVKAA

SEQ ID NO: 51534 - protein, 484 aa, unidentified
MRRLVGIDLGIASAHTVRVLDERGKEVCRRKCEPTVPGFTAIEAAALAGAPVGTRLEVVIEPTGPAWLPVAVFFIRRGHVVYRVSSAKAADLRRFLSRHAKSNGIDADTLARLPLVDPDGLQPLELPDTERAALDRRVRACDRLTRAGAEHKVRIKDLVRQLMPATPLTGEIGRADLAVLERFADPRVLLAAGVDQLAALITEVSHNHQGVARAHEWIVAAQAAVELYADHPAMPYADLAAEVATEVRLLRAVEAELAKHEEQREIAYRWADPGQLARTLPGLGEVGGPVLAAIIGRAARFPTGAHFKAYTGLTPRASETGETDRKGQPMSKAGSTLLRSTLIRAADHARKQDPQLARIYYIQMVERGAEHIKALCVVAAHLAERAWAVMNRRMPYVVCDTEGNPVTKAEAKAIIAERWTVPAEVRSRRRSKKHAVGKAPQQVLTGHGKSHAQGADETRRPSPGRSSKTPRPRSSTAGPAEVTA

SEQ ID NO: 51535 - protein, 413 aa, unidentified
MQVMYKRCAGLDVHKKSVVAHVRLWEGNELHEETRSFGTMWGDLWQLADWLRAEEVTHVVMESTGVYWQPIFNVLEGDFEVWVVNAKHIKHVKGRKSDVRDAEWIAQLMQYGLLAPSFIPEEPQRELRELVRYRTHLIEERTREVNRVHKALEDANIKLSSVATDIMGVSGRLMLQAIIAGKDDPAALAQLAKRRLRNKIDELERALTGRVKDSHRVLLRLHLEHIDELNAKLEQLEEEIEKLLPPFDQDDLIDRLDTIPGVDRRIAQIIIAEIGVDMSRFPSADHLTSWAGLAPGQNESAGKNRSSRTLKANRYLRPALVQAAHAAGRTRNTYLGAKYGSLSGRRGKKRAAVAIARKILVIVHHIIREGTVYKDLGADYLDQRRRETVTHYAVRRLEKLGYKVTLEPLQPAA

SEQ ID NO: 51536 - protein, 333 aa, unidentified
MNNKIYIGIDLHKRSQTWVVLGEANNAKLLSRTYLVTPDAIDRAVSDVKKFGDKLIALVEPVCGWIWVVKRLRELDMEVQISNPRKIRMIAESLQKTDENDAFILARLLKTGEVALSNECDPETRKHRSLCRQRCFLVNTRASFKTRLESIVTRDGNHTFLARAKNRTQMVETNSEVTIHQEAITSLDIILKKVEEEIKHSTHVLSPQIKRLMTIPGVGPITASTVCAEVGDFKNFKKPEQLASFAGLVPRERSSGGKQKLGGITHAGSSYLRYVLIETALRIREIPETFSLFNFYKKIKTKSGAMKARVALARKILTIMWYMMKNEKDYVAY

SEQ ID NO: 51537 - protein, 418 aa, unidentified
MTDTFTWYLGIDWGSAAHQFCLVDSRGEICDERAVPHTTIAIHAALQAICAHTGATPAAIAVGLEMSRGVLVDTLLDQGFSVFAVNPKQLDRFRDRFTAGGAKDDRRDAHVAADSLRTDPRAYRRVRPDDAAIVVLRELSRLLDDLQGEAARVTNRLREQLYRVHAPWLTFSPAANDPWLWAILGETPHPAAWPQLPRRRLAQTLQTHRIRRVTADEVLATVRQPTLTVAAGVADAVALRIASLIPQLRLLHEQHATTERQIDRVLAQLAQPDTVEGKPTEHRDAEILQSLPGVGRVVAATMLTEASGLLAARDYATLRAYTGAAPITKRSGKRLFLVRMRYACNGRLREALYHWCRTSLQHDAAARAYYDGLRARGHAHGRALRSVGDRWLRILIAMLNTKTLYDGSRFEQTQTMAT

SEQ ID NO: 51538 - protein, 347 aa, unidentified
MGKSITDLSSVTTVGLDLAKHVFQVHGIDAFGRVIVAKALRRKDVLAFFAQLPECLVGMEACGSAHHWARELIKLGHDARMMPPAYVKPYVRRQKNDAADAAGICEAVTRPSMRFTGVRTLENQAALMHHKAREMLVAQRTQLINALRGHLAEIGVIAAQGLKNARELAGVIKAEGDVTIPACVRTALAPLVRQLHALDLEITCSDRTIAAMARDDATARRLMTIPGLGPVTASAMASSVQDVSAFSGPREFAAFLGLTPRQNSSGGKERLGRVSKMGNRYLRKLLVVGAHAVLYHRKPYEDALRSWAKKLIQTKPFKLVAVALANKMARIAFAIMRGKTSYSATPA

SEQ ID NO: 51539 - protein, 374 aa, unidentified
MNKFSKYVGLDTHKESIAVAVADARGGKPRYYGEIANTPDEVRKLVKKLCPDGELLAFCYEAGPCGYEIYRQLSQLGHHCSVVAPSLIPSKPGDRVKTDRRDSEKLCRLDRAGELTPVWVPDKEQEAMRDLTRAREDMKGLERTTKQRLNAFLLRYGRGYEKGKSRWTLAHFRWLEGLKFDVAVQQIVFQEYVDAVKQGEARVAGLENEMEKALENWTLAPVVKALMALRGVKLITAMTIMAELGDITRFDSPRQLMSFLGLVPSEVSSGATRRQGGITKTGNGHVRRVLIESAWSYRFPARKTAHLQRQAEKCSSEVQAIAWKAQKRLCGRYAHLLTRGKLKVQVCTAVARELVGFIWAIACEVMNKHVVSAR

SEQ ID NO: 51540 - protein, 337 aa, unidentified
MRIIRIGLDTSKHVLQVHGVDENEQPVLRRQLRRSEVEKFFAKLAPSRIGLEACGASHHWARVLRGLGHEAVLLPPQYVKPYVKRGKNDQIDAAAICEAMSRPGMRFVPIKTAERQAALMVLRVRDLLIKQRTMLCNAIRGHAAEFGVVAAKGPARISELLQRAHGEAAGVPALAREMLSLLANHLDALEARLKALETQLVAWHRQDPVSQCLATQPGIGPIGAVSFALKVTDPKGFRSARHFAAWLGLTPKEHSTGGRRRPGRISRQGDEALRKLLVLGATARIRFAKADSASPWLLNLLARKPNKLAAIALANKMARTLWAMMVSGETYRHPQAA

SEQ ID NO: 51541 - protein, 377 aa, unidentified
MKAPSTRPAAVLGLDVGKSSHWACLIDRDGEVLASAPVRNREAELDALFASAPAGTLVVVDQFRNIGSLAVRRARAAGLGVAHLPGLAASRAAGLFAGEAKTDERDAAVIARTALGVPDSLSGVPGRGEALEAARALSSQRDHVVACATRDKNRLRAVLLESCPALEAAVDLSDRRWLELLAGFGGAWGIARSGAEGPRAEAAGEAAAASTAPPPALVEAENRQVRFLAARISEALDEAGALEAETAALLEGDETYACLLTVPGIGPRTAAQLAVSVDIGRFPDHDHLASYCGIAPRVRSSGTSVRSVRASRRGDARLKSLLIFSCNSLVRSSGRYGEYYRACRARGMGHGRALKAVARKRLRAIYAVMRDRVPYRE

SEQ ID NO: 51542 - protein, 353 aa, unidentified
MSQQNARIAVVGIDIGKNSFHIVGQDGRGEIVLRQKWSRSQVEARFANMSPCLIGMEACVGAHHLSRRLRALGHDARLMPAKYVRPYSKGQKNDFRDAEAIAEAVQRPTMKFVATKTADQLDLQALHRVRERLVSQRTGIINQIRAFLLERSIAVRQGIRFLRAELPRILAMPPDVLSPRMVRIIEDLACDWRRLDERVEGLSNEIETIARQDAGCERLMSVPGIGPIISSAMVAAIGAGDVFTKGRDFAAWLGLVPKQISTGDRTILGKVSRRGNRYLRVLFVQAAWVVLIKPKIWERHGLKPWLEAARKRLHHNVLAIALANKLARIAWSVLARGRAFEVRKINQAAPQPT

SEQ ID NO: 51543 - protein, 339 aa, unidentified
MQHFAVDLGGRKSQICVREPSGKILREREVATSSLPRILAKEPPSRVVLETCAEAFSMADAALERGHEVRVVPATLVRSLGVGARGIKTDRRDAQVLSEVSTRIDLPSVHIPSAKARDWKSLCGLRQQLVRSRTAFINTSRGWGRSRAIRIPSCTPATFPKRATKAVESLPDGLPLALQRVLDSIEDLNVRIAEADKELASLAKEDDTCKRLMTVPGVGPITAINFAAALDEISRFSSAHAVESYLGLTPGENSSSQRKQRTGITKAGPPAVRTTLIQAAWSLRRARPNDPIVVWAKNIELRRGKFVATVAVARKLAGILFALWRDGTTYESSRAATKT

SEQ ID NO: 51544 - protein, 379 aa, unidentified
MRYFGLDVHKATCEGAELLPDNTIRRFRFPNEKKEWKRFAQELDGNCKVALEATGNASMIYDILSERGAQVIVVNPIRTRAIAEARIKTDKVDAEILVRLLAADFVCACWVASKVERELRTLLHHRAALKKQVVGVKNRIHAVLARHAIKVPVSDLFGVKGRQFLRELEELPEVEKIVLTSNLKILEALEEEITAVEKELNLRAIELPGVESLLGIPGIDVLSALTILAEIGDIKRFTSAKKLASFSGLVPSVHQSGKTRYTGHITKAGRSMLRWILIQVAHTAVRQPGALRDFYLRIKKRKGRKIAIVAAARKLLTIIWAMLTKNTEYRYLKEDLRQKKIRRMYQRALPYKVDNNLLQKITSLVEEEMMMADIPHPVA

SEQ ID NO: 51545 - protein, 343 aa, unidentified
MQTITTIGLDIAKSVFQVHGVDAEGNVLIRRQLKRRYVLAFFQKLPPCLVGIEACASSHHWSRELQALGHSVRLMPPAYVKPYVKRQKNDATDAEAICEAVTRPNMRFVATKAPEQQSCLMLHRTRHLFIRQQTAVINAIRAHLSEFGIVAPIGRNGVEELLNVVANPSDKRVPELARACLSALGAQLRRLKEQVLEFDRMINAWHRSNATSKRLDEAPGIGPVLATALVATVADPKAFRSGRNFSAWIGLVPKQHSSGGKDRLGHISKQGDRYLRSLFVAGALAVIRYAKIHGTKHRPWLTALLARRPTKIAAIALANKIARMAWAMMAKGERYKEPVALAA

SEQ ID NO: 51546 - protein, 349 aa, unidentified
MVVVGADVHKRTHTFVAVDEVGRLLGDKVVLATTAGHHKALRWARETFGDELLWGIEDCRPLSARLERDLLSAGQKVVRVAPKLMAQARASARTRGKSDPIDALAVARAVLREPDLPIAAHDPVSRELKLLVDRREDLVAQRTSTINRLRLRIHELDPTQAPALGSLHRPRPRQVLADWLATQPGLLAELARDELADITRLSTVIDALSARISDRISTIAPALLALPGCGALTAAKLVAETAGVARFKSEPAFARHAGVAPIPVWSGNTAGRVRLTRSGNRQLNAALHRIAITQIRLTGSNGHTYYRKRLAAGNSTPEALRCLKRRLARVVFTRLRADHHPHPALQTAA

SEQ ID NO: 51547 - protein, 393 aa, unidentified
MVDETGGTLWSKKIDNDETAILTALGELLDLADEVRWAVDISGTASALLLALLAAHGQQAVYVPGRTVNRMAGAYRSEAKTDARDAYIIAETARQRRDFAPIEVPAQLAADLALLTAHRSDLVADRVRMINRLRDVLSGVFPALERAFDYSAHKGALVLLTGYQTLPTIRRRGLTRLTSWLANRGVRSANVVAATALEASQAQCTSLPGEDVAAQIVADLAAQVLSLDDRLKRVDRQIRETFRTRPQAEIIESLPGMGPILGAEFVVAAGDLSTYPDAGHLASAAGLVPVPRDSGRRTGNLHRPKRYSRRLRKVLYLSAQTSIIREGPNRDFYFKKRGEGCKHVQAVIALARRRASVLWAPLRQPSHRTSRAGRAMRDWKDGYSNAYLSQVQS

SEQ ID NO: 51548 - protein, 429 aa, unidentified
MSMTQNERIGQVTEQTIVIGVDIASEIHHARAFDWRGIELGKIIRFENSAEGFAELMAWIAAISARERKEHTIIGAEPTGHYWFTLAEHLRNSEVKLVLVNPHHVKKSKEMDDNHPSKNDVKDPKTIAKLVLEGRWCEPYIPQGVYAELRIAMNIRWRILREMTMAKNQVQRWLKIYFPEHKKVFGSFECVSSIAVMREAPLPCDIIALGVEGVNTVWRRKKLRAVGKKRAEMLYAAANSSVGCTDGMVAARIEHRLLLDDYETKLRQHEEIMSVVETLCEQLPEVEELLKIKGIGLVTVAGFLAETGDMRRFDSPRQIQKLAGLAITENKSGKRKGQSGISRRGRSRLRTVLFQAAISLVGKYGSSEFRELHHYYTTREKNPLKKKQSIIAVSCKLIRVFHALTIKKCAYDPVKMLADIHRNKQHKAA

SEQ ID NO: 51549 - protein, 338 aa, unidentified
MIAVGVDTHKQQHHAVALDGLGQVLGEIVIATTLAGYGQFVCWLRELGESVLVGIEGAGSYGAGLCEFLQAEEIEVFEVERPQRRERRGGKSDRIDALLAAKKVLTGEGLSTPRGSGKRLALQMLLAGYRSIISERSRLYNQLQALQVSAPYALRERIGQARNGAALANRLTGMRTRPTATQQENLTLQVLRDIANRARALDADAENYTRQIEEMVCSLAPTLLEEPGVGPICAGRLLAFNPSRFTSEAAFARANGTAPQPASSGKTVRHRLSRGGDRQINAAIYTIALSRSVHHPPSRAYIQRKITEGKTKREAMRSLKRHLSRHLYNQLTKTPLTT

SEQ ID NO: 51550 - protein, 403 aa, unidentified
MDFYVGIDVSKFKHTVAIIDQDGEIRKKSFDISNSREGFDSLLNELGLLGEKEQIKIGMEATGHYMNCLVRCLISNGYQFQIYNPSLISKFRDSESVNLAKTDNLDAMLIAKYVATHPFTSSPQLSYLIGEIRKISRAKYFLFGDKTACYNHLLRYLDEAFPEFVSFFKKNEDGTRKNMGRNLFESPTIRWLLSEYTSPQKMARMRSETGETLRRMSKGSISFNRFNQLRELAKNSIGYSTEVDEQIIRNLVTQVTIIDEEIDMLNELLEPLMEEINSPLLTIPGIGINLAAMIIGEIGDIHRFDNPEKLIKFAGLDVKVYQSGTINHKGHIRKRGSPILRYALALSVQKLRIHSPVFSEYYYSKLRQGKATNVAIIATTRKLIRVIWKMMTTNQVFENIKRD

SEQ ID NO: 51551 - protein, 327 aa, unidentified
MYILGIDVAKQTFDATVQTATGIHHYQAFPNTPEGFAQLNTWLTQLGIRQVHACMEATNIYWEALSMWLYERGHTVSVVNPARIKGYAQVQMQRNKTDKLDSAIIASFCATHKPDAWQPMSEAQRQLRDLVRYRDDLLQTRLQQQHRLRDTTNAVVRQSLEALLTVIATQLEEVQEAIDKHIKAHKELRTNVQLLTSIVGIGQITAMKLVAEFAAIDQYDSARSAAADTGVTPSHDESGTSVRRRSRMSNMGNVNLRAALYWPAITAMTHCPSFKACAARLLANNKPNNVIIGAVMRKLVHIIYGVLKHQTPYDPAKVLGPSASTSC

SEQ ID NO: 51552 - protein, 344 aa, unidentified
MKKKRLPKSLEKMNLNAAGIDIGSTEHYVAVPEDRAEKNFRVFQTFTSDLYELGNWLKECKITTVAMESTGVYWIPLFQILEEMGFEVYLVNAHHVKNVPGRKTDVKDCQWLQELHTYGLLRASFQPESVIRQLRVIMRQRDMLIRYSSSHIQHIQKTLTLMNIKLSNVISDITGETGMGIIRDIVRGEHNPEELIKNCRRGLKNSTDIIKKSLEGNYTEEHIFLLNQNLELYDFYKKKIEACEKEINKLLSSISFNNCSNISSKDGNIQKLDDFTTNDYLKKITGVDLLAVKGFNTNSLLAIISEVGLDMSRWKTVKHFTSWLGLSPNNKISGGKILHSGTKK

SEQ ID NO: 51553 - protein, 344 aa, unidentified
MTKNDIAVLGIDLGKNSCSLAAFDNTGALLMRKRMTRDAVVTFAAGLPACTIAMEACCGAHYLGRTHEAQGHTVKLMSPEYVQPYVKGQKTDDRDAEAIAEAATRPTMRFVTIKSEEQLDLQVLHRARQRMVGARTALINQLRAVLLERGIILPKGRASLKLRLGELIEHELAISDRARRLIEDLTSEWRSLDQRITAYDDELAALTRENVMARRLSTIPGIGVINATALVAAVGDASAFGKGRDLAAWLGLTPRQHSTGGKTKMLGISKRGNKYLRTQLIHGARAALPHLAAKPNRLGEWLQGMLARSHPNVVVVALAAKLARIAWAVLRHEEDFDRQALAMA

SEQ ID NO: 51554 - protein, 316 aa, unidentified
MSNIAFEQVIKVGCGADVHKETIVATIRRSDIDFETRTFSCYTSSLIELREWCQSCGVTHFAMESTGIYWKPVFNILEESDMKIILVNARHVKNVPGHKTDKKDSIWLSKLLLSGLLKGSFIPPEDIRELRDLVRYKKKVTEQRSSEKNRVIKTLEDCNIKLSSVLTNVDGAVGDRLIRDIIEGESDPEKLIKHYHGRIQKSRSEFKLALQGRLTPHHRLMLKMVKRSIEDKDKLIADLEKEIDKKVEKYNDQINRLQTIDGVGRDSAITIISEVGVDMSQFPNEKHFSSWAGMSPGSNESGGKKKVPKQSKETPT

SEQ ID NO: 51555 - protein, 358 aa, unidentified
MAINSLSRIEQFVEGYQSHSFWIGMDVHKRSYHIALLRTDGKSLTFVSPASPHFVVQLINRLAIHVSAVAYESGPTGFPLARELEAAGIPVMVVAPSRVPRPVTSGAKTDRLDCLKLASYAAKGLLHSIAIPSPEDEARRALLRRRHNVAASLRQCKQHIKSLLLFLGIDEPAEVENWQQGADESLRALPMEPSAKHTLESHLRELTFFRQELKEVESQLQQLTKQQTHRKTIACLKSVPGVGPILATTFSCELFRPERFTRAEEVASYLGLAPMVRHSGEKTPSGRLVPIGQTKLRSLLIEAAWIWRGRDRYAQELYNRFFSRMGIAQKAIAAVARKLAIILWRLCIEQRPYRPATI

SEQ ID NO: 51556 - protein, 388 aa, unidentified
MEARTVNALPPAAADHAAVRCLLAIELSKKSWVVAINTPLADKISRHTLPGCDWTGLLELIQRVRTRVARELGRPVEMISCYEAGYDGFWLHRLLEGQGVHSLVVDPASVQVDRRARRAKTDRIDAERLLRSLMAYLRGEPKVWSVVRVPSVAEEDDRRLHRERDRLIAERIQHVNRIKGLCAIHGIYDYQPMRPDRTRRLEQLRTGDGRALPPRLKAEIARELQRMELVLRMLKEIDAERNAIASARMSTHTNAKKIQDFVKLKAIGPEIATVLTGEVFYRPFNNRRELASYVGLTPSHFQSGSTCRDQGISKAGNPKARTTMIELAWLWLRHQPDSAFSVWFRERVGNLKGRIRRITIVAMARKLLIALWRYLETGVLPTGAVLKV

SEQ ID NO: 51557 - protein, 343 aa, unidentified
MELYVGMDVSLEETSICVVDGAGEIVCEGTVLSEPEAIAAFIEAKAPHAKRIGLETGPTSTWLWHELRTLGLPVICIDARHAKAALSMQINKSDRNDAVGLARIMQTGWYKEVQVKRLSCHEVRAVLNARALLVKIKRDLENQIRGLLKNLGLRIGKAGGNVFSRRVEELVADQSLLQEAVRPLLAVRESTRREIADLHRKLLTLARDAEDIRRSMTVPGIGPITALTFHATIDEPARFRRSRSVGAYVGLTPRRYASGEIDWTGRISKCGDRMLRTYLFEAAGVLLTRVPQWCKLKAWGHRLWKRIGFKKAKIAVARKLAVMLHRMWRDGTDFIWSSKEAAA

SEQ ID NO: 51558 - protein, 340 aa, unidentified
MAIVAGFDVHRAQITFDALDGETGELTRGRIAADPGAVRGWVERFGEREVHVAVEACTGWLFVCEALNEAGAVAHLAEPVETSALRGKKRRAKTDRADARWLRTLLAEGRLPEAWIPPAHVREWRTRTRLRKTLIDERTAWLQRVRATLFHHGVRGVPAELRSAAGREFLARLELPAADLERIEVALQMVDALDRQLGPIEQALRRLARRQPGCRALMDHFGIGELTAPMILCELGDASRLSASRKAVRCAGLDIGVHRSDRRARVGKLTRQGSPQLRWALFEVAQSACRPQSPDHADYLALKARGLSHVRASMTIARKFARRSFHTLRELGPSALDPVS

SEQ ID NO: 51559 - protein, 338 aa, unidentified
MKLYGAIDLHSNNAICGAIDSHDRVKLRKKSPCEPEAILDAFAPFKQDILGIAVESTFNWYWLVDGLMDAGYRVHLVNTSAVKQYEGLKYTDDNTDTFWLAHLLRLGILPTGYIYPKELRPVRDLLRKRHQLVELRTTNILSIQNLWIRNTGVRLTSNSTKKLTHEQIEKRFDDPNLVLAIDSNRLVMQALDDQIKRVEGTVLKQSKLDPRYRYLLSIDGVGKILALTIMLETGDISRFEKVGNFASYCRCVGSTKLSNGKKKGAGNTKNGNKYLSWSFVEAANFAIRFYEPARRYYQRKMAKTKRVVAIKALAHKLARASYYVMRDQVPFDPAKIYR

SEQ ID NO: 51560 - protein, 325 aa, unidentified
MTASHFADNSFIGIDVGGSSLDVAWHRGDSAHYANRPDAIAALVNRLTKQPVRRIVIEPTGGYEKALVKALREAQLPLEIVHTTRFKAYRELLGVKAKSDTSDARLLAAYAAAPDDVRGRKADYVELPEDAIREALSELASRRDQLKHMIHAETCRLGTTRLAELRQAITTHLEALKAEDKSIHKRMLELVRQRLDLKRDQKLLATIKGIGPKSTLALLACVPELGRIDNKAAAALIGVAPFVHKSGTMVAPARIHGGRAAVRRILYMAAVAASRHNPVLRPFYDRLIAKGKPAKLALIAVLRRLVVFANAVLKSGQPWKGATAA

SEQ ID NO: 51561 - protein, 370 aa, unidentified
MAHTSTLFVGLDVHKETIAVAYVAEEREAEVVSLGTIGTRQCDIDKLIRKLQAKGKQLHLVYEAGPCGYWLYRYLTKKNLKCWVVAPSQIPKKAGDRVKTDRRDAVQLARLLRSGDLTPVYVPAVADEAIRDLVRAREDSLKDGKAAKARLKAFLLRQDIRYEGRANWGPAPLRWLAKVVCPTPAQQIVFQEYVRAVSEHTERLQRLEAELQTQVQTWRWLPVVEAVQALRGVQFTAAVILIAELGDLTRFENPKQLMSYLGLTPSEHSSGERRRQGAITKTGNSHARRALIEGAWAYRYPAKVSRHLQLRLEKVPTAIQDISWKAQVRLCKRYRRLIARGKNANQVVVAIAREMAAFVWAIARTVEVTP

SEQ ID NO: 51562 - protein, 262 aa, unidentified
MVVEQVGGSNPKVPQRFAKAAFLHWAAKLKRPAREVYAVYEACGFGFALQRQLSALSIHCHVVCPQKLDEQNRRVKTDGLDAKALCLKLDRFVQGNRDALALVRVPSEKEEQLRAVHRQREQLVKVRKQLEAQGRSLLVNHGIEPVKNWWKPRTFAALQVPEWMKELLQNSQPILLALQEKIAALTLQLQNAATTNQPRGLGALTSVIIDREIGDWRRFNNRRQIASYTGLCPGEYSSGNTRLQSCVTKHGNPRLRELRWWN

SEQ ID NO: 51563 - protein, 371 aa, unidentified
MNSILYVGMDVHKENYTLCCYSFDKDDLQYKQTIAPDYKMILKYLEQVRKQYPEEIEFVCGYEAGCLGYTLYHQLNDHGVKCVILAPTTMAITNKSRIKTDKRDAGNIAKCLAFHTYSEVYVPTTEDEAVKDYIRMRDDQKKALKILKQQILALVLRHGYRFVEGRNYWTIKHVTWLKSLELGGTLQESLDEYLITYAYLTNKLERLDKRIEELADGERYREKVKKLSCLIGVKAHTALSTIVEIGDFKRFAKAEKLAAYLGLVPGEDSSGEKRILGSITKAGNCHVRKLLVESAQSYTRGAVGHKSVALKRRQSGNTPEVIAYADKANERLRKKFYRMTLKNCTNRNVAAMSIARELACFMWGLMTDNIA

SEQ ID NO: 51564 - protein, 355 aa, unidentified
MNSSPKVVKIDFTGKHLFIGIDVHKKKWVITVRTLALELRTLSIDPFPEVLEKFLERDYPGGIYHMVYEAGCFGYASYDYFQEKGIDIIVTPPNRMYRENRRVKTDKRDSRDLALFLSKGLLQAVVVPCQQVRELRQILRIRNKQRDRKKQIQQEILGMLRFLHIPLQTAGWGKSRLEELKQIRFSEEGLNFSFSLLLNEYEFYVKMLSESDRHIRQYSRQITEHWPTIERITQIKGIGSLTAFELTLHLFDRKDRFVHSGKLVHYLGLTPSEHSSGETQRKGGIGGGNPQRRALIIQIAWQAVRWDPILLDKFDRVYRHSGIKQKAIVAVARKLMVRIYTIIQKNEKYQIGVAA

SEQ ID NO: 51565 - protein, 349 aa, unidentified
MTVYVGVDLHSNNNYVGIINEANEVLFKKKLANDLTTVLSVLEPFRQDIAGVVVESTYNWYWYVDGLMEHGYTVHLANPAACVQYEGLKNVDDKRSALWLANLLRLSILPTGYIYPKEERSIRDLLRKRLQLVRHRTAHIVSIKNSITRSLGVHMRSAEVQKLREAQIRMLFPDEHLFLAINASAVIIQRLSAEIDHIEKVILTQAKLKREFQGLRTLPGIGEILALTIMLEVGDIRRFAQVGNYVSYCRCVQSIRSSNGKKKGQGNRKNGNKYLSWAYVEAAHAATRYYPVIGRYYQRKLAKTNIATAVKVIGSKLARASYYVMRDQVAYDEGKLFGGKAEPELPLAS

SEQ ID NO: 51566 - protein, 350 aa, unidentified
MLIIGCDYHPGFQQIAFVDTATGECGERRLNHTEGAEQFYRDLGARGIEARIGMEASGHARWFERLIAELGFELWVGDAAAISTKRVRKQKNDRQDAELLLTLLVENRFPRIWVASCENRDLRQLLWHRHRLVQTQTRLRNQLHAVALNEGVRRKKALWRPKGRAQLESLVLAAWASRRREDLLQLLDQVDSTIVELTAAIGKEAEKRPEVLRLMTHPGVGALTALAFVLIVGTPERFASSKQLSSYIGLVPSEESSGERRCLGHISKQGNTLLRFLLVAAAQATVRSDPEWRRKYLHLAMRRERAIAKIAMARMLAVRLYWMWRNGWDYAQLPKLGSHAGQPGNRLGLQ

SEQ ID NO: 51567 - protein, 444 aa, unidentified
MVRRKRAVLELAHPNAAGIDIGSASHFVAVPADRDDEPVREFKSFTDDLNTLADWLKACDVDIVAMESTGVYWIPLFELLESRGFTVYLVNARHVKNVSGRKSDVLDCQWLQQLMSYGLLSGAFRPKDEICALRAVSRQRDMLLAYQARHVQHMQKALAQMNVQLANVISDIVGETGQKIVRAIIAGARDGKVLSKMKNVRIRASEADIEKSLRGNWRPEHLFALGQAVALFDAYGEQLAACDRQLEVMLAALQQDDVGDPGKAKRRSRARNAPKFDVRAYLFGMCGVDLTRINGIDTTTALKVIAEVGPDMSRFKSAKHFASWLGLCPGTKISGGKVLSGASKRTANRAAQALRLAAAALRSSQSSLGAYFRRLCARLDRPKAITATAHKLARLIYTMLTKGTEYTDQGQDYFEERYRQRVMHHLAKRAEKLGFQLTPIPEAV

SEQ ID NO: 51568 - protein, 459 aa, unidentified
MTKPKPKRSRREREMSPVHAGAAAIDVGATMHVAAVGPGRDPEPVRSFGTFTADLHRLADWFKQCGIKTVAMESTGVYWIPTFEILEQRGFAVVLVNARDAKHVPGRKTDVTDAQWLQRLHEYGLLRASFHPERRVAALRDYLRQRERLLDYAASHIQHMQKALMQMNLQLHHVVSDITGASGMRIIRAVLAGERDPAALAALRDQRVKASEETVRQALVGNDREEHVFALLQAVELYDAYQAKVAACDVRIEAALKEIEAACPPPASPIPAPRHRTRQPNALAFPAREALHRILGVDLTQIHGLGPYLALKLVGECGTNLSAWPSAKHFTSWLCLAPSNKISGGKVLSARTRRSSNRAAALLRLAAVTVGRTETALGAFYRRLAGRVGKAKAVTATARKMAVLFYNTLCHGMDYTDPGASYYEDRYRRRVLTNLQRRAKSLGFVLHPVEPKPGGAGVS

SEQ ID NO: 51569 - protein, 401 aa, unidentified
MSTMRDNSTRVKRFRELKATLRTDRSRLLVGLDIAQAEHVVHLRHAHTRVVVPTLTIPNTTRGFTQLWARIQQAQRATGCRDVVCGLEPTGTYHQAVATFLEAQGADVLLLSSSVAYWNRRTQDGTWDKNDRKDAVNCADLLEQGKVLFYSQPTGPLVELRHLVKCLRRARTELAACKARWRTTLRPALAPMGAPLPSRLWVELPAVLQAWEPVTPGRPAVPKGRLPLGLAIACADLGAQVTAVQARIATLEAALTPLAERLPAYTLLRSIPGVGATVGAILLAEIGDIGWFTQFSQLRKLAGLDIVRVQSGQFAGQMRISKCGRGLLRWALYHAAVGAARTAGGRARLAALKAKRRGDRFAGFKAIVELAAKQLRVIWGVWRSGTPYDPTRAGGLRRQRR

SEQ ID NO: 51570 - protein, 356 aa, unidentified
MKKIMRVGLDLAKSVFVVYGVDKREHCQLRRTLRRAELLPFFASLEPCLVGMESGSGAHYWARELRALGHDARIMDPRLVAPYRSQGRTGKNDSNDAAAICEAVGRPKMRFVPIKDPDQQAVLLVHRVRKGLVNEQNRVANQLRGLLAEFGIVLPKGLLSLKRQWPGMRQTEAEQVPGLAWEELDALYRRLCDLQQVIVAYDRKIQDHVQRDPRAKRLTEIKGIGTITASALVATIGNGRDFKNGRQLGAWLGLVPRQYSSGGINRLGRITRRGDDYLRTLLVHGARSELMYVHRRDDQKSRWALKLREEKSWNKASVALANKHARIAWAILARESRSPAESCFVDDIGRTAARGT

SEQ ID NO: 51571 - protein, 429 aa, unidentified
MKIIYPRVCGIDVHKKFIVAVICISESVEPVYLKKRFSTFHNDLIRFRDWLIQNDCQNVCMESTGKYYIPVYNILESHISNIVVANPKWVRAVKGEKDDDKDAKWIADLFKLGIVKSSFIPQKDFRILRELTRYKYKLVNMRSSEKNRYQNALTSGNCKLDMVFTDVFGKSASNIIDLILSDNPYTDEDILSKVHKNCKASPDMILNSINGTDLTPVQKSRIELVNNHIKQLSSNIQRLDKLIDLMIEPYEDYIAFLCQIPGVSRNSAITILSEIGVDMNQFTSTRRLTSWAGLTPSSNQSAGKKKSVRISRAGVYLKPCLVEVAHAAVKDTNHPYYANKFNKISKRRGKKRAYIAIARKILVAAYHMLLTGEIWNPADLAEVETPVEQRIKYVKNNLKSDIKQLLDIGLTVEELTLMIQQNANNIATQ

SEQ ID NO: 51572 - protein, 462 aa, unidentified
MPRKGDVETAESNRRELQGLPVIRPNVAGIDLGSERHWVCAPTPEGHGREITSFGATTPELIRMAEWLKQRHVESVAMESTGIYWIAPHEVLEAQGLQVLLVDTRQLARVPGRDKKTDPIDCEWIQRLHSCGLLRSSFRPEEAVCMLRTLVRDKANLVAESGDWVRRMQKSLDQMNVRVHRAVSDIDGVTGMAILRAIAGGERDAKKLAKLRDRRCSKTEQEIAEQLSGHWREDHLFSLQQALKMYDAVQERIAAYEQEIARKLGEMERDELRDQTAPPLSNANKAKKIKQRGQEAKRQALYRMSGVDITQIDAIGVETVEVVLSEYGSDLSRFPTEKQFVSHVTLAPHVPKSGGRAVKKRKRNSASTRVAAALRMAALSLRHSQTALGAYYRKLAQRIGGDIAVFATARKLATLIYRLLRWGQPYLDEGAAAYESRYVQQRIKSLSAKAKELGYQLTAANA

SEQ ID NO: 51573 - protein, 413 aa, unidentified
MVEYAAYVGWDWGQQHHAVDVAAPREVPWQMKIEQKPEAIRAFVDQLRSRYGGAAVAVCIEQGRGAVMYALMQYEFLHLVPINPRAVARYREAVRLSGATDDPTDAWLIRELVQRHPEHFAAWSPDDAVTRELRLLSEWRRKLVDQSTATSQQLRDTLQQYFPQVLDWVGELKSPMAAAFLEKWPTLESVRRARPDTVRQFYRQAGSRSAEKIEQRVEQIRVAEPLTRDAAVMAALSVVTLCLVRQIRSLENSIADLDQRIARIWADHPDREIFAALPGAGPALGPRLAVAFGTDRAKWADASSMQCFSGVAPVVEQSGKQRWVHARWQCPTFVRQTFHEFAGQSIKQSAWARTFYDQQRARGRGHHAALRALAFRWIRVIHSCWKTRKPYDEAIYVDVLRHRGSPLVASLVA

SEQ ID NO: 51574 - protein, 428 aa, unidentified
MDELNRNRLEEFRQLRQEVRHSEEYLIVGIDIAKDQHHAFFGTATGKTLLRRLVFSNDYEGFRKLLDQAEALGVRHGLKKVVYGMEPTANYHKPLGEYLITLGRMVVLVSGVTVKRNRESLDGRWDKHDVKDSANVADLISQGKCLYYEHPSAELRGLRGLLSLKRRLKKQEQGYRVRIRNHLIAQYFPEMDSHYGRSEAEGLAIVRWCFPPSQIAELDVEPFIQRVTSRRIRMEQRRRLEALWEKAGMSIGCDVVPGVDHEARVMVEGLRQIREMIKETEQKIEELCNAFPAYRFLLTIPGFGPDVSAKVLGAIGEPDRFENGKQVLKLGGLDLSADRSGKNSDKAVPEISKRGKADLRYALYQAAFIASTKNRDFMRYYTRKLQGREKEKGIHTKMLVKLSAKMLLIAWTVMKKKEAFNPAYLKVE

SEQ ID NO: 51575 - protein, 344 aa, unidentified
MAKLNTIGVDLAKNVIQVSVVTPHGKEVSNKALSRNKFSDFLFTQKLSLVAFEACASSHHWARLAKEAGHTVRILPAISVAPFRQGHKTDQNDALAVAEAAVRPNIKEAPLKSVEQQGLQAIQRSREMLIRDRTAISNHIRGLLLEFGIAIPKGFYHLHQAVPDILEDAENGVPDMFRSTLCLMHERLIQIKHDIDQLTKQIEALVKANDACRRLLDIEGIGPISAVLLFATLGSGEAFHNGREFSAYLGLTPKQYSSGGKTNLIGISRHVANKRLRAVLIQGARAYIHRAKEHKTPKDQWLKAMIDRAGSGKAAVALANKNVRTAWAMLTHGTSYNKFEGLAA

SEQ ID NO: 51576 - protein, 322 aa, unidentified
MKLYLGIDMSKSGFTAALCSEDQVFQIVHPEVRNQIDGWQTIRDWVLKQSKENPVGVHLGVESTGGYEKPLIDWFRSNTEFVVTVLNPVRVKKFAQSELSRTKNDLNDARLIARYLAIRKPEPTLVIVPEIEELKLMARHLEHLIRKQADEKTYLDSVTEAAIRSQTQDIIQTYQKQIEKVQVQIRKHIDSHPNLRNQSGLLQSIPGIGEKTSAILLCECIPALTPKQQVAHAGLAPRHNQSGKMNGKTQLCKTGNKRLRTALYLPTLCAIRCNPVISEFYQRLIARGKPKMVAVGACMRKLVHIIVGVLKNQISFNPNYAL

SEQ ID NO: 51577 - protein, 313 aa, unidentified
MAQMAPTVGVDVSKQRLDVALYPAEARFSASNDSAGWHELCRRLRPIGARAIGIEPSGGYERGVIAALLDAGLPVRSVNPWKLRQFAKAAGWLAKNDRLDAWAIACFVATLPTRAVQHDPTRQHLAELVTARRQIVDLRQELSNQLEHLSDPELRRMQERRIRHIDADLVRLDRRIADAIAAVPALATRHDLLRSMPGVGPVLAATLLALLPELGSITNRAIGALVGVVPYDFDSGRMKGLRCIFGGRAAVRRVLFMAAQAAAMCNPVLKAFKQRLLAAGKKPKVAIVAVMRKLLTTLNAMLRDQQEWRAADA

SEQ ID NO: 51578 - protein, 350 aa, unidentified
MSMLADIADAVIGVDTHADTHALQIAAANGVPIAECTITNDENGFAEAIAFAGRHAPGPRVFFALEGSRSYGVGLLRALTAAGIPVVEVVRSARDNRRRRGKTDRIDAGLAVLAALRMDVERLAVPRNDGDREALRILLGARDELATTRTRQVNRLRALLLSGDDHDRAAAKGALTRVRLDALISPPSRRAEDCESLVRRTEIQRLARAIRQADDELTANNRQLTAIIDRVAPELLKRRGIGPVSGAQAIVSFSHPGRCRNDGAFASLAGSCPIPASSGRTTRWRLNRGGDRALNRALHTIALSRMISCPRTRDYADRRRGEGKTNAEIRRCLKRYISREIFRLLNTQMA

SEQ ID NO: 51579 - protein, 317 aa, unidentified
MPASVFVGIDVSKMQLDVAIRPGGRCSVSNDETGIAHLLDQVKAVHPTLVVLEATGGYEIPVTGALAAAQLPVVVVNPRHVRDFAKATGTLAKTDALDAQTLAHFAEVLHPAQRPLPDEQTQALAALVARRRQLVDMLTAEKNRLCQASTPIRSGLKAHITWLEQAIQDADTDLAEAIRQSPLWREKDELLRSAPGVGPVLTTTMLATVPELGTLSHKQISALVGVAPFSRDSGTLRGKRMIWGGRAQARAVLYMGTIVATRFNPVIRAFYQRLCAAGKAKKVALTACMRKLLVILNAMLKYRRPWSHVVETAEAGA

SEQ ID NO: 51580 - protein, 416 aa, unidentified
MNERGTVAAGIDTHKDTHALCVIDLVGRVVATGAYAADGEGYDRIAAAIGDPRDCVVVGVEGTGSYGAGISRRLAELGYDVVEAVRPKREKRMAGRDKNDPADAERAARDALAGKASGAPKAGGGWVEALRFRMVARDAAVSESTRAANSAHALIVTAPAPIRGELGGMKTPALMKALSRRRRARDVVESSLWESLRSLSLSWIGAKKAAAAHEEAMREILLANAPALLDIHCCGTISAARLAVTAGDNPERVSGESAFASLCGASPVEASSGKVKRHRLNRGGDRQANRALHTIARQRMKRDSRTKLYVDKRTKEGKSRREIERILVRYIAREVYGALMRPMDAACEPYRASARAAKSERLRAGAAQAQASRALGVASARISEMERGRLVDAPLLQRYRSWLESLSAGERRESPE

SEQ ID NO: 51581 - protein, 360 aa, unidentified
MTVTLGVDPHKASHTVVATDPVGRQLTQTTSRGTRTSDHQELIGWARQRWPERTWAVEDCRHVAGRLLADLLAAGEQVVLVPPRLMAQTRQASRVPGKSDPIDALAVARAALQEPKLPQARLDGPAREIKLLVGHREDLVAERTRIENRLRWHLHDLDPERAAMLPTRHLEQRRVLDELEAWLAELPDSVQVAIVRELVMRCRELSLRANELQAELSDRVARVCPRLLTLPGCGVLTAAKIIAEVAGVGRFRSEAALAMHAGAAPLECSSGAWQRHRLSRIGNRQLNAALHRIAVTQLRVHPPAQAYLTRLQATGKSKREALWVLKRRLVRVIYNLLQADLHQARPAPSTALLPAHEPAA

SEQ ID NO: 51582 - protein, 344 aa, unidentified
MKLFIGLDVSLAKTAVCIVSEHGKIVKEAEVGSDPAALTQFALEQQGEIAMIGMEAGPLSQWLHRGLTEAGLEVVLMETRQVKGALKAMPIKTDRRDAEGIARLLHLGWFRPVHCKSVSAQEIRALLGARKSIQQGVIALEMSLRGLLRNFGLKVGAISKGRFDARIQELVASNTTLVAATEPMLRARATLRHELARLERHVRSLAQDDPTCRLLMTMPAVGAVVALTFKSAVDDPARFSSSKKVGPWVGLTPSRQQSGERDVTGGITKAGDAHLRRALCQAATVMMNRGRGSWLRTWASRVAKRRGTKRAMVALARRIGVILHRMWLDGGNFRWEGAPEPIHA

SEQ ID NO: 51583 - protein, 342 aa, unidentified
MQVTTIGLDIAKNVFQVHGIDAAEKVVVRRQLRRRQVLEFFKALPPCLVGMEACATAHYWARELTKLGHQVRLMPAKDVKAYVKRNKNDAADAEAICEAVRRPTMRFVQIKSTEQQGRLMLHRARDLLMRQRTQVINAMRAHLAELGIVAAQGRDGIKELLKIIASEEDARLPVDAHASLVVLAAGLHAVQTMIRSIEKRIMVQHRSNEASQRLETIPGIGVIGATAIAATVPDPKVFGSGRGFAAWIGLVPREDSTGGKQKLGPISKRGDRYLRRILVVGACAVLRYARHKPEKYPWLTQLLARKPFKVVAVALANKMARIAWALLAKGGTYRVPALAAAA

SEQ ID NO: 51584 - protein, 413 aa, unidentified
MPARSTSSPGYFSCPRESQVEVAHLSPIGKEISGLLPVSAWKFKGMNPTTMRDQVGDFDLTGKEEMMNYNQSHAFYCGVDLHARSMFTHVLDRKGQTVFERDLAADPGEFLDAIKPFRKNLVVGCECMFAWYWLADLCEDQKIPFVLGHALAMKHIHGGKAKNDRLDAAKLAGLLRGGLFPMAYVYPRAKRQTRDLLRRRSFFVRQRAQLIAHIVNTNSQFNLPPLAKKLSYAGNRSAAIAERFADPSTRLMIASDLALIDNYDTQIAELERHLIQSAKVDDPVTFGFLRSVPGIGPILGLILLYEIDQIGRFPEVGNFLSYSRLVRCEHSSAGKVKGSGSRKIGNAHLKWAFSEAACLMKRCCPGVRSWCQRQEKKRGKRVSLAILEAKIGRAVYHLWRRQRAFDLKRFLKG

SEQ ID NO: 51585 - protein, 281 aa, unidentified
MRYSTTVGVDLAKNVIQVSVVSSRGKETLNRSLTRKKFAEFLGKQKPSLVAFESCAKAHYWARAAERHGHEARIIPAKAVAPFRQGHKTDSNDALAVAEAARRPNIKEAPIKTLEQQGLQAVLRARDRLIQECIAQSNHLRGILLEFGIAIPQGFASLLRTLPEVLEDGDNELPDFYRPGLQRMYHRMLELREDIDAMTKEVGELVKQHAVCSKLTALEGIGPIGAMSLYATLGSGAAFSKCREASAYVGLTPKQYSSGGKANIVGLSKKVGNRKLRSVLI

SEQ ID NO: 51586 - protein, 283 aa, unidentified
MVTVGIDPHKQTHTAVIIDDTGRRVGQALRVPDDPASVAALLSWAGRHAAGQDVVWAVEDGRGLARRLATALVAAGQMVVWVPVRLMVAERHHTGPRGKSDPLDALAVAKAAHNPDNARYLTRHRGDEPGQEVAPLVDERDALVAERTRLINQMRWRLHELAPGLEPVSLITLKAVREVAARLATFADSTLRRVLLANCERLQRLTADINALTRELSEHTRRLSPNLLSVPGVGPVVAATILAELGDPTRVRNGAALARLAGTAPIPVWSSDTERHRLDRGGN

SEQ ID NO: 51587 - protein, 347 aa, unidentified
MVTFGCDSHKRTHTLVVVDQNGCQLGERRVVATASGHLEALDWARQWSERQWALENCRHLSRMLECQLLSAGEVVVQVSPKLMGSVRRSGRELGKSDPIDALAVARAALREPHLPVAQLEGREREVKLLVDHREDLVGERTRIQNRLLWYLHELEPGYQVVASGLLRSVVLAEVSRRLERHTGVVAEIACELVVRLAELTQSVKRLQQRLESLTRELAPSLLTLPGCAALSAAKLLAETADVSRFRSSAAFAMHNGTAPIPVWSGNHNRHRLNRGGNRQLNVALHRIAITQIRLGGPASAYVARRLTMGNTKTEAIRALRRQISDEVYRRLRQDQLKRSTAQVAVAA

SEQ ID NO: 51588 - protein, 428 aa, unidentified
MTNRDTIPPGAVLVALDIAKLRNEVLIEMPGQQRRRRLSVLNNRTEHDRLIDILKAFDAPVVCAFEATGNYHRPIAWRFMEAGFDTRLVSSMALARTREALHNGWDKNDPRDAQVILHMLRVGASQTYHDPMKTGINDVQELSKTHEAIANAKTEIQHRILTHYLPLYFPEVERFRGNTRSDWFFAFLEAFPTPGSIVALSREQFISDAWQVVGRKVSKERLLSDIYETARTSIGLPLPLNSPAVRMFRMVIAEARGLIRQRDEIEELADTLLHGSADYQALRQIPGIGPIIALTIIAEAGDLRRFRHHRQFLKFCGLDLSTQQSGQYRGQTRLSKFGNARLRRCLWIAGQVAIRQRENGFRDKFERYIARDRDSPDLRRKALTAITAKMARVVHAIIKSGSDYRPFFEGRVPGGRTPLRRAVRAPVG

SEQ ID NO: 51589 - protein, 413 aa, unidentified
MDVLHSRCCGLDVHKSSISACILLRESGRVQKHQRRFGAMTQELQELAEWLRQFGVSQVAMESSGVYWKPVWNILEGQFTVVLANAQHIKNVPGRKTDQKDAEWIAQLLQYGLLRPSYVPCEIIRDLRDLTRMRTSLSQEASRISSRIQKVLEDANVKLGSVATNVLGKSGRAMLEDIISGEDDPEHLACLALGHLRVKIPQLRLALEGKIRSHHRFLLRHLLDQVQFVEHEIALLDERLEQIAQQRPELAQAVARWDTIPGIDRVAAWALLAEIGDNMAQFPTAEHLASWAALCPGNHESAGKRLRGTTRQGSPWLCRMACQCAWAAARTKNTYLSLQFRRLAARRGKKRAIIAVAHTIIVIGYHLQKNQSNYEDLGGNYFDRIHSDGLKRYLVKRLQQLGHKVTLEPMEAA

SEQ ID NO: 51590 - protein, 384 aa, unidentified
MRAIEQTGTAQNDNTVFVSMELSKASWLLAAQASPSGKTSSHKLDGGDADGLLALLRRLQAREQRATGEEVQIILGYEAGYAGFWLQRRLTAARITCWVMDPGSLQVNRRARRAKTDRLDAAMLLRALMAWCRGDRAACHMVQVPSVEREDARRTHRERQRLINERVQHVNRVKGLLATQGIYTFLPLRRDRWARLQELRTGDGLELPHRLRREIEREFKRLELVLEHIAASEAERDATVAEPAADDADAAKVTLLSKLGGIGTELATVLVREALYRSFANRREVAAYAGLTPSPYASGERQRDQGISKAGNPLLRKSMIELAWLWLRYQPDSKLARWFVDRVGVIRGRVRKITAVALARKLLVALWKYVTTGLVPEGARLKTV

SEQ ID NO: 51591 - protein, 391 aa, unidentified
MIFVGIDVAKDTHYAAVSDDSGAVLVKPFAFQNNAEGFCLLLKKLSEFDRSKLLIGLESTGIYSENLICFLYESGFRLAVINPIQTATLRKTAIRKTKTDKVDTMLIIKSLMVNSYRLYSQRDADFLKLKTLCRFRQNLKKSKARLKIQLAGYVNLVFPEFGKFFKSGIHIAASYALLKKYSSPKEIAALRTSTLCTLLSKASHGRFGKDTAEALKSLALSSVGVKNPYISIQIAQTIAQIELLEQQIKDLNSAIEEAMESLNSVLMTVPGIGAVNAACILGEIGDIKRFSKPCKLLAYAGLDPTVRQSGQFTAKSTRMSKRGSALLRFALINSAWQLTLNDTTFKAYYDLKRSQGLNHYGALGHVAHKLTRVIFKLLTSDTPFNPAKLVA

SEQ ID NO: 51592 - protein, 326 aa, unidentified
MMHPAEAFKPAPTDALITIGIDVSKDHLDAARHPSGDSLRVPNTRKGHTELLRWLGNSGSIARVVFEPTGPYHRMLEERLASVGLQIVKVNPRQARRFAEAAGRLAKTDRIDALMLARYGALLEPVTRPVRSDVQNQLAELVAARRGLMRDRTATLNRLKTLTIELLKRHARHRLRQIEAQVASLDAAIDAIVLGDPVLCRRRDVLASIPGLGLITAHTLLADMPELGAMDEGQAASLAGLAPITRQSGIWRGRSSIQGGRASLRQALYMPAIVAMRFNPDLKRVCDRLIAQRKHTKIAITAIMRKIVVLANALLRDNRLWTPKTS

SEQ ID NO: 51593 - protein, 352 aa, unidentified
MKFLGIDYHKKRSFATLINQNGLIVGRFTIRHNNIDEDLKKIKTITQGDKTKTVLESTMNWGFMYDKLWEYFGHSMLANPYKMKIIAESTNKNDKVDSYVLAQFLRMNYIPQSYAPSPQVRLIKDLIRHRISLVQERVRAINRIHLVLLKEGIFDNKVLDEDRSWSVMSAAGRKIIERLVQGWTTHHQTIYKNNMDLIDIYTEKIEDIEQIFYKNWQSTDPIIKRLMTIPGIGLITAISIRYEVDDISRFPNSRRFVRYCGLCPTTSSSDERIYHGKIVKSVNKYLQSAFVESTLGAIRGSAQAKAYYYKHKQRTNKSNIARIILAKRICEIVYQVWKYNCCYEPRFFNCVS

SEQ ID NO: 51594 - protein, 424 aa, unidentified
MRVIYERCAGLDVHKKIVVACRRDGKKQESKRFGTTTPELLELVDWLSQWECTHVAMESTGEYWKPIYNLLEGIFQVFLVNAKHVKQVPGRVTDMGSARWLAELMQHGLLKPSFIPPAPQRDLRDLTRYRTKLVQERARIANRIQKVLEGANIKLSSVISDTFGVSGRAMLETIVGGQADPGTMAELAKGRMRSKLPELEKALTGLVREHHRFLLTNQLAHMDFLDEQIATMGARIEGQIQEMSKSQDKPFCDPDGATPLKAQDAVELLDTIPGVDTHTAEVIVSELGVDMSRFPTAKHAASWAGLSPGNHESAGKRYSGRTTKGNRALRSGLNQAAWAASRTKDTYLSAQYHRLASRRGKKRAIVAVAHSILVISYHILKRHQPYHELGANYFDERKRESVAQRLTERLEKLGYQVNLEPVVA

SEQ ID NO: 51595 - protein, 333 aa, unidentified
MRKKWFIGVDISKKTLDVVIYDSKKKHSDSANYLKVSNDEEGFNRMVSWFQGKRMSLSGMVIGMESTGIYGFDLRVFLESKGIDHCVYMPLALKRSLGLTRGKNDKLDAERIAYYTWLHREELSCSKLSGSAVLRLQELSNERKTLVKQQAVYKAYLTEMDGRERTASCVRAEEMLAFLKAQTEAVEKEMEEVISRDSSLSRNYRLLLSIKGIGSVNAIHTIIHTNNFEAFETARQFACYLGIAPFGHTSGTTVKGKPKVLRMGPKQLKADLSQAANSAIVWDKELKAYYERKRKEGKAYGVVLNAVKFKLVCRMFAVVKRGTPFVELMNYKS

SEQ ID NO: 51596 - protein, 342 aa, unidentified
MSTQFLGVDMAKDTFDAALWVNDQAQWLGTFPNTLAGFQDLQTRIPPQTAETGETIHLIVEPTGGYELALMNFACEQRWQISLPNPKQVRDWAKGQGRRAKTDQQDAMLLAKYGAKEQPRLWSPLPEAVATLDDLLRRRDDLELMLRQERNRQSAFDSRPVVSTSVQASVEQVIRALEEALQSIERTIKQHMHSHPDLDRAAKLLLSVPGIGQKTVLPILVVMIRWHTWTDGQGAAKGLVAYVGLDPQPHESGTSVRKRATISRMGNRVVRRKLFMAALGGVRGNNALQHFYRRLVGRGKPKMVALVAAARKLLVWAWAVFRTQTAFDPARHEAQPLLKCLT

SEQ ID NO: 51597 - protein, 346 aa, unidentified
MEHYVGLDVSLKLTAICIVDRTGKIEREGVVSSDPEAIAEFIKSHALHVERIGLETGPTVTWLWTELSKLGLPVICIDARHAKAALKMQINKTDRNDAVGIARIMQCGWYREVRVKDLDSHAIKALLVSRALLVKIKRDLENQIRGLLKNLGLIIGRAKMNVFSLRATQLTEGRPELATAVEPLLKARETIEQQIDRLDRKVMRMARNNSQARRLMTAPGVGPVTALCYLATIDDPTRFKRSSSVGAYIGLTTRRYASGEIDWTGRISKCGDKMLRSYLYEAANVLLTRVAKWSALKAWGIRLAKRSGLRKAKVAVARKLAVILHRMWIEGTEFNWSSKEATNQPA

SEQ ID NO: 51598 - protein, 313 aa, unidentified
MDNVVVAGIDVAKSKADICILPDGIVAAFSLDEEGVLQLVDTLKASRVNLAVMEATGGYEARLAAAIFHADIPVAVVNPRQVRNYARAIGRAAKTDAIDAEVIALFALAVKPQPRALPDAMAAQIRELVDRRRQLMKTRTAEENRLQQASNAKVIGSIKRTIRHLEKELAAIDSDIDKHIKDSPLWLEKKELLQSVKGIGDATTRILIADLPELGKLSRYQIAALVGVAPMNRDSGKYKGYRKIIGGRSHVRHALYMATLSAIRCNPKIKTFYRHLKSNGKKGKVAMVACMRKLLVTINAMVRDNQNWSPENA

SEQ ID NO: 51599 - protein, 417 aa, unidentified
MKSASSSLPDQPVNGVTAGLDWACEDHAVAVVDDRGQEIARRTVAHSAAGLRDLAGMLDLYRVEEVAIERPDGPVVEALLEAEITVVVISPNQVKSLRGRYGSAGHKDDRFDAFVLADTLRTDRARLVPLVRDSEATIALRQMCRARKDLVGHRVAATNQLRAHLHNVLPGVVGLFADLDSAISLAFLARFDCQDRVDWLSAKRLAAWLASVGYSGRVDPAELYARLVAAPRGATGQYGAAQTHTTKALLAVLTTLSEQIKALTVQISRQLALHADQQIFTSLPRSGRVRAARLLAEIGDCRGRFPSPDSLACLAGVAPSTRQSGKSRAVNFRWACDKNLRDAVCDFAGDSRHTNPWAADLYQRARDRGHDHPHAVRILARAWLYVIWHCWQNSSAYDPNQHRALQRFLNQDHRAAA

SEQ ID NO: 51600 - protein, 410 aa, unidentified
MKIAGIDVHKKVLMVVVVDASAPEEKPARRRFVTLPSELQRFRIWLQEQGVEEAVMESTAQYWRSVWLELEPHMRLHLAQAFSNRAPRGRKHDFKDAERLVRRLIADELILSFVPDGEQRIWRSLTRMKVQLTRDRVRLQNQMECLLEEMRIKLSIVVSNLLGASGLRILQALAQGETDPKKLAELGDERLQCTEEQLVDALTGTVQPMHRGMLSLQLQRLQLIDQQMAELNRMIAQAMQSHQDAVIRLAEVPGLGVDSAQQIIAEVGAQARTFSSAAELTSWVGTCPGKEESAEQNHSSRSAKGNKYLRRVLNQAAHAAVAKKGSHFQVVFRRLLPRLGYKSAIWAVAHRLCRVVWKILHEGVRFIEQGREVGPREKKQRAQMLARALRKLGYEVTITPLNQLAAKPAV

SEQ ID NO: 51601 - protein, 342 aa, unidentified
MKITTIGIDLAKNVFQVHGVDGHGNAVLRKKLDRVKMAEFFIKLPPCLIGMEACGSAHYWGRKLTGMGHTVKLMAPQFVKPYVKTNKNDIADAEAICEAVSRPNMRFVPIKTDEQQAVLSLHRVRQSFIKVRTAQANQIRGLLSEFGTVIPQGIANITKHLPEMMEKSDLPSRFRDLLQRLCDHLKDIDKQVDEMDEKIQQWHRSSETSRKLAEIPGIGPITATALVASIGNAKNFVNGRQLAAWLGLVPRQHSSGGKSVLLGISKRGDTYLRTLLIHGARAVIRFAENKPSTTWLNKLLSRRNKNVAAVALANKNARVVWALLTREEQRFRSDYCPALAGA

SEQ ID NO: 51602 - protein, 330 aa, unidentified
MKKWNVILGVDVSKLTLDICWAEQNQHIKIDNCSQGFNVFKMWCKTLDIDLKETLMIMEFTGGYEYRFIQFCESKSISYLRVPGLEIKQSMGMVRGKNDQDDSYRIGRYGEQRNNELEASKPLDNNILALKQLMAFRKRLVRERAGLESTLKEREHMYGTKNKDTITRIIRSRIKTNTQHIEQVEQEITEVIKSNESMMLNYRIITSIKGIGCVNGWMTIAYTENFTSFTDARTYGVYVGVIPFGHTSGTSIKRRSKVSYLAHKELKQELSQAARSAMTHDPEIRAYAERKLKNKDYKLVQNNVKFKLILRMFSLVKRGERYVENYNRAA

SEQ ID NO: 51603 - protein, 406 aa, unidentified
MNMNAVGIDVSKRKSTVAILRPGGEIVKKPFDVPHLSSDFRSLTRLIQDLDGETRIVMECTGHYYEPIARRLSQAGFFVSAVNPHIIRNFQGHDNPLRKVKTDKADSVKIARYTLDSWGNLKQYTLMDELRSQLKTMNRQFSFYTKHKTAMKNNLIGLIDQTYPGANTYFNSPVREDGCQKWVDFVDTYWHVDCVRKMSLTAFINHYQKWCHRRRYIFSKSKAEEIYGKAKELVPVLPKDNFTKRIIKQAIAQLNTTSKTVEELRNLMNETASKLPEYPVVMAMEGVGPSLGPQLMAEIGDVMRFTHKGAITAFAGVDPGVNASGEYSQKSVHASKHGSPVLRKTLFQIMEVLIKNKPDDAVYLFMDKKRAQGKPYYVYMTAGANKFLRIYHGRVKEYLLNLSELN

SEQ ID NO: 51604 - protein, 324 aa, unidentified
MIDGILGIDVSKNTLDASISSCNKVRARSFANSSDGWRHLLDWLITQKIRRVHACLESTGRYSLGIARALYEAGHVVSIVNPAQIRDFARTKLGRNKTDGVDASHIREYCELFKPQPWTPPSEAHRRLGELQAIRAGIVAGLTEWKNRMNSGMVDAVAQSLADVTILHFTSQLGAVDEAIAQTIDNDPSLRRKRDLLLSISGVGETLAGVVLAELPGPDMLRSSAEVVAYAGLNPRQHQSGTSIDRVTRISKIGNAVLRAALYMPAMSAMRFNPAIVALVTRLKSRGRLNPKQIVVAAMRKLLVLCFGVLKTGKPFDPAIAMGC

SEQ ID NO: 51605 - protein, 359 aa, unidentified
MEVVYQRCCGIDVHKKMIVACFRDGRKKEIREFGTLTSELRELTSWLLDSDCEMIAMESTASYWKPLYNLFELSGLPAMVVNAHHMKSLPGRKTDMKDAEWIADLLQHGLLKASFIPDREQRELREVSRYRKSLVEERSRELNRLQKMLEGANIKFGSKPTHINGKSGRKYLDLLLSGEEISLETVDDIRNHQMHSSAEEILSALDGIISPLQRKLIRNVLDHIDDMTKRIKDIDTIIKDYIKDYEDAINALEEIPGVGKIGAQTIISEIGKDMSRFPSASHLCSWAGVAPGNNESAGKRRSGRTTKGNPTLKTTLIQCAHGTSKHKDTFFYAQFQRIKIRRGSKIAAMARPPKILCKS

SEQ ID NO: 51606 - protein, 323 aa, unidentified
MSTKATKKRRSFIGIDVSKKLLEVGVHQSDYHFRCPNDPKNFPALITELISLRPARILLEATGGLERALLQALHAAGLPVVVVNPRQVRDFAKALGLLAKTDRLDARVLAHFAAATQPAIRPVKAQQETELDALMGRRTQLSDMLVQEKNRRGSAATKDTRDDIEEHIEWLEERIQELDEKLKEQLKCSAVWQQKDQILQSVKGIGFVTSMALLADCPELGQLNRHQIAKLVGVAPLNRDSGQQRGARHIWGGRAQVRGKLYMATMAAIRFNPVLKSFYERLIAKHKPKKVAMVACMRKLLTIINVLIRENKLWNVDAQQLSA

SEQ ID NO: 51607 - protein, 338 aa, unidentified
MELYGGIDLHSNNSVFAISNEEGAIVSRKKLPNEPEVILNYLRPFKAKLAGLVVESTFNWYWLVDMLIDNNYCVHLANTTAIQQYSGLKHADDNSDAAWLAEMLRLDILPTGYIYPKDERALRDLMRKRMQLVQQSTKNLLSIQGAYMRHLSYKLSNNKIKQLTLLKIQQDFESDNIVLATQTNLSVMSCLKAQINTIEHAIVKQTKLRTEFQELTNIDGIGMILALTIMLETGSIDRFEKVGNYASYCRCVSGARFSNGKKKGSTNSKNGNKYLTWAFVEAANFAIRYNSTVKSYYQKKLAQTNKTVAIKTVAHKLSRACFYVLRDQVPFEVRRAFA

SEQ ID NO: 51608 - protein, 319 aa, unidentified
MMKLKYSICCGLDVHKNVIVATIVTTNKDGISEYLQKSFSTINSDIQRFHNWLIENNCYHVCMESTGKYWIPIFNYLENDIDVCLTHPKYVKAIKGKKTDKKDSKWIADLYKFDLVRCSFIPPKDFRQLRELSRYRFKLVCMKSSEKNRIQNCMTISNVGIASVLSDPFGKTATEIISYLLEHTADSMDEKAVRKLIKKGAKSKSDEIIEAIKGYTIETDQAKKLELARGHLEYLDDMITQTEVELYVRIKPYYEFVEFVSTMPGMTELSSTIVLAETGVDMDIFDDAKHLCSWCGLSPANNKSAGKQKSVRCTGQAFL

SEQ ID NO: 51609 - protein, 346 aa, unidentified
MRFYTQQHRHYCGIDLHARSMYVCILDQAGEVRLHKNLRATPEAFLKAITPYHEELVVAVECMFTWYWLADLCAAEGIRFLGHALYMKAIHGGKAKNDRIDAHKIAVLLRGGMLPEAYVYPAAMRATRDLLRRRLHFTRKRAELLTHIENTNSQYNLPAFPKKLTYATNRTGVVDRFADASVQQTIAVDLELIAHYEELLRELEHFILRTATGHDANTLYRLRSVPGIGKILSLVILYEIHDITRFARPQELASYARLVKCAKESAGKVRGHGGRKIGNAHLKWAFSEAAVGFLRKNPEGKAYYERLVHKHGKGKALTVLAHKLARAVYHMWKHDQVFDQKKFLAT

SEQ ID NO: 51610 - protein, 440 aa, unidentified
MNMSKTYRSVPVKRVEVEKVLAAHAGEFVEAGFDIGKRWVWTTIRFRDGTCLRPWRAGNPLEIASLVDLLKQAGERVKLRVAMESSGTYGDPLRQALSDAGLDVHRVSSKASHDWAEAFDGVPSQHDGKDAGVVAELCAMGKSVAWPLQKPTELEQELAYWVDQLDAAHRVQQVWIGRLESRLARHWPELGQERKLSAPTILKALRHWGSPAALGADPQAAATLSRFSHRLLDPVGIDRLVQEAKQSVGVRMNAWDQRRVREDAEGALLAHRQKTAAKRRLHELARQHELIPALGEVVGIPTACVLWVCVGDPRHYGSGGAYRKAMGLNLAERSSGMYQGQLRISKRGKSLPRRFLYFAALRYVSKQPVKQWYLEKKRRDGDEGMRGVVAVMRKLPLALHAAARGEAFDAARLFKSIVNEVNNSNMRQQVQGGDARPKRQ

SEQ ID NO: 51611 - protein, 343 aa, unidentified
MDLGDRWSFYCVLDEAGKIILEQKVATTPEAMKQTFAKIPRSLIALEAGTHSPWVSRLLTELGYEVIVAHAQKVELITQSNRKDDRHDARTLARLARIDPALLGPVRHRRAQAQIHLTVIRARAELVSARTALVNAARGLVKSYGERLPKCGTYQVNEKLAEGGSAELRDVLAPLLREVESLSERIKEYDQRMEKIAKEVYPEVFLLQQVKGVGTQIALTYILTIEDPYRFPKSRQVGCFLGLRPGRRNSGESAPQKKISKEGDRYLRTMMVQGAHYILGPFGEDSDLRRWGLKLAERGGKNAKKRAVVAVARKLAVLLHRLWVSGAVYEPLRNSQKAMRAVA

SEQ ID NO: 51612 - protein, 333 aa, unidentified
MNHVGIDVGCKELVMAVSIKGQFKKTKTFENTGSGHKLIIKQLSKLKENAQVCIEATGIYHFDLAVALSRAKGIELMVVNPQVSHSFAKVLMKRSKTDAIDAEILATYCERMPFEPWKCPADELISLRAISRRIAALNKLKAQTKNQRHALTSTNGTPDIVIAHTDDLIIILENQIQALRDSALSLIAQEDELAEAFHLITSIKGIADASGIQILSELMLLPRDMNQKQWVAHAGLDPRHFESGSSVSKKPRISKAGNKYIRQALYMPALVATRHEPHIKAYYTHLIDDNGLKKVQAVCAVMRKLLHAIHGMLKMKQTFDGSRFYTFPNKEQT

SEQ ID NO: 51613 - protein, 403 aa, unidentified
MAAVSGIDWAAEWHDVDIADEHGTRLLAARFAHDERGICALIAALLDHRVCRVAIERPDGLLVARLLAAGITVLAIHPNQLAAARDRFRAAPGKSDPFDGFVLRELCRTDSHRFPALAPCSDETLALRALVRAREDLVGARVALANQLRAQLDAAWPGATRIFRDTDSPIALAFLARYPSHADARGLGPKRLDAFLARHGYSGRKTPEQLLGRLRSAPTPAIGEHESDARRSAVAGLVSALESLVAQISQLTGEIRGAIGRHPDGPIFLSFFRDPKSVICAAGLLAEIGDNRARYPTPDTLAADAGHAPVTKKSGKHHAVGFRWACDKRLRNHVGVLADATRRWHPWAHDVYQRASDRGADHPHATRILGRAWTRVLWKCWQDRVPYDPTQHRALTRYLATRG

SEQ ID NO: 51614 - protein, 343 aa, unidentified
MEAYAGKQFVGIDLHRRRTVIVRTTEGGEVLETVRIVNDVERLASVMARAGERPEVVLEATYGWYWAVDALQAGGASVHLAHPLGVKAFEYRRVKNDVRDATDLADLLRMGRLPEAWIAPPATRELRELVRHRAKLVGLRSHCKAEVHAVLAKCGVQVLMSDLFGVAGTALLDGLDLPAPYAARIASLRRLMDDLDFEVDLFAGMVRGRMAHEPGYTAVQVIPGIGPTLAAVFVAEIGDVTRFASAPKLTCWAGLTPKHHESDTHVHRGRITKQGSRLVRWAAIESVKRIPAASPAGLLRERVADRRGRNIGSVAAARRQLEFVFYALRDGHVRALEHRPRVA

SEQ ID NO: 51615 - protein, 349 aa, unidentified
MKKITVIGIDIAKNVFQLHAVGSEGTVVLRRQLRRGQVLGFFAKLDPCLIGLEACATSHYWAREFQELGHDVRLIPPIYVKPYVKRQKNDAADAEAICEAVQRPTMRFVAVKSAEQQGVLMLHRARELLVGQRTALINALRGHFAEFGIVVAQGPQHVGALVQRVMEEQDASLPHPVRTAFAPVVAALLNLGGEIGKLDKAILASHRRDQTSVNLATIPGIGPLIASCLSASVPDARRFACGREFAAYLGLVPKQNSTGGKPRLGRISKMGNRHLRTLLVVGAHAALYRIKSGKTQSRLADWARVLLAKKPFKLVAVALANKMARTAWAIMAKGTSYNPGFGRPLEAAA

SEQ ID NO: 51616 - protein, 320 aa, unidentified
MSDRLAVGIDADSKSLVVARHGTKGSTRIPNSASAIGKWLSGLPTRTRIGVEATNRYHELVAQSAQKAGHAVFVLNPRDIKHYAKGVACRGKTDSGDAQVIARYIAKEADNLHEHVARSPAQERLHVLLQQRDSLVRSKTKLNLSLGSGASESALFGGVFSSLKEAIALLDQEIQRLCRSGEQHDLYRRIMTIPGIGPTVAAFITHHITRWPLASSDAWIACTGLDPRPNESGARIGRRRLSKRGSAGLRQILYMAAMGLTRSKGGKPLYNAIRERGHSSTATFNILARKLAKIAWGVFKSGRDFDPAMLKVGQACFQQA

SEQ ID NO: 51617 - protein, 321 aa, unidentified
MPDDKPATERVFVGVDVSKDKLDVCLLPGGEHRVFKNDAGGHGKLVAWLASGEEHLVVIEATGGYERPAMFALQEAGVPVALVNPRQVRKFAEGIGRLAKTDKLDAAVLAQFGRVVAPPLAEKTSEKQRELAALVVRRRQLLAMQVAEKNRLGQATDKFVQKNLQQSLKALDRQIHSIEKRIAELLDSDDQWKAKLELLMSTPGIGPTIAATLVAELPELGTLNREKIAALAGVAPFNGDSGKSEGKRRIRWGRGEVRSALYMGVLAARRWNPAIKAFAARLTKAGKSFKQIQIACARKLLVILNTMVKTNTHWENKLEKN

SEQ ID NO: 51618 - protein, 393 aa, unidentified
MVCVGIDVAKDKHDCVILNSEGKVLAGVFTIPNNADGFATLLQKIRSCTSSDDKIKVGLEATGHYSYNILGFLLNQGLPTFVINPLHANLFRKSMSLRKTKTDRVDAKTIAAMLMSNVDLKPYTDTAYHNEELKSLTRYRFVKVSERARLKQSVSRLVTILFPELEKLLPKLHLSSVHALLIEFPGAKQVAEAHLTHLKALLKDASKGRYGRDMATEIRDAARRSIGSVMPAKSLELRHTIRLIRELDAEIKDIEAAIEAIMEELQSPITTIPGMGFRMAAMILAEIGDFSFFDSPDKILAYAGMSPSTYQSGHLSLAGTYSHMEKRGSRYLRYALYNATKYVCHWDPGFAAYLAKKQAEGKHYNVALSHAAKKLVRLIYALEKSRQPYRRAA

SEQ ID NO: 51619 - protein, 410 aa, unidentified
MKKLDKDTALITIDGGKFSHWSYISCENGAELPVFEFGNNRKGLDKLYSEITGFMRSQELKRFTVGYESTGSYLRPLISFLKKKGAHLIQINPKHTKRVKEITDNSPNKTDKKDPIVIAQIIRLGNGLSTLIPEGKYADLRNLIHERERCIKDRTRCLGRIEALLAEYFPEFLLVMKGVTSKTSAYLLRKYTTPSRICELSEDKLTDILYTNSRYQLGRQRAKDLLYVAKQTIGISDGIAALSYRVKLQIGQLDLISGQLDQIEKKIISICKSVSYSKYINSIKGIGWISTAYILGELGNLSNFKKASQIIKIAGLNLYEISSGQHRGRRRITKIGRGLLRKILYYTAMRTVKTNGVFHAYYSQCLSRGKLKKTSLVIVMKKIIHLLFALVREERFYSKEYLSLKAKQAA

SEQ ID NO: 51620 - protein, 349 aa, unidentified
MKKLSKVTKQMGETIGIDLGDKVSRYCIVDRDGDVMEEGSFRNQSSSIDTHFAGEPRRIALEAGAQSAWISRELKRLGHEVIVANPRELKWITSSDTKNDPADARKLALLARADVRLLAPVEHRTAEQQAELAVIRARDAILRARTLLINSARSLAKGFGLRLPKSITNTFGGRAIEMLPEFLRTTLAGLVEQIDALSQAITGYDQQIAGLAGKHPELARMESIPGVGRLTAMTFVLTLGRAERFAHSRDVAGFLGLRPKQRQSGARDPQLGISKSGDPYMRKLLVQCAHHILGHYGKDSALRQWGLAKSEGGKKATLRAIVAVARKLSVLLHRLWVSGEFYKPFPKMV

SEQ ID NO: 51621 - protein, 341 aa, unidentified
MNTSKTLVGIDVAKRVFQLHWLDAETGKTVSVQLKRERFLEHFADRAPCLIGMEACGGAQHWARQRVAMGHEVKLMPAKVVRRFVGGNKSDVHDARAIWTAVQQPDVRAVALKTEGQQAILALHRMRQQLVKFRTAQINGLRGLLAEYGEVMPRGKGGIKAGIAEALQRLADRLPAMVIDTLRDQWGRVGQLDAQIGEMERRLRAWQQADRDCQRLARIPGVGLLIATAAVAMMGDPRAFRSGREFAAWLGLVPRQTGTGGRVRLLGISKRGDTYPRTLPIHGARSALTHAKEPDPWIAALRQRRPLNVAVVALANKMARTIWALLAHERTYQKGFASRAA

SEQ ID NO: 51622 - protein, 417 aa, unidentified
MSEYAAFVGFDWADKKHDICLVDAATGKKEPSVIKHTPQAIEEWATSLRSRFGGEKIAVCLEQSRGPLIFALLKYDFLVLYPVNPSTLAKYREAFSPSRAKDDPQDAEYAAELVIDHRERLKAWQPDDEKTRTLQYLVEHRRRVVSDRTRASNRMTALLKLYFPQVLEWFDDIRTDLVCDFLLQWPTLEAVKKLRRTTLEKFFRAHNSVRGRANEERFAAIKEAVPLTQDRAVIDSSVPMIKALASQMKTAIAAIREFDQKIEELCAGHEDFHLFASLPGSGSVYSSRLLAAFGTDRERYESADEVARYSGIAPVIERSGQSCRIRWRYFCPKFLRQSFVEYAGESIKHSFWARAYYAQQKAKGKSRQAAVRALAFKWIRIIYRCWHTRTEYNEVKYLESLRKKGSSLLSYAAQKAA

SEQ ID NO: 51623 - protein, 373 aa, unidentified
MNYSTVYVGMDVHKESFSLCCYTNEMEKAEYPQKADAHYSKIINYIEAMRFHYGNDALFICGYEAGCLGYTLYHQLTDHGLKCVILAPTTMLQQRGKKKVKTDKRDAALIARCLAHNDYSPVHIPTDQDEQTKEYIRMRDDHKLALKKVKQQILSFCLRHNYCYDGTKNHWTEAHLKWLEALKPEGLYQEILQEYLLTHRTLVDKIERLGKRIDELSSGKSYKENVQKLSCFIGVKKVTALSVITEIGDFKRFASAQKFASFLGLTPGENSSGDGQTRLGITKAGNRHLRMLLIEAAQGYSHGQVGFKSKALKARQGGNTPEVIAYADKANERLRRRYYRMVLHNNKKSNIAKTAIARELACYIWGMMTEDMA

SEQ ID NO: 51624 - protein, 347 aa, unidentified
MKFYTQTHQHYCGIDLHARCLYVCILDQQGNILVHKNINANPQALMKLVTPYLDDLVIGVECMFSWYWVADLCRERQINFILGHALYMKAIHGGKAKNDKIDSHKIAVLMRGGMFPQAYVYPREMRGTRDLMRRRMRLIRQRAELFAHIHNTNSQYNLPPINKDLHHVCHRDGIAERFSDPSVQKSIELDLNLMGFYDQQLSKVEWYIQKHARNCDQHSLILLRTVPGIGKILSLVVLYEIHTIERFPTVQDFASYCRLIKCKKESAGKSYGTSGKKIGNAYLKWAFSEAAVLFLRANPEAQAWLENTANKHNKARALTILAHKLGRAVYFMLQRKTVFDQERFLNS

SEQ ID NO: 51625 - protein, 400 aa, unidentified
MLSIGIDVSKGKSTVCGMKPGGEIVYTPFEIQHTREGMSELVSLLRSSGEEVRAVLESTGSYHCPVVTALLENGIFVSVVNSLRMKRFCSQSIRKVKTDRIDAMQIALYGLAYWQELQPTRLPEDTYRELQLLARQYYQMTSLLIKAKVDFNAICDQVLPGMQELMNDHAGRHKLSDFVLRYCHTTHILEMGETRFRKDYCKWAEKKGYRNCERMAALIFATAQNGIPVLPNAPSTQIVITEAIRVLHTVEASRDAILTQMQALAKTLPEYSLVREMPCIGDTLAPRLIAEIGDVRRFHSKRALIAYAGIDAPPYQSGKFCANNRHISKRGNRYLRKTGYEVMQSYVMHKPANDPIFTFIEKKRGEGKSGKLAMVAGLNKFLRVYYGKVTELYRSLPAIE

SEQ ID NO: 51626 - protein, 337 aa, unidentified
MKYSGIDLHSNNSVVTVTDEEDRVIAEKRLPNDLTRIVGFLLPWRDELKAVVVESTYNWYWLVDGLQEAGFIVKLANTSAIRKYDGLKHSGDEADARQLAHLLRLGILPTGTILPPEQRALRDLARKRMQLVRSRTSHILAVENIVARQQGAKIGGRQIKQLTADVVDQMGLPPDVALAIKSNLAVILTLNAQIDVLEKHLQKKVGERKEFVLLSSVPGIGRILATIILLEIGTIDRFAEVGNFASYARCVDSQHMSNGKKKSEGNTKNGNKYLAWAFIEAANFAQRFNAEAKRFYERKKTKTNTTVATKALAHKLARACYHILKEQKPFDVTRCFA

SEQ ID NO: 51627 - protein, 463 aa, unidentified
MKRNRWRKSRRPRRDPSLLERINPDVAGIDLGSSQHFVAVPTDRDGDPVQSFGTFTGDLHRLADWLTACGIRSVAMEATGVYWIPLFEILEVKGFEVLLVNARHVKNVPGRKSDVLDSEWLRDLHSVGLLRGSFRPADAIVALRGYMRHRDTLVDSMSAVIQRMQKALLQMNVQLPQVITDITGKTGLAIVRDIVAGRTDPEQLAQHRDARCHASEREFVAALTGNYRPEHVFVLKQNLELFEIHQSKLADCDAAVEAHLKQLADQLAPPATELPPARRKRSKAAGNEPAFDVRAYLHRLTGVDLSQIDGIGPYTALRLVSEIGTDMTRWPNQDHFASWMTVAPNNKITGGRLISSTTPRSANRAAEILRMVAMNVGKTQSALGAFYRRLAARVGKAKAITATAHKLAMLVYRMLKGEIDYADPGPDAYLAQQRKRAVRGLQRRAQALGFTLVRTDTGELLPA

SEQ ID NO: 51628 - protein, 400 aa, unidentified
MKQFNPNDVIIESETALALIHQQQTAIRPYSLYIGLDVHKDTIAVSIAQSDGSKPRYYGEIANTQKAVEKLVKKLSPDGEVLALCYEAGPCGYGLYRQLTGMGHDCIVVAPSLIPSKPGDRVKTDRRDSESLARLHRANELTPVWVPDSEQEAMRDLTRAREDMKHLERQSRQRLSMFLLRHGKHYDSGKSKWTQAYFRWLERVKFDHPVQQIVFQEYIDSVKQQQVRVKGLENEMEKALNTWSLAPVVEALMALRGCKLITAMTVMAELGDITRFDSPRQLMAYLGLVPSEYSSGKSTRRGGITKTGNGHVRRVLIESAWCYRFPARKTAHIQRRAELTSPAVQDIAWKAQKRLCGRYQHLMDRGLLKVKVCTAIARELAGFIWAVACEVMNKHPGLAA

SEQ ID NO: 51629 - protein, 375 aa, unidentified
MIATTRPEMSVSEPTLYVAFELGKKEWKLAMTSGFAVAPWLRSVGSGDWRGLERALAQGRVRFGLPATALVVSCYEAGRDGFWIHRALEARGIRNRVVDSASIEVNRRARRAKTDRLDALKLVRMLVRVCYGEKKVWSEVHVPSVAAEAARQVSRERTALTQDQTRLINQMRGWLATWGATLPSRRARGWWTTVRDGAGAPLPVAVHARLARAEARLAVLEGQIAALEGQQQAAVTAAPPASAVRQLVQLKGIATTSASVLLDEGLVWRAFRNRRQIGGLLGLAPTPYDSGEVTREQGISRAGNKRLQTISIQLAWNWVRWQPLSALTQWYREHFGTGKRARRIGIVAVARKLVIALWRYVTTGAVPAGAILKVA

SEQ ID NO: 51630 - protein, 353 aa, unidentified
MSSIIAFDSHKRYTFARVENDKGEHPEEFRIEHRRGNIAEFLSRQPPGSPVAIETIGNWYWIVDEIERAGMVPQLVHARKAKMMFGCINKTDKLDAQGLNVLQRAGTLPTVWIPPAGVRDKRELPRTRMVFAVERTKLKNRIHSVLDKYGLQDAFEEISDIFGATGRRVMVGVLGQLPSHTRYTTALLLEQLDQTEQKIKVLEARMKELFKETEQHTLLKTMPGIGFILAVVILQEVGDIGRFASAERFASYSGVTPRVHASGGKVRYGRLRPDTNHYLKWAFSEAGNSVAVNRNRFPARHVSQLYNRIRGRKGHAKAVGAVARHLAEATYWILTKNEGYRDRGLLEVSPTGT

SEQ ID NO: 51631 - protein, 388 aa, unidentified
MIQVDDLSRSLIAFEQISTLVIVVELSQSSWLAAGVVPGIERRPLKKLDPDPTALLHLVEGWRDRATKAGRAITRTVLAFESGRDGFWLARWLRVRGVETFVMHSTSVAVSREPRRAKTDRLDTEMLIRVFLGWLRGEPRHCKMVAIPTLEEEDARRPSREREILVGERTRIINRMKAALVRLGIRGFKPGLLTAPQKLEALRTPEETPIPPNTLDEMRRDMARLAWVREQINAIEQARLERLERAPATGRHAMVRMLARVIGVGVETADMLVQEVLSRNLRDRRAVARYAGLTGSPDESGSKRREQGLSKAGNARVRRGLIQLAWRFLRFQKDSALAQWYRGRTEDGAGKRKRTMIVALARKLLIALWRLVTIGEIPVGVALRTAVA

SEQ ID NO: 51632 - protein, 377 aa, unidentified
MKAPSTRPAAVLGLDVGKSSHWACLVDRGGEVLASAPVRNREAELDALFASAPAGTLVVVDQFRNIGSLAVRRARAAGLGVAHLPGLAASRAAGLFAGEAKTDERDAAVIARTALGVPDSLSGVPGRGEALEAARALSSQRDHVVACATRDKNRLRAVLLESCPALEAAVDLSDRRWLELLAGFGGAWGIARSGAEGPQAEAAGEAAAASTAPPPALVEAENRQVRFLAARISEALDEAGALEAETAGLLEGDETYACLLTVPGIGPRTAAQLAVSVDIARFPDHDHLASYCGIAPRVRSSGTSVRSVRASRRGDARLKSLLIFSCNSLVRSSGRYGEYYRACRARGMGHGRALKAVARKRLRAIYAVMRDRVPYRE

SEQ ID NO: 51633 - protein, 351 aa, unidentified
MIVIGSDPHKRSYSCSAVVAGTGEQLGCETAQATGAGHERLLAWARGVDRERVWVIEDCRHVSGKLERFLLARGERVVRVPPKLMAGRRRGSREAGKSDPIDALAVARAALEEGIDTLPVAVLDGPAREIKLLLDHREDLVCERTRIQNRLRWLLHDRWNELELPAGCLDRRVWLDRLAGRLARSPQDADVRVMRAQVRRIKELVREANALERELRLLVRGLQPGLLELPGVGTLTAAKLIAEVAGIGRFRSEAKLARLAGIAPIPASSGNRNRVRLHRGGNRQLNAAFHRVAVTQLRIHPPAQNYVARRVGEGKTKREALRCLKRHLVRTIYNTMTPTPNEMPAPALALT

SEQ ID NO: 51634 - protein, 358 aa, unidentified
MQTQSNKIDFNGQHIYVGIDVHLKSWVVTIMTELLTHKTFSQNPKPEELYHYLLKNFPGGIYHSAYEAGFCGYWIHNMLVEFGIKSIVVNPADIPTTGKEKVMKTDSRDSVKIARSLRSGDLVPIHVPSITTLEERGLIRMRATLVKDLTRYKNRIKTFLHLHGIEYPEAFSISRTHWSNRFNKWLETIEMTEWSGKASIDILLGQSRHLRSSVLQVTKQVRELAKTDRYKVQQDLLRSIPGIGILTAMTILTEIETINRFASIDQFCGFVGLVPSTNSTGDHEVIGDITPRGHSILRSAIIESAWVAARLDPALNKSYHDYCKRMEPNKAIIRIARKLSSRIMFVLKNNQPYVYSIK

SEQ ID NO: 51635 - protein, 320 aa, unidentified
MSDSLDIGVDVDSKEFVPAVADRKAGDRIANTRAGIAQWLNTLPQRCRIGMEATGRYYELLARMAGQAGHVVYVINPRLIRHYGRATGSRGKTDAMDAEAIARYVKKENDRLREYVPRTDEQQQMHDLLRKRQTLVKTRARLEQSFGVSKSAPGELSDLFCALAGTLSELESELQRLGRDGEHGTLYKRLLTIPGIGPAVAAHLIYYMTRWPLANANAWIACTGLDPRPNESGGRTGRRRLSKQGAPVLRQMLYMAAMGLKRCRRGQPLYDELSKRGHPSTAVFNILARKLARIAWGVFKSGRDFDPAMLKVGQACFQQA

SEQ ID NO: 51636 - protein, 361 aa, unidentified
MAKARTLVGLDVHAAKVVAAILDTESGELRFRALGGESGPVVDLCRVLPGPVRATYEAGPTGYGLARALLDAGADCLVAAPGKIPRGATDRIKTDRRDAEHLVRLLLAGKLQPVRIPGPAEEAMRDLVRAREDLRMDLMRSRHRLSKLLLRHEIRFEGPGGNWTDRHRSWLAGLSFEDAAAQATFEDYLGAVDSLFHRRGEIERQIGGLIPTSPWAREVGRLRCLRGIDTLTAVGLCAEIGDFARFGKAGQLMSYLGLVPSEHSTGQSRRLGSITKSGSRHGRRLLVEAAWHYRSAPRVGRMLERRQEGQPATAIAVSWSAQRRLHRTFSTMRRRKKRSTVTAVAVARELAGFCWAIALIE

SEQ ID NO: 51637 - protein, 447 aa, unidentified
MEKGRKRRSTANLPLVHRNAAGIDVGDTIHAVAVPEGRDDPSVKSFGAMTCDLQEIIKWLSECRIDTVAMESTGIYWKPLFTMLIANGFEVYLVNSRQIRNVSGRKNDEDDAVWIQKLHSFGLLKSSYLPGDEQEALRTLVRYRRTLTSDCNRFVLRMQKTLELMNIKIHTVIRDITGKTGIAIVEAIINGERNPENFLQYVNKGIKADNETILNSLEGNWRSEQLFVLAECYNSYKYYRERISVCDKEIENQLVAYQETCNPEIEIKLNERSKKQATKNKPKFNTSSYLKAIYGVDVMAIYGISDILALEILSETGTDMNKWDTAKHFVSWLNLCPNNKISGGKMISSMLMKKKPNVASQAFRNAANAVQRSDNWLGDYFRRMKAKGGNKYAAVATANKLATVFYKMVKNSQEFNPLELIKYQERYKLAKINYLERKLGALKKELA

SEQ ID NO: 51638 - protein, 323 aa, unidentified
MCKVIGIDISKASFDVAFQKKDEPFVYHKFPNNAKGFKTFLKVIDEGDHCVMEATGPYYLCLAYYLFDNEIKLSVVNPLQIKHFVRMRMVKAKTDKKDAKMISLYGLSEKPELWQPNEKYIMQLQLIHTATEGLNKQSTMLKNQLEAFRQLPDTDKEVIRTFKLLLKTIMSKITQLEKRMLDIVEQHYSKTFNSLKTIPGIGTKTSIILIAITNDFRKFEDIKKLSAYVGLAPRIYESGTSVKGKGHITKMGNKYLRKLLYICAWSAKRHNDQCKTLYERLSAKGKPERVIKIAIANKLLRQAFAIGTNLSSYDKKHEESLVY

SEQ ID NO: 51639 - protein, 418 aa, unidentified
MKLFVGLDVSSEKLDVCFLSDDDQLTVLLEDSLGNDIEGANQIKQKILAFQKVYSFSQIVIGMESTSMYSFHPATFFNEDRELQRINTVVTIENPFRIKQFSRIFDEDKTDKNDAMRIADFLRIQRYTTSPIKEEKYMALQRLTRTRYQLIGQLVETKQHFLENLTYKCNALTRELKNNDTNSSVFGATLLALMTEDYGLDELALMPLTDFTSLLQEKGNGRFKNPEGLAKTIQRAITMSYRLSELAQESINIILSVLAREIRALEASIKDLDKAIEQLVIVLPEYQCLTSIPGIGKVYAAGLLAEIGQIQRFEDQTKLAKYAGLSWKIKQSGNYQSENTPLTKQGNRYLRYYLVEAANSVRRYLPEYQAFYQKKYKETPKHQHKRAIVLTARKFVRLVDTLLRNHQLYTPPRSVVEK

SEQ ID NO: 51640 - protein, 607 aa, unidentified
MSTIASLDRIGVGIDTARYGHRVSFLRPDRKPAAKPLTVMENRAGYQALQDRLNQLHEQHPTAHFHVRIDAAGQYAVNLELFLRGLKLPMTISVGEPKRNKDYQKAHFPKRTTDDTESQAMARFAVIELPNATPAPSTPMILLREVAGRLQSKVKQTTQAINRLHNLLARVFPELATLTEDISVGWVLKLLDKYPTAERIAQAQIASLEKIPYLSVEQAHAVHQAAKQSVASLRGELAEALVRDLVNQLRLCQKAEQHLHQLLLEAFADLPASPHVQVLTITGIGEATAAALVAKIVDINRFATPNHLVSYFGVFPEESSSGVDKHGKPLPPGTLIMSPKGNDLVRFYLWNAARTAIQHNPAIRALYRRLRAKGKRGDVAFGHCMRKLLHLVYAVWKTDGPFDKEHFPWEGSSDTQPSATTPPSADAGTTPSANEEAVGHKRDLPAEEVVTTADSTLEPASPAVKPASQSAAPRPKVDFACVREHVTMEQVLQHLGYFASLRGRGRQRRGPCPVHSQPTAPERTFSVHLGKNAFQCFHAECAVKGNVLDLWAAIHRLPLYEAALDLAETFQVPRNREEEPVKGTSSPRTATAKTSAPAAATATDGAK

SEQ ID NO: 51641 - protein, 316 aa, unidentified
MTRMSTNTSILYVGLDIAKDSLQINLANQNFALPNTAAGHRRFLARLRVLAQPVLVVCEATGGYEQALVAVLHQTHIPVAVVEPARVRHFARACALRTKTDRIDAALLTEFGRQTAPRPQAPLDQSTAALRELTRHRLQLQDMAQTVAQQSRHLTLPLLRKQNALLLRQLRTHLQKIKTQIDTLLQQDQTLRLKAQALQQITGVGEKTAASLLAEMPELGTLNRGQAAALAGVAPFARESGRWQGKRFIGGGRPLARKALYMAALVASRYHPTLKAFYERLRQRAKPAKVALAALMRKLIILLNSHLKNLTIPLAN

SEQ ID NO: 51642 - protein, 352 aa, unidentified
MRTSQKTPETITTIGIDLGKNTFHLVGLDKRGAIALQRKVSRSQLEHRLSNVPRCLIGMEACSGSHHIGRQLTALGHDVRLIPAQYVKPFLKGHKNDYRDAEAIAEAVQRPTMSFVAIKTPEQMDLLALHRVRSRLVGQRTGTINQIRGFLIERGIIVRQGVVPLRKALPDILSSSSDILSPRMVNLIAELMQDWRRLDERIETVSTEIEALARQDDSCQRLMTVPGVGPIISSAMVAAIGNGAGFKQGRDFGAWLGLVPKQESTGDRTILGKISKRGNKYLRTLFVQAAHVVLVRRPSTAKRGLRPWIEQASKRLHRNMLAIALANKLARIAWAVLARGQAYQPRIAANAA

SEQ ID NO: 51643 - protein, 403 aa, unidentified
MNSVGIDISKGRSTIAVMRPFGEVVISPFEIRHTGSELSKLAKQLKSLDGETRVVMEATGNYHASVAKLLHNAGLYVSVINAKLVHGYGNNELRRVKTDRKDAVKLANYGLDRWLTLPRYIPEEDTRLLLKNCYRQYRQYSKVQTVLKNNLISLLDTVFPNANRLFSSPIRGDGSEKWVDFVAEFWHCRCASEKSERAFTSKYLRWCRKHGYNFREAKAHTIYAEASGHIGVMPKSETTKLLVKQAVSQLRATSTALAALKQEMQSLASVLPEYPVVMDLFDVGPTLGPQLIAEIGDVRRFYSKKALVAYAGLDAPPNDSGDVTGRHKSMSKIGASSLRRTLFLVMSVYLQTAPLDEPVCQFMDRKRAEGKLYRVYMMASANKFLRIYYATVKAYLESLEHTA

SEQ ID NO: 51644 - protein, 388 aa, unidentified
MFKTVERPDAPAAIRMDIGAIFVSLELSRSTWLLTSVSPGAGEKMSQHATPAGDLRQLFECLAELKRKALARTGKTYPIIVIQEAGLDGFWIHRALEREGIESHVVDAASIAVPRRRRRAKTDRIDGKTLLRTLMAFKRGEPRVCAMAKPPSVEEEDRRRLGRERKTLIAERVEHVNRIKGLLFTQGAIDYQPLRRDRRARLEALRTGIGDPLPARLKDLISRELDRLELLLAQIKAVEAERDALLAEQSRQAPAAAGMLLAFKGIGPEFAAVLWLEGLFRSFANRRQVAAYAGLAPTPWRSGSIAREQGASKAGNPRLRATLIELAWLWRRHQPKSALTLWFEDRVKANGGRVKKALLVALARKLLVALWKYVTTGLVIEGAVMTTA

SEQ ID NO: 51645 - protein, 368 aa, unidentified
MTKTVYIGMDVHSTNYTLSSYTCETDNCFSTVKLGPEVKNILKYINRIKEVHGDDVEIVTGYEAGCLGYTLYKDLKKEGIKCIIIAPTTLPKQKAGEIKTDKRDAQKIARALGTGTYKSVYVPDQEDDDVKQYIRMRDDHKLTLKKTKQQITAFCLRNGFTFTDGKSKWTQKHIKWLRSLEMTAMQREILDEYLITFDYYTLRIKQMDEKIEEISHQVRYAEKVSKLCCFAGMSTHKSLCHIVETGDFSRFAKAPSYSAYLGTVPGEDSSSTSVNRLPITKAGNSHLRMLDIEAAHAIGRTSKQKSRTLMERQKGCSSEIIAYADKANARMRKMYKDISQRKNKNVAAAAVARELACFIWGMMTDHIS

SEQ ID NO: 51646 - protein, 342 aa, unidentified
MAIVGAFDVHRRQVTFEVADTATGQVRWGQVRPACRATLRQFLARFAGEEDVSFAVEGCTGWRFIVEELQRAGLDAHLADPAATADARGSKRRAKTDRTDTHQLRQQLADGRLPESWIPPPLVREIRTKLECYHDLREEHTAWVQRIHATLFHHGVPVIEHVLSTMEGRARLEAGEGLSPAARQSVGVALRVSDAVRTELDALHKELAGFARRQPGCRALAVQYGVGPITAAAIWAFMGDTRRFSSSAQAVRHTGLDVTVYSSDGKRSSGHLSRQGPPVLRWALYEAACSAARATSPDLDYYHDTKERIDHKRAAISVARKIARRSHHILRELGDTAWTDAA

SEQ ID NO: 51647 - protein, 350 aa, unidentified
MSPRNAPRPAAVYGVDIGKNIFHVVGLDSDGEPVQRVRFRRDTLMKFFERAAPAIVGMESCAGSQWIARRLQALGHKVRLIPAQFVKPYVKSNKSDIIDAEAIAEAATRPTMRFAAIKSEEQSDLQALHRVRDQMIGTRTRLINQMRAFCLEYGIALRQGAGLFKLDLPLVLDDLSNDLSPAMRKLLVDLFADLRQLEQRINDVTREIAAIADREDVARRLMTIPGIGALGATALLAAVGTGCQFQKARDLAAWLGLVPREYSTGGKQKLLGISKRGNRYVRKLLVHGARSCFRHLDRTRDRLGSWLDGLQSRMHPNKAVVALAAKMARIVWVVLTKPGALYERRDPAFA

SEQ ID NO: 51648 - protein, 406 aa, unidentified
MDKNATLIPRVIGLDSHPDTFTAALLRGRTPAEAVTEKMFNRLPMAQLTSWAKKHTTTEDLIVLEASGNSFQVVRTLAAVERQALVLESCQMGKLKEAHANNDKLSAVRIGKAYLAGTAKTVWVPDPKTQERRDWFHAHRKAVKRTTQVRNRLRSYLSDNGVRLKKGLSLAQGKAASEQLRKLQPWTPRQWQVIEGLLMELRHADEQRAHWRSLIAQEVLADPQLLSMVRLCGVREMVAFALGALIGDIHRFAEPRKLVKYIGLNPAFDDSGAGTWHGGIAGHGRKDLRCLLIESAQAILRGSKNPLAQWGKKLLRRKGSVNLTAGAMARKLAVAVWYLMMGRWTALEEIDERLALKVGKLITSVGAKALKQLKKTRKAFRKEIYESLKVGRVYALDPDKKFAPAA

SEQ ID NO: 51649 - protein, 410 aa, unidentified
MEVLYPHCAGLDVHKDTVVACVRHMANGTVKREVRTFKTTTTGLLALSEWLASEGCTQVAMEATGVYWKPVWHILSDGDFTLTLANAAHVKNVPGRKTDTNDATWLADLLAHGLIRASFVPDAATQEQRGLLRTRKQLVRERASHVQRLQRTLEDANIKLDSAVSDVMGLSGRAMIEALIAGETDPARLADLAHKRIKTSPETLREALRGRVTSHHRFLLALHLKQISALDEAIAGIDAEVDAHVEPFRAAIAQLKTIPGIGDLGACVILAEIGHDMSRFPTQGHLISWAGLCPRNDESAGKRRSTRMRKGAPWLKTVLIQCAWAGARKKGSYLQAQFHRLRARRGAKKAIGAVAASMLTAAYHMLKDGTFYQDLGPDHFDRRAAQTKANALVAKLRSLGYEAHLTPIQA

SEQ ID NO: 51650 - protein, 330 aa, unidentified
MTTASQKNITQKGNNETTFVGIDIAKLELVVHVLPTNQQLTATNSNDGIKQLLKLFKELKPKQIVLEATGGLEREVLSHLAANGFEVVCINPRQARNLAKGLGQLAKSDAIDAKILATFASLQCLVARPVPTRETQEMNDLVTRRQQLIEMKTMETNRSHWTKQKTICKSIEKIIDALEKQIADIDERIKNIIDNNPDWCAKDKILQSVPGVGPKTSQVLISALPELGMLNRREIAALVGVAPMSCDSGTKSGQRHIKGGRADVRSAMYMATFSAVRYNTTFKVFFDRLIGRGKKYKVAIVATMRKMLTVLNVMLKTKTCWNEHGVRPQK

SEQ ID NO: 51651 - protein, 347 aa, unidentified
MGDGIAGQQVVGIDLHLHRSVIARVDEQGEELGWVRIDNDPKTLVAECRKAGRGAPVAIEATYGWYWAVDALLAAGFQVHLAHPLGMKALRKRKRVKTDPRDAYELATLLRLGSLPEAYIAPPDLRELRELVRHRRQLVKLATSIKGGVRALLAKHNIRLAASDLDGDMAIALMDGLDLPGTYAIRLASQRRLMMVLADEIAAIEIELHTRLRHHPGYRNLLKVKGIGPILAAVFVAEIGDVTRFPTAAALCCWAGLTPRHYESDKTVHRGHISKEGDTLIRWAAVEAIQRQTEPVVKNVKDGIIARRGKSVRNIAKVAAARKMLEVIYYVLRDGEARCLATGAVAA

SEQ ID NO: 51652 - protein, 402 aa, unidentified
MWYVGLDWADTHHDVAVLDEAGKRVGARRFAHSHEGLNELKQFLLSIAPSPEDLACIIETNHGLLISFLLSAGIPVYPVNPKMAHKLRKVAGAKTDQIDARLLAKMGRFDLDEMRRLKPDSPTVQELKTLTRDQDALIRTQTRLVNQLTACLKEYYPAALHLFTKLQQRCTLLFLQAYPTPQTAQTASLEEIRATLRATKHTSPTRFAPKIFQELHRSQLVASPLVVRAKSHLMLSLTKQLLVVIEDIASYDKQITALFLTHKDQKIWSSLPGAAKRLAPRLLAEWGDDRGRYTDANSIQTLAGTAPVPYQSGNYAKAHKRSACLKPLRNHLHQFAWQSTLSEPWANDYYQRKLAEGKTHSMALRALANVWVRIIYRMWMDKTPYRAETFEAAQHAHAKRAA

SEQ ID NO: 51653 - protein, 415 aa, unidentified
MESVYNVAGIDVHKKMLAVVIANAHDRELQFECRKFGTTVSELRRLVNWLQMQSVQEAAMESTAQYWKPVWIALEGHCRLHLAQAKSNRGPRGRKTDFRDAMRIVNRLLSGELILSYVPNMEQRCWRTLTRSRHQLRQDRVRLQNQLECLLEEVQIKLSSLLSDLLGQSGRRILRALADGEANPTVLASLASGRLRATREELQDSLSGKLLPLHRQVLSLYLERLDLIESQMESLEKSVAQSLQAHQDSVARLVEIPGVGVDSAQQIIAEVGPLAAAFPSAAQLASWVGVCPGRQESAGISYSNRSAKGNPTMRRLLNQMAHAAVKQNGCYFQILFRRWLPRLGYKKAIWAVAHRICRLIWKVLHEGVRYVHRGLDLDPKAVQQKRRRLVAELRLLGYKVDLAPLDSQTAPGMSM

SEQ ID NO: 51654 - protein, 321 aa, unidentified
MGEYIGLDVSMKDTAISVRRDGLRVWRGKCASDPEIIARMVRKHAREPERVIFETGPLSVWFYHALRAEGLPAICVDARHAKAALDMAANKTDANDADGLAHLAEVGFYREVRVKGFDSMLTRTLVAARTKLVRIKTEISNQIRGLMKTFGLVIPAGKGSTFDANVCAKLNDSSDLAKIITPLLEAWRSVRMRAAELTRRLIGDARQSEACQLLMSIPGVGVVTATAFATAVEDPDNFRKSRSVGAWLGLTTRRYQSGQVDYNGHISRRGDHQVRALLYEVACVILTRSSAESALRDWASSFANASASSGPQSPWRGNSPS

SEQ ID NO: 51655 - protein, 346 aa, unidentified
MRIIGCDFHPSWQQISWLDTETGETSEQKLVHAAGEAKAFYQQLAAPALIGMEATGNSQWFIELVQDLGHEIWIGDAAQIRASYVRKQKTDKRDAAHILKLVGEGRFPRLWTPDREQRDLRQLVLHRHKLVEIRSRVKNELQHLALNKGLQKKRTLWSQAGLQLLRGLPLKPWASCRRADLLGLLALLEEQIGKLDRAVQQAAEEHPQAKLLMTQPGVGPNTALAFVLTMGDVTRFQRGKHVASYLGLIPREESSGGRQKLGAITKQGNRLVRSLLVEAAQIAVRYDPGFRKQYLHHCHQKPKAVAKVAAARKLAVRLYWMLRTQKPYPDIVRIESSPRVPLVGAS

SEQ ID NO: 51656 - protein, 414 aa, unidentified
MQQIYARVAGLDVHRDSVVACFRHLGPRGGVVREKERFTTTTAGLQVLEAWLADREVQLVAMEATGVYWKPVLYALERRFTVWLCNARAVKKVPGRKSDLSDAEWLADVAAHGMVRPSFVPPLPIRELRELTRYRKTQIDARVAEIQRLEKVLQDAGVKLTSVASKVLTQSGRAMIEALIAGEQDPAKLAALAKGKMRPKIPALTEALAGHFGPHHAVACRRILGHLDFLDETIGALTEQIDARTAAFDSVYKSLLPVPGFDRLTIDVIIAETGADMTRFPTAGDLASWTGVCPGGHESAGKRRRVSTTPGNPWLRRALIEAARAAVRTKGSYFGAQYRQIARRRGPNKAAVAVAHSLIELVWHLLSTGEVFKDLGDDYFTNRQDPERRARRLVAQLEELGYTVTLETPQPAAA

SEQ ID NO: 51657 - protein, 351 aa, unidentified
MLIIGCDYHPGVQQIAFMDTETGEFGERRLEHGEGEAEKFYRDLQQAGIRVRVGMEATGHARWFERLLQELHFELWIGDPLEIRATRVRKQKTDRHDAQLLLKLLLEDRFPRIWVASWENRDLRQLLWHRHRLVQMRTRIMNQLQAVALNEGVREKKRLWGQAGRAQLESFVLAPWASRRRKELLELLDRLNPSIRELNAAVEQEATRRPEVRRLMTHPGVGSLTALAFVLIVGTPQRFACGKQIASYVGLVPTEESSGGRRRLGHISKQGNSLLRFLLVEAAQATVRSDPDWRRKFLHLAMRRERGIAKVAMARKLAVRLYWMWRKEWDYEQVKRFGSHAGQPGNPLGVQ

SEQ ID NO: 51658 - protein, 323 aa, unidentified
MAKRITICAGIDTGKRKLDVALDGSSEQMQVENTPEGYMGLVEWLRRQKVKRVGIEASGGYEQAVVAELRRKRFVVVVFQPAQVRAYAVFHLQRAKNDRIDAALIAACTAATKKIHPAPDPRLLPFAAHLTMIEQIGEDLAKLKNRIESCRHERIQKLWKQQIALLAKCRRTEFKALVAAIRKHRDLAARLDLIYSVGGSGMPTAVSILVRMPEIGQITREQAAALAGLAPYDDDSGDHVGVRHIEGGRERLRRALYTAALPASFRWNPQLMALYNRLIAAGKGHKRALIACARKLLVIINAVVARGTPWLAEPPKIASAPVT

SEQ ID NO: 51659 - protein, 371 aa, unidentified
MEELIKIHVGLDVHKDRITVAQALPGRDDARLVGSVAHDIPKLLKVLGKLGSPEQLHVVYEAGPTGFGLQRALRGRGYACEVIAPSKTPRKAGNRIKTDTRDAIDLARYSRSGELSAIWIPDPADEAIRDLVRAREDAVQARTQARHQLSAFLLRHSKVYAGKTKWCGVHDRWLAAVSFESSPSQTAFTEYWQAVKSVHERVERLSTALLGAIDGWRFEPVVGALQAMRGIAAVSSIALVAEIGDFERFGSARQLMGYLGLVPSEQSSGDKTSRGSITKTGNGHARKLLTESAWNYRFAARISRDIHARQEGASEAVRAIAWKAQLRLTRRFAALNARGVQKNKVCVAVARELAGFVWAVGRQAQRESSLN

SEQ ID NO: 51660 - protein, 313 aa, unidentified
MFIGIDVSKARLDVCARPGGRVWKVNNDEAGIAQLVGEVAELRPALVVMEPTGGFEMPAAAALAVAGIPLAVVNARQVRDFAKAVGKLAKTDVIDAEVLARFGEAVRPEPRGMPDEQTQELSAQLTRRRQIVEMLTAETNRMYAARVEKLRKRIYAHVKWLRQQLKDADDDIDRHLRETPIWREKDDLLQSVPGVGRVLSRTLLAELPELGTLDRREIAALVGVAPINRDSGTSHRKRVTWGGRAVVRAPLYMAALVATRHNPIIRTTYERLLAAGKAKKLALVACMRKLLVILNAIVRDRRPWLPSLASHDR

SEQ ID NO: 51661 - protein, 354 aa, unidentified
MNSTQVFEKCKIAVAIGIDLAKDHCDVVAYNADNKICFSKANMSYPKLMEWLANAYPAVVLMESCKGCHVRARDIADLGHDARLVKGADVKALRNVCQKNDIRDADYIARLLYVPGTKFVFVKNQRQQSLQFLQNEYKSFQELRIQVGNQIHAGLEEFGCPARKSTAFIQSRMVAHLEKNAELIPEAVMASFLRRREMWLNLFEQEEGAKKRMEEIAKTDDDAKRIMTVPGVGAQTAVGMLVHIGGDIGRFKNSGQFAASIGLVPKQNSTGGNTTLNGITKCGPKRLRANLVQCGQVILMHADKLKGNFGDWVRKMRDSGKKRGVIACAIAAKLARIIYRLMKDKVDYTPVPSR

SEQ ID NO: 51662 - protein, 309 aa, unidentified
MTAVGIDVGKAALDVAIEGVAGVVRFTNNPAGIRKLIRRLAEVTDARAVIEATGGYEDALLEACCDAGLWVSRINPRQARDFARATGELAKTDAIDARLLCLLSRLFVDRLRRYEAPAPWQRDLRDWLLRRSQVVSTLQAQKQQTALTSPAVHKLMARTIAALARELAAIDREMRTLLKAHTTPALQSSKGMGPIFQATSLALLPELGTLTRQQIAKLVGVAPLNRDSGQLHGKRRIRGGRAPVRVALYMATLSAVRWDPTMRAHYQQLRARGKLGKVALVACMRKLLTIVNARRRDELRDAGGIAIAV

SEQ ID NO: 51663 - protein, 317 aa, unidentified
MTPETVYAGIDVAKRRLDVAVRPTGEQRAFANDANGIAELVAWLQGQQPQLVVLEASGGYERSVLASLGVAGIPVAAVNPRQVRDFARAIGRLAKTDALDAAVLAHFAEAVRPEPRPLPEAQAEQLRALVVRRLQVVEMLTAERQRLAFARPPVRGLIEAHIAGLKEELTHLEEEFDRILRGSPLWRAREDLLRTVPGVGHAVARVLLVEMPELGQLDRRRIAALAGVAPLNRDSGQWRGRRAVWGGRARVRSALYMAALAGSRHNPVLQSCYQRLLAAGKVKKVALIACMRKLLTILNAMMRDGAEWRPVPFAIPA

SEQ ID NO: 51664 - protein, 422 aa, unidentified
MSYCPVAGIDVSKRFSDMCILSPDNKIFAQEKIYHDETSINRANALLQKAERLFFSKPVIVMESTSHYHLILFQFFSEHGYDVIVVNPLQSNSMKDFSIRKRKTDRVDAFKLAMMYRTKALRPSQIPQTATRALRQLCRHRAELLNDVSSYKNRLTALLDQTFPGYDKVFSDVGGVTSCAVLVRFPTPTILLVEEESELVEVIAAASKSGYSFAKKKAGLLISAAQKAQTLGIHSCADETLIVCTIQMLRTLSESVLQIETAIDNLLAQIKEMRNNVSLLQSIPGVGSHSAALLLGEIGDISLFKKPKQLAAYFGLDPTERQSGSFRGTKNKLSKRGSPYARAALHMGVVNSICKRGKDSAANPVLLSYYEKKCKNKPAKVAQAASMHKLVFIVFAVLRDQKPFELKTPEQHAVEQGFVKAA

SEQ ID NO: 51665 - protein, 383 aa, unidentified
MSSITSSAVSAVRTIIYLGMDVHKESIMIAVLPTGAKSPIRLDRLPNDLPKLRKWLDRVGRDGEIRACYEASGAGYVIHRAMKEWGYECEVVAPSLIPKRPGVQRKHDKRDAADLARFYRAGELTTVRIPSESDERVRDVVRCRETFQKEILKSRHYLLKFLARRGFVFREGTNWCGPHLKWLLHLTTENSPLEQHDRFIYREYHALLLYKLERREELDRQIEQLALLPHIAPMVERLQCFRGISLHSAMVLATEIVDWRRFERPSQLACYLGLVSREDSSGDRTRLGSITKAGNSHCRHVLVQAAWSYRHRPQIGIELKRRQQGQAPSVIVHAWKAQQRLHQRFNHLSYRKRPQIAVVAVARELVGFLWAVMQDTPVEHQVV

SEQ ID NO: 51666 - protein, 390 aa, unidentified
MIYVGIDVASQKHDFFIMNDLGETYITHSITIPNSNEGYKKLHNSIQEFCGATNDFKVRIGLESTGFYHKNIVSYLLSLDYEIMVINPILTNMYKKSKKVHIQKNDNIDSIYICMYLGDTRTVFKPYTIVSYHSDALKALSRDRFSLVEELRLAKIGIYRLLVHVFPEYLKLFSNIYQGSALSILERYNNPDRLSKAHISTISSLIHGKCRVSAIDIINAAKNSIGIKDDCLYFELERAIIRLKYINSQIEEYNKEIKRYIELLNSPILSIPGISYITAGIILGEIGDISNFKNAESLISYSGLDVIIYESGKYKRTNLSISKKGSIYLRYALYQAARVCWISDPMFHNFYLKKQNENKHFYVILGHIEKKLVKVIYSVLKNNKPYSPHL

SEQ ID NO: 51667 - protein, 354 aa, unidentified
MPRQSKDTVATLGIDIGKNTFHLVGLNKRGAIVLHQKLSRRQLEARLANLPPCLIGMEACVGAHHLSRRLKAFGHDAKLMPAKYVKAFLKGNKNDYRDAEAIAEAVQRPTMRFVATKTAEQLDLQALHRVRSRLVSERTAIANEIRAFLLDRGIAVAQGLHRLRLALPDILATRTDLLAPRLLHILNDLIGDWRRLDERIHAVSLEIQLLAQDDPSCERLMTVPGIGPIISSATVAAIGTGDAFSKGRDFGAWLGLVPKQISTGDRTILGKISKRGNRYLRTLFVQAARVVLLRPATWERHGLQPWIAAAAQRLHHNVLAIALANKLARIAWSVLHHGRNFEVRKISQPTSQPA

SEQ ID NO: 51668 - protein, 421 aa, unidentified
MQPEAPEAFAAFVGLDWADAKHDVCLQAAGSAQREHRSLDHTPEAIDAWVCSLQKRCEGQPIAIGLELNKGPIVFALRKYHFLVLFPVNPLTLARYREAFTPSRAKDDPTDAALQLALLRTHRDKLPPLTPQSPTLRALAQLVEHRRRVVGDTVRITHRLTSTLKNYFPQALQWFQDKDPVIFCDVLSRWPTLKAAQLARRSPLETFFREHHVRSADVIAQRINAIKAAIPLTTDESIITPNVLLVQALVSQLRATLQAIQDFDNAIAQPAQRHPDFPLFQTLPGAGPVFAPRLLVAFGEQRERSASAAELQPCAGIAPVTERSGKKCWVHWRFQCPTFLRHTCVEWAAESIRHSFWARVYSQQQRDAGKAHQAAVRALAFTWIRLLFRCGQDRTPYDESVYLNALNRRGSSLIHNLVKES

SEQ ID NO: 51669 - protein, 457 aa, unidentified
MAQDTQTGDRAARHKAPISEQPAAVSRDHRVSSHWCNSEETTLSVTHPAPPGRPTGGIDWATDDHAISIVAADGDQLERFASTHDAAGLRALVGRLLAAGVGEVGIERPDGPVVDALLQAGLTVIVIPPGQLKNLRSRYGSAGNKDDRFDAYVLADTVRTDRRRLRPLLADTHATSALRSVTRARKDLVGHRVAVANQLRAHLQVVFPGAVGLFADLDSQVSLRFLERFPSQDKADWLSPKRLTAWLGAEGYSGRTDPAVLHARLADAPRGAAGEGEHTAAHASVTLALVAVLRTLTVQIEGLAARIAEQLTLHPDQAIFTSLPRSGRVRAARLLAEIGDARGRFPTPESLACLAGVAPSTRQSGKLRAVTFRWGADKQLREALCDFAGDSRHANPWAADLYRRARARGHDHAHAVRILARAWAHIIWRCWQDNTPYDPTQHGALQALLNRDQQTAA

SEQ ID NO: 51670 - protein, 352 aa, unidentified
MEKAYDGRQIVGMDLHRRRSVLVRMTQDGRRLSTSKITNSPQELRREIARAGKSPQVVLEATYGWYWAADTLAAAGAEVHLAHPLGVKAFSYRRVKNDERDAADLADLLRMGRLPEAWIAPREVRELRELTRYRIKLVRLRTSCKDQVHGVLAKLGVPVTCSDIFGKAGSAWLDGLRLPQPYSGKVTSLRHLAGELSAEITMLGEVIASLLAGDRGYQVIQQLPGIGPVLAAVIVAEIGEVTRFRTAAQLCSWAGLTPRHRESDTKVARGHVTKQGSRLLRWALIEAIQRIPRDCAIGGVKDAIIARRGKEARNIAKVAAARRLLTLVFYGMRDSQIRCLSRPPATQTAQAA

SEQ ID NO: 51671 - protein, 333 aa, unidentified
MLPPNCGTATPYILRNTVGLDISKLTFDATAIVGNAEYSAKFDNDSKGLDQFSDRLKSLGCQNLHICMEATGNYYEEVADYFAQYYSVYVVNPLKISKYAESRFKRTKTGKQDAKLIAQYCRSAQESELVKRQKPTDEQYRLLRMTAAYAQIKSECAAMKNRHHAAKDEEAAKAYAQIIKAMNEQLEVLKEKIKEQTEKPNCKEGVKRLETIPAIGRMTAAVLFHHLTSSKFETSNKFAAFAGLSPQQKESGTSVRGKGKLTKFGNRKLRAVLFMPAMVAYRIRAFPGFIKRLEEKKKPKKVIIAALMRKLAVIAYHVHKKGGDYDPSRYKSA

SEQ ID NO: 51672 - protein, 472 aa, unidentified
MTKRKVETPAELASLPIQQTHAAGIDVGDATHWVCIDADGGDKAVREFPAHTPGLRQLLSWLREHAITTVALEATGAYGHVLFLTLLEAGFHVITTSPTFTRQIKGRPKTDRRDCQWVQRLHRHGLLPSIFQPDEATQTLRDLVRQRANHVRLSGQHIQRMQKALELMNLKLTKVLGDITGVTGLKILRAIVAGERDPYQLAKLRDRRCKHTLDEIAIALDGRYRLEHVTELKLNLTMWQQYLSVIAELDDLIAKQLHPMRKETTLPPLPPKPRVRGRKPHDPRFNVRTALYYMVGIDLTAIEGIDEIHALTLISELGADFTKWPSVKHFTSWLGLCPNWKKTGGKVQSSKTRKGKNRAASALRMAAWSLIQSKSYLGAHLRRQRSRLGAPKAITATAHKLARILYNLMRHGIVYMRQEESAYAEQVRARLEKQLHRRARELGYELKPILAEVVMPDGEIVQVKPDGEIVPA

SEQ ID NO: 51673 - protein, 356 aa, unidentified
MSIVAHIHPYVVGVDTHARNHVYSVLASATGELLGSQKFPTTEAGIKRAMRWVVSRTHSHDDTLWVIEGTSSYGAVLTGKVLARNFSVAEAPRVDSQHRYGTGKSDELDCARIARATLGLPVDKLRRPRLGRGVRQAIRILVASRELLAGERTRNVNALTALVRSNPLGIDARSSLSSAQIEQVASWRMRDEDIEIRVARAEAKRLARQILDLDCELGANERDLAGLVQISEAAPLLQEKGFGAVSAAKCLTAWSHYGRIRTEAEFASLAGVNPIPASSGNTVRHRLNRGGDRKLNSALHMVAIVKMPHDEETKKYVTRRREEGKTDREIRRCLKRYIARRVYRTLNAQHSLATTT

SEQ ID NO: 51674 - protein, 426 aa, unidentified
MKNINEFAATVGWDWADQKHDLWLRPADDSKAQHLILAQSPEALHEWVAKLRERFAGRPVAIALETSRGPVISALLAYDFIVLFPVNPKALKNYRAAFSVSGAKDDRCDAMLLEEYVRLHWQKLKALEPDTVPTRTLAGLVETRRQLVDERTRLVEQLHSVLKTYYPLAEALFAQQMTHPMAADWLARWPDLESLQKAQAGTLRSFYFKHNSRSSQTIEERLRAIAQAKALTTDPAIIVPARLRVLGLAAMLKPLHWTIAHLDEQIQTLMDQHPDAEIFRSLPGAGPCLAPRLLVAFGTNRERFGSATEVAQFYGVAPVIRQSGNTKTVHVRHRCPKFGRQSFHENAGCALRQEPWAGCYHQQYKTRHGGRHHQANRSLAFKLIRIYYACWKTRQPYDPKRYARALQKSGSPLHKLLAGSQTQASQ

SEQ ID NO: 51675 - protein, 401 aa, unidentified
MTTLRDNAMRVKRFRELKSTLRTKRHRLLVGLDIAQAEHVAHLRHAHTRVVVPTLTIPNSTRGFAELWARIEQAQRATGCREVICGLEPTGTYHQAVATFLEAQGADVVLVSSAVAYWNRRTQDGTWDKHDPKDAANCADLLEQDKVLFYSQPAGPLAELRYLVKCLRRARTELAACKARWRTTLRPALGPMGEPLPNRLRAELPALLQAWERAAPGRPPVAKGRLPLGLATACADLAAQVTAVQARIATIEQALTPLAERLPAYALLRTIPGIGPTVAAILLAEIGDIGWFTRFSQLRKLAGLDIIRVQSGQFAGQARISKCGRGLLRWALYHAAMGLARTTAGRARLAALKAKRQGDRYAGFKAIVELAAKVLRIVWGVWRSGRPYDPLRTGGLKRQAR

SEQ ID NO: 51676 - protein, 421 aa, unidentified
MKSSTAERLKQVPERHLIVGVDPHKKKHAAVVMMQNAQVLGKRKFDNTFGGFESLVSWAQEQVRATGSQGVMFAIEAGGHYWRNLAYYLDGRDIGLRLVNPFTLKRRREGDDINRRKNDYRDAEMAADLLRTGKFVDTRLPYGAWAELRATHSAYRRMVKESSRMGNTLKALLDGVFPEFADIFKNPCGKTALAVLSLGASPTAVAALKATAFVELVRKKFNGRGLAVRKLKEVHRLAGISAGIREGAESVAREVSFLVQRLQLVVMQMEQQVIHLRQLVDAIPEGRPLLSIPGIGYITVAGLLAELGSLRGYQNSKQLVKMAGTNPTEEASAGKSGSHTPMSKKGRAGLRWVLWSAAANLIRVNEDFRCWARVRRERAAHAHPLHRREVMGAVCNRLLRLAYALVNHGECYRCPTAEVAI

SEQ ID NO: 51677 - protein, 410 aa, unidentified
MEPILISCAGMDVHEKKVDVCIAHGPFDKPPKFEIRTFSTMTSDLEELMALLKKYEVTTIGMESTGIYWKPIFNVMEGEFAIVLANAQRLKAIPRKKTDIIDCKRIANLLRYGLLPNSFIPPREIRELRDLNRTRRKLVGMMTSEKNRLIKVLEAANIKLSSVVSKIYGVSSLALIRSLLEKDKLSREEISQLAKGKLKKKVDQLEKALNGKLTDHHRFLLGMHLENIDYLAKQIKKIDEEIQRKMVPFQKEAKLIQTIPGISEVNASAILAEIGVDMSQFPDAAHISSWAGVCPGNNESAGKKKSGRTQKGNSFLKGALTESAWAASKTKDTSYSAFYRNIVRRRGKKRALVALAHRMLIDIYYVLKSGKPYQDTGAEAVYEITMKRRERSMIRSLEKAGYSVAKAEAA

SEQ ID NO: 51678 - protein, 393 aa, unidentified
MPQESKAAIPTQDQKTAGDIFISVEMSRSKWVIGVHTPLAEKIALHTLTCGDVDALLTLIDRAQAKLTAAEVGAPAVVVCYEAGYEGFWLYRRLVAIGIRVVVIDPASLLVDRRAKRAKTDRIDARAMVRALMAWSRGERQVLSEVRVPTVEQDDARRGLRERQRLVKERTAHGNRIKGLLKTQGIMDFDPRAADAIAHLDAIVTGDGRPLGLCLKREIVRELERLTLVMRQIEQVEAERDAVVQDCGQQADAGVEPEREAAMIAVLNRLKGIGMNDATILAREAFWRDFRNRREVGGWSGLAPSPWASGSVSRDQGITKAGPPMLRAHMIQMSWRWLFWQPDSELAQWYRSRTEGATGRMRRVMVVALARKLLIALWRYATTGMVPRGAIVT

SEQ ID NO: 51679 - protein, 343 aa, unidentified
MQTMTTVGLDIAKSVFQVHGVDAGGQVIVRRQLKRRYVLTFFQKLSPCLVGIEACGSAHHWSRELQALGHTVRLMPPAYVKPYVKRQKNDATDAEAICEAVTRANMRFVPTKTAEQQSGLVLHRARHLFVRQQTSVINAIRAHLAEFGIVAPVGRHGVEELLDVVTDPNDKRVPDIARACLSALGDQLQSIKKQILEFDRLIRAWHRSNEMSMRLEAAPGVGPVLATALVAAVADPKSFRSGRNFSAWIGMVPKQHSSAGKNRLGNISKQGDRYLRGLFVAGALSVIRYAKVHGTKHRPWLTALLARRPTKVAAIALANKIARMVWAMMATGERYKEPVALAR

SEQ ID NO: 51680 - protein, 315 aa, unidentified
METNAVFIGIDVSKAQLDVAQRPEGQSLVFSQTPVGIESLVAHVRSLNPSAIVLEATGGLEVPVASALAVAGLPVAVVNPRQVRDFAKATGRLAKTDALDAYVLARFAEAVRPAPRQLPDAATHEFSALLSRRRQLIEMRVAEHNRLGSAPRRIQQQIRKHLTWLDRQVEAIEEELAQRITSTPIWRERDNLLQSVPGVGPTLSRTLVAELPELGILTRHQIAALVGVAPLNRDSGTLRGRRTTWGGRAVVRAVLYMGTLAAVRWNPVLKVFYQRLRAAGKAPKVALVACMRKLLTILNAMLKHRTPWSLVVERS

SEQ ID NO: 51681 - protein, 360 aa, unidentified
MKIVGCDLHARQQSIAMLDRETGELTEKVIRHEGNAVREFYASLGKPVVVGIEATGAMQWFLELLEELGIESRVGDPAKIRAAETRKQKHDRRDARLILDLLERDRFPAIWMPTSEQRDLRSLLRDRDQWVKMRARLQHTLQAIALNHALRKGSSLWSGTGQEALAKLPLPAYTCQRRNELMSLYAQLQRRIQQLDKQVEEQAQHRPQARRLMTHAGVGPVTALATDVFLGDPSRFTTANEVASYIGMIPSEHTSGKRQRLGKMSKQGNSLLRYLWTEAAMHAVRNDPELKRFYRRKLIQKGMGKARIAAARKLGIRLWIMLRDQIEYEEFCRRGKLRQNGEAHAGMPDFNSGPATTVTG

SEQ ID NO: 51682 - protein, 349 aa, unidentified
MAEQRLSYTGERIDIGIDVHKETYTVTCLCQRQMVKTATVPADPARLAASLPRWFPGAKLFSAYEAGFSGFVLHRALTTAGITNIVVNPASVAVAANDKVKTDRRDAKKLARDLADGRLRGIYVPTEAEELARLLPRTRAQLVAHRATITRQIKAKLHQFGLITPGSRRLMSSRYLREIAAWELPPELHVSLTLLADQWRFATRQLLEVRRLLREQAKAQVALESVYRSVPGVGEVVARTLATELGDMTRFANERALFSYTGLTPSEYSSGTAIRRGHISRQGVSRLRHVLVETAWRALPRDPILQAMFDRIAATRGKQRAIVAIARRLIGRIRACFRHGTTYAVGTAG

SEQ ID NO: 51683 - protein, 346 aa, unidentified
MLHAGLDLSRKRLDFHLLDEEGESVEVGAAAPDADGLRSLAARLGRHGQPLRAAIESMTGARFVHDQLELHGWEVEIADAVKVKGLAPLACKTDRIDAWVLAELSRRELVPAIWLPDPGVRAERERARFRLHLVRHRSSLKQRVHATLLTHGTPCPVSDLFGVRGRALLERLCLPEPWTGTIEASLRLIDELEREIDACEAELRTLGAEHRYVPLLITIPGIAWVLAYTIAAEIGDIARFPSPAKLAGYTGLCPRVYQSGESDRRGPLSKMGPRYLRWALIEATTHASRHPAYRERYERTKARLGKQRGPRVAQVDLARKLAEAIWHMLTHNRPFAPAGAPAPMTA

SEQ ID NO: 51684 - protein, 313 aa, unidentified
MDKAAPVFVGIDVAKHRLDIHLRPSGESLTIDHDDENVAALVERLAALAPALVVLEASGGMEVRLAAALAAAGLPVAVVNPRQVRSFARAIGRLAKTDRLDAAAIAHFAEAVRPAVRPLADEATRHLQALMARRRQLLEMLIAERNRRQAAAPALHGRIDAHLRWLEEALAEIERDLDGAIRASPVWRAKEALLLSVPGVGPVSARTLLAQLPELGALTRRQAAALVGVAPFNRDSRKMRGKRAIWAGRAALRACLYMAAVAAARGSNPAIAGFYRRLHQAGKPAKLALTACMRKLVVTLNAMLRTNTAWKQA

SEQ ID NO: 51685 - protein, 421 aa, unidentified
MKSNTQNAKIEAITEKTLVLGIDVGSEMHYARAFDYRGIEYSKKPFKFSNTEAGFATFKEWILDLKERHEKDKVVPGMEPTGHYWFNLGKFLQDNEMKPVLVNPHHVKKSKELDDNNPTKNDRKDPKVIAGLVREGRYMIPYLPEGVYADLRTASNIRFQLQAELTRIQNRISRWFNIYFPEYKTVYGKPDAKSGMLILKAAPLPEDILTLGIDGVNQIWRDAKLRAVGKARAKTLIEAAEHSVGSKEGAVSARMEIRMLLEDYESRNTRLQEVMVLIEELVKQIPMAEKLLEIKGVGIRTVSGFLAEVGDISRFNNPKELQKLAGLALVENSSGKHKGETTISRRGRKRLRYLLFEVAMSLVAKNPEFRELHNYYTTRRLNPLKKMQSLMAIAAKLIRVFYAMLTKGVDYDPKKLSLIHI

SEQ ID NO: 51686 - protein, 339 aa, unidentified
MKHVAIDLGGRESQICIRDGSGAIVEERRYQTRLLPRLMKAWEPSRLIIETSAEAFAIADAALALGHEVRIVPATLVKTLGVGERGVKTDRKDARKLSEVSCRIDLPSVHVPSALSRCLKSVCGNREELIECRTKLINNARGWLRTQLWRVRTGATSSFPTRVREHATTTHQVVPEFLERTLVLIETITAQIRIADSELDEIASNHPICQKLMTVPGVGPVTAIRFLAAIDDVTRFPNAHALQSYVGLTPGERSSSESERRTGITKAGPAKLRRALVQAAWCCMRSRSEDAMIVWARELATRKHKFIAVVALARKLAGVLFALWRDGTTYRPRFTEATN

SEQ ID NO: 51687 - protein, 423 aa, unidentified
MDVIHQRVAGLDVHKETIVACVRIMADARVSRECRTFATTTAGLQDLLAWLTASGCSHVTMEATGVYWKPVWNILSDGDFELLVANAAHIKNVPGRKTDVNDATWIADLTACGLIRGSFVPDQAFQELRTLLRTRKQLTREQTRHVQRLQKTLEEANIKLDSLISDVMGLSGRRMIEAMIAGERNPQKLAALADRRIKASPKALYDALHGRLTDHHRFRLQLHLAQYDAVAAAIGAVDHEIEAAIDQMDETMKAGQAFFRSLIRLLSGIPGVSTLSAQTILAEITPDMTRFATAGHLVAWAGLCPGQNESAGKRKSSRLRKGAPWLKTTLVQCATSAVKKKDSYFKAQFQRLKSRRGPQKAICAVAAAMLTTIYHMLKDGTQFQDLGAHHFDRRPPEAKARHLVAQLTKLGYTVQLQPLAEAA

SEQ ID NO: 51688 - protein, 436 aa, unidentified
MRECRCSMIMGFTKPIEHFNLQRKKVITMNTLYVGIDVSSKSNVVYLMLPNGDKHSNFSVANSHEGSTQLVKRILSALTSHSLDTVLIGLEATSVYGDNLVYFLREDATLTPFNRKIHVLNPKQVKKFHDAYNDLPKNDYVDSFVIADCLRFGRINKEVYLGDYHYKALQNLTRARFFAVQNLVKEKQRFMNVLFKKYSTMTQEKVFSDTFSTTALAVYDEFDSAEALANMDLHELTEFIMEKGKNRFPDPDAVAKAIQKAARSSYRLPKTVKDSVNQVLSISITSMKALESQIKEFDKAIKAQMELLPNVLISIPGIGPVYSAGIMAEIGDINRFDNQASLAKYAGLAWKQHQSGGFEAEVTRLIPSGNRFLKYYLCEAAFSLVRCDKEYSDFYHLKYKEVNRCQHKRALALTARKFVRLVFRLLKDNRLYCPSK

SEQ ID NO: 51689 - protein, 348 aa, unidentified
MLIIGCDYHPGFQQIAWVDTETGECGERRLTHREEAEQFYGTLKERAVRVGMEASGHARWFERLLSDLRFELWIGDAAEIRTKRVRKQKTDRQDAQLLLRLMVEDRFPRIWVADAANRDLWQLLWHRHRLVQMRTRVMNQLHVVALNEGLRRKKALWRPAGRSELESLILAPWASRRRQDLLDILDQLTPKIQELTRALEGEVEKRPVTRRLMTHPGVGPLTALAFELVIGTPERFGCGKQIASYVGLVPSEESSGDRRRLGHISKQGNSLLRFLLVEAAQVTVRSQGQWRSKFFHLAMRRGRKIAKVAMARKLAVRLYWMWRQGWDYGQFEKLGSHAGAPGNRHGVQ

SEQ ID NO: 51690 - protein, 430 aa, unidentified
MKSNTQNAKIEAITEKTLVLGIDVGSEMHYARAFDYRVIEYSKKPFKFSNTEAGFATFKEWVLDLKERHEKDKVVPGMEPTGHYWFNLGKFLQDNEMKPVLVNPHHVKKSKELDDNNPTKNDRKDPKVIAGLVREGRYMIPYLPEGVYADLRTASNIRFQLQAELTRIQNRISRWFNIYFPEYKTVYGKPDAKSGMLILKAAPLPEDILTLGIDGVNQIWRDAKLRAVGKARAKTLIEAAEHSVGSKEGAVSARMEIRMLLEDYESRNTRLQEVMVLIEELIRKIPMAEKLLEIKGVGIRTVSGFLAEVGDISRFNNPKELQKLAGLALVENSSGKHKGETTISRRGRKRLRYLLFEVAMSLVSKNQEFRELHNYYTTRRLNPLKKMQSLMAIAAKLIRVFYAMLTKGVDYDPKKMVSDIKRPAVYQQAA

SEQ ID NO: 51691 - protein, 358 aa, unidentified
MVDKVTEAAVVGGVDTHKDLHVAAVVDQNNKVLGTQYFSTTRQGYRQMLAWMTSFGTLKRFGVECTGTYGSGLLRYFQSAGLEVLEVTAPDRMERRKRGKSDTIDAECAAHAAFSGIRTVTPKTRDGMIESLRVLKTCRKTAISARRVALQIIHSNIISAPDELREQLRNMTRMQLIRTLGSWRPDASEYRNVTNVYRISLKSLARRYLELHDEIADLDVMIAAIVDELAPELIKRNAIGYESASQLLITAGDNPQRLRSESGFAALCGVSPVPVSSGKTNRYRLNRGGERAANSALHIIAIGRLRTDAKTKEYVARRVAEGHTKMEAIRCLKRYISREVYTLLRNQNRRINSIPITA

SEQ ID NO: 51692 - protein, 265 aa, unidentified
MNYVGIDIHKRYSVCVAQDERGRRLGEARIEGNLAAGFAQFFRSLGGKSRVVIEACWNWQAIYDRLERVEQIESISVANPYKTRLIAEAQIKTDRLDANGLATLLRGNFIAPVHVPGRQARARKNVLRQRLYWARLRTRIRNRTHALLDRQQEIQLPQCSDVFGARGRSFLRQLELAKPDAYLLGEDMELLELIGRQIKEQEKRIGAGNQHDALSRRLQSLPGMGLILSAVAAAEIDSIERFNSAEKLCAYAGLVPSTYSSGGNT

SEQ ID NO: 51693 - protein, 339 aa, unidentified
MELYSAIDLHSNNSHVAIIDEQHNRIFYRKLGNDAKLIGNTFAPYRKELKGIVIESTYNWYWLADFLKEEGYSVHLANPCGIQKYSGLKHADDKHDAFWLAQMLALKILPEGYIYPKADRPLRDLLRKRAHFVQVRTSLLLSLQNIVMRNCGVKVRANHLKMLTQDPVAGLLKDQEELALAGKASKETIDFLTRQIQRIEKAVQSKAILKEPFSKLLTLPGVGDILGMTILLETGPIERFKDVGHYASYCRKVSSRWTSNEKTKGKGNTKNGNRYLSWAFSEASDHARLTHEPSRNFYNRKLNQTNACVAHSALAHKLARAAYFIMRDQVVFKEDKMFR

SEQ ID NO: 51694 - protein, 375 aa, unidentified
MSEHNEAFVAFDTSKLRNAVAVADGGRVGEVRFFGEIENIPEATAKLVRKLAGKYERLTFCYEAGPTGYGLYRQITGLGHACNVVAPSLVPKKPGDRVKTNRRDAVSLAKLLRAGELTAVWVPDEGHEAMRDLTRARETAVNDLRAKRQQVSALLLRLGRHYPHKRKTWTKAHMNWLASQKFEYPQQRFVFEEMMLAIRQAQERLTRLEEAIRGAVPEWSLAAVATALMAMRGIDLISAATLLAEIGDLSRFRTPHELMGYLGLVPSEDSTGDTVRRGSITKAGNGRARRMLVECSWSYQHPPRVGAHKQHKVDAAPPAVREIAWKAQCRLHKRYRALIRRGKLKTVAITAVARELAGFIWAINREITTACGAAR

SEQ ID NO: 51695 - protein, 371 aa, unidentified
MKSILYIGMDVHKENYTLCSYSFEKDELLYKQTVTPDYKMILKYLEQLRSRYADEIEIVCGYEAGCLGYTLYHQLTDHGIKCVILAPTTMGITNTGHIKTDKRDAGNIARCLAFHTYNAVYVPTPQDESVKEYIRMRDDQKKALKIIKQQILALVLRHGHRFEGGKNYWTQKHVKWLKSLDLGGTLQECLEEYLVTYEYLADKIERFDKRIEEFAENERYQSKVKKLSCFIGVKTHTALSALVEIGDFKRFARAEQMAAFLGLVPGEDSSGGKQKRGSITKAGNSHVRRLLVEAAQGYTRGSVGHKSVDLKRRQTGNEPQIIAYADRANERLRRKFYRMTLKNGTKRNVAATAVARELACFMWGMMTDHVA

SEQ ID NO: 51696 - protein, 446 aa, unidentified
MEKFEKMKIVNPNAAGIDVGSKSHFVAIGQEEKDVCEFGVYSKDHLVLIDYLKRSLISSIAMESTGSYWQTLFFALQEAGFEVLLVCGYQTKNLRAKTDVKDCQWIQKLHSLGLLRGSFLPSEQTARIRILHRHRSSLLEESSKMTNKMQKALRLMNLRLDVVISDITGKSGIAIIAAILNGERNGENLARLADPRVRKSREEISNALQGHWSEEYLFELKDCFDIYKLLQEKIKVCDLQIEKLLLEFTKGKTSKVGTGSLTKKQLKGKNQPKIDLVKLSNLYYDVDLFAIEGVSVGTVLTLISEIGQDIYKFQSAKQFSSFLRLAPNNRISGGKIISSRTPKGANRFSIALRNAANTIENVKKGPLFNFFKRIAYKKGRGAAITATARKLSVIIWNMIVKKQEYQPIETELYNQMIKQKRITSIRKMMKNSNILINELSTNYAFS

SEQ ID NO: 51697 - protein, 307 aa, unidentified
MRIICGVDVSKQWLDAWISGLHRRFANSPAGCEALLAFCREHAAELVVMEASGGIERPCFLALWKLGQPCAIANARSVRKFAEAMGYLEKTDRIDAEMIARFAEAKRMVSTPPPSADQQRLTALATRLRQVTEDMANQKRRLHSTRDATALASLEELIAFLRRQADTLADAISGMIDADPLWSALDRTIRSVKGAASRTVAYLLAELPEIGTLNNRAITKLVGLAPLPDDSGQRRGKRSIRGGRAGVRSLLVLIADIVRKFDPTLADFRERLLAKGLTKMEVRVALARKLLVRLNAKARDTRAALTA

SEQ ID NO: 51698 - protein, 345 aa, unidentified
MEQLIRIGMDTSKRVFQLHGVNAAEDVVLRKKLRRKEMVALFADLAPSVVGIEACGGAHHWARLLRSFGHEVKLLPPEYVKAYRKRGKNDAADAAALCEAMSRPTMRFVPVKSAEAQAALMLAGLRERLVRQRTQLSNAIRGYAAEFGHVAAKGLDKIEPLLARLAADEDLPELAHELFALHAKEHAELQAKLAAIEAKLMAWHRTNACSQRLDKIPGIGPVSAAMLTMKVPQPQLFRSGRDFAAWIGLTPKNHSTAGTTRLGVITRAGDETLRSLLVVGATAVIQQVQRGRGRPSPWLAALLKRKPPKLVAVALANKLARIAWKLMVSGESYRAAPIPAMPVAA

SEQ ID NO: 51699 - protein, 400 aa, unidentified
MNAVGIDVSKGKSMVAILRPYGELVEAPFEVKHTSSGVQSLIQTIQSIDGESRIVREHTGRYYEPLFCQLTQAGLFVTAVNPKLIKDFGTNSLRKVKSDKADAIKIAKYALDSWSDLKQYSVMDKIRKQLKTMNRQLDFYMKHKTSMKNNFIGLLDQTFPGVNNYFSSPAREDGSQKWVDFATTYWHVDCVRNMSRNAFINHYQNWCKRKEYNFRQSKAEEIYETAKELVPVLPKDNVTKFIVKQAASQLADASETVAQLKAKMDEAASRLPEYPVVMAMYGVGSSLGPQLMAEIGDVSRFTHKGALTAFAGVDPGINESGSYEQKSVPVSKRGSAQLRKALFQVMDCLIKNMPQDDPVYRFMDKKRKEGKPYYVYMTAGANKFLRIYYGRVKEYLLSLQ

SEQ ID NO: 51700 - protein, 332 aa, unidentified
MNLVSTLGIDLAKSTFSLHGVNSNGEVVLRRTLSRAKLSELVAQLQPCLIGMEACSGAHEWARRFVASGHTVKLMAAKFVMPYRKSGKNDGNDAEAICEAVARPNMRFVPVKSLEQQSDLTLHRVRQGFVDERTATLNRLRGLLAEFGHVLPLRAVEVHRRVPQLLGKLPTRVAACARDLLEHAARLQAKTFQYEHEIRAHVRSNALARRAQTRMGIGPITASALVATVGNGRDFKNGRQFAAWLGLVPRQYSTGGKTRLGHITKRSDPYLRTLLVMGARAVLQRAASLTDPLSQWALAVRERRGYHRACIAIAAKNARVAWALLAREPVPA

SEQ ID NO: 51701 - protein, 387 aa, unidentified
MSKPADLNRCLAPLDQEHTIIAVIEMSQSSWLVAGVVPGIERQPLKKLAPDQDALLKLLHRWRAEAGQAGREITRIAVAFEAGRDGFWLARWLRAHGIEAHVIHPTSIAVSREHRRAKTDRLDTALLKRVFLGWLRGEPEHCHMAAIPTLEEEDARRPTRERESLVGERTRIVNRIKAALARLGVRGFKPTLRKALERLDALRTPEGTALPPNTRAELHRDMARLQFVMEQIQQIEAARSQRLEQAGAEGPNAMVRLLAQVVGVGLETADMLVHEVLSRNLRDRRAVARYAGLTGAPDESGRRRREKGLAKAGNARVRRGMIQLAWRFLLHQKESALAQWYRARTAEARGSTRKTLMVALARKLLIALWRMVTTGEAPHGVVLRPAG

SEQ ID NO: 51702 - protein, 396 aa, unidentified
MRNDVTIYVGIDFSKEKFNACLLMEQGVMGESEFPNSKTGYLKLTKWVKNTSELGRSFDSSLVLFCGEHTGTCSIGLCEYLYAKGMKIWLESALKIKYGSGLKRIKDDKADAEMIAYYAKRFYEPGSCALFEPDSADLKTLRTLYQFRNRVVCDRVAIGNRISSGAFDCSTLVRNRMVKHHKEAQKDEKDIEKEMVKLMETSEELASNYQILISFKGIGPITAAALIIYTSNFKKFDNPRKFACYCGIAPFGKQSGTSINTKPHVSLFAHIGIKAAMVQACKSAMQHNAVIKAYAQRLYAKGKHEGIVMNNVKNKVMHIIFKMIQTQTLWEQEYQQKHMKECKAIPGKNGIGATEAAPIINATLKTSSSVVECTFLEEHSFQKNCKKTSSFSCVET

SEQ ID NO: 51703 - protein, 304 aa, unidentified
MNGIGIDVSKRQLDVGTTDGKTLQVSNSRSGFAELDLWLQGHPAGQIVLEATGGYEQPVLDFLHNAGHPVVRANALRARKLAQGLGHMAKTDRLDAYALAKMAALVKLRSYQPLEPWQREMRDFVRARRQAMHALTVARQQQEMVGNRELRRLLQANITCLQRTVERLGKRISEQVSKQPQLAVLKSMKGVGPGLQAVLASYLPELGKISGKAVASLVGVAPMSHDSGTMRGKRSIHGGRAEIRQVLYMASMSAMRHEPRLRDFYQSLRARGKEGKVAIVAVMRKMLVILNARMRDAQGGSIPA

SEQ ID NO: 51704 - protein, 422 aa, unidentified
MLEEDPQVEEVVARVAALDIGKAEVVCCVRVPHEDKPGRRCQEVTTHSTMTRSLLAMSDHLRCVGVSRVVMEATSDYWKPVFYLLEAQGLDPWLVNAKDVKHLPGRPKTDKLDAVWLCKVAERQMIRPSFVPPPQIRRLRDVTRYRIDLVGVRSAEKQRVEKLLEDAQIKLSVVASDIFGVSGREMMAALIGGQTNPKALAQLAHGRMRAKITQLEEAFTGHFTDHHRLLLTKMLARIDALDADIAELDAVIEEMVAPFILAVEKLDEIPGVGTTVAHVVLAEIGIDMSRFPTAAHLASWARFAPGVKESAGRKKGSGATGHGNRYLARVLGEAAVAAGKTDTFLGERYRRIARRRGKKRAIVAVGRSILVIIWHLLSDPQARFVDLGPDYYDNRIGPERKKRNHIRQLEALGYKVTLQPAA

SEQ ID NO: 51705 - protein, 388 aa, unidentified
MYLIGIDISKYKHDCFIATEAGVTIKAFSFENNRLGFDLFLEVIRSLDQSKEIRIGLESTGHYGSNLKRFITTSGYTYLEFNPYLTHMFSKALSLRKTKTDKVDAKTISSMLGSVDYKTLHTRFYHINELKQLVRYRHVQMMNRSKTLIELTNILDRIFPEFKPFFNERFAGSAIFILKKFKSRTRISKLSTKDYESIRSYSKGKLSYVRVQKLKSLALSSVGYETQADLLLLKHSIKHHEELSNTLDSIDEAILSIMKDIPQTLTSIPGVSVISAAIIIAELSDFKNFTNPAQIVSFSGLDTSVNQSGTMETRGHLVKRGSGLLRMTIWQITFNSLRLNPRLYDYYLKKRAEGKHHKVALVHCARKLIRTIYYLGVNQLTFDHSQFK

SEQ ID NO: 51706 - protein, 461 aa, unidentified
MRKARKSGRKPGRKIVDVTANMEILHRDAAGIDVGNAQHYVAVPAGRDPKPVQTFESFTADLHRLGQWLKACQVRTVVMQATGVYWIALYQILESYGFEVYVVNAKHTKTLPGRKTDVLECQWLQKLHTFGLLNNSFLPPQQIRVLRTYLRQRESLVAAAGTCIQQMQKVLTEMNVQLANVLSDLSGRSGMAILKAILSGERDPQRLAALADRRVQASRREIAQSLEGHWREELLFVLQQVHDLYFFHLESIAGCDRRIEAHLQTLPSKVDLTASPLPHRDRLPRRKHLPQTNLREELYRIAGADLTRIDGIEVQTAQIFVSEVGVDMTPWPDEHHFASWLGVCPNHQITGGKVIRRSTKKVLNRAATALRLAAQTLHRSQSYLGAKYRRLRAKLGAPKAITAMAHHLARLIYRLLRFGTEYHDKGVQHYESKYRQTQMNWLQKQAAQLNMQLIPANGDAK

SEQ ID NO: 51707 - protein, 339 aa, unidentified
MYYTGIDQHKLTSYLTTVDNKGVIIKQANLKNNDFEILNYFHQLGDQSIATVETTGGWYWLSDLLKENNIKLKLAHAKYVKAIAYAKVKKEKVDSHILAQLLRMDFIPEANKIDEDLRPLRDTLRARLRLTQKRTSALNFMNRMLEKFNVQNPSELSEQYQLQYGQFSDQAEFLKEQILTLEKSIHPELLPNEDIQRILWIPGIGKMNAFTSFLEIYDINRFETVKNFLSYCRLAPQASNSGGKTKQSKTPKDGNKYLKIVFSDAAIHAIQYYPVIKKYHNSLLRKKNKQIAKYIISKEIASIVYHVLKTKKSFNNKFKNIDLARIKSFQWPRITSPVA

SEQ ID NO: 51708 - protein, 335 aa, unidentified
MKTWQVTTLTESGYKYSFAQHADAKELFDRLNKKFPGAHFKSAYEAGVCGFSAHYALMGLGFENIVVHAADIPTTGKEKALKTDAVDSEKIAWSLKRDELTGIYIKDKDYMDDTNLMRLRQRFIKDLSRQKNRTKHLLYTQGVTYPERFSKNGTHWSRNFMKWLREEVVLLSEEKRTLMLLCDQVEHIRKDILAVTREIRRLSTSDKYKENFSLLSSVPGFGLITSMSMLTEFDNNPMRFPNERKFVAMLGLIPTCHDSGEKKVSGEKINRGNKQVGPLIVEASWVAIHRDYQLGCYYTNCCQSMKPQKAIIKVARKLACKAYAVMKTKKPYVLS

SEQ ID NO: 51709 - protein, 343 aa, unidentified
MGEVSTIGLDIAKSVFQVHGVDGTGAVVMRKRVSRSKVLEFFAGLSPCLVGIEACPSAHYWSRELQALGHTVKLMPPSYVKAYLKRSKNDANDAAAICEAVTRPSMRFVPIKTQEQQTGLMLHRTRQLLVRQRTMLSNAIRGHMAELGIISAKGRNGTAELLQIIGDVADDRIPPVARFCLDLLARQYLTLNAEVYAVDKRIHAWHRACEESRRLEEIPGVGPIVATALVAEIGDWRAFRSGRSLAAWIGLVPKQHSTGGKERLGSITKQGNRYLRWLLVTGAMAVIRYARAHGTKRPWLTRIMDRRPAKVAAVALANKIARMAWAIMVRAERYKEPKLLLAA

SEQ ID NO: 51710 - protein, 339 aa, unidentified
MKFPFSLKHYEVMESIYVGIDVSKRTLDVCLKCSGNEQFFKIENKSNSIKKLFKELRKVDSCVVIAMENTGHYNHQLYKVLPNFNFTVYVIDPKHIKRSIGLVRGKNDKVDAKRIATFIERNNEDLDPWKPLSKSVYSLKVLLTERKAEVARIRSLKQRIEGLNQQKSISSVPKLITRNKKEIKRTQKRVKEIEKMIREEIAKENSLKREIDRIKTVPGIGDITAWMIAAKTQGFTRLLDPRKLACFAGVAPFEQQSGSSLKTKPRVSKMADRALKTVLQMAAMRAVRLNNELQEYYHRKVEEGKNKMSVLNAVRNKLIHIAMALIKNKTYYKNPLVLS

SEQ ID NO: 51711 - protein, 404 aa, unidentified
MYNAVGIDVSKGKSTVAVLQPGGTVIRKPFDVSHTSQSLIELARYLGSLEGSTKIVMECTGRYHEPMLKALYEAGLFVSVVNPHLIKNFGNNSLRKVKSDPADASKIARYTLDNWAELRQYSGMDNTRTQLKTLNSQFSFFMKQKVAAKANLIALLDNTYPGVNKLFDSPPREDGSEKWVDYAYSFWHVDCVRRIGLKTFTERYKAFCKKHHYIFQQDKPEKLFNASKELVAVFPKEKTYKLLIQQSIRQLNLASEHVERLRQEMNALASTLPEYSTVMGIYGVGKTYGPQLIAEIGDVSRFTHREALTAFAGVDPGVDESGQHKSKSNRASKVGSARLRKTLFQIMTTLLQNAPEDDPVYRFLDKKRAQGKPYYVYMTAGANKFLRIYYGKVKECLRNLEQAE

SEQ ID NO: 51712 - protein, 359 aa, unidentified
MDVRDQAKQHVIGGVDTHKDLHVAAVVDERDRVLGSQSFATTRQGYRQMLAWMGSFGEVQRIGIESTGSYGAGLLRFVQTVGIEVLEVTTPDRHDRRRRGKNDDLDAQNAAHAAFAGQRTVTPRSRDGMVESLRVLSACRKTAVAARRVALQLIQNTIVCAPDGLRDVLRSMTRMQLIRTLAAWRPDLTAYRDVEAAYRITFKSLARRYLELHDEIADLDIMIGAIVDELAPDLVARTSIGPVGAAQLLLAAGDNPDRLRSEASFAALCGTSPVPASSGKTIRHRLNRGGDRHANSALHIIAIGRLRTDPKTKTYVAKRVAEGHSKLEAIRALKRYIAREVFTLIMRRHKTINQTQIAA

SEQ ID NO: 51713 - protein, 406 aa, unidentified
MFYLGIDVALNTHRLVMLDGNGERVSSGISFQNNTADFKKVLSKLKELSINSDNSIAGLEATGNNWENLYCFLTSNRFKTIVLNPHQTNKFREALRKKAKTDDIDAFVIAGLLRSNEFASSYVPEDKIQTLRELTKLRYEFIKDHKNYQRQVLALLNIIFPEYKQTALKNPFAIASLAIFKAYPTAKHLSIAKPKHIEKIVRSIKGNNFNIKEIENLISIAKTSVYSGRCQESRAITLNILLSQVESFGKSIQQLEEQVNLILSPASNDDINSFPGSNLLTIPGVGPKTLAAILSCVGESGQAFHDGVKLIGHIGFFPQIYESGETKRANRLSNKGPAYLRQALYVASVACIKHNLQLRNLYHTKVSQGKKPKQALICVAKKLAHICLSMLHSGQDYNPARVFSYV

SEQ ID NO: 51714 - protein, 332 aa, unidentified
MLTESGYRERHPQQASAKTLFDFLKKHFPDGEYHAVYESGFSGFATYYALKEYGIDCVVTHAADVPTTQYEEVMKTDKVDAAKLARSLRAGDIRPIYIRERENIDDRSVIRIRKTIQKQLSGYKSRVKHLLHCNGVEIPDRFASPGTHWSKAFIKWLKEDVVLLSPSRLSLDLLVKQVETIRQTLLDATRAVRRLARTDRYGSNCELLMSIPGIGVSVAMCILTEIYDVKRFRNENQFASYLGLIPTCHNSGGRTSSGEKTFRGNRHLGPMVIEAAWIAVYRDYGLGLAYARYKQSMKPQEAIVKIARKMSNIIFSLLKNGRKYEPYRWDKE

SEQ ID NO: 51715 - protein, 352 aa, unidentified
MKKIVKQVAGIDVAQKELVVCLGRMYDDWSPQLYANKTFCNTIKGFVTLLQWIKKMTDEAVSVRFVMEATGVYHESLAYYLDEQGFEVSIVLPNKISNYCRTLDIKTVTDKTASEAIAQFGLERKLNCWQRPKGIYKKLRQLTRERDQIVQERTVAKNQLHAEQAEAEPHKKSIVRIRQRIALLDKQEKEIQTELAVLIKEDKEMQALIILICSLPGVGLLTASIVLGETNGFELIRNKRQLTSYAGFDVREKQSGTSVKGKPRISKKGNKYLRKAMHLPALTAIRHDERFKAIFARLVSKHGIKMKAAVAVQRKLLEMIFTLATKKMRYDKNYFTKTIEAETNKQQNKDAA

SEQ ID NO: 51716 - protein, 346 aa, unidentified
MTTVDATRPVTGGVDTHLDVNVAAALDPIGGLLGVAEFPTTPAGHRRLAEFLASFGTLTRVGVEGTGSYGAGLSRYLRGSGVEVVEVDRPNRQSRRHTGKSDPVDAIEAARAALSGRAQGAGKSRDGNVEAIRALVVAKRSSRSTKIQTLNQIRHLGFTAPEELRSRLQGISRQHLGAEAAALRPRAGGDPVVFATKTALSLLGHRVLVLDAERERLNLLLGELVKDTAPQLLEIHGVGVDTAATLLVTAGDNPGRIRSEAAWAHLCGVAPIQASSGKVTRVRLDRGGDRQANSALWGVVITRLRSDPRTQTYMERRLKEGRSKPEIIRVLKRYVAREVYHRLPRT

SEQ ID NO: 51717 - protein, 315 aa, unidentified
MERHPASPSFVGIDVSKDRLDVHVRPSGQTFAVARDGKALEQLVSDLRALAPTLIVLEATGGFEITVAAALASASLPLAVVNPRQIRDFARATGRLAKTDTLDAQIIALFAERIRPEARPLADADSQNLAELVARRRQVVELLGMETNRLHQARNPRVQRMLKATLKTLKAQLAELDCDIDDTIKRSPIWRAADDLLTSVPGVGGVTAHTLIADLPELGQLDRRRVAALVGVAPVNRDSGQMRGKRTIAGGRADVRSALYMAALSAIRWNPIISQHYKSLVERGRPKKVALIACMRRLLGILNAIMRTKTPWQCA

SEQ ID NO: 51718 - protein, 355 aa, unidentified
MPSKTDTAVAHTIGIDTGKNTLHMIGLDEKGAIVLREKVSRTRIAARFVNVPPCLIGIEAGMASHHIARELAALGHKVKQVPPAYSKPFRQVHKNDFRDAHAVAEAVERPSTRCVPIKTDGQLDLQALHRVRSRLVGNRTAVINQIRGFLLEHGIPVRQGHRFLRQQLPQILATRADVLSPRMIRIIGDLVEDWRYLDERIETVTDEIEALARADEGCQQLITVPGVGPIISSAMVAAIGNGAAFCKGRDFAAWLGLVPKQMSTGDRTILGRITKRGNRYLRTLFIQGARAVLLHPTSWARHSFGPWLTTAARRMHRNVLTVALANKLARIAWTVLAQGRRYEARVEPRIEPAAA

SEQ ID NO: 51719 - protein, 364 aa, unidentified
MKEYIGVDLGKRKAVVVKKDRVGNVTGKATLAVTEAALEKYFSKQDPRSKVVVEATGNWMYLYETIEKHVPEVVLAHPLKTRAIAEARIKTDTIDATTLAELLRLDGIAKAYIPPQEVRDTRELLRYRASVVSLRMGLKNKVHAVLTKNGIECSFSNVVGKKSRQWLKTLSVRDCYRRELDGYIRLAELSTALIQEITTKIKEVVSVTPQAQLLMTVPGISYYSALLILSEIGQIERFPSAKHLCSYAGLVPSVYSSGSKSFHGRITKQGSRWLRWICVEISIHAANGDARFQSLYRRILRRRGLATAKVAVGRKILTVIYAMLKNNEPFRRRRPRQLILAKAWSKKSKESSGHPPGVMIQASA

SEQ ID NO: 51720 - protein, 339 aa, unidentified
MPDVEALLRLLERWRDEAAKASRPITRITVAYEAGRDGFWLARWLSAHGIEAYVIHPNSIAVSREHRRAKTDRLDTARLQRAFLGWLRGERQHCSMATIPSLEEEDAKRPGRERENLVGERTRIGNRIKSTLARLGIRGFKPTLRQAPARLERLRTPEGEPVPPNTLAELRREMARLRLLAEQIREIEAARLQRLEQQPNSGAHPMIRLLAQIRGLGIETADMLAHEAFSRVLRDRRAVARYGGLTGAPDESGARRREKGLARAGNARVRRGMIQLAWRFLMFQKDSALAQWYRARTADARGATRKALIIALARKLLIVLWRLVTTGELPHGVVLRTAS

SEQ ID NO: 51721 - protein, 337 aa, unidentified
MKYSGIDLHSNNCVVTVTDEEDRVVAEKRVPNDLAKILGLLAPWQDELVGVVVESTFNWYWLVDGLQEAGFKVLLANTTAIKKYEGLKHSGDETDARYLAQLLRLGILPTGTILPPEQRAVRDLARKRMQLVRSRTMHILAVENITARQHGARISSNQVKHLTTESIDQMRLPEDVALAIKANIAVITTLSAQIVLIEKRLQEKVVVCAEYGLLTTVPGIGQALATIILLEAGPIDRFAAVGNFASYARCVDSVRISNGKKKGEGNAKNGNKYLAWAFVEAAHFALRYCAEAKRFYERKKAKTNNVVAIKALAHKLARASFHILKERKPFDVTRCFA

SEQ ID NO: 51722 - protein, 374 aa, unidentified
MSNISEAFVAFDTSKLRNAVAIADAGRAGEVRFLGEIENSEAAITKLVRKLTAKYGRLTFCYEAGPTGYGLYRQIESLGHACMVIAPSLIPKKPGDRVKTNRRDALNLVKLLRAGELTAVWVPDRRHEAMRDLTRARGAAVEDLRSKRQQVSAFLLRQSLHYAGKKTWTKAHMNWLASQKLEHPEQRIAFEELLLAMRQAQERIERLEQAIRAGLPDWSLAEVVTALMAMRGIDLISATTFLAEIGDLSRFRTARELMAYLGLVPSEESTGDTVKRGSITKAGNRRARHILVECSWSYRHPPRVGRQKQEKVAAAPRAVREIAWKAQCRLSARYRALTRRGKLNNVAITAVARELAGFIWAISREVTTARAAAG

SEQ ID NO: 51723 - protein, 390 aa, unidentified
MDVLYQSCAGIDVHQATVVVCILHGPLTSTRPKREMAQFDTTTKGLKACHDFLSQFHVEAVGMESTGVYWRPVWHELCDDFELILAQPAHMKAIPGQKTDKKDAHWIAQLTRIGLLPRSFVPDETIQELRELTRQRKHYVESRNRETNRIHKILQSGGIKLTTYIEDIMGASGRNLLQLLIDETPLTPRMIHQSVYTSLKRKVPQLLEALDGYFSAHHRFMLGQSLEIYDFYQKQIDCLEERINGYLNLYERPVEILDSIPGIDLITASVIIAEIGVDMSQFPTAGHLASWAGLCPGNNESAGKKRSTKIRHGNSYLKRCLCQAVFAAKKQKGSPLAERYYQIQSRRGPQKATIALAHQLLKIAYILLKENLTYQEFVLQKKATRDEPVA

SEQ ID NO: 51724 - protein, 403 aa, unidentified
MIFVGIDWAEAHHDVCVLDEAGAILAKGRVPDGVDGVARLHEVVAAHAEEPTDVVVGIEIDRGLLVGALVAAGYLVYAVNPLAASRYRERHTTSRAKSDPGDAKMLADLVRTDRHNHRTVAGDSDLAEAVKVLARGHQGLIWSRTRQTNALRNALREFFPAALQAFPELGALEACAVLAAAPTPALAKRLSQSRILRLLRSAGRQRNLDRRAAEISEALRSPQLQAPPVVVGAYGEVVRSLAQVIEGLTREIERLQTELSTRFEMHPDAEIILSQPGLGSLLGARALGEFGDDPNRYADAKARRCYAGSAPITKASGTRLVVLARVARNRRLADACYLWAFAALSASPGARRCYDAHRAKGKTHHQSLRAVANRLVGILHGCLRHRQLYREDIAWPTSVETAA

SEQ ID NO: 51725 - protein, 313 aa, unidentified
MQPCFVGIDVSKNSLDVHVLPQGQHYCFAYTSEKLEAMVKKLKKLNPKLIVMEATGGYEISAAIKLNQSQLSVAVVNPRQVRDYARAIGRLAKTDAIDAYVIARFAQDVRPKTRDQITLNNLHLKELVSRREQLIDIRTAEKSRLSRARCKQVIETIEKLIQTLDDQIRQIDNQLENEIKNNPTWSKKVELITTVPGIGKKTAITLVVMLPELGKLNRQEIASLVGVAPMNRDSGLLRGKRCIVGGRALVRRALHMPTLSSATRWNEKLKSFYNRLMANGKKHKVALTACMRKMITIINCMLKNDRAYNPNCL

SEQ ID NO: 51726 - protein, 394 aa, unidentified
MSSESKTSSTTVSTVYVGMDVHKDSVMVAVLPAAAPQPIAVDRLPNDSAVLRRFFTRLAREGTTVRACYEASGAGYVLQRAIEEWGHTCIVVAPSMTPQRPGHQRKHDKRDAIQLARLFRAGELDAIRIPSTADERVRDLVRCRQTLQQNVLRARHYVSKFLARRGFVFRQATLWHRAHFRWLHALLAGTGARALASEDTLVLGEYLALLEYTLARRDALDEQLETLARTPAYAAPVGRLKCFRAIDTLSAMVLITELGDWRRFQRPAQLMAYWGLVPTEHSSGPRERRGSITKAGNSHCRHILVQAAWHYRHRPAISGALKERQRGQPATVIAHAWKAQHRLYTLYHRLAARRPTQIAVVATARELVGFLWATMRDLRDGLAETELQPGGLLA

SEQ ID NO: 51727 - protein, 356 aa, unidentified
METAYDGRQVVGMDLHRRRSVLVRMTEDGRRLGTAKITNSPAELRGAIARAGKHPRVVLEATYGWYWAADVLAAAGAEVHLAHPLGVKAFTYRRVKDDVRDSADLADLLRMGRLPEAWIAPHEVRELRELTRYRIKLVRLRTSCKDQVHGVLAKLGVAVTCSDIFGVAGSAWLDGLRLPQPYAGKVTSLRHLAGELTTEITMLGEVIASLLAGDRGYQVIQQLPGIGPVLAAVIIAEIGEVTRFRNAGQLCSWAGLTPRHRESDTKVARGHVTKQGSRLLRWALIEAIQRIPRDCVIGAVKDGIIGRRGKEAKNIAKVAAARRLLTLACYGMRDGQIRCLSRPPAGPPVTETARAA

SEQ ID NO: 51728 - protein, 371 aa, unidentified
MKKNNTSGKELTQDRKTWRGPITIGMDVGDRTSRYCILDGNGETVREGSVGTTKAALKQLYGQLKRSRIALEVGTHSPWISRLLNAMGHEVIVANPRQLKLITESSRKNDRVDAEMLARLARVDPKLLRPIRHRGEEAQMDLMTIRARAALVEGRTALVNAVRGFSKAVGERLASCDTDQMGVEKMAELPAGLQKVLEPLLSQVEALTAGIKKYDREIEQIAREKYPETSLLTKVGGVGTLIALTFVLTVEDKNRFEHSRDVGCYVGLKPKQGDSGESQPQLRITKEGDAYLRTLLVQGAHHIVSVRSQDSDLKRWGLKLTERGGKNAKKRAIVAVARKLGILLHVLWVTGEVYEPLRNSHAAERQSRKAA

SEQ ID NO: 51729 - protein, 321 aa, unidentified
MRNAVGLDISAKTFDVVTIINGETDYRKFSNDEQGCKNLKEWISAKREKDIYVCMEATGNYYEQAADCLAEEYHVSVINPLKIKAYAQKRFSRVKNDKQDAKLIAEFCQTALIEELPKREKPTEQQYSLKRLLSLQSQLLEQQTSQKNRIKAAKDSFVQKIHEKQLKELENHLNAVKKKIDQTIKSDKKMKELTKRLETIPSVGKTTAISLMSYLINSTFENAKQFTAYAGLNPHQNISGTSVNKKSKMTKYGNRRIRGSLFMAALVAFKNNYFPAFTNRLKKAKKPKMLIIGALMRKILVVAFNLYKTETDFDKTRYQTA

SEQ ID NO: 51730 - protein, 423 aa, unidentified
MINALNVQSHEKGDRPLKKHSKSSQRSEPTLKRTKARGPVQRDAKEVLAEVLGKLTGKLDAPAVSSNVKESRRGNTVGPNRDRLTVGVDLGDRWSQYCILGLEGETLAEGQLRTTQEDVGEFFQAMTAARVVIEVGTHSAWVQDVITEWGHEVLVANPRLMEGSKRRKRKSDRIDANKLARLGRVDPQSLYPIRHRSREVRQDLVVLRARDALVSVRTELINTTRGLVKSMGTRLPRCSSPSFAEKVKDAIPVEVGEALLPLVQLTERVNDCIARYDQKIEELGQKKYGHTTLLRQVKGVGPITSLAYVLTLEDPQRFSSSREVGPYLGLVPKQEDSGDSQPQLGISKTGDRMLRRLLVGSSQYMLGAFGPDTIAKRRKDRNPVNRRSFDDAEADSLSERFAATTSTRLVRVTAGNGQIPGDR

SEQ ID NO: 51731 - protein, 345 aa, unidentified
MKYFFIGIDVSKEKLDATMIHYESESDSEQQLAYTTVENNPKGFRSLVSWSKKNAGRGVKTDTMLFCCETTGGYDRALCDWLYSNDLDIWRESALQIKRSMGLRKGKDDKADSEMIAHYALRFRSQATLYKPLDGNMRSLRNLFLYRQSLVADRQAKMVSAKEKQHISSKSKVDNFIYRDAQKSIDIMTRSIKECERRMLEIIKEDEEMYRNYLHLISCKGVGLVTSVMLIVYTDNFKGWNAKKMASYCGIAPFYESSGSSVFHKANTSGYSNRRLKGILTQAARSAITHNPTLRQYYLRMKAQGKPYGVILNNVNNKLVHILFSLVLHDCDFELDHEAKRALRA

SEQ ID NO: 51732 - protein, 272 aa, unidentified
MTVVTVGIDLAKNVFAVHGVNAAGKAVLVKPLVRRAKLLELIATLPACLIGIEACTGAHYWAREFQKMGHTVRIMAPQLVSPYRMSGRHGKNDAADAAAICEAVARPNMRFVPIKSVEQQGQLFVHRAHQGYVSERTALINRIRGLLSELGIVLPQAFKAFLSGGAQVLEDLPGYCNQVIGDLLNELYHIEEKIKNSEKLIQQLARDNSAAQLLMQFRGIGPMTATAIVASIGNGHDFKNGRQFSAWLGLTPRQQSSGGKARLGRIDLLPVD

SEQ ID NO: 51733 - protein, 411 aa, unidentified
MHNRQNYLYVGVDLHKEHHTAVIINCWQEKLGEIQFDNKPSAFSKFLLEVETYVSDGLSVVFGLEDVGGYGRALAKYLVDHEQVVKEVNPALSFLERKSQVMIQKNDSWDAECVARILVNKFNQLPDAKPNDLFWSIQQLVSRRNALVKAQSALKNQLHIQLNHHYPSYKKFFSELDGKTALVFWQQYPSPSCLGGTNIKQLTAFLLDVSNNTCSVKKASDILKLVKEDGQTMKEYQETRDFLVRSIVRDIEFKKKEMKYSERELKRLVILLDYQLETMPGIELVTASALIAEIGDVRRFPNANKLARFAGIAPVYFGSGGKGNTHKSKQGNRALHALFYNLAVQQVQVAKGSKLPRNPVFHAYYQKKLKEGKTKGQALVCIMRRLVNIIYGMMKYKTAYELPIVEEKEVV

SEQ ID NO: 51734 - protein, 321 aa, unidentified
MNKNSTILGIDISKDSFDVFSEEGGHKSFRNTLEGFRLFYKALSPDHWVVMEATGSYHHRLALFLHQKGICLSVVNPLVIKRFIQMKLNRVKTDKSDARMICQYGEEASLDSWNPDPEYMRECKQLQSVIGVYTKQQTALKNKLHSLSSSGVSSGCMVRSLKRQLKALKGEITALQDKMEALIKEHEQDVYTRIQSIPGMGKKTAMLLIVATNGFRDFESSKQIASYLGLAPHERSSGSSIRGRSRIGKNGHSVVRSHLFLCSFTACLYNPQCKALYDRIVRKGKSKKLALIAVSNKLIKQAFGIAKSGLYYDENYRGSLA

SEQ ID NO: 51735 - protein, 339 aa, unidentified
MPGWLIDVHQDFYVVVEQAGGSNPKPPQRFPKAAFLHWAAKLKSQATEVYAVYEACGFGFSLQRKLSALSIKCYVVCPQKLDEQNRRVKTDGLDAKALCLKLDRFVQGNRDALAIVRVPSEEEEQARAIHRQREQLVKARKQLEAQGRSLMVNHGLEPVPNWWKPRTFTALPAPQWMKELLANSQPILVGLQQKIAALTVQLQSAASPEQPRGLGKMTSVVIDREIGDWNRFSNRRQIASYTGLCPGEYSSGNTRLQSCVTKHGNPRLRAALVELAWRLVRFQPNYHPLRKWRQILAKGALATGAARKKAIVAVARQLAVDLWRIKTGQLRSEELGLIN

SEQ ID NO: 51736 - protein, 415 aa, unidentified
MEKIYDKCCGIDVHKKLIVACLRSGRKNEIREFGTSTKDILSLTDWLTDKGCEMIAMESTGSYWKPIYNIIESCGLQAIIVNAQHMKAVPGRKTDVKDAEWIADLLQHGLLKASYIPDKAQRELRELVCYRKSLIEDEARELNRLQKMLEGGNIKLSGTVSNINGKSSRNMLEVILSGEVLDLKKLESMVSEKKVSKRLKASKQKIVDDMDGVLTALQRKMIRELLKHIDELERHIKNLSDDIDRFMDSGEKAAVKAIEEVPGIGKVSAEAIISVIGTDMSRFPTDKHISKWAGLCPGNNESAKKRNSGRTTKGNKTLKTTLVLCAHAAVRVKESYFAAQFARISVHRGKKRAYVAVAHSMLIAIYHMLRYGATFMDLGSEYYNTFNRERKAEGCLKKLKQLGYAANIATIADLA

SEQ ID NO: 51737 - protein, 318 aa, unidentified
MYNVGIDVGSKELVMVVRHKGKNHKARSFNNTHEGHAQIVKILSAKKDDIKICLEATGVYHFDLAVALTQAKLSLMVVNPKAARHYFEALMTRSKTDKVDAGILAQYAEYMPFEAWQIPDSKILQLRAYSRRIAALTKLKTQMKNQLHSMVSGNATPEAVIDETAESIAFFETQIQRLKEHALDLIASDEKLQCSFDIVTSIKGVAEASAIQLLGEVLILPEDMKDRQWVAFAGLDPRQHSSGTSVSKKSRISKVGNAHLRQALYMPALCASHTDPYVKAYYQHLIEDQGLKKIQAVCAVMRKLLHAIHAMLKNRTCC

SEQ ID NO: 51738 - protein, 350 aa, unidentified
MIIIGVDFHPEYQEIASVDTDTGEYQEKRLAHPKEAEEFYRSLSCVGQVVRVGMEASGHGRWFERLLEGLGVELWRGDAEVIRAKRGRKQKTDREDARHILKLLLKDDFPRIWVPNWENRDLRQLLWHRHRMVQARTRVMNQLQAVALNEGLRCKKRLFRADGRQQLESFQLAPWASRRRRELLELLDRLNPAIAELSQAVEREAEKCPEAQRLMTHPGVGALTALAFVLIIGETERFQCGKQIAAYLGLVPLEKSSGNRRRLGHITKQGSSIVRFLLVEAAQVTVRSLPEWRSKYTHLMMRRGRKTAKVAMARKLAVRLYWMWRKGWDYEQWKKFGSYVGQPVHRYGVQ

SEQ ID NO: 51739 - protein, 417 aa, unidentified
MEEALEWFVGIDWASEKHRVCLLDGTGRCVGERDVPHGGAGLAELCSWLLTATGAPASRIAVAIEVPHGPVVEALLEQGFAVYGINPKQLDRFRDRFTVAGAKDDSRDAHVLGDAVRTDRHALRRLAVEHPLVIELREFSRLSDDLQQEQQRLVNRMREQLWRYYPQALELTDDLTSDWFLALWRQAPTPAKAARLRQATVAHLFKAHRVRRLQPAEALAILRRPPLAVAAGTTAAACAHIETLIARLALIKRQLKAAHRRLDELCAQLDAEDVPGQPFEQRDLAILRSLPGVGRIVQATLLAEAPQLVRRRDYDALRAFCGVAPVTRRSGKSCIVIRRLACNKRLSNAVFHWAKAAVQHDPASRQRYGALRQRGHSQGRALRSVADRALYVLCTLLRRQTLFDPDHARPALMAAAA

SEQ ID NO: 51740 - protein, 321 aa, unidentified
MTTSPPDGSYVCVGIDVSKDKLDVDWSDDRPPFSADNTPDGHRLIVQALLPVGVHRVVVEATGGYDRPIVAELAAAGLPVVVVNPRQVRDFARATGRLAKTDAIDAKILALFAVAIQPPLRPLEDAQTQALAELLARRRQLVQMRVAEGNRLDQAQAKKVKQSIGKVIKVLDRQIDDIDDDLNKLIQGSPIWKVREELLTSVKGVGTTTARTLLAELPELGTLSRQQIAALVGVAPFNRDSGQFRGKRSIRGGRSVVRSALYMATLVAAQFNPVIRSYYHRLQAAGKRKKVALVACMRKLLVTLNAILRTQKPWRSPNVYA

SEQ ID NO: 51741 - protein, 346 aa, unidentified
MQHYVGLDVSLKQTAVCVVDQTGKIQREGMVASDPDTIADFIAANAPHVARIGLEAGATSTWLWTELKKLGLPVICIDARHAKAALKMQINKSDRNDAVGIARIMQCGWYKEVRVKDLDSHAIRSLLSSRALLVDMKRDLENQIRGLLKNLGLVIGRAKLNTFTARANELIDGKPALAAAVAPLLKAREAIEQQIADLDCKVLRLARSEPQVRRFMTVPGVGPITALCYLATIDDPTRFKKSRNVGAYVGLTTRRYASGETDRTGRISKCGDGMLRSYLYEAANVLLTRVARWSALKAWGMRIAKRRSLSKARVAVARKLAVILHRMWIDGTEFCWSSQGNAMQSA

SEQ ID NO: 51742 - protein, 349 aa, unidentified
MSILAMDLGKYKTVFCEYDSTGGEHTFGTVKTKPQDIHDLFVTTEPERVVVEVCSTAGWIVDIADALGIETEVANTMHDAWRWKNVKKKTDKEDALKLAKLSAMGQIPTVHMPAKDVREKRALMKYRQRLVSYRTSIKNAIRAIFVREGIAIVRTKALWSREGLAWLKDQARALDKISDAEQLWRGQLHVELGLLQTVITSLKAVERKLNEMGSSDQRVKRLQTINGVGPRLAETVVAFLDDPKRFKNAKQVGSYVGLAPRQYQSGQSERQGKTGGRGNKLLRNLLIEVCWVSLQSNRWARETYQRLLRGSPSRKKIAITALARRLVVRCWAMLRDEQDWEDGIEMSSA

SEQ ID NO: 51743 - protein, 411 aa, unidentified
MKTYLLRHANPVEPQRRSAPRTTTSAILGRPASAKNGPVLFVGLDVHTDSIAVSLAPSDTTEVRRYGLIGGTHDEVLRLAKKLRAAHPDTELRFCYEAGPHGYPLGRCLRSHGYECILVAPSKIPRAAGERVKTNRRDADQLARLDRAGELTAIYVPDPQDEAVRDFLRARYQVQRQQHRARQQLKMFLLRHNFHYAGTKAWSAAHLRYLATVKLPYPEQQFLFQEMVQVITEAGERLERYDAQLPRVVAGWRWAPVVRALMSLRGVALWTAATLLAELGDLHRFATARQLMGYLGLVPSEDSTGDQRRQGGITKMGNGLARRALIEAAWNYRTPARISRELLKRQEGLSKQIKDLSWAAQTRLHHRYQHLTGVRHKKSPVAAAALGRELSGFGWALGQIVAPHAPKPVAA

SEQ ID NO: 51744 - protein, 343 aa, unidentified
MSILYAGLDVSLELTSICVVTAEGSIFKEAKVASDPEAISMALLELDASFERIGLEAGPLSQWLFFGLRDAGLPVCCIETRHSKAAIAAMSLNKTDRNDARSIAQLVRSGWFKTVHVKSVESQELRTLLTSRQFLVNKLRDHENEIRGALRPHGLKVGRVSSSGFAARIRELVADRPRLALCMEALLASREVLMTQLAKLHAALLRVVKNDELCVRFMAIPGVGPVTALAFKTTIDRPERFRRSADVGAHLGLVPRQFQSGETDRRGRIAKTGDGLTRCALFAAANVMLSRSTQWTALKHWGVTIAKRSSLKKAKVAVARKLAVIMHRMWRDGTAFRWTAKEA

SEQ ID NO: 51745 - protein, 372 aa, unidentified
MADDSVIFIGLDTSKLKISVAIADGSRNGEVRFWGDISSEPTCVASMVNKLSKRGAKLHFCYEAGPTGYGLYRQIVELGHECAVVAPSLVPKRAGDRVKTNRRDAVSLARLHRAGELTAVWVPDAGHEAIRDLVRAREAASDALKQSRQQLQSFLLRHGRVYSGRKPWTRAHTRWLASQVFDHPAHHILLAEYRQAIEDAGVRLDRLTKLVMETAASWSMAPVVAAYQAMRGVAFMTAVTFVVEIGDVRRFDNPRQLMAYLGLVPSESSTGERVKRGGITKAGNTRARRVLIEGAWTYRFPARVSPTIQARLEGLPRTVREIAWKGQVRLCARYRKLVAAGKPKVVAVTAIAREMAAFLWAIGQEVAPTAKA

SEQ ID NO: 51746 - protein, 316 aa, unidentified
MEAPVAGIDVSKDKLVVYFQGKYYEFQNNKQGFEGVKQVLPKGCKVAIESTGVYHINLAKYLGKEYDVRIINPLVLKKFKNIRGKKSDKNDAKKLAELVISMGSEFTTSEAKELTSQWDFITRSIVRVKNRLRRDLILLGYKDSLSKKNLNEVLRGEDNIVLSEVRFLLDELERLEVRKREIEEELEDLVPKDSLIFTIPGIGRTLGCIILARVGDVKRFGDKKRFVAYCGLDPLVESSGKSVVSRGISRRGDAVLRRAFYLAALTAIKVNPIIKRFYEEHKENLKGKKLITACARKLAVITWAVLYYNKPFDANE

SEQ ID NO: 51747 - protein, 329 aa, unidentified
MSALVCGLDVHKDSTYATILDPSGKIVNQMRMNNERVLSYLSNFNVGKVAMESSNQVASLYRKLESKGYSVVVSHPKKTRYIAEAKIKSDRVDSRAIAELARLDALPLAYMPDKEISMLREQVRRRAFLVRERVKLRVKIKSILTYEGIRWPSDTGLFTVKGVEWLHGLCFEPVESYLRVLKPLDDEIRLVSKQLRGLAGKDEEVKLLMTVPGIGYYSALLVKSEIGDVNRFPFGDRLCSYAGLVPSTHASGNTVRHGGITKEGSKWLRWVMVEAAQTHVHKYDTSITRVYSRIAERRGRRSAVVAAAHKLLLVCFSVLKNRRPYYDQA

SEQ ID NO: 51748 - protein, 321 aa, unidentified
MTYIGIDVSKDTFVVAYSPDKNSKTKTFKNTTKGIHEFIRTISKEEHHCVMEATGNYSALLVYLLSEAGITTSLENPLKVKNFARAMLSTVKTDEIDARLIALYGEKMQPAPYKLRSDAILTLKQKRTVIRQLKKQLIATRNLKGSMEALPFFDAKCRKSVEKTIAFLEKQVKDLEEDLASLAKSEYKKQMDLLTSVKGIGVTLAAALIMATGGFTYFDNAKQLTRHLGLSPTYQQSGTSVNFKGHINRNGDSSLRSQLYVAAFSSIRCNTECRACYDRLRSKGKPGKVAVIAVANKLIRQAFAVVTQEKPYVDGYVSSKK

SEQ ID NO: 51749 - protein, 373 aa, unidentified
MQENSKIFVGLDTSKMKISVALAEEGRRGEVRFLGDIDNTSDAIRRLIRKLTGKFCELLFCYEAGPTGYGLHRQITALGHACSVIAPSLIPKRPGEHVKTNRRDALTLARLHRAGELTTIWVPDPGHEAIRDLVRAREAAMEDLRKKRQQLQSFLLRHGRIYPGLRSWTLVHARWLSNLTFEHPAQYLVLREYRQAIEDAEARLERLTQQVADVVSTWSMAPVVEAYQAMRGVAFLTAVTFVAEIGDVRRFETPRQLMAYLGLVPSERSTGEQVRRGSITKAGNPRARRVLIEGAWTCRYPARLSRALQVRQERLPKTVRAIAWKAQMRLCARYRRLMAAGKRQTLVTTAIAREMAAFLWAIGHEVEPRSAAA

SEQ ID NO: 51750 - protein, 408 aa, unidentified
MGRAAEVVAPSSSIRTDGGCPVVQVNDLSRSLAAFDPISTLVVVVEMSKASWLVSSVVPGVERQPLKKLEPDATALLRLIERWRNEAVRVGRPISRIVLAYEAGRDGFWLARWLIARGIEAHVIHSASVAVSRERKRAKTDRLDAAMLMRVFLGWLRGERGHCGMVAIPTMEEEDARRPNRERESLVKERSRIINRMKSALARLGIRGFKPHLRKAPERLAGLRTAEGTGLPANIIEEFRRDMARLALVREQISSIEKTRAERLERAPDTGPHAMVRLLARVIGIGIETADMLVREILSRKLRDRRALARYAGLTGSPDESGLKSREKGLAKAGNARVRRGLIQLAWRFLMFQKDSALARWYRTRTEGPSGARKTTMIVALARKLLIALWRLVTTGEVPDGVELRTAA

SEQ ID NO: 51751 - protein, 318 aa, unidentified
MPEFSRFVGIDVAKDRLDVHVHPDAIVFSVVNTAQAVRRLIKRVGPTEATAFALEASGGYERTCAQTLAAAGLTVFCLHPADVRAFARLNGKRAKTDALDAALIARAAQAGAPTRKPYRVDTLADELKEMVALRHQISEHLTVLRGQIKRLSLPAMKQLVAQRIKQAQDDIKRIEHTIAQTIAAQPELDARATRIQSAPGAGPILAATLIAYMGELGTLSSRQAASLVGVAPHPHQSGNSTRPGRCQAGRARVRRVLYMATVAAARTTSKASPIRDFFLRLRNRGKPFKLAIVAAMRKFIVTLNAMIKNNTDWRPNTI

SEQ ID NO: 51752 - protein, 398 aa, unidentified
MTESSDYESVQVFIDDDVGKDTHHAVAVNRSGKRLFDKTLPNDENKLRSLISDLKQHGQILLIVDQPATIGALPIAVARSEGVLVGYFPGLAMRRIADLHSGEAKTDARDAAIIAEAARTLLHALRTLKLADEQIAELSMLCGFDDDLAAQTTQASNRLRGLLTQIHPALERVLGPRLDHPAVLELLQRYPSPEKLASLGEKKLAALLCKLAPRLGKRLATDITRALTEQTVIVPGTNAAVVVLPRLALQLITLRKQRDEVALEVEQRVLAHPLYPVLTNMPRIGARTAARLLTEVACRAFASAAHLAAYAGFAPVTRRSGSSIRGEHPSRWGNKTLKRALFLSAFAALREPISRAYYTRKISQGKQHNQALIALARRRCDVLFAMMRDGTFYTPTAS

SEQ ID NO: 51753 - protein, 356 aa, unidentified
MKNSQLDFTGQTLYIGIDVHKKSWQVTILLNGMKVKVFSMNPNPKELNNYLTNHYPNANYHSVYEAGFSGFWANRQIQALGIKNIVVNPADVPTKSKERRKKTDKIDSSKLARELSVGNLDGVYIPSTKAEALRTLIRLRRQIVNDQTRQKNRIKSLLLFLGYSVPEDVETKHWSQRYIKALRNLDIEHEESKATLNELLNNLNFIRSQLVQILEQIKGFIAKDQQADKTVRLLKTIPGIGPILAVILYSEIIDIYRFKKLDELANYVGLSPAIYSSADKEINLGLTKQKNKYIRNYLIESAWIAIRKDPALQMAYGQLCKKIPSNKAIIRISKKLLNRIRTVWINQQEYVIATVA

SEQ ID NO: 51754 - protein, 347 aa, unidentified
MQTLIERGCGLDVHQATVVACLLMVRRDGKVQKQMRTFGTTTRELVGLREWLLSEGCTHVAMESTGVYWKPIYAILEGALEIVVANAQHIKKVPGRKTDVKDAEWIADLLCHGLLRSSFVPPKPIRELRDLMRYRRKLVESQAAERNRLLKVLETANIKLANVATDVFGMSGRLMLRALIAGKATPQEMAELAKGLLRKKIPELELALEGKLEQHHRFLLELQLQRLEAAEKDLAVLEQCIRQMLEPYAAQLALLDEIPGVDWTLAAVIIAELGVDMSVFGSVSQLASWAGVCPGNNESAGKRKSSRIPSGNVYLKSGLVEATNAAARAKGHLSERQVFPSQGTSRV

SEQ ID NO: 51755 - protein, 347 aa, unidentified
MRFYNNAHPYYCGIDLHARLLYVCIIDDKGEVLVHKKIKDDKQALMMLLEPYIGNVIVGVECMHCWYWVADWCDDNDIDFALGHALYMKAIHGGKTKNDKVDSFKIANLLRGGNFPIAYHYSKEMRATRDLLRRRTKIVRHGAMLKGHVVNTNSQYNLPANQVNLKNVTAREELKHRYPDPVVQRNIELDMNILDFYARELSKVEHFILAQARQHDQASIELLKTVPGIGRILSLTILYEIGNINRFDSVQRFASYSRLVKCKAESAGKTYGTQGNKIGNAHLKWAFSEAAVLYLRGNDKAHNYLNKLQKRMSKAKALSALAHKLGRCVYFMLKNRTVFDDSRFLKG

SEQ ID NO: 51756 - protein, 339 aa, unidentified
MDHFAGLDVSVKDTSVCIVDDAGRIIREVKVASEPDALLAVLTNRIYHFKRIGLEAGPLSQWLFSALAEAELPVICVETRHMRAVLKAQINKTDRNDARGIAQMMRVGLYRPVHVKTLRSQKLRMLLTHRKLLQSKAIAVDNDLRGTLRNFGLKVGMVGTAKFEARIRELVENLPDLAVLVEPLLVVRRVLREQIGILHRRLLAIVRDDEVCRRLMTVPGVGPVVALTYRTTVDVPARFRKSKSVGAVFGLTCSRDQSGERDRPGAISRCGDEMMRAMLYEAAQSMLGRSSRWSWLKAWATQIAKRRGMKRAIVALARRSMDRPCLAREFERNGHFGPR

SEQ ID NO: 51757 - protein, 304 aa, unidentified
MEYFAGLDVSMAETHVCVVTRNGTAVHEARVPFTPASIAAALARVPSCQWILFETGRMAPMLYHGLSHLGLPVVCVESRQAYQALKSLATHKTDRNDARDLAHLARTGFFKPVHVKSLPAHAVRSLIIARKKLVGQRVTLENQIRGLAVVFGVRLPCALSSTVIGSALQASEGIPGLSAAMRGLVAARAAVLAAVTAIDGDIRKMARASGACRRLMSISGVGQLTALAFTAAVDDPGRFRRSRDIGAYLGLVPRRYQSGEVDYTGGTSKCGDRRVWTLLYEAAECHADPLQGTAEAQRLSIGDR

SEQ ID NO: 51758 - protein, 365 aa, unidentified
MQKISTMRTSGKNIFEGRLTLGLDLGDRSSAYCVLNEAGEIVLEHKLATTPETMKQVFGSMPRCRIAMETGTHSPWVSRLLTALGHEVIVGHAQKVRLITKSRRKDDRLDARTLARLARIDPELLSPVKHRSAQAQLHLAEIRARAGLVSARTALVNAARGLVKSYGERLRKCGTQQFTQGITSGLSAGLREALQPLLREVESLNEGIKEYDRRIEKMAKQTYPETALLKQVKGVGDLIATAYVLTVEDPHRFRKSRDAGCFVGLQPGRRNSGDSEPQMHISKEGDEYLRTLLVQGAHYILGPFGEDSDLRRWGQKLAARGGKNGKKRAVVAVARKLAVLLHRLWVSGEAYEPLRNSTKAMTAAA

SEQ ID NO: 51759 - protein, 398 aa, unidentified
MVPQLHVGIDVGCKKHRIGIADSQGRILEEFDTLHTEAGFREFFHRVDHYKETLGLPVAVAMEGYNGYARPLDQLIQEKGYILYNVNNLKLARFKEVFPGTAKTDTIDTRKILELFHLKEHLPLAKDVLQRVFPVPSVNEKLKRLSRRRRSLVNEKVRIANRLQSDLQAVCPELLEITHCVSNRWFLRVITSRDDLRQLARLRYSTLLKLRGIGPVYAGYIRQWQKIASFSREVDYVGPMILQDARRLLELLDQIQSLNKALEALVKGSEMTQRLSSIPGYGGTSVAELVGEIGTWERFSGESGLALYLGMSPLTYQSGQSHRTRTPRQVNRRAKAAMMTAVARHMGCVPESRAYYDKKRAEGKTHNQAIRALGRQLVRVIWSMLKNNRDYKLKEVNK

SEQ ID NO: 51760 - protein, 369 aa, unidentified
MKNGSTLRVGLDVHKESIAVAYAGKEGTEPVYVGEIGTRQGDIDAMIRKLQSKGAELVFVYEAGPCGYWLYRYLTRKGLTCFVVAPSLIPRKAGDRVKTDRRDAVMLARLARSGDLTPVYVPAVGDEAIRDLSRAREDALHDLNAARFRLKAFLLRNDIRYSGRANWSAEHVRWLARLVLPTPAQQIVFQEYVRTVSERTELLRRLEAELLEQAKTWRLYPVIEALQSLRGVQFTVAVTTVAELGDLTRFDRPRQLMNYLGLTPSEYSSGERRRQGGITKMGNGHARRVLVEAAKAYRHRAKVSEQIQARQQQLPKEICDIAWRAQVRLCGRYKKLALRGKHANTIAAAIARELAGFMWAIAKAQATAA

SEQ ID NO: 51761 - protein, 360 aa, unidentified
MEPEGKTSRITGGVDTHKDTHTAAALDATGRVLGNATFPASAVGYEELLAWLRRFGPLDRVGVEGTGSYGAGLMRYLRESEVPVIDVNRPNRQARRQHGKSDPADAEAAARATLSGDASGVPKSQDGTVEVIRILRLERRSAIQARTQAANQLHAVVSTAPEPLRTKLRALSLAALLDHARKCRDVRPTDTVSATQRVLRGLTARWQHLDREVDQLDAQLAALVKTAAPALVALRGVGIDVAGALLVAAGDNPERLAHEASFAALCGVSPVDASSGRQRRHRLNRGGNRDANRALWVVALVRMQRDPRTRAYVLRRTGQGLGKREILRCLKRYIAREVFKLLRASSVVAGDGETRLEHVA

SEQ ID NO: 51762 - protein, 356 aa, unidentified
MKSFEDIKNFVASKMVYCGIDIHKHHWNLCFFCDGIIVEKLTIDSDFHLLLRHTQRFYSSAQKIHFVYEAGFSGFHLQRQLAGRNYDCTITPPNRVPQSHDKVKTDKRDANKLAQFLASGLLKKVYVPPLSVEADRQILRLRKGCQQKLTRVKNQIKSYLNLHGCYSYPVNGSKWSKNYISWLESLEFELPTQRFVLQEYLKEFYYFQNRIAELTCRLREMAEQKAYQKNYKRLVACKGIGLITAMTFLLEVHDFHRFPSAEKFTSYLGLTPSQFSSGDHVRLGHITREGNSHVRCALVESTWTVIRHDPFLCDKYNRIRAKGTNGKKAIVATARSLAVRLRRCLLDDADYVVGVA

SEQ ID NO: 51763 - protein, 341 aa, unidentified
MEDVSTIGLDIAKSVFQAHGADASGAVVFRKKLSRGRLLAFFAAQPRCVVAMEACAGAHHWGRELMALGHTVRLIPPAYVKPFVKRQKNDAADAEAICEAAQRPTMRFVPVKSAEQQASGVIFRARDLLVRQRTQLMNALRGHLAEYGHVAPKGVMYLDRLVVEIEDPESEIPEAARTSLKAMVRMLDRLDTEIALLDAEIARRAKEDPVARRLMTIPGIGPVTAAALVALAPAPEAFRCGRDFSAWVGLTPLQRSTGGKQKLGQITKAGERTLRRLLVIGASAVIKQALIRGAPAGSWLAQMLTRKPRMLVAVALANKTARIVWALLARGGIYRAPALAA

SEQ ID NO: 51764 - protein, 342 aa, unidentified
MSEATLIGIDLAKRVFQLHGACDDGSVVFRKKLSRPQLIAFVSRHPRCVIAMEACATAHGWGREFEKLGHEVRLIPPIYVKPFVKRQKNDAADAEAIVEAATRPTMRFVALKSEAQQARAMLFRTRQMFVGQRTQLINALRGHLAEHGLVAARGPAHFKRLADAIEDDDPALLQDVRELGRMYLEQIEGLNARIADIDGKVKSAAKEDGLARRAQTMPGVGPVTALAIETFAPDLATFRRGRDFAAWLGLVPKQHSTGGKQRLGKTSKMGQRDIRTLLVSGAMAVLQAVERFDTPNNGWLKRLLTRKPRMVAAIALANKMARGLWAIIMKQEDYRNPVAAMA

SEQ ID NO: 51765 - protein, 375 aa, unidentified
METTRQALMNDTSVVRILYMALELSGNKWKVAIADGQRAPSQRSIAAGDTSELLQVVEKAKTRCRLPGVVRVLSCYEAGRDGFWLHRWLLEQGIENVVVDSSSIEVNRRARRAKSDRLDAAKLYEMRIRHSVGEKRLWRVVRVPSVQQEDERRVHRELERLKRERNAHINRMRSLAVLHNVRLGKVGGRGWSERLPQLKEQLPAGLWAEIERESVREQLVCQQMHTLEKSRQEQVKHMSAGPLVALLKLRGIGLTSAWLLTRELFGWRGFGNRRQLAGCAGLNPSPYDSGDCQREQGISKAGNRRVRALLVELAWYWLRYQARSALSAWFTRRFAAGGKRMRRIGIVALARRLLIALWRYVEHGVIPEGAQLKSA

SEQ ID NO: 51766 - protein, 342 aa, unidentified
MNGDYDGRQYVGIDLHRRRSVIVRMTEQGEQLGWVRIDNDPVALGLELAKAGPDPEVVLEATYGWYWAVDALQTAGAHVHLAHPLGVKGFAYRRVKNDVRDAADLADLLRMHRLPEAYIATPHERELRELVRHRAKLVALRSGLKAQVHATLAKQGRLPAASDVFGRAGMAWLRSAPLELVYRQRIDSLLELIDAYDGEIETFRTMIANRFTGHRGYRALQQISGIGPTFAAVFVAEIGDVTRFSRPEKLCCWAGLTPRHRESDATVHRGPITKQGSKLVRWAAIEACQRTRPGSKLAADRTRIITARDRNIGVVAAARRLLTLVFYGLRDGQIRALAAGAA

SEQ ID NO: 51767 - protein, 349 aa, unidentified
MVADELDYVVGVDTHRDEHTLALVEAATGAVLAQQTVASNGRGYAQALRFAQQQVDAARVWAVEGAGHYGAGLARYLSERGETVLEVGRSPRGERRLSGKDDQLDAVRAARAALRSEPLPRPRSGERREALRLLLVARRSAVDVRREALVQLRSVIVTAPERLRQELRGLPVQRLLDRCSRLRRSTTPTPDQVAARVVLRTLARRIEAATVEADELEGEILVHVRALAPELLDEAGVGPIVAAQLIVAWSHPGRIRSEAAFARLAGVAPLPASSGQTSRHRLSRGGDRQLNRALHTIVLHRRQHDPATRDYIARRIAEGKSRRDATRLLKRYLARHLYRLLQNQEPLLA

SEQ ID NO: 51768 - protein, 428 aa, unidentified
MNAEDTIRRKQFCQIKDEISGSDDYLVVGIDVAKDKHHAFMGSATGKSFVRKLVFENNLEGFGKLLERSEAVKTQNALSKVVFGMEPTANYHKPLGAHLIGCGCHVVLVTGKAVKYNRELLDGRWDKNDDKDAANVADLVSRGRCLYYDYPSSSINELRQSLSLRRRLKKEEHSVRMRIRNNLLALYFPELDRFYSACESETLAIVRWCLDPGRIAGMDFESFFLMVTRSRRGIAQKRRLQKIHQLAVESVGCAMGPAAEFEAVLLVDKLKAVRGQLKQVADQMQDICLQFADYSYLLTIPGFGPYVAARVLASLANPWRFDSSNQVIKMAGYDLGANRSGRSSDQAVPVISKRGNAELRYALYQAAHVASTRNRDFIGYFTRMLRGRQRERGIKTKMKVKLAAKMLKIAWTLMKKHEAFDPDHLIVA

SEQ ID NO: 51769 - protein, 476 aa, unidentified
METSYRRCCGIDVHKKTLQVCVLPPQGQTHSKPLEREFRTFSRDLRHLKQWLQRCQVTEVVMESTGQYWRAVWNVLEGEIARLVLVNPQHVKALAGRKSDRIDSHRLARYLENNDLQGSFVPPREIRELRDLTRSRVHLLQEANRVKNRIGQMCEAGNLKVSSVATDLFGVSGRRMLEAVAEGQRDPGWMADYARGTLRGKKKQLERALEGSFTQYQRWMLRTQLKHLKFLEEQVVQLEQEIERRLEPYQEFLRRLRTIPGVDRITTWTILAELGPDMSVFPDAQHAVSWAGLCPGNRESGGKRLPSKTRKANVYLRRSLCEAAWGASRSKATYLAALYRRQRSRLGHKQALFALAHQLLLIVYTLLSRGEDYRELGADYFDQKNKPKVVSRLVQRLTRLGFYVTLQEATAPSAELPVAPAGTTPTFVVPESVSEALAADAPAVKPRRGRPCKCASRGLPCRHKSAFRTQPPGRSL

SEQ ID NO: 51770 - protein, 343 aa, unidentified
MSIVRVTGGVDTHADVHVAAAIDHNGGVLGVESFPTNEAGYESLAGWLASFGPVTRVGVEGTGSYGVGLSRFLATTGIEVLEVDRPNRQVRRKKGKSDPTDAVAAARAALSGEASVVPKQRNGPVEQMRVLLVARRSARQQRIQSLNQLRHLVLTAPEPIRVRFKDRYKTGLVTEAANMRPNKGSDPVTFTTYLMIRNLARRVKALNTEIREIDVMLAALIAQAAPSLLELHGVGTDTAASLLVTAGDNPQRLDSEAAWAHLCGVTPIPASSGKVTRYRLNRGGDRNANAALYRIVLTRMSSHPETRQYVTRRRSEGLNTAEIMRCLKRYVARQVFKHLPATS

SEQ ID NO: 51771 - protein, 359 aa, unidentified
MSNDSTFVIGLDLGDQGSYLAILDQDGESIEETRLPTTQAAFQRKFSSLPPSRIALEVGAHSRWASHLLKELGHEVLVANARKLRAIYTNPRKGDRADAETLARLARLDPKLLSPIYHRSPQAQGHLAVIRSRDALVRSRTLLINHVRGIAKSFGARLPSCSADSFPTKVEASIPELLRPALLPLLDTIASFTQQIRGYDRQIQSLCQTQYPESQLLRQVPGVGYLTALAYLLTLEDPSRFRKSREVGPALGLIPKQDQSGDRDPQLRITKTGNAYLRRLLVGSAQYMLGPFGPDCDLRRWGLQLAERGGKNAKKRAVIAVARRLAVLLHRLWKTGESYDPFYRSHSSAVQPAALSAAA

SEQ ID NO: 51772 - protein, 404 aa, unidentified
MKGESRMKYQNCISLDVSKDSSHIQAFDAQLNKLSKVNIIQHTLQGFSDLRRLYNTLEDAIVVFEATGIYHRGLQKYLIDSSIHYVMINPLVSAKIRKQSLRSIKTDKKDCRTIAKAYYTADEKDTMIEPVVEFHFNQMKQLSRHYEDALGHLVKAKVSYNAKLDVVFPAYKNLFSNIYSDTATAVIMKYKHPDRIKTKEPESIKKHLLKVSCHREAYCERQAKKILAYVNNCCSGCNASDIDCDILLDLLGTVKMFELKCVQILQQLIELAKQTNYFEFICSIPGIGENLGSRIVAEIGDIRRFKGSKQLIAYAGTDPHIYQSGIREGTHLSISKKGNKNLRTILYLATSCHLRLKTKHTTVITEFYTKKKQQGKPHKVAQVASLNKLLKVIYSVSTNQTIFA

SEQ ID NO: 51773 - protein, 357 aa, unidentified
MVLMVGVDVHKDTHTAVVVDQLGVRRAQRRVQATDAGHLELLAWVQGVGEEFAVAAGPEIEWAVEDCRHVSLRLERALLAAGQRVRRVPPKLMAGARSSAREFGKSDPIDATAIARAALREPDLPLAEHTPASRELKLLVDHREHLVAERTAMICRLRWHLHELDPGLERSIPARGLDKPTRLTALAALLPAEHPGLVGELAAELVADIAARTTRIRALEREIARRVAVLAPQLLELPGCGPLSAAKLLAETARPGRFRSEACFAMHAGVAPIPASSGRTDRHRLARGGNRQLNAALHRIALTQTRLPESLGRAYYDKRRARGDRHNDALRALKRRLARVVFNLLRQTEPTPTPAAA

SEQ ID NO: 51774 - protein, 425 aa, unidentified
MNYKQNEKINQVKESTLVVGIDIGSTTQYARAFDWRGIELGKVFTFSNSREGFEAFKAWMQHLQDKYKKLDAIVGIEPTGHYWFDLGAYLEDEGILLVMVNPYAVKQTKELDDNSQSKNDRKDPKVIAKLVTEGRYSAPYTPDGVYADLRIMVANRKRLIREMTQIKNRFARWFAIYFPEYTDVFGDYEAQSSMLLLKKVCTPEAIVELGAEKINQIWRDARLRAVGMKRATTLCETAKRSIGLKKGSSAARYEMKLLLEDYEYKKAQLDAVMEEIEKLCRKIPESEQMLAIKGIGVITVAGFLAEVGDVRRFESPRQIQKLAGLSLRENSSGKHKGQTTISKRGRSKLRAVLFNAAIPLIAKNPEFKSLHEYYTTRANNPLKKKQSVIAISCKLIRVFYAILANGVTYDAQKMLSDIHRQPQAA

SEQ ID NO: 51775 - protein, 417 aa, unidentified
MRIVRPICCGADIHKDLIVATIATTNQDGITEYIQSSFSSQNFDLNRLKAWLIEHHCFEIAMESTGKYWIPVFNVLEDEIKVFVVHPKYTKAIKGKKTDKKDSKWIADLFKHDLLKFSFIPPKEIRELRELSRYRIKLIAMRSSERNRYQNSMTISNIGLASILSDPFGKSSRAVMKEVIRSSSVTEEKISKLLERNARKKVKEVLQSLDGSHIESDQRLKMNIASQHMDQIDSHVRRLETEMAIRCIPHATLINLLLDIPGISYLSAMTIIAEIGTDMSVFETSKQLSCWAGLAPSNNESASKKKSVRISKAGSYLKPLLVQCALAAINSKSNPYYRIKYNRIKKRRGHKKAIIAIARMILVNIYHILSTGEVYSPCDMEQIINPKPVKKVMTIQNAIEFLQSQGFDTSKLISSSS

SEQ ID NO: 51776 - protein, 414 aa, unidentified
MSDDVSWFVGIDWASAHHRGCLLDGEGTPVGERDFTHDGAGLTELCDWLTARAGVSAQRIAVAIETPRGPVVEALLERGFAVFSINPKQLDRFRDRFTVAGAKDDSRDAHVLASSLRTDRRAFRRLNVDDPLVIELREWTRIHEELTQERNRLANRVRDQLWRYYPQARELSDDLAADWFLDLWQQVPTPAKAARTTEKTIGRILKQHRIRRIDAGTVLRVLRSPALSVAPGTTEAASAHIRTLAARARLINIQIKEAQRRLDELCGAIEAAPGQICEQRDVAILRSLPGLGRITLATLLAEACEPVRLRDYHILRSLTGAAPVTRRSGKSCFVVRRHACNKRLAQAVYHWARVAKQHDPTSAKRYEELRRRGHSHGRALRSLADRLLYVLCTLLKRQVLFDRNFQSAHVAQAA

SEQ ID NO: 51777 - protein, 370 aa, unidentified
MDESSKILYVGLDVHKDSIAVAYGPDDRGAEVVSLGAIGTRQSDIDKLIRKLQSKGTTTLVFVYEAGPCGYWLYRYLTAKGVACHVVAPSLIPRKAGDRVKTDRRDAIPLARLSGDLSAICVPGVEDEALRDLSRGRDDAMQDLKRSKRRLKSFLLRQDIRYEGRATWNAAHLRWLSEVVCPTPPQQIVFQEYLRAVSEQQERRQRVERELHEAVKGWRLYPVVEAIQALRGVDLTGAVILMTELGDITRFDNPRQLMSYLGLTPSEYSSGERRRQGGITKAGNSHARRALVEGAWAYRYPAKVSRHLQLRLETLPAEVQAISWKAQVRLCKRYRQLTARGKHVNQVVVAIAREMAAFAWAIARLVPLAP

SEQ ID NO: 51778 - protein, 342 aa, unidentified
MNQVDIIAIDLAKNVFQPHGATRTGDVVFRLKLTRARLVDYVASIPPCTVAMEACAGAHHWGRKFQKLGHEVKLIAPIYVKPFVKRHKNDVADAEAIAEAALRPTMRYVAVKSADKQASGMAFKIRDLLVRQRTQTINALRGHLTEYGVITANGTQNLPRLRSILESGESGLPEPVRELSELMLAHIAHLSDPIQLLDKELRQRARKDDVASRLMTIPGIGPICATAIEALAPETPTFRKGRDFAAWIGLVPLQNSSGGKEKLGRISKMGQRDLRRLLIIGASSVVRWAIARGAADGSWLKQMLERKPRQVVIVALANRIARVAWALITNGGTYRIGASAVS

SEQ ID NO: 51779 - protein, 354 aa, unidentified
MKRNTKYVGLDVHQAMTAATVRGEGGCVIVRSVIETSERSITEFFSAMAGTVHVAFEEGTQAQWLYDLLSPQVDRVIVCDVRGEKRSGNKGDRVDADHLSEQLLRGGLRAVYHGSRERADLKELTRAYRNLVEDSTRVMLRLKALFRARAIRTPGGGVYAPRERAVWVAQLPERGARFRAQTLYAQLDVLRTQRKKAKAAMVTEAKRDPAWAVLETIPYFGPVRIALLLATIGTPWRFRTKRNLWAYSGLAVVTRSSADYEMFDGRAHRRSRRPLTRGLNRNHNRVLKAVFKGAATTATGKPGPLQDFYHGMLERGMREELARVTLARKLAALTLRLLKTGEVFDPTELSRPQT

SEQ ID NO: 51780 - protein, 371 aa, unidentified
MFHVGLDIHTKRISICALDEKGQVVHRSQVRSIQDLLRVLTDLPDRFQVCYEASCGYGHFHELLRPLATRVVVAHPGQLRLIFRSRNKNDRNDAERLAKLLYLGEAPAVHVPSADVRTWRELINCRSQVIAKRTRAKNAARALLRGAGVTPPKHPGLWTKEGLAWLRRLELPTASQQLRRDLLLEEMETLLRQVQRIERQLTQQAQRTPAVVRLRSIPGVGLRTAEAVAAFIDDPHRFPNAKAVGSYFGLVPCQDQSGDRNRLGHITRQGAPVVRQLVAEAAWQARRRSPTVRAYFERAQRDDPQRKKIALVATAHYLVRVMWALLKRGTDWQENPALAKAPGPASGGAPAAERGEGEREKERGERMSESA

SEQ ID NO: 51781 - protein, 326 aa, unidentified
MKKFIIGIDVSKDTLDFCILEKDSRKKLQQGVIINKEREILTWLKNIDKENVVVALEHTGHYGALLSWLLEEHMFTYYLINPLDLQRSLGLQRGKSDTVDAYRIADYIITNHHKLSPFKLPCESLRKLKALMTARERYVKMSVQIQNSLKAEMILNEKVALKQLIKLEQKQLKSIKNTIQDLEKQMMEIVKSSQDLNTTYTKISSVIGVGTITSIKCIIETDNFTRFTDARKFNCHCGLAPFPYQSGSSVKGRTKTHFLRDKTLKSILFKAAGSAIQHDPQLKKYYEQKLEKGKHKLTALNAVANKIVLRIFAVAKRNEPFVKLIA

SEQ ID NO: 51782 - protein, 467 aa, unidentified
MFVLGCDVSRGYVDITVVNERGELALPPSQADASAQGESRIFRQISALRKNYPQETVIAVMENTGGYEANIAQCFRQHGVPVSVLNPKNIHSFRQLELHHAITDPSSARDIALFALQHLDAIKTEVEGTSERALKRLAHILDALSRDMTRLKNRLDNLLFTVRPELLSLTRGDKPRWLLQLLLQYPIPQKLARGRMSRVTRIPGITPDKARNLISLAKSSRGADNHPDFAPLIVYLATRLLQAMDQEKTLRKELEQRFNRIHPSCPLPTIKGVSSYGAAIILAHIGNVHRFHSAKALVAFFGLDPLVRESGDLQHRRHISKRGPGMVRRVLYMQCLSMCSDPDHSIGRFYARLTKQGNPHYYAITACMRKLTVILYAMLRSGNAFDPNYEDSSKALKQSERDRGRKKLRVAKHARTSLALDVPISTREAKRRKRIIALQNKKREGPHVSCDTSAGSCPKNLNEVTFP

SEQ ID NO: 51783 - protein, 318 aa, unidentified
MRKHSIICAGIDTGKRRLDVALDGCPDEQLQVPNCEEGYQRLSAWLRQRKVKRVGIEASGGYEQAVVCRLRREGFSVVVFQPAQVRAYAKFHLQRAKNDKIDAALIAACTAAVRKLHAAPDPRLVRLAEHQTLIDQIVDQISRIKNYLESCRDPRLRRFWQDEIKRFRGLFKTELKALVAAIRRHRDLSERLDLIASVDGIALRTATAILVRLPEIGRISREQAAALAGLAPYDNDSGERDGARHIAGGRQRLRNSLYGAAFAASFHWNAELIELYKRLIAAGKEHKVALVACTRKLLIFANAVVARGTPWESRAATR

SEQ ID NO: 51784 - protein, 458 aa, unidentified
MKGKRRSAEKHPGMVTVHPNAAAIDVGATMHMAAVGADCTSDPVRSFGTFTGDLHRLADWFAECGVKTVVMESTGVYWIPIFELLDERGVEVFLVNARDAKHVPGRKTDVSDAQWLQRLHSHGLLRASFRPKGEITELRAYLRQRERLLDYAASHIQHMQKALTEMNLQLHHVVSDITGATGMRIIRAIIAGERDPTVLALMRDTRCHAGVDIIEKALTGYYRAEHLFGLEQALALYDEYQQKVSACDMRIQEVLMALASLRGHRGEPLGSPRRRMPRQANGPAFDVREALYALLGKDLTQIHGLGPYLALKLVAECGDDLSAWPSAKHFTSWLCLAPSNKISGGKVLSSRTRRSGSRVAALLRLAAVTVGRTETALGAFYRRLSARIGKAKAVTATARKIAVLFYNALRHGMDYVDPGASYYETRYRERVIGNLHRRAKAFGFILQQDTVASEVAVS

SEQ ID NO: 51785 - protein, 360 aa, unidentified
MSKRLSKKASWFKENNFTAKDEIYVGVDVHKEQYHVAIWHNGRIGCVYSMSSDNNKLLRDLQQIRSSLKNVVYEAGPTGYGLVRLLRSACLSAEVVATTKTPRMTDSSAKTDRLDCQQLAEYAAKGLLTFVAVPAQQQEADRQVVRLRDQLMSKRKRVMQQIKSFLLQHNIAWPGGNWSKIVLKRLRQLDIVSELRFTLDQYLDEYEFLSKKVAQTKARLREIFSSERHSAAIKIFKSHPGVGDIVAWEFRVEMFDITRFNQPKQVSKYTGLCPRVSQSGNSCRHGPITKTGRRQLRAILIQAAWAWHRRDPYARQIYNRLLRNTGSSKKAIVGLAKRIAIHLWRMLCDGCLYDANVVKV

SEQ ID NO: 51786 - protein, 344 aa, unidentified
MWIIGCDYHPSFQQIAFVNQVTGEYDERRLEHKGGEAEQFYRNLAGQQVRVGMEATGGMRWFERLLGELGIELWIGDPVKVRAAAARKPKTDKEDARLLLRLLLEKRFPRIWIPTVEQRDARQLVLHRHRLVQTRTRAKNQLQAIARSEGLHAKCRVWSQAGQRELMALPLSPWGTVRRQDWQELLVELNQRIDPLDRALEQEAEQRPEVRLLMTHPGVGPVTAMAFVLTLCDPWRFSTSKQVAAYLGLVPQENSSGKNKQRLGHITKQGNRLLRGLLTEAAHAAAKHDPEWRRKYVRLAMKKNRSIATVAVARCLAVRLWWMWKLGLDYGQMQESRSHAEQPA

SEQ ID NO: 51787 - protein, 334 aa, unidentified
MQITTIGLDLAKHWFQVHGVDAAGKVVVKRRLRRAEVVAFFKTLEPCLVGIEACATAHHWARELIALGHEVKLMPPAYVKAYVKRNKNDAADAEAICEAVTRPSMRFVPVKDIDQQSVLMMHRARNLLVRQRTMLVNALRAHLAEFGVIAPRGLRHVEQLIAAIEAESTALPELARSILRLIVSQLNDTQAKIQQVEAKLAQWHRNSRLSKLLATIPGVGIMGASAIAATVCDPNLFRSGREFAAWLGMTPRQNSSGGKERLGRTSKRGDKYIRCLLVAGAVAILRHARTRDEGRRMGSRDAGAKAGEGSRGGARQPNSPHRLGGDETGRRLQS

SEQ ID NO: 51788 - protein, 343 aa, unidentified
MGNVITIGVDLAKSVFQVHGVDAEGMTVVRRQLRRRQVLPFFEKLPPCLVGMEACATSHHWARELEQLGHRVRLMPPRYVKAYVKNQKNDAADAEAICEAVTRPTMRFVEIKTTEQQSVLILHRTRQMFVRQRTTLINAIRAHLAEFGIVAQIGRNGVEALLQTIAERNDARVPAVARSCLEALVAQLHLVKRQILEADRRILAWHRSNETSRRLDCLPGVGPLVATALVASVPNPQAFKSGRDLAAWIGLVPKQNSSGGKDRLGNISKHGNRYLRMLLTVGALAVIRYAETHGTAHRPWLASLLERRPTKVAAVALANKIARMAWVIMARGETYKEPTLQTA

SEQ ID NO: 51789 - protein, 457 aa, unidentified
MTQKRSKPKIDRTMPMVHPNAAAIDVGATMHTAAVRADWTPEPVRSFGTFTTDLHRLVNWFKECGVETVVMESTSVYWIPIFELLDARGFSVFLVNARDAKHVPGRKTDVSDAQWLQRLHSYGLLRASFRPKGQIAELRAYVRQRERLLEYAASHIQHMQKALTEMNLQLHHVVADITGTTGMRIIRAILAGERDPKVLARLRHYSCHSSIETIEKALTGNYRAEHLFALEQALTLYDAYHEKVSACDVRIEAVLKELSVGRGRQSGSLPSSHRRTDQANGLAFDARAALFSLLGKDITQIDGLGPYLSLKLIAECGDDLSAWPSAKHFTSWLCLAPSNKISGGKVLSSRTRRSGSRAAALLRLAAVTVGRTDTALGAFYRRLSARIGKAKAVTATARKIAVLFYNAIRHGMEYVDPGSSFYETRYRKRVVDNLRRRAKSFGFVLQPLEPTPSVPVS

SEQ ID NO: 51790 - protein, 418 aa, unidentified
MKMIKTKKQRIVNGKTLIVTVDISKDKHFGYWRCPDGTDVKPFTFSNNGAGFSEFWERISRAKEIHRLDEIVFGYESTGPYAEALVHFMKARGVRLVQVNPMHTKRVKELQGNSPNKTDQKDPKIIADIIELGRVLTVVIPEGPAAELRRLTQARERSTERHTALVNQLQSLLAIIFPEFLQVLNNVKTATAQCLLKHCPTPRGLVAFGLDNLTETMWDVSRGRMKEDRAKALYEAAEASIGVVEGQASILLETQAILAAMEASEKFTERLEQEMSHHLKQIPYSSCLLSIKGIGEVTAAGLIGEVGDFRKYSTLGEMMKLAGLDLYEVSSGKYQGTRRISKRGRPLMRKLLYFAALRAVRSDGLMAHQYQRYLDRGMLKTKALIAIARKLLGIIFAIVRDNSAFDYSRTSFQFQEAA

SEQ ID NO: 51791 - protein, 351 aa, unidentified
MLIVGCDYHPSFQQIAWVDTESGECGEQPLMHSTGEVEKFYRNLKEQGVKVRVGIEATGHAHWFERLLAELGHELWVGDAAEIKAKRVRKQKNDREDARLLRTLLVENRFPRVWLPNVGNRDLRQLLWHRHRLVQMRTRVMNQLQAVALNEGVRRKRGLWSKTGRAQLESFQLMPWATRRRKDLLELLDGLTPRIAALTAAVEKQVEQYPEAQRLMTHPGVGPLTALAYVLIIGSPERFRCGKQIGSYLGLIPCEDSSAGRQRLGHISKQGNSLLRFLLLEAAQAAVRSNPQWRREFLHLTMRRGRQIAVVALARKLAVGLYWMWRKGWDYEKSLQFGSHVGQPGTPYGVK

SEQ ID NO: 51792 - protein, 371 aa, unidentified
MTKHNTFIGMDVHKNSIDIAIADEGRKGQVRHYGKIDGTLSTLDKVVRKLVSTGNRLHFVYEAGPCGYQIYRHLSDQGFDCDVVAPSRIPKPSGNQIKNDRRDALMLARLHRSGNLTAVYVPRAEDEAIRDLTRAREDVKNDEKRSKHRLLSFLLRSGIRYTGGSPWSIAHMRWLSDIKMPHQSQQVVLQEYIGTVNQCKERAQRLTEQIQQLLPEWQLYPIVQALQSMRGVSTIVAATTVAEIGDLKRFQTPSELMSYLGLVPSEHSSGPKTKRGPITKAGNGHVRRVLTEAAWAYRLPARVSRALLKRQEGLPESVCDISWKAQLRLCSRYRRLWNKGKAKQVVVTAIARELCGFMWAIANEIEVPANN

SEQ ID NO: 51793 - protein, 460 aa, unidentified
MIGRKNEIIELFKKYGHDKILFVGIDVSKNFHTVTILNGYYDILLKPSTFSIYEEGFKKLTNKINKIFSQSNAQVLVFGCEPSGHYYLNIMSNLKKTYPEGIFKLINPKSTKSNREQMMQYNKTDPIDAYAIADLLIRGEGYNFTKEDTIYKSIKEYVRYLDSLTKEQTRLKNKIHSYLDEIYPGLENELSNFTNTKYGQAFLQILPHPKKLKYMSQADIVLMYQKHGFDIKPKIAKRISDASKKLLIVDNIGLETKLSFLEMIVNQFVYTQNTIQKIEGKLKELLGCLDYSENILQIKGIKVKTLSRIIAYLNNPSRFDNGKQVASFCGLVPKKEQSGKKHGEERISRQGHKKLRSTLVQAAHVAVSNMGYFTAFYNRLVIQGRKDPKLAITATANKLIRIIIHMIKTGEKFNPPTAQNKELAVSKINRLTKKKLEKLTKENRMGSLTQDITDVYLIRV

SEQ ID NO: 51794 - protein, 463 aa, unidentified
MRDAIGIDPDSKGFVCAQVKASAPVKTRGYLATEAELGKFVKWVKGEGDLIVAIEGSNGLSKPLEMKLRETGVVFYSFKPADTEKFRKAVLGQNKDNQKDAESVARYAMALESQGKLDGYRRVWFPDAELQLLSRGYERKSQAMTAEINRLWKLIRHASSELYLALGGNHPEVEMKDNMLKNQGILALLGQHPNFQEWKDLSEAQFLAAMGGNHNGRRELITQLCKLAGNLTPVRPAMALMIQDSARTIQRLKREEDDIREMLEQLTKDSPAVQALKEKRGIGTITAATMIAEIIDIRRFSRDDNLAGYMGLGMREHSTGDTTRMVPSQLFNHRLKDAFMTAARNYVRFNTDSHLAGYYRNLVKAGMKPLEATKRVARALVRVIFRELYALQGSEANPPEIEEAKEGESDVASGATRSEQSHSSNTSPSSLTSKKAPRPIKVKSTRRLRTTKRRPNAVLKKSC

SEQ ID NO: 51795 - protein, 345 aa, unidentified
MKITTVGIDLAKSVFQVHGVSERGKAVLRKQLKRSEVLTFFANLPPCLIGMEACGSAHHWARKLIELGHEVRLMAPQFVKPYVKTNKNDRNDAEAICEAVARPNMRFVPVKTPEQQAALALHRARAGMMKARNAQANQIRGLLGEFGIVLPQGIGQLRRRLPEIVEDSNNDLPRLMRTLLRRLLAQLQQLDQQVSELEREIVLWHRQNDNSRRLERIGGIGPLTASAYVASLGNAKGFNNGRQVAAWLGIVPRQDSTGGKPRLLGISKHGDVYLRTLLIHGARSVLRHLEHRPDQADSWLKRLMLRRGKNVAAVALANKNARIAWALLAHQREFDPDYVSTVPSR

SEQ ID NO: 51796 - protein, 310 aa, unidentified
MALTIVDTCTVTGGVDTHADAHVAAALNHIGGLLGVESFPTTPAGYGRLLAWLQSFGTVSLVGVEGTGSYGAGLTRHLVAAGVRVVEVDRSDRQERHRSGKSDPLDAQSAARAALSGKAKGAPRGRDGRVEAIRTLMVVKRSARGERTRSINQARSLVITGPDDLRARFEHHSTNALAVELAALRPRPGDTVEYATRVALRELGRRAEFLADQIDHLDSLLLPLVELQAPSLLDMYGTGPHVAALLIIAAGDHPDRLRSEAAWAHLCGACPIPAGSGKTTGRFRLNVGGDRQANRRFGSEGGIEVVGLAV

SEQ ID NO: 51797 - protein, 376 aa, unidentified
MTAIRATGMSVAEPTLYVGFELSAKEWKLAMTSGFGVAPWMQTVPAGDLGAVTRLLTRARARLHLPATAGVMSCYEAGRDGFWIHRALTVIGVSNRVVDSASIEVNRRARRAKTDRIDAQKLVMMLVRVCQGERDVWREVRVPSVEAESVRHGSRERRQLKQEETRLVNQMRSWITTWGGRLPKRRVGDWWTTVTDWSGAVLPAPVQARLARGQARLTVITAQLGVLDQAQQTAVAAAPPASPLRRLVQLKGVATVGATGLLEEGLVWRAFHNRREVGGYLGFRPMPFRSGQLARDQGIDRAGNMRLRGLALQLAWSWVRWQPTSALTQWFQTNFGGRGKRARRIGIVAVARKLLIALWRCATTGAVPTGAIVKVA

SEQ ID NO: 51798 - protein, 308 aa, unidentified
MNTYTVVGVDVSKATLEVKSNKLHFSVSNTEKGINEMFSKLKGEENMLLVCEASGGYERLVIHKAHLSKIPIHCANAARVRAFAKSEGIRAKSDPIDAEMIRRYGVEKTLAPTPPPNPVSEKMANLLDRHNQLSKLIASEKNRLQNSPKIIHKSIIRIMKALECELKRINEEIKKAVASDEVITKRVKCIQETKGMGPVVAWHIVAYLNEITQLKRNQAVAMAGLAPYNKDSGTMKGKRRIEGGRGKVRNVLFMAAQSAAVHNPVIREYVKGLRDREKPYKSAIVAAMRKLLIHVRSELKKSELELAF

SEQ ID NO: 51799 - protein, 343 aa, unidentified
MTVYVAVDFHARQQTLSYCDLADGEIHRRELRHQQDEVRAFYAAFTAEVIVALEASGYSSWFEQMLAELGHTVWLGNPTEIRRKAPRRQKSDRRDADLMLDLMLKGDFPQLHRFSEESRLVLRQLRYRHKLVKLRTIAKNSLHAIGINAGLPLKRRLLTQKGIRQLQALQLSPVLAAQRDEWLQLVAWLNERIATVETALQELADNDNAVGLLQTHPGIGLLSGLALRYTLMPVSRFPTTRKVTAYVGLDCMEDQSAERRRLGSISKAGSRLLRFLLNEAGQVACRKDPDLKRFYQRLVHRRNRPKAKVAVARKLLVRSFIMLRDQIDYAEFVRRGVAARVAR

SEQ ID NO: 51800 - protein, 324 aa, unidentified
MLSGRVVIEAEVASEPGVLIAFIRTKAPHAVRIGLESGPTSPWLWHSLKSAGLPVVCMDARHAHAALSVRPTKSDRNDARGLAEMVRMGWYKEVQVKSLAAHERMALLGVRRRLVDMRVEIDGQIRGILKTFGLVVGRGNKNAFAQRARMLAQDHPVLSALIDKLIEVREVAVAKVAVLDKEIRSFVRADPTLRRFMTVPGVGPVTALAFRSTIDEPDRFKRARDVGPYLGLTPRRYQSGETDRQGKISKCGDRFTRTCLYEAASVLLTKVQRWSPLKAWGTRLARRIGSKKARVAIARKIAVILQCIWTDGTEFWWTKEAAQA

SEQ ID NO: 51801 - protein, 342 aa, unidentified
MEITTVGIDLAKSIFQVHAVDAAGQVVVRKALRRAQVVPFFAKLLPCLVGMEACGTSHHWARELMRLGHDVRLMPPAYVKPYVKRGKTDANDAAAICEAVTRPSMRFVPVKSTEQQAALALHRTRDLLVKQRTQLVNMIRGLLAEFGIEMARGLRHALELAARLSAGDAAEVPPLAQRVVIGLANQIGAVQIQLTRLEKELLAWHRDSDLSQRLATIPGVGIVSATALAASVSEPERFRNGRQFAASLGLTPLQNCSGGKERLGRISRMGDRYLRRLLVVGMTSLVRRAKATPTSVDPRLPALLQRKPVRVVTVAAANRTARVAWAIMTRGGTYRAPAATAA

SEQ ID NO: 51802 - protein, 347 aa, unidentified
MKFYTQQHKFYCGIDLHTKKMFVCILDAGGNIRIHQNINTDPEAFLRIITPFREDIVVAVECMFTWYWIADLCVEHHIPFVLGHALYMKAIHGGKAKNDKIDSHKIATLLRGGMLPQAYVYPARMRATRDLLRRRNHLMRKRAELFAHIQNTRSQYNLPDPLGCIAKPKNREGIVERFDDPSVQKSMAVDLEIIEAYDHILTQLERDIIACAKEHDLRSYALLQTIPGVGRILALVLLYEIESIKRFPQVQDFVSYCRLIKSIKESNGKKYGSSGKKIGNAHLKWAFSEAAVLFLKGNEPGKKYLQRLAHKHGKAKALSILAHKLGRAAYFMLKNKEAFNQKKFLGL

SEQ ID NO: 51803 - protein, 323 aa, unidentified
MSQPNLQCMGIDVAKLSLDIATTDTIEPFTVGNDEDGFAVITDKLKHTKINLILMEATGGLEAAIACKLQSEGYDVVVINPRQARDFARSMGYLAKTDKLDAAMLAQLALVIDRHPDRSRYIRHQPDEARAVLAAMVVRRRQLNHMLVAERNRLYPSHPQSRKSIDNIIDALQNELDRINEQMKQHMTAFFQEQARLIGSVKGVGDITVASLIAELPEQGKLNRREISALTGVAPLNRDSGKMRGKRTTFGGRAGVRATLNMAALVATQFNPAIKLFYQRLLAAGKPKKLALVACMRKLITILNTMLRKGEEWNASFQSQVIS

SEQ ID NO: 51804 - protein, 359 aa, unidentified
MEQKNKPARHVVGGVDTHKDLHVAAVVDDYDRVLETRSFPTTRNGYRLMLAWMRTFGELQRVGVECTGSYGAGLLRYMQAAGVEVLEVTTPDRHDRRRRGKNDDLDAQAAAHAAFAKRRTVTRRSRDGMVESLRVLKACRKTAVNARRIALQLIQNTIIAAPDVLRDQLRRMTRMQLVRLLAAWRPDLTAYRDVEAAYRITLKSLGRRYLELHDEIADLDMMIAAIVEDLAPDLVERNSIGHNSAAQLLLTAGDNPERLKSEASFAALCGVSPVPASSGKTTRHRLNRGGDRLANSALHIIAIGRLRTDDKTKQYVARRMAAGHSKLDAIRALKRYIAREVFGIIMRRQKQINQTRIVA

SEQ ID NO: 51805 - protein, 349 aa, unidentified
MNILALDLGKYKTVFCEYNSVGGEHTFGTVKTTPQEIHDLIVDKEPDRVVLEVCSIAGWVVDIAEALGKETETACTMHDAWRWKNVKKKTDKDDALKLAKLSAMGQLPTVHMPPKIVREKRALLKHRQRLVKYRTSLKNGIRAIFAREGIILTKGAATWSQEGLQWLKGEARDFAKISDGAELWRGQLQVELGLLQAVTDSLKVVERKLDKMAASDKQIKRLQTISGVGPRLAEAVVAFLDDPKRFKSGKEVGSYTGLVPRQYQSGQMERQGRTGGRGNLMLRNLLIEVCWASLATNAWARDTYKRLLRGSSSRKKIAITALARKLVVRCWAMLRDEQNWREPIPTTTG

SEQ ID NO: 51806 - protein, 432 aa, unidentified
MAKKIQYQSVDVQQLSLESLLGGFQTGGPIVVGIDVAKRKFLAALCNSRGEVQRVVRFEHPTQTPTFVGLLEGLQTAGMTVEVVMEPTGTYGDPLRFHLGVHSIPVFRVNNKHVHDAAELFDRSASKHDAKDACLIAWLHVHQRSTRWQPLSEDRRRMRALVAQRELFDAPLRRLLAQMEPLLARHFPELEKFFDLGRAKTPYRLLEAFGSPAAMARAGEQQIRECLRKSARRGPDPDLLQRFMHTVRTTAGAAMVADELQLIQMTASEILRLFQMRQQVDTRIEQVGAEVPVVQAMRSCLGAVTAAVVFAYLGAPNDYASAAALEKAAGLNLVERSSGTDAGTKHLSKRGPAMVRKYLFLAAMRLIQTDPIAKAWYQARASFKGDAKAKALVAVERKLCRALFHIAGSGEPLDSTKLFDIRRLQIKPSEAA

SEQ ID NO: 51807 - protein, 398 aa, unidentified
MPSTNLQNSLDFDGQSFYIGLDVHKKSWAVTIRSMGMEIVHFTQPPNVNALVGYLKKNFPGGLYLSAYEAGFCGTTIHEQLCKLGVENIMVNAADIPVTDKQRKNKTDLHDSRSIAKNLEWGVLKGIHVLTREQQELRSLFRLRESNVKDVTIANNRLKSCLMYFSIELPETIGRKQYLSLKALEWLSNLELTSAAGTITLQQYIEELKHQRKKLYQITKLLREQIQASYTQTYKCLLSVPGIGGVTAMGLIAEIADFSRFDDPNQYSSFLGLCPWENSSGESTKTKGMQPRCNRHLRPLLIEASWAAIRKSPILFAYYSKHAIRNPKQAIVKVAAKLAMIAKGVATSQQLYQSDYLQNKRKEQEDQKKARKAKRFSSGIAEQHINKQPDNVQISLPG

SEQ ID NO: 51808 - protein, 358 aa, unidentified
MRIIGVDLHARQQTVAMLDTETGELLEKTLKHDGDEVRKFYSALPGQVLVGIEATGSMHWFLELLEELGIERQVGHPAKIRAAEPRKQRHDRRDAALLLKLQVEDRFPAIWMPSTELRDLRTLLMHRHQWVRMRTRVQNALQAIALGHGLRRGKTLWSQLGQHTIESLPLTPHAVHRRTELLALYGKLQAGIDELDERVMDHAQQRPGARLLMTHPGVGPVTALATDVFLGDPARFENGKALVSYVGMIPSEYSSAGRQRLGGLSKQGNPLLRFLWCEAAVHAVRRDPELQRFYRRKLAQKGLGKARVAAARKLGIRLYIMLRDQIDYQEFCRRGQMRQKSGGACAGMPEVGHSPAKQ

SEQ ID NO: 51809 - protein, 418 aa, unidentified
MIEDVQWFVGIDWATQSHCVCLLDVEGRRVNERDFAHGGAGLTEMRDWLLEKTKAAPAQIAVAIETPHGPVVETLLDHAFLVFAINPKQLDRFRDRFTVAGAKDDSRDARVLGSALRTDRVAFRRLVVDDPVVIELREWSRMAEELQQERTRLANRVRQQLWRYYPQAVELTDDVADDWFLALWQQVPTPAAAAKASDKAIVRVLKDHRIRRLDAATVLQTLQKTPLFVAPGTTEAACAHIRHLAARLRLVNQQIKEAHRALDGLCSKLEAATESPAGQHCEQRDVTILRSWPGIGRIVLATLLAEATEPLRARDYHALRALAGTAPVTRRSGKQCFVIRRLACNRRLQTAIHHWSRTAIQHDTTARRRYDALRRRGHGHARALRSVGDRLLYALCTTLKRQTPYNPNCQTAQVTTSL

SEQ ID NO: 51810 - protein, 458 aa, unidentified
MYRELQPLREALSHQLKARLSPAVAGVDPDKLLETYLDRLTMYIGVDVADQSFTALAMDAGREILGSLEDCANDPDGFASFVTWARALRDQHHLHIMAIAGETTGIYYWALWDFLGEQADVARVLYNPRTTEHMGEVLSKKVRDELVDALLLSEQLRLGSTPEVRLQEDADLLSARYYSRAARHMAQQINRNKNQLRALLRAYCPPLCQVFPGYKLHHPAVHALLQKALFPDEFVHLGVEAVATTLLEHCDTAFGLTEAQQLVEACRHALARPVRREVIHQLVHAHIQDIATFQQRKAFYLKSGYALIKDRQEAKLLRTVKGAGVSNTLALVSEIGDVQRFASGERLASFLGLTTSKHISGTTLFQAKRITKQGSRNGRYAAVNVAQQLSHRVPRYHAMYQRIKGRKPPRKGHFIALVAIARDFVSTVLYDMWRNQRPFFLEVSDYRDYRRKNQRSDD

SEQ ID NO: 51811 - protein, 415 aa, unidentified
MNAVGIDVSKGKSMVAALRPMGEVALLPQEFLHTEVGLEQMAYAIIALGEDTRVIMEATGRYHEPVAAALHEYGIYVCVLNPLFIKQSGGGSIRKVKTDKADAMKIAKYGLDNWVDLREYTPMDTVRQQLKLCSRQYNLYMKTVVSLQNNLISLTDKTFPGVNELFSSPERADGHQKWVDFVMTFYHCDCICRVSENAFAERYQKWCKRKGYHFSAEKAQDVYLGSCGHFTTLPKNDNTKLLITTAAQQLLAGKMTLAALRTEMTRLAKQLPEYDIVRAMYGVGETTAVQLMAEIGDVRRFPRRSSIVGFAGVDPAVNQSGKHAAQSTPTTKRGSPHLRKTLYQIVCTYLKKSPAEESVYQFLDKKRSEGKPYFVYMTATQNKFLRIYYARVKECLETFDSQQNSTQNLRDRKRA

SEQ ID NO: 51812 - protein, 354 aa, unidentified
MSKDIKKPAGETRRYVGIDLGDKKSRICILDERGEIVLQEWVVTTPEAFFKRFHGEAKMDIAMEVGTHSRWASDLLGRCGHKVVVADPRQLALITKNDAKSDKRDARTLAQLLRADPRLLSPIEHRAENLQTDLTVIRMRDNLIETRTRLVTSVRGVVKATGGRLPSSETSSFPQQVSDLIPQPLRPALAPVLEVIDRLNEAIYEYDCLLEHWARTRYQESSRLTQVKGVGTLTALTYMLTVGDKARFSRTRDIGPYLGLRPRLGQWGDNEPQLRITKAGDGLLRKTLVECAQYMVGPFGQDSDLRRWGLKMIEAGNGSKRARQRAVVGVARRLAVLLMSLWKSGQTYDPLRHS

SEQ ID NO: 51813 - protein, 392 aa, unidentified
MVQEAERVVIGVDPHKLSATIEVVDGREQLLGSGRFTTDRAGYAAMRKYVETWPERLWAVEGSNGAGRPLAQRLLEDGDQVVDVPAKLAARVRLFDTGHNRKTDARDAHSVAIVAVRTKTLRVLQLDGELEALRMLTDRREALTRRRVQTVDRLQALLAELLPGQAKRDITTGQAKAMLASVRPRDIAGKTRRRIAAEELAELVAVEAKIKKATAELKAIVLARGSRLMDLHGVGPVVAARVLADVGDVARFADRNRFASWTGTAPLDASSGEQNRHRLSRAGNRRMNHMIHIAAVTQLRLDTEGRVYYRRKRAEGKKPLEAIRCLKRRISDAIYRQLLEDAQAAVGHGLGTGPGGHCGATQESSAADLPPHIDTSDQPLPGPADKTLRRTG

SEQ ID NO: 51814 - protein, 358 aa, unidentified
MQSVTRVGIDLAKMFIQVHAVDAVGKLVCNKQLSRDKFIAWCNQLPAGCLVAMEACSGSHAWARKLIALGLDAKIIAANHVTPYRLEGKGGKNDANDAAAICEAASRPSMRFVPVKTLSQQGMLCVHRYREGVKEERTANINRIRGLLAEFGIIAPQSPNKLRERLAEIIEDADNDLCGIARMVIQEAFSHWDEIDKQLEWCAQRISAHVKENQQAQAAVQLMGVGPVTASAAVVTVGDFKQFKNGAQFGAWLGLTPRQNSSGGKTKLERITKRGDVYLRMLLIQAAKAAVMTAHKRDDPISRWLLQLREKSGWQKAAVAMANKNARILWAVMTKGCDFDPRYVSVKPSGGGSIAAAI

SEQ ID NO: 51815 - protein, 352 aa, unidentified
MVYVGMDVHRKRTQVAVLDERGHEVLNRNLSNDPGELTPLLLSLGDDVSVVFEAAYGWGWLADLLGDLDIDTHLAHAKNVKAIASARLKNDKVDARTLAHLLRTDLLPEAWLAPREVRDLRALLRHRARLVRYGTSLKARIHAVLADQGIKVEVPRLWTGPGRGWLDALDLPALQREIVEDLLVVLDATMTRVKRLEREIKDLAQPDERVCALQKVPGIGLLSAMTLVAEIGDIERFPTARKLCAWAGLTPQVRNSDRTIRHGHITKQGSAWVRWVLGEAAQVAKSRPPFAHTYAHIAQRRGNNIATIAVARKMLARCFHILKEVNQGQVSEEASESGALAVRHGPNVRPGF

SEQ ID NO: 51816 - protein, 355 aa, unidentified
MSDVKFIGLDVHKTSISAAVLDGSGKLIMQAVLLTNAAAVLGFVRGLRGTLRVTFEEGTHAAWLHRVLQSEVAEVVVCNPRKNALLKSGNKSDQIDARKLADLLRANLLKAVYHDDSRTLTLKELGRTYRSLTDDTTRVMRRLKALYRSLAIDTGGKKLYTRRHREQWLSQLKQPGQRYRAERMFEQFDQMKALRRQVRGDLIEEGHQHTATALLSSIPYVGPIRSALLIARVQTPFRFRTKRQFWAYCGLALETRSSADHQVIAGELKRKTKPVFIRGLNLNHNPDLKNIFKSAATTASASPGPFGDFYENLLTKGMKPEMARLTLARKIAAISLSVWKKGERFDPEQLKTQAA

SEQ ID NO: 51817 - protein, 377 aa, unidentified
MNATAALPVVGVDLAKSVFQLAIANGSWRVVEQQRLTRTQFERWFANRAVGLVVMEACGSAHHWARWLNARGIEVRLLPAAYVRAYVKRNKTDAADACALLEAARCAEIVPVRVKSIEQQALQGLHRTRSLWMATRTSRINALRGFCREFGISIAQGSRLGVEQIGRVLADPHSAVPALIRTTMQLVVEEIRLLEVRIAQLERELTALARQSPACTTLLSIPGVGLLTATAMVAATSGAVSHFRDARHFASWFGLTPKEHSSGGTRHLGVSPSAAIATCACCSPTAHARYYAQRAWRCARARRSMAYGNGRWAFSTALITIRPLARSPTSSRAFATPPCAMANRMSLPACTRSSRARRSRCRPEDALSRMYLTPSLA

SEQ ID NO: 51818 - protein, 373 aa, unidentified
MPFRPLDPRVRDVDNTPASPVFSCWNLDSVNGPTESAARIRKVKCAGGFIMSLNQMRILGIDVAKAKLDIALLLPDGKFRSEVVPNTAEGFEKLAVWLERNDAVQVHACMEATGIYWEAAAAFFAEKGHAVSVVNPAQISAFGSAALSRTKTDKKDARLIARFCAERRPPLWETPVPELAELRALVTRRDALERMRTQEKNRLHVSHAEIRQSVERHVAYLEREIKDIDAEIQRKTDDDANLKKQRELIDSIPGLGVKTIPVLLSFFSGKRFSNPRQAAAYAGLDPRQHESGSSVRRKPGISKMGHAFLRKTLYMPAMVAVSRTSWGKAFKARLAANGKPPMVILCAMMRKLVHVAIGVLNSGKMFDPALHGA

SEQ ID NO: 51819 - protein, 308 aa, unidentified
MHYLYYVGLDVSKETFDASLVAFEDANEMAHRKFANSRKGICSCLHWVEKRHGIRLDDVIFCAEDMGSYISEMAVCASDRTLNFNFSLISPLVIKYSMGIARGKTDRVDARRIAEYAITHYRKIALYLPAEKELCQLRTWLILRAHLAKQRVAKLVLLEKLDYKEKFADVSIQRSMLQEEIAYAETHMKTIEREMKELIAADSNICRNYKLLTSIKGVGPITAIVMLCSTLNFTKITDHRKFACYCGLAPFEHSSGTSVRGGCHTSSMANRDIKVQLNRSALIAIRCDPQLKAFTNAKWLKVNINSAS

SEQ ID NO: 51820 - protein, 330 aa, unidentified
MKSWNFTLGVDVSKNTLDISCAELNEHIKIVNGSEGFTVFLKWCKSLKIDLDKSFLVMEYTGGYEYKLIQFCDSRNIKYARIPGLAIKNSLGITRGKNDKIDSFRIAQYGEEKHKSLIPQKPVSPVIIKLKELLSFRKRIVRENAGYQASIKEREHMYGENKKDIIVKTLKAKLKSNQKYIEAIEIELMNIVHQDEKINLNYSLITSIKGIGKINGLMTIAYTENFTSFSNPRSYAVYVGVVPFDHTSGTSIRGRKRVSHIANKELKQELNQAARSALEWDKEMKSYGDRMMKRKCYKIVLNNIKFKLILRMFAVVRNGEMYVENYRNVA

SEQ ID NO: 51821 - protein, 384 aa, unidentified
MSSHPAVVPTTARSIIYLGMDVHKESITIAVLPAVAKGPTRLDRLPNDLPKLKRWLDRVAREGELRACYEASGAGYVLHRALHDWGYGCEVIAPSLIPKRPGVQRKHDTRDAADLARLYRAGELTAVRIPSEADERVRDVVRCRETFQREILKSQHYILKFLARRGFVFREGTNWCTPHLKWLQHLTTEGSPLAAYDRLVYREYHALLLYKLQRRDELDRQIEQLALLPSLAPMVRHLQCFRGISIHSAMVLATEIVDWRRFERPAQLACYLGLVSREDSSGDRQRLGSITKAGNSHCRHVLVQAAWSYRHRPQTSVDLKRRQQGQPPAVITHAWKAQQRLHQRFNHLSYRKRPQIAVVAVAREQVGFLWAVMQDVAPANSHAA

SEQ ID NO: 51822 - protein, 346 aa, unidentified
MKKIFIGIDFSKEKFDATLIQAEGLKECAPSVHEVFYNKTSDYRRLVKWVKAHAEGFAADTWLFCGENTGGYSIGLSNYLYASGYDMWLECAYKIKHSAGIQRVKNDKADSRAIAEYAMRNYDKMILHKPQSASLTCLREIFLYRHSLVRQKVALTVRRDEKRLTQEKSDARAFMSFTSKHLITEVNKAIAKCDQKIKEIIASDDELREIFDIITSMPGIGVQNATCLMVYTDNFQKFDLDSRKIACYYGIAPFGRQSGTSVNSRPQVSPFANRMIKSLLSQAALAAIKFDMNVHIYYQRLIERGKHPLLVHNNIKNKMLHILVAMVRDRVKYNPDYVYRTNKEIV

SEQ ID NO: 51823 - protein, 393 aa, unidentified
MMRYWVGFDVGKAFHWVCVLDEEGEEVLSRRVEATEEDLEAACKEIEGLGGERTFGIDLLGGPATLLEAVLLGRGERIFHVPGIAVNRARDAYPGEAKSDSKDAHVIADQLRLRRASLHEVCPRDEATTEMRLLVAHRRDLLQDQTRRAARLREVLLGVFPGLEAALDLKREGALLAVTRVATPAAARKLGVARLFRWLKARDVRKAPDLAERIVEAAKAQRRELPAAEAKAALVAEIASEILRTRKRIADLDRRLEELLKENPAARIVRTMPGMGVVFTAEFVAEVGNLGRFASADALAAAAGVAPVLRASGATSYRRRARRGNKVLKRVLYRSAFSCISHHERSEAFYRRKRAEGKGHHQAVIALARRRVDVLWAMLRDGQMYSERPSQAA

SEQ ID NO: 51824 - protein, 404 aa, unidentified
MLSLFVGLDWGGLNHAVCVIDAAGRITARFEARHDAAGLADLLLARLRRLGPPADLPVAIERPSGLVVDTLVEAGHPVIPIHPNVVRACRPRHRAAAGAKSDPGDAFMLADILRTDGHRFRPLAPSSDEIRALRALVRGRDDLVAQRVALANQLRSLLEGFWPGAAAIFAAIDSPIALAFVSRYPTPDSAARLGEKRLASFLASHAYCGRRSAAELLPRLRAAPTGLAGDAEAEAKGELARALAGTLERIVAAIAKLTARIEHAVAELPDGRIVMSFPRAGRVCAAQILAELGDVRGRFLTADQLAAEAGVCPVTHQSGKSRGVVFRFACNHRLRQAITCFADNSRHACAWAAATYARARARGCKHQHAIRVLARAWVRVLWRAWQDRRPYDPAAHLARAKSAA

SEQ ID NO: 51825 - protein, 403 aa, unidentified
MFYLGIDVSQKTSSCLLLNAEGRKGKAFTFENSPEAFQSLVQWLEEQSVPRHDLLIGFEATGNFWENLYVYLKEKGFAVVLLNPFHVKRYREALAKKAKTDHIDALVIAQFLRTGEYVQSQVAEETIQSLREMTRLRYELLKEKKNYQRQVCSLLTVVFPEYDQTILKNPFTISALAVLQKFPTAKDLAQAKPKQIEKIIRSIPGNSFGAQEIDTLISVAQHSMYSGRAKEARAISLRILLTHIAHLVHSIQELEEETQKVLSPQRPDDPFPGENLLTIPGVGQNTVAAVLSYLGEDGANFSSSTRAVGYVGYYPKIYQSGQSKRDNTISKRGPKMLRWALYMAAVASLRHNPEMKTLYHRKRSQGKTKKQALICVAKKLLQIMLAMLKSGEPYKPQMVFVQS

SEQ ID NO: 51826 - protein, 402 aa, unidentified
MNAVGIDVSKSKSVVAIMRPFGEIVSTPFEIKHTASDIHSLIELINSVEGESRIVMEHTGRYYEVLAHQLLEANLFVSAINPKLIKDFDNDSLRKVKSDKADAVKIARYALDKWQNLKQYNVMDELRNQLKTMNRQFGFYIKHKTAMKNNLIGILDQTYPGVNTYFDSPARSDGSQKWVDFASTYWHVDCVRKMSLNAFIDHYQNWCKRKKYNFSQSKAEEIYGKAKELVPVLPKDAITKLIIKQAVDQLNSASTTVESLRTLMNETASKLPEYPVVMAMKGVGTSLGPQLIAEIGDVSRFTHKSAITAFAGVDPGVNESGTYEQKSVPTSKRGSADLRKTLFQVMDVLIKTHPQDDPVYQFLDKKRAQGKPYYVYMTAGANKFLRIYYGRVKEYLASLPES

SEQ ID NO: 51827 - protein, 359 aa, unidentified
MDAQEGPVRRIVGGVDTHKDLHVAAVVDEQDRVLGTQSFASTRQGYRQMLAWMRAFGEVQRVGVESTGSYGAGLLRFLQQAEITVLEVTTPDRQDRRRRGKNDDFDAQNAAHAAFAGIRTVTPKSRNGMIEALRVLSACRKTAVAARRIALQMIQNTIVCAPESLREMLRRMTRMQLVRTLAAWRPDLTAYRDVEAAYRISLKSLARRYLELHDEIADLDAMIAAIVDELAPNLVARNSIGHVGAAQMLLTAGDNPQRLRSEAGFAALCGVSPVPASSGKTARHRLNRGGDRAANSALHIIAIGRLRTEARTQAYVAKRIGEGHSKMEAIRCLKRYIAREVFLLIRQRQKEINQTRIAA

SEQ ID NO: 51828 - protein, 355 aa, unidentified
MNTSHYIGFDVHKKTISFCIKTAAGEIVEEGVVAAQRPALQQWALARRQPWRGALEATLFSGWIYDTLQPYSAELQMAHPAKMKAISAGKKKSDAIDARTIADLVRCNLLPACYVAAPRIRELRRLLRYRTLVVSEAVRMKNKMAGLLMETGALYVKEKLHGKKYFASLLEELEDVPGSVIDLLRLSRGALEMFESTQRKLVRELLAAPELTERVQRLTSIPAVGQITALTWALEIGDPQRFRSAAEAMSYCGLTAALKSSAGKQQRGPISKQRNHWLQSTLIEAAKLAPRWNPQLAALHAHELERGHRNRATLAVARKLVTYLLAVDKSGQSFQLRAPWPLEAAEPSEQNIKTA

SEQ ID NO: 51829 - protein, 339 aa, unidentified
MRLYAAIDLHSNNSVLVILDETDKIVHERRHPNDLPTILAALAPYRENIQAIAVESTYNWYWLVDGLMDAGYTLKLVNTLAVKTYDGLKYSSDEHDARHLAHLMRLGLLPTGYIYPKEERAVRDLLRKRSLLVRNRTLHILSIQNLVSRNSGNGIVATAIRKLDEEAISRICGGNANLALAIKSSLSVLFCLDAEIEGLEKVVLAKARLRPEFKKLLTVDGVWHIIGMTIMYETGDIGRFAKVGHFASYARCVGSVRLSNGKKKGEGNRKNGNKYLSWAFIEAAHYAVMHNERIRKFYQRKKAKTNTVVALKSVAHKLARACYHIIKEQTDFSEERAFA

SEQ ID NO: 51830 - protein, 391 aa, unidentified
MVCVGIDVAKDKHDCCILDSEGTTLVDCFTIPNNLDGFKRLLQTIKDCTQKSDKIKVGLEATGHYSCNILGFLLDNDLPVYVMNPLHTNLYRKSLSLRKTKTDRVDAKTIATMLLSDVDLKSYTDTAYHNEELKSLTRYRFDKVQERAKLKQSVSRLVTILFPELEQLVSSIHGTSIYALLSEYPGAKQISEAHLTRLANILVTTSRGHYRKDRATHIRDAARTSIGSVMPAKSLELKHTIKLIQELTSEINEIEDAIRKIMDELKPPILSIPGMGFHSAAMILAEVGDFSNFNSPDKVLAYAGCSPSTYQSGKLTNCYAHMEKRGSRYLRYALYTATKYVCYWNPVFTEYLTKKQAEGKHYNVALSHATKKLVRLIYALQKSGKAYLAVT

SEQ ID NO: 51831 - protein, 394 aa, unidentified
MKLVGIDIGKNSHHFCVMDKETGELNVTPSSFSNNKEGFDFLINSLKPYSKKSILLGMEDTGHYHVALLKFLLSNGYTVALINPKTTDFTRKMEGGITKNDKLDTITICNVLDTPERKKQYRITKVDRFDLYEQRQLTRHHHNLKEELNIYCNRLQKSIDLVFPEFNTLFGSKYGVVYMNLLKTFGSAEAIASTDIRTIRKCFEIKGRGGRISLTPEKLKECAKNSIGISSEVETIQIKHLVSQITLIKEQIAEIDKKIEEFSITNNSPILSIPGISHFSGTSILAELGDIGNYSKPSQIIKFAGVAPYHYESSQYNAQHTGITKKGSKYLRKTLYQIILPVISNNPVFKKYYRLKISQGKGHRCAQGHCIRKLLRIIYHLLETGQSFDPALLR

SEQ ID NO: 51832 - protein, 347 aa, unidentified
MEHIAIDLGGKKSRICVRDDKGTILEERNYPTERLSSYLKKRPGSQVVLETCSEAFAIADQAKQLGHKVTVVPATLVKELGVGSRGVKTDKKDAQVLSQVSSRVDLPSVHIPSGQAREWKALCSSRDCLVASRTKLINHVRGWLRTQLVHVRSGGVQTFSQRVEEELLNRPDGMPMYIHRELQSIKMLNEQIAEADKELDEITAQETRFRNLMTVPGVGPVTALRFVATVDDVGRFRRAHALQSYLGLTPGENSSSMRERKTSITKAGAPEVRWLLVQAAWCAWRTRPGDPMVKWANQVASRRGIQIAIVALSRKLSGILYAILRDGSQYQSKRAADSLPLPANSPV

SEQ ID NO: 51833 - protein, 373 aa, unidentified
MGESSKTTTLYVGLDVHKDSIAVAYAPEDRGAEVVSLGAIGTRQCDIDKLIRKLQSKGATLVFVYEAGPCGYWLYRYLTRKGLACHVVAPSLIPRKPGDRVKTDRRDAITLARLMRSGDLSSIYVPGIEDEALRDVSRGREAAMHDLKRSKRRLKSFLLRQDIRYEGRASWNPAHLRWLSEVVCPTPPQQIVFQEYVRAVTEQQERLQRLERELHEAVKGWRLYPVVEAIQALRGVELTGAVILLTELGDLTRFDSPRQLMNYLGLTPSEYSSGARRRQGGITKAGNSHARRALVEGAWAYRYPAKVSRHLQLRLEKLPAEVQAIGWKAQVRLCRRYRQLTARGKHVNQVVVAIAREMAAFAWAIARIVPLAS

SEQ ID NO: 51834 - protein, 345 aa, unidentified
MKNTVAGVDLAKEVIQVCLCTNNKVHSNIEIPHHEFLTWLFKSKPISIIFEACGTSNYWKQRAIEAGHDAQLISAKLVASIRQNQKTDKNDALAIVQASQLADIQFIKGKSVEQQQLQSMMRLRELAIKQKTASSNQIKALLLEFNIRASSKHGGLKGAVESLLEDAENGFSFEFRRALNAAWGLHLGLLDSIRVYDRCLEATIDEHDDCKRLLKLEGVGPLNAINLYIALGCADLGVFNKGKDASACIGLTPLQHSSGGVTKLGHIRKNAKSSTLRSQLITGAMAVVNQMVKRTAVTKKEAWVQGLVARRGKKCAAVALANKTVRTAYVMLTQGTEYKAELVAV

SEQ ID NO: 51835 - protein, 353 aa, unidentified
MRYIGVDLHTNSFTACYLEQEKPEYIKTFRLQDLGNFIKNLQETDEVALEATGNSCFFYDEVSPYVKRVVVVAPLQFEVIRRSVNKTDKHDARAIAFFLSKDMLPEAKCKSKQCQQLASLLKTRDQLVKSRVSLINKIHGLFNYHGIKIKKEVLTIKAGFECSLGKHDWSHLEKVEIEVISSNLEVIRESLKKLEKEIIAFAQQLPGFNNLISIKGIGAISAAVFVATIGDINDFSNPEKLTAYFGVVPRVSQSNQQCTIGRITKRGSKIGRTSLVQCTWIAIRYSPYLKSFYERVKKSVVLLRLLLLLLGGFSQLFSILLKTTGFSKILQNMKFLIDNNHRRNIYELYNRTK

SEQ ID NO: 51836 - protein, 343 aa, unidentified
MRAITTIGLDIAKSVFQVHGIDAEGNVLIRRQLKRRYVLTFFEKLQPCLVGIEACATSHHWSRELKALGHTVRLMPPAYVKPYVKRQKNDAADAEAICEAVTRANMRFVETKTPEQQSCLILHRARQLFIRQQTSVINAIRAHMAEFGIVAPVGRKGVEQLLAIVMDAGDQRVPEVARACLAALGAQLRMVKAQILEFDRRIMAWHRSNETSRRLDAIPGIGPALATALVASVADPKAFRSGRNFSAWIGLVPKQHSSGGKDKLGSISKQGDRYLRSLFTAGALAVIRYAKIHGTQHRPWLTALLARRPTKVAAIALANKIARMAWAMMAKGERYKEPVALAA

SEQ ID NO: 51837 - protein, 348 aa, unidentified
MKNHQIGIDISKEKVNICLRKEKKSVWEHECPNTVASIKKAIRKGMKDHGAVTDDIIVCAEFTGRYIYPLVCACDELGLFLWMEDPTRIKNSFGIVRGKDDKIDARRIAEYADRFSDKAMAYGMPDRTLASIKSKLADRDMLLEDRKRYETQLHDQKGFMDPKDYAQKSRLWNAVIKTLNRQLALLDKQLAELVASDKKISRQVELLKSVDGIGDRVALYMVAVTMGFKRFQNPRQFFCYAGLAPFKYTSGKSIHSKSKVSQRANKHIKALLHLAALSAATHMKDSEYKRYYERKIAEGKHPMSVLNVVRAKLVSRMFAVIRRNSEYQKNYVFSNSLEKNSALPIANS

SEQ ID NO: 51838 - protein, 367 aa, unidentified
MDSITFVGLDVHADSITAAIVHGQSQEVEVIELSSDLMKVRRLFRRLSDKAPVRACYEASGAGFVLQRVLSRDGFHCDVIAPSLIPRRPGDRRKTDRLDAIMLARLYRSGHLTPVHVPTEDHEALRRLLRLRTTYHAYRTATMHRISGVLRNHGHVFKEGKSTWTKKHRQWLASLRQSLDGPLQTALAIELEHLEYLEAQQHAMDAELERFALSDQFRLQTEALCCLRGVKTLTALTLLCEVDDVRRFASPRALMAYFGLVPSERSSGDKEYRGPITKAGNIHVRRLLVEAAWNNRHRAAADLIMNRRRQGQPPAVVAIAIKAQHRLSKKFWHLDQRKHRHIAVTAVARELCGFIWAILNQLQPTAY

SEQ ID NO: 51839 - protein, 353 aa, unidentified
MQPRSKVTTWAGVDVGGKELTVTLVRGRNEPVHLTIPNTPDGHATLRRALRKKAGIARVALEATGTYHLDLALLLARTDGIELMVVNPLAARRFAQAQMRRAKTDRVDAQVLLEFCQRMAFEPWAPPSPAALELRNISRHLAALIADQTALKNRLHAAQATETTPRFVLADLADQTAAIAERILRCQAEGERVAHSDPDLQAAFSSLLSMPGLAERSAVLLLGELAVLDPSMSPDEVVGHAGLDPRPIQSGTRGNKDTARKISKVGNSRIRAAMFMVAHNAAQRGVVGEFRDRLIARNKPYYLAQTAVMRRLLRVCWVLIVKKASWDGALFAPRPPRRLATTDQIAQNSHPAP

SEQ ID NO: 51840 - protein, 393 aa, unidentified
MVYVGIDVAKDKHDCFIVNSDGEVLYDVFTIQNNMDGFEDLFFKIKTSSKDLSKVKVGLEATGHYSCNILGFLHNKGLSTIVINPLYTSLSRKSVSLRKTKTDKVDARTIASMIMSDVSLKPYSDTLYHNEDLKSLSRYRFNKVSERAKLKQSVSRLVNILFPELEKLVSTLHTKAVYELLSEFPGAHQVASANLKHLTALLISASKGHFGRDKANEIREAARRSISSYLPAKSLELRHTIKLIRELNAEIAEIETEIKKIMDSIDSPTLSVPGISYALGAVIVSEVGDFSRFDNPDKLLAFAGCSPSTYQSGQIYSTHSKMEKRGSRYLRWALLNAAKYVCKWEPTFAIYLRKKRAEGKHYNVAVSHAAKKLVRLLYHLETTGEKYIPQTLS

SEQ ID NO: 51841 - protein, 333 aa, unidentified
MDTETGECGERRLAQREEAETFYRDLHKKGGRVRVGMEASGHARWFERLLTELQFELWIGDAAEIRTKRVRKQKTDRQDAQLILKLMLEDRFPRIWVASWENRDLRQLLWHRHRMVQARTRIMNQLQAVALNEGLRYKKRLWREAGREQLELLRLAPWASRRRHDLLELLDRLNPTIAQLTTAVEEEVEKCPEAQRLMTHPGVGRLTALAFVLIIGRTDRFQGGKQVASYLGLVPEEESSGDRRRLGHISKQGNSLLRFLLVEAAQVTVRSDSEWRGKFFHLAMRRGRKIAKVAMARRLAVRLYWMWRRRWNYEQLTKFGSHAGQPGHPHGVQ

SEQ ID NO: 51842 - protein, 335 aa, unidentified
MENNNPVARNFIGIDVSKDTLEVAYPKTTKGFTTVTVANAPLSIWKLLKTFDQATDQIILEATGTYSLLLCHLLSKAGIRFSLLNPRQSTGYARMQGKTVKTDKADAILLAQLGQQMQPSVTVLKDASWYQLQAQRAYLRQLKKQRIMLLNLKSSFLPSPYPNQTVNSSLQTHLDFIEAQIKEIEHSQTPQSEDYQQLFEQITSISGIGEVTAHEIIAATNGFEDFDNPKAFAKFIGICPTYRQSGTSVKSFGRINRSGNPHLRSVLFMAASVAKRWNKDCKATYQRLRAKGKTYKQAIVAVMNQLIRQVFAIVKANTSFENGYNLAKMVQAKNE

SEQ ID NO: 51843 - protein, 367 aa, unidentified
MSIDTFVGLDVHAASITAAILRPGSEQPEVIKLSSDLMKVRQLFRRLSGHGPVRSCYEASGAGFVLQRVLAGDGFSCEVIAPSLIPRKPGDHRKTDRLDAVMLARLYRSGHLTPVHVPTEDHEALRRLLRLRTTYHQYITATMHRISGILRNHGFVFTEGKSTWTKKHRLWLARLRLTLQGPLATALAMEIQHLEYLETELQSMDTELERYAQSPLYRCKVEALCCLRGVKILTALTILCEVDDVCRFSSPRKLMAYFGLVPSEHSSGKRQHRGSITKAGNIHVRRLLVEAAWNNRHKAGAALILNRRRQGQPPEIVAIAIKAQHRLSKKFFRLDQRKHRHVAVTAVARELCGFVWAILMALPKTQH

SEQ ID NO: 51844 - protein, 341 aa, unidentified
MQITTIGLDIAKNVFQVHGIDAAEKVVVRKQLRRGQVMKFFAALPPCLIGMEACATAHHWARELTKLGHEVRLMPAKDVKAYVKRNKNDAADAEAICEAVRRPTMRFVGAKSAEQQGRLMQHRTRDLLMRQRTQVINALRGHLAELGIVAAQGREGLKQLLTIIADEKDARLPIDARASLIVLAAQLQALHTMIGSIEKRLTVQHRANESSKRLESVPGIGIIGASAIAATVTDPNAFRSGRDFAAWIGLVPRQDSTGGKQKLGPISKQGDRYLRRILVVGAHSVLRRAKQNPEKYPWLTKLLARRPFKVVAIALANKMARVAWALLARGGTYRVPALAAA

SEQ ID NO: 51845 - protein, 348 aa, unidentified
MLADQFDYVVGVDPHRDMHALAVVHVLSGAVVLETTVAASSDGYAQALKLAEVHASGRRAFAVEGTGSFGAGLTRFLSGRGERVLEVSRLRRERRSGGKTDALDAIRAARSVLGQERPATPRAGGERQALQALVAAREGAVDAKCAALGQLRDLLVTTPEPLRGELRLLTPARLLKRLAATRPDGRRDPELRGTMLALRSIARRVLQVTAEERELAREIETIIRKLAPQLLDQSGVGPHSAAQLVLSWSHRGRISSEAAFARLAGVAPIPASSGQTVRYRLDRSGDRKLNRALHMILVTRKRAHPATIAYIERRIQEGKTRREATRCLKRYLARSLYRLLERGAPLAT

SEQ ID NO: 51846 - protein, 341 aa, unidentified
MGEVTTIGLDLAKQVFQVHGADGAGTALFKKRLTRSKVISFFASQARCLVAMEACGSAHYWAREIQKLGHEVRLIAPSYVKPFVKRQKNDAADAEAICEAVQRPSMRFVPVKREENQASAAIFRARDLLVRQRTQIVNSLRGQLAEFGWVAPKGLGHVAGLIAGIEDPVFPLPQGTRSALMVLIDSLRDLERRIDELEREIAQRVKEDETGRRLMTIPGVGSINAAALLALAPPPETFRKGRDFAAWLGLTPLQRSTGGKQRLGATSKMGERTLRRLLIIGASAVVRHASKRGAPAGSWLAKMLARKPRMLVIVALANKMARIVWAVMMKGEDYRAPAAAA

SEQ ID NO: 51847 - protein, 349 aa, unidentified
MKENNATNEAREIKVLGIDLAKQSFQLHGVDGQGRVVLTKKLGRNQLSAFIANLPPCLIGLEACGGAHYWVRQFTQLGHCVRMIAPQFVKPYVKSNKNDAVDAEAICEAVQRPAMRFVPTKSLSQQDLRSLHRIRSQLVARRTAQANQVRGLLLEYGIVIPKGISYVRKAIPSILEDAENVLSALFRELLSELYDELVHLDKRIHALEQRLVTLSAGHDDCQFLLTIPGVGLLTATALVAAIGDVSVFKNGRELAAWLGLVPKQHSTGGKQTLLGISKRGDSYLRTLLIHGGRSVVRVAHKHPDKRNRWIGDIKQRRGENISNVAVANKNARIAWALLTRKENYQAKQA

SEQ ID NO: 51848 - protein, 423 aa, unidentified
MKSSGTQTFTAYVGIDWADTKHDFCLQERGSDRREFGCVAHQVECIDEWAKSLQQRFGTPVAIALELAKGPIVYALQKYDFLVLFPINPLTLAKYREAFKPSRAKDDPSDAELALDLLMRHPERFAALHPQSVGMRTLISLTERRRELVNDKIRLTNRLTHTLKEYYPQALDWFDQHDTVLFCDFLTRWPTPLQARRAHQASLKAFFHVHNAHRPQIIAARLKAIKAAVPLTQDPGVIVPCRLHVMVLIEQLRLALQAIEQFDRHIAELAPTLPDYRLFAGLPGAGPHLAPRLLVAFGEDRERFQRAEELQKYAGIAPVTERSGKKTWVHWRWQCPTFLRQTFVEWAGQTINKSFWAGAYYYQQRARGSTYQAAVRALAFKWIRILHSCWKTRTPYDESKYLNALKRRQSPLLNNLVPNPQNP

SEQ ID NO: 51849 - protein, 373 aa, unidentified
MNTIYIGVDFHARQQTICYLTTETGELVTTALKHEPKTAVRTFYEQFSGQVIVGLEASGYSPWFERLLEELGHQVWLGDATEIRRRARWRQKNDRRDAELILDLMLHDEFPRLHRPSLQSREVMRMLRYRQKLIKMRTMSKNSLQSLALQSGIARRGRLFTREGKAELDAAVMSAAMEWQREHWWQLLEALDQQALEAMTWLKGAGQNDVSIARLRTHPGIGLLTSLCLVHTLQPVARFRNTRKVAAYAGFDPLERSSAERKHFLGISKAGSRVLRYLLVEAANIAVRKDEELKRFYQRLAQRRGRPKAKVAAARKLLIRAYIMMRDEIDYAEFRRRAVAARLARLRQGPPIPAALIGQPASTARQEPLPRGK

SEQ ID NO: 51850 - protein, 454 aa, unidentified
MSKKTKKTKTGVKKITQFEIIRPNVAGIDVSDNDTMMVAYPINEAEVQIEAFECYTRDLYRISSTLKAHNIESVAMESTGVYWIPLFLLLQEDGFEVYLVNSKHVKNVTGRKEDEEDAEWIQKLHRCGLLSASFQPDNQTRSLRSVVRHRSAMVRTRATYLNRMQKALEQMNLKIHTIISDIDGKTGLSIINAILSGEREPDKLADLCDRRIKASREEIIKSLEGFWLEEHLFELSQCYKLYVFHNEMMNECDKKIEAILQQVIKSKNNGVMPQLGKLKRKLNYKNDINIDITNYLYELNQVDMVSTNGITGISEITALTIYSEIGDNLHRFKNEKHFTSWLGLAPNTKISGGKIISSRVPKKKHYAGQILRMAALSLSNNKGPLGDYYRRIRSTAGKQKAVVALARKLAVIYYRMMTTKEQYNPQSLIGYQEKWRDRKIRNLEKYLNKLKGVA

SEQ ID NO: 51851 - protein, 362 aa, unidentified
MKKHSNSVKKSESRMKRRNPRAEQRRDSSEVMAELVSQLRQQLEEKSVPAAESAVEERDAVGPNLDRLTVGVDLGDQWSNYCILGLGGETLREGQFRTRRQEVEEFFQGLAVSRVVIEVGTHSAWVRELIAGLGHEVLVANAQRMEGRKRRRRKNDRIDAVKLARLGRVDPKALYPIQHRSTEVREDLLVIRVRDSLVESRTKLISTVRGMVKTMGARVQGCSSVSFSAKAAEQIPAEVRETLEPLLRLIQTLSEEIKSYEKRIEKLGSEKYMDTKLLRQVNGVGPVTSLAYVLTLESPQRFKRSRDVGPYLGLVPQQEDSGDSQPQLGISKAGDRMLRKLLVGSAHYILGPFGPDTHFFMF

SEQ ID NO: 51852 - protein, 370 aa, unidentified
MRTLNKYIGLDVHKDTTVIAVAEEGRAGEVRLYGTISSDLHALEKALRKIGGEGVRLHVVYEAGPTGYVLYRRLQQLKIACIVVAPSKVPHAPGVRQKTDRRDAEQLARLHRAGDLTAIHVPDAVDESIRDLTRARADAVHDLTRVKQRLKSFLLRQGYRYSGKANWSEAHQRYLRELVLPLPALKAVQEEYLLAITQALQRVERLDDLIAAQVPEWRMYPAVQALMCLRGFQLTAATVLVAELGDVRRFTHPRHVMAFRGLVPHEHTSGTSRKLGGITKAGNAHARWILTEAVQHAFLVPKVSSQLTVRQRGQPTAYRELSWKVQTRLYKRSRHLLGRGVMKAKVTVALARELAGFIWALLVQVPVPKA

SEQ ID NO: 51853 - protein, 333 aa, unidentified
MKDLSSAQHFVGCDVSKDTLDFALFEPGKNYRTFQHIQVANTEEGFRAMRKWLRSFGVKVSDAVIGLEHTGSYSSALGEWCHKKSIVFVLLHPMDVKNACSTGRNKTDKVDAQFIADYLYTMREKLAPSQPDPQPIKTLRALRNERQLAVKARTAYLNQMKNVEDKSTLRRMEKVAATFTAQIKAIEADIHKVITSDEKIRNTYERLLSIPGIGMLNAITTIITTCNFTRFQTARQYAKFSCVCPLSRFSGSSVKGGAHVSHAGHSEIKSLLTEGARGAVRCDRQLRDYYQRKRAEGKSHGCVMNAVKFKLICRMFAVVKRQSDYVNTEAYRS

SEQ ID NO: 51854 - protein, 412 aa, unidentified
MDALIERAAGLDVHQGSVVACIILGAAGRRPTKEVRRFGTMRQDLAALRAWLLEKGVTHVGMEGTGVYWQPVYAALEAAFTLIVGNAAHMRNVPGRKTDVKDAEWIADLVRHGLVRASFVPPPEVRVLRELIRHRKALVGTLAAERNRTLKLLESAGIKLAGVMSDVFGVSGMLMLRALAEGTADAATMADLAKRRLRRKRDRLALALDGSFAEHQRFLLGLHIRRLEEIERDLAEVEAAIGAAMRPFAAQQALLVTVPGVDALTAAAIVAEIGTDMAAFGTAQRLAAWAGLCPANHESAGQQKRRGTRKGNPYLKAMLVATAISASRTKGTYLRDKFHRLKARMGPKKAAVAIAHKILTAVFHMLQRAVAFTDLGADYLDRIDKHRTAKRLVRRLDALGYDVMLRPKMAGA

SEQ ID NO: 51855 - protein, 340 aa, unidentified
MQYKRIAIDTSKSVFTLHGIVANDQPVLRRNLRRSDLEAFFAKLPPTEVVMEACGGSHHWGRVLTKLGHRVKLIPPQYVKPYVKRGKNDRNDAEAICEAAGRPGMRFVPVKSAEQQAGAMPLAVRELLVRQRTQLVNALRGHASEFGVVVGKGIENVSGLLAKIAATDSIPDAAREMLAMLGNQIAHLDEQLGTLETRLVAQHRATPMSKLLAGQPGIGPIAALTIVHKVDPTQFKSGRHFAAWLGLTPKERSTGGRQRLGGISRQGNERLRQLLVVGATAVIRHAKPGSKSASAWLLAVLERCPRKVAAVALANKMARTVWAMMTSGEAYRMPVASKAA

SEQ ID NO: 51856 - protein, 338 aa, unidentified
MNIVFLGIDLAKNVFQLCGLNQAGKPVYTKRTGRKELLQTLANIPACLIGIEASTGAFYWQREFEKLGHKVKVISPQYVKPFVRGQKNDGNDAQAIAVALMQPTMQFVPPKSPEQQDIQALHRARQRIVNHRTATVCQIRGLLLDRGIPIGSAVSRARRAIPLILEDAENGLSSRMRRTIAELYDLFNDLGRRIHFFDKEIETVFRQSEACQRIAKVKGIGPETATAVVAAIGKGTEFKNGRHFAAWLGLVPRQHSSGDRQVLMNMTKKGDKHLRTLFIHGARAVVRVATNNNDGHMNQRVNQLKERRGFNKTTVAVANKNARIIWSMLRNETGYQVV

SEQ ID NO: 51857 - protein, 465 aa, unidentified
MGAGKMNRKQRKELGRRLQSANPGLEVVHPRAAGIDVGNGAHYVAVRPEQDAEPVRRFECFTADLHRMADWLEACEVKTVAMQSTGVYWIPLYEILEQRGFEVYLVNARHTKNLPGRKSDVQESQWLLKLHTHGLLNNSFQPTAEIRVVRTYWRQRGEHVRSASTCIQRIQKVLTQMNVQLANVISDLSGLTGQAIVRAILAGERDPRKLAELSHPRIRAGREQIAKSLEGNWRSELLFVLKQEMEMYDTYQHKIAECDRELEATLKQFGVPERASTEQPKIPNAKKTKRIQRNAPGFNLTSELHRITGVDLSRIDGVNAIVAQTIISEVGLDMTRWKTEAHFASWLGLCPDNRISGDKVLARGTRHVINRAATALRMAATTLIKSQSYLGAQYRRLRTKLGAPKAITAMAHRLARLVFRMLKYGQEYVDKGTQYYEQKHREQQLHLLKKKAATLGFQVVETGVA

SEQ ID NO: 51858 - protein, 421 aa, unidentified
MKKADTGKVKFVKDDALIVAVDIGMELNRGYCTTPDGRSTKTFKFENTRDGLDTLWGMIMASKNRFKCNEVIVGYESTGPYGEPMLHYLMNKPVRIVQVNPMHTKRVKEINDNSPLKTDEKDPRVIADIIRWGHALSIVIPEGDAAYLRRLNNSRERHVRERTALVNQLQQLVFLLFPEFMTVIKDIKCKTPLYLLKRYPTPEAISVLDKHLLGEEMRKRSMGKFREHHADMLINLAKNTIGIREGGSGLSLDIRHILVQLEMLKTLITEIESEMEIALGRMSYSSKLLSIKGLGVVSVAGIIGEIGDFKKFKTQSEIMKLAGLDLYEISSGKKKGQRRISKRGRSLLRKILYYAAIQTIRKNGILHDYYTRLTDRGMKRMMALVAVSRKLLGILYAIVRDDSEYSVNFESIKRQVIKKAA

SEQ ID NO: 51859 - protein, 360 aa, unidentified
MKNSSKLSQQTKLAKPDRSVGLDLGDRFIHYCMLNQEGEVIEEGRMQNSESALCKHFANEAVMRIAMEAGTHSPWVSRLLKRLGHQVLVANPRKIRAITGSESKNDRNDAELLARFAAYDPKLLSPIEHRSQQRQQDLNLLCARSTLVRARTMIVNVVRGLVKSAGGRLPSCSTESFAKRVAGSIPTPLGEVCLPLLKQIGQLTAQIDRMDKQIEQLARKYSEISVLKTVPGVGPVVAACYVLTLDRPDVLGDNRQAGAFLGLRPRQSQSGDSDPQRRISKTGNSYLRSLLVQSAQYILGRFGPDSALRRWGLKLAASGGKRGKKRALVAVARKLAVMLHSMWRSRIPFQAFPQPATTAA

SEQ ID NO: 51860 - protein, 429 aa, unidentified
MNYNTQNAKIASITEKTLIVGIDVGSETHYARAFNWRNYEYSKKPLAFSNDEAGFSSFKDWMDDIAEKHGMKVVIPGMEPTGHYWLNLGAYLQEQGMKPVHVNPHHVKKSKELDDNNPSKNDRKDPKTIAGLVNEGRFSYPYIPTGIYAEIRNLSNLRIQTQEEITRIKNRIARWFSIYFPEIKDVYRNPDAVSGLMVIKQAPLPCDIKELGVDGVNKIWRDARLKGTGIKRATTLVTAAEHSIGNTEAPRSARKEIRNLLNDYEIYKNRMDELMEEIRETLSEIPYIDKLMEINGIGIKTVSCFIAEVGDIGRFDNPKQVQKLAGYAIVADSSGKHNGESRISHRGRKRLRYALYEATISVIGKNKEFKEIHSYYRTREKNPLKKMQSVIAVACKLIRIFYTILTKGVDYDGQKMLTDIVRPEMQLAA

SEQ ID NO: 51861 - protein, 398 aa, unidentified
MTESSDYESVQVFIGVDVGKDTHHAVAINRSGKRLFDKALPNDENKLRSLISDLKQHGQILLVVDQPATIGALPVAVARSEGVLVGYLPGLAMRRIADLHAGEAKTDARDAAIIAEAARTLPHALRTLKLADEQIAELSMLCGFDDDLAAQTTQASNRIRGLLTQIHPALERVLGPRLDHPAVLDLLQRYPSSEKLASLGEKKLAAQLCKLAPRLGKRLAADIAQALAEQTVVVPGTNAAAVVLPRLALQLITLRKQRDEVALEVEQRVLAHPLYPVLTSMPGVGVRTAARLLTEVACRAFASAAHLAAYAGLAPVTRRSGSSIRGEHPSRRGNKALKRALLLSAFAALRDPISRAYYTRKMSQGKRHNQALIALARRRCDVLFAMMRDGTFYTPQAS

SEQ ID NO: 51862 - protein, 451 aa, unidentified
MEQATRFVGMDVHKDTIVVAVTATGEVGKAMAYGTFPNTTAALEKLVKRLRQAGSGPIKFCYEAGPCGYGVHRALTKMGEDCMVVAPSMIPRKSGDRQKTDKRDADGLAVLHRGGLLTAVWVPDAAHEAMRDLIRARLAAIRAVRAARQQLSAFLLRHERIYPEGRTAWTKAHRGWLVDQSFAHPAQQIVLEECIEAVRSGEQRRDRVDGYLHAQIPTWSLFPLVQNLCALRGLDTIASAGLAAAIGDPSRFASAPDFMAYLGLVPSEHSSGPKRHIGAITKAGDVHARTLLIEAAHSYRFPARITRHKLTAVEAVPEAVRTIAWKAQTRLCQRYRQMMAKGKPRQVVVTAIARELAGFVWSIACITSDPAATGDVVNGPCNEATTYLMGVEIDSDKVTAAREGAVKRGQQSPAEAGRFRAPRRQSRAGVPNRTGRSAQTKMAAAEASLTG

SEQ ID NO: 51863 - protein, 428 aa, unidentified
MDKVETIRLEEFRQLKKEIRGSERHLIVGIDVAKDKHHAFFGTATGKTLLKRLVFENTLEGFEKLLLHVEAVKGKHALEKEVFGFEPTANYHKPLGEFLIKASHMVVLVSGVAVKRNRELLDGRWDKHDTKDSSNGADLISQGKFMYYDYPVSPLRDLRNLLSLNRRWKRQEHGLRVRLRNHLVAQYFPELDRYYRQWGSEGLALARWCLSPSVISGMDYEQFTRLVAPGTRRIAQRERLRAVWHRAARSIGCEVGEALAFEAKMMVEALAQVRESIDAIDGKIRDICVRFPEYHYLLTIPGFGPDVSSKVLAAIGNPFRFDNHREVLKMAGLDLSATRSGKNANRITPVISKKGNAGLRYALYQAAHIASTGNQYFIMYFTTTLRGREKEKGIRTKMRVKLAAKLLVIAWSLMKKKQSFHPGYLTIE

SEQ ID NO: 51864 - protein, 357 aa, unidentified
MSSNMKKYIGLDVHKEATSIAVLNGAGKLVMESIIETKAATLLEFLHGLRGELHVTLEEGTWAAWLYDVLKPHVAEILVCNPRRNALLKEGSKSDKVDARKLAELLRAGLLRAVYHGENGLRTLRELARSYLTISKDQARVMSRLKALYRSWGIPCSGRQVYTPRHREQWLSRIAQPGVRRRAELFYQQMDGLSVVRHAVRGELLAESRKHQAVKILRQIPLIGPLRAALLLALMQTPHRFRSKRQLWTYSGLGVETHDSAQHRYVDGQLQRSKKPQQIRGLNQNHNHEMKKIFKSTAMSASRCAGPLQDFYAGLLSKGMKPDMARLTLARKIAAITLTLWKKGERFDAEHLKSQAA

SEQ ID NO: 51865 - protein, 402 aa, unidentified
MNCVGIDVSKGKSMIAVMRPFGEVVVSPFEVRHTASELSELARLLKNLDGETRVVMESTGNYHAPVAWLLHGAGFYVSVVNAMLVHDYGNNSLRRGKTDKKDAVKLANYGLDHWLTLPRYVPEEDTRLMLKTCYRQYQQYSKVQTMLKNNLISLLDTAFPDANRLFTSPPRADGSEKWVDFVATFWHCECVCGLSKKAFTAKYQKWCRKHGYNFSQDKALDIYASACGRFGVMPKTNTAKLLVEQAISQLQTTSAALAALKQEMQSLAASLPEYPVVMEMFGVGPTLGPQLIAEIGDVRRFHSKKALVAFAGIDAPPYQSGQIDVRSRSISKRGSASLRRTLFLVMGVLLQCAPMDEPVYQFMNKKRSEGKPYRVYMMASANKFLRIYYASVKAYLDSPEHD

SEQ ID NO: 51866 - protein, 482 aa, unidentified
MKKRNIYQNQSQELLHLFEETVSREKVMCVPMDYAKNDHLVMFCNGHGDILRKPFSVKNTPEGIGYIDEQVTRSCRQRGIKKKHVFFGGEDANSFAKNFVSTLRSKGFVVANVNAHDAKKQRSNIQASTDRIDLMGIATMLLNCRANCCPAQLGIYRNLRTLVRHRRRLVQMLTEVKNRVHGIVDELFPGFLNENNSGIVPFTQSSLYLMQDRFSPKQIRRRKRQKLVEILKRLGTSKAEHTAAKLQQYAAKVLHAPVAYVDTMQLSLSQHVKHIRCLKESVAQMEKEIALNLAQTQGAFLTSVRGIGLVLAAGVTAEIGDPNEQKPLNNLASYCGIVPRVKQSGGLDGKTYTSPVAKRCNRILKDYVVKSAYHLGLHGPQDLMADYKRRDASGQHADFGIGRRYLRMAINLMRTSQVYLPPNLRKDDSTLQKRAGYYLMSWPYLKEKWKKVGALEAAFANNRPLGLWRQIVQELYDIKLKL

SEQ ID NO: 51867 - protein, 341 aa, unidentified
MAVAGGLDLHRGQLTFDYVDTGTGESWRGRICPADRESLRGWLRRFHGVPDVEFAVEGCTGWRYVAEELQRAGITAHLAEPAETAGLRGRKRRAKTDWADARHLRDLLLDGRIPESWIPPGHVLEARALVRLYKDLLEERTSWQQRVHATLFHQGIPVVPKLGTADGQQRLDAAELSAAGRRAVQAGLRQIERLTQEMASLRRELARLSSRQPGCRALRRAHYGIGGLLSVAVWAELGDCRRFSSSDDAVRHTGLDVTIYDSDGRRARGHIARQGPPVLRWALYEAALYASRPASPDYAYYCGVRDRIDGQRALLSVARKLARRCYHTLRDLGEDALAPAA

SEQ ID NO: 51868 - protein, 330 aa, unidentified
MTYIGIDVSKASFVVAYGSEKSRNTKSFMNTTKGIREFAQTVDKGECHCVLEATGNYSALLVYLLSEAGITVSMENPRKIKNFARVMLSTIKTDEIDARMIALYGEKMNPVPYKLPGEAILVMRQKRTVIRQLKKQLTATKNLRESFEALPYIDPKCRKSMEKTISFLEKQVKALEEDLASVANDVYEKQMNLLTSIKGIGATLAAALIMTTGAFTYFDNAKQFTRYLGLSPTYQQSGSSINVRGHINRNGDSSLRSQFYVAAIASLRCNAECRACYDRLKANGKPGKVAVVAVANKLIRQAFAVVSHDTPYIDGFVSAIPSPSLSTMEE

SEQ ID NO: 51869 - protein, 344 aa, unidentified
MEYYAGLDVSLRSCALCIVDSKGTVLFERELPCEVSDIAECLAGFPHPIERVGFEAGAMSQHLFFGLTAEGFDVVCMEARQVSAALSAMRNKTDKTDARGIAQILRTGWFSPVHMKSRKSHGLSALLSTRKALLKKTMDLANEVRGLLKIFGVRLPKTVKHGSFDSVVRPMIEIDDVLAHALVPLLDARVVLYQHYLELDRRVKRAASHDDVCMKLMTIPGVGPIAALSFKSAVDDPTRFKSSRTVDAYFGLTPRRYQSGEHDNPGRISKAGDRDVRAVLYAAANALLMRTMASSQIKSWGMRLMRTKGHRRAVVAVARKLAILMHRMWIDGSEFRQDQVGGMA

SEQ ID NO: 51870 - protein, 408 aa, unidentified
MRAMSEARFAGVDWASEEHAVCVVDEHGRIVEGRRFVHNEPGIRALCSRLVRLGVALVALERPDGLLIERLLDAGLSVVAVHPNQVKAMRPRYSVAGGKSDVFDSFVLAELARTDSHRFRVLVPDSDQTKALRSLTRAREGLVRTRIGLANQLRDQLACFWPGASKVFCSVDTAIALAFLARYPSPVDARGLGEQRLAAFLKRHGYTGRKPASELLERLRGGAQGRADELEMQARRQIVLALVSALEPIVARISELTIEIRHALEAHPDGPTFRSLFIAPDSWLCAATLLSEIGDCRERYPTYRSLAADAGQAPVAVESGKSKHAKFRWACDHRLRAAFCTLADASRRHNPWAADIYDRARARGASHTHATRILGRAWSQIIWRLWHDHDTYDPTRHTALQRLTAPGG

SEQ ID NO: 51871 - protein, 343 aa, unidentified
MHIASIGVDLGKTTFHLVALAEQGKVVVRKKFSRKQLLAYTANLQSSLIGIEACSGAHFIGAALRSQGHDVRLIPAQFVKPYVKSNKNDFLDAEAIAEAVARQNMRFVPIKTEDQLDLQALHRVRDRLVHRRTAIINQIRGFLLERGVTFAKGPANLRKRMPAILEDAEQNISPRMRTLLARVWQEWKQLEIDIADASDEIERIANEDAGCKRLRQIPGVGPLVSTATVAAIGNGAAFRKGRDFAAWLGLVPRQHSTGDKAKLYGISKRGNLYLRRMFVHGARAVLLRVKYDTGGFGQWVRQLEARAPRNKVIVAIANKLARIAWAVLFRAEDYQHMAVCTQV

SEQ ID NO: 51872 - protein, 471 aa, unidentified
MTTYPMRRRFANPMMEQAMAQRKRGVTLKPGKGQAALTVTHPNAAGIDIGSAAHYVAVPPDRDEQPVREFASFTVDLEAIAAWLSACGVDTVAMESTGVYWIPLYELLESRGFTVLLVNARHVKNVSGRKSDVLDCQWLQQLLTYGLLSGAFRPADQVCVLRELWRQRGRLLREQARHVQHMQKALTQMNIQLANVISDVVGETGQKILRAIVAGERDGQVLAKLKNRLIHASQDEIAKSLQGNWRSEHLFSLKQALGAFDFVGTQLAEADREIEAQLKVLQVHDANPAKGKKRSRARNEPRFDLRTQLFRVCGVDLTRIDGINVTTALAVISETGTDMSRFPSVKHFTSWLGLCPGTRITGGKTISGRTKQCANRAAQALKLAATALRTSRSALGAYFRRLCAHMDKPKAVTAAAHKMARLIYTMLTKGQEYVDQGQDYYEERYRERVLRNLAQRANKMGMRLVTAEPAA

SEQ ID NO: 51873 - protein, 348 aa, unidentified
MVIIGVDSHKRTHTAVAVDGNGRKLAEKTVATTADGHLELVRWSRRWRERSFAVEDCRHLTRRLEGDLLRGGERVLRVPPKLMASTRRSTREPGKSDPIDAQSVARAALRERDLPIARLDGPEREVRLLVDHRVSLIGDRTRLQSRLRWFLVELGIPEPQPRTLGQPTVLARLELDLGGRSEPSARISRDLLARIRELTTAVNALGREIQALTDLLVPSLLALPGCGHLTAGKLLGETGGIARFRSRAAFATHNGTAPIPVWSGNTVRHRLNRGGNRQLNLAVHRIAVTQLQKAGPGRDYVAKRMVAGDTKVEAIRALKRRISDEVFRRMNADEAARVALIQPARAAA

SEQ ID NO: 51874 - protein, 409 aa, unidentified
MEQVFERCAGLDVHKATVSACVRVPRAGGRRHQEIRTFGTSTNDLLTMRDWLAGYAVTHIAMEATGVYWKPIYYVLEEGFTLLLVNAAHVKQVPGRKSDVADCAWLAQLLEHGLLRASFVLPRPIRELRDLTRLRKSLIQDRTRAANRLHKVLQDAGLKLSSVAANVLGVSGRAMLSALMGGNSDPNQLAELARGRMRNKMPALRQALTGRFRSHHAFLLGQVIAHVDYLDESIIDVSKRIEELLVAFAATLERLVTIPGVKRRTAEVIIAETGADMSRFASAQHLSSWAGICPGSDESAGKRRSGRSRQGNRWLRAALIESANPAGHTKATALAARYRRIRARRGHNRAIVAVGRSILEISYYVMSRATTYLEVGTNYLDQRHAERLKRRSLSQLQRLGYQVTLVTAA

SEQ ID NO: 51875 - protein, 425 aa, unidentified
MQTDGANQQQQYAASIGFDWGDQQHAVALQAAGSGRVETQTIKQTPESLHDWVLGLRNRFGGRNVIVAIEQSRGAVTNALLGYGFVHVLRVPPKSLARYREAFYPSGAKDDIPDASLLLEWARDHRDRVKVWTPDKPETRALQKLTEFRRDTVGRRIVITNMLTQSLKEYFPQALSWAGELNTPMACDFLEKWPTLVKLQKTKPAQIRNFYQEHGCRRTEVIQQRLEEIRSARPLTQDSAVISTSITVLETLIPQLRCLIDAIDRIESQIHVLFNKHEDRDIFDSFPGAGPVMAPRLLAAMGSDRSRYDAALEVQQHSGIAPVMERSGNSTWVHRRFACPKFFRQTFHEFAGLSIRYSSWACAYYKMQIDKGKGHHAAVRALAYKWIRIIYRCWQNRVPYNEEIYLEALRRKNAPLLEFLDQAAA

SEQ ID NO: 51876 - protein, 356 aa, unidentified
MPVAPTYPNGSYGVVIAIDPHKASWTAVVVGSGLTPVAALRVEVNRAGYRQLLRFAAKWPQARWAIEGAAGLGAPLTERLRAEGIAVIDVPAKLARRVRLLSTGHGRKNDQADALSVGIAAWSAPALRTVEVDEAIAALRALTEHRDDLVRIRTQLVNRLHAMLVKLVPSGLPRGLTAESAAETLRRIRPRDPLGRTLRRLAVELVGELRRIDRRIAEATQALSDAVAASGTTLTRLLGVGDVVAAKLLARTGPISRFPSAAAFASFCGVAPIEVSSGDVVRHRLSRAGDRQLNYALHVMAMTQIRYDSPGQAYYQRKRAAGKSHKEALRCLKRRLADVVYRIMIRDTVSSLTLAA

SEQ ID NO: 51877 - protein, 346 aa, unidentified
MEHYVGLDVSLKLTSICIVDRTGKVEREGVVASDPEAIATFVKLHAPHVVRIGLETGATSTWLWTELNKMGLPVICIDARHAKAALKMQINKSDRNDAAGIARIMQCGWYKEVCVKDLDSHATKALLVSRALLVKIKRDIENQIRGLLKNLGLVIGRAKMNMFAVRAAQLAEDRSELLAAVDPLLKAREAVEQQILDLDRKVLRLARNNAQVRRFMTAPGIGPVTALCFLATIDDPARFKRSRSVGAYAGLTTRRYASGEIDWTGRISKCGDKMLRSYLYEAANVLLTRVAKWSALKAWGVKLAKRSGLRKAKVAVARKLAVILHRMWIEGTEFKWSSKEAADQPA

SEQ ID NO: 51878 - protein, 343 aa, unidentified
MDHFAGLDVSVKETSLCIVDGAGRIVREVRVASEPEALLAVLTNPAWHFKRIGLEAGPLSQWLFNALAEAGLPVICVETRHMRAVLKAQINKTDRNDARGIAQMMRAGLYRPVHVKTLGSQKLRMLLTHRKLLQSKAIAIENDLRATLRNFGLKVGVIGAAKFETRIKELVENLPDLALLVEPLLVVRRVLRDQIGVLHRRLLAIVRDDDVCRRLMTVPGVGPVVALTYRATVDVPSRFRNSKAVGAVFGLTPSKHQSGESDRTGGISRCGDEMMRTMLYEAAQILLLRATRWSWLKAWAMQIARRRGVKKAIVALARRLAVIMHRIWVDGTEFRWTREAVAA

SEQ ID NO: 51879 - protein, 343 aa, unidentified
MQIHSVGIDLGKTTFHLVALGATGQVLIRKKFSQKQLLAFTANMATALIGLEACSGAHFLGRALRAQGHDVRLIAAQFVRPFLKSNKNDYLDAEAIAEAVDRKNMRFVAIKTDDQLDLQAIHRVRDRMIACRTAVINQLRAFLLERGMTFAKSPAKLRVAMPDILENAEAELTPRMRNLVVRLWAEWSMVDQQIEELNHEIEQIASSDEACQRLRKIPGIGPLIATAIVATIGNGAAFRKGREFAAFVGLVPRQHSTGGKARLLGISKRGNPYLRKLLIHGARAAVVRMKRERAPFGAWLDALETRAPRNVVVTATANKLARIAWAVLSSGDEYRPLPAPLAA

SEQ ID NO: 51880 - protein, 394 aa, unidentified
MKLVGIDIGKNSHHFCVMDKETGELNVTPSSFSNNKEGFDFLINSLKPYSKKSILLGMEDTGHYHVALLKFLLSNGYTVALINPKTTDFTRKMEGGITKNDKLDTITICNVLDTPERKKQYRITKVDRFDLYEQRQLTRHHHNLKEELNIYCNRLQKSIDLVFPEFNTLFGSKYGVVYMNLLKTFGSAEAIASTDIRTIRKCFEIKGRGGRISLTPEKLKECAKNSIGISSEVETIQIKHLVSQITLIKEQIAEIDKKIEEFSISNNSPILSIPGISHFSGTSILAELGDIGNYSKPSQIIKFAGVAPYHYESSQYNAQHTGITKKGSKYLRKTLYQIILPVINNNPVFKKYYRLKISQGKGHRCAQGHCIRKLLRIIYHLLETGQSFNPALLR

SEQ ID NO: 51881 - protein, 343 aa, unidentified
MGEVSTIGLDIAKSVFQVHGADGTGAVVMRKRVSRSKVLEFFAGLSPCLVGIEACPSAHYWSRELQALGHTVKLMPPSYVKAYLKRSKNDANDAAAICEAVTRPSMRFVPIKTQEQQTGLMLHRTRQLLVRQRTMLSNAIRGHMAELGIISAKGRNGTAELLQIVGDVADDRIPPVARFCLDLLARQYLTLNAEVYAVDKRIHAWHRSCEESRRLEEIPGIGPIVATALVAEIGDWRAFRSGRNLAAWIGLVPKQHSTGGKERLGSITKQGNRYLRWLLVTGAMAVIRYARAHGTKRPWLTRIMDRRPAKVAAVALANKIARMAWAIMVRAERYKEPKLLLAA

SEQ ID NO: 51882 - protein, 367 aa, unidentified
MTIYLGLDVHARSTVYCAEKESGEILVRGEVLTSRSGFEEISARLGVGSGCRVGLETGSQSFWVSGLLSELGMESYVIDAQEVRQKSRRPRQKSDRRDAFELCDGLRRGIFVKHIYVPVAEVQRLRLIVSRRRHFVRLGTSQVNAAKSLLRSVGLSDLAGTLTTYKAWEELLAKPELATLRQFACAHYRVWRSSREQVDKLHDELVRALVPFKETVRRLQTVPGVGEITAATYIAVIARPDRFPSSSEVSSYLGLVPSGWDSGEREQHGPITKTGNSELRAMLVEAAHHASAPNHPLHPYFARVCAKSGFKKAVVCVAQRLARILWRMWLNEEDFAIEKLNVVRERRKVSRTYFWRIRDSVNPGVRA

SEQ ID NO: 51883 - protein, 403 aa, unidentified
MNAAGIDVSKGKSMVSVMRPLGEVVAKPFTVCHTGSELKELADYLKSLDGETRVIMEHTGRYYEPVAQFLHDAGLYVSAVNPKLIKDYGNNSLRKVKTDKADSKKIAKYGLDNWGELRQYASMDTIRYQLKTLNRQHALYSKMKTAMKNNLIALLDQTYPGVNALFGSPAREDGTQKWVDFAASFWHADCVRGMSQTAFTERYRKWCKRNRYNFSSDKAAEIYTGAKDQIAMIPKDDLTKRLIRQAIDSLNTVSKTVEQLKAEMLKLASQLPEFPVVMEMHSVGDSLGPQLMAEIGDVTRFIHRGSITAFAGVDPGANQSSEREAKSVRTSKSGPPELRRTLFLVMDGLLKSMPQDDPVYQFMDKKRAEGKPYLVYMTAGANKFLRIYYGRVKEYLASLENAD

SEQ ID NO: 51884 - protein, 406 aa, unidentified
MSFDHPREETAAIRTHFGAIFVSLELSRKTWLITSLSPGGREKMSRHSVPAGDVAGLLARFAELRGKALARTGTSYPIIVIQEAGLDGFWIDRVLRREGIESHVVDAASIAVSRRRRRAKTDKIDGEALARALLAFKRGEPRVCSMAPAPTPEEEDRRRICRERQALIAERVRHVNPRRMRSIRPVIKGLLFSQGVGDYEPLRRDRRRKLASLRGGDGRALGPNLKAQIGRELDRLELLLEQIRAVEAARDALLAPAIEAEAASPPTPSSARMLLRLRSIGPEIAAVLWTEGLCRSFSNRRQVAGYAGLAPTPWRSGSIDCEQGVSKAGNPRLRTTMIQLAWLWLRHQPQSALARWFHQRLAGAKKGARKTLIVALARKLLVALWKYVSAGVVVEGAVMKDVATHG

SEQ ID NO: 51885 - protein, 309 aa, unidentified
MKEELVYLGVDIAKSYLDAAIGDERRRFANERIGHRELIKWVKQLKAPVQVICESSEGYERALVQALVGAKLKVSLVQANRVRQFARAAGILAKTDRIDAEVLCEFGRRMRPQTVTAARLEQERLRELESQRRHLTHLLVMEQNRGARVSDASVQRLNRRLINQIKKQIEHLDLLIKVYIDQSHELLAKAAKLTSISGVGARTAALLLAQLPELGQLNRREVAALVGVAPFNRDSGKMRGKRAIYGGRRPVRHGLYMAALVAAHHNPILRAFYLRLRAAGKPGKLAITATMRKLLIVLNSALKPDLNYT

SEQ ID NO: 51886 - protein, 360 aa, unidentified
MNRHIFAGIDLGDKNSVARIATDRDKSERLGFMNTRAGRARLFLELKRRSGAAGGATIVMAYEASSCGFVLRDQAEAEGIVCHVLAPTKMEKSSQQKKHKNDDRDADDVLEKLRGHVLAGNRLPTVWIPDLEARDDREIVRTRLELGEKQTQVKTQIQMLLKRHGLERPKDLSKRTVAWRHWLTALSKSETLQWATRESLSSMLRQLGAIESELQQLDFRVQQLAQQERHKPIIEALTEEKGVGLLTAMVYRTELGRASRFRRGRHVGKYVGLTPTSHESGEQNDRKGHISRQGPPRLRKVLCQASWVHIRHDSESRQYYQRLVARNPKKKKIALVAVMRRLAVRLWHRMRKAESLMANR

SEQ ID NO: 51887 - protein, 355 aa, unidentified
MARDSREAAGTTIGLDLGDRRSDLCVLDQAGEVVRRMKAATTEAGLSKALARYPGARVVLEVGTHSPWVSRLVTRQGCQAVVANPWRVRRIAAMEDKSDRIDAELLARLGRADPKLLRPIEHRGEQAQKDRSLLRVRDGMVRARSGLVTRARQITKSLGKRLPKCDADDFSRRLEKDGLVEEFPGLGTLRRAVEELTRDIAALDREIETACVERYPETVRLRGIKGVGPITALAFVLTIDDPKRFERSRDVGAYLGLRPKRWQSGGSDPEMRISKAGDRYTRQMLVQASHYILGHFGPDTALRRFGKRLMARGGRSARKRAVVAVARKLAVLMHRLWVTGRQYEPLHGVRLDVAA

SEQ ID NO: 51888 - protein, 410 aa, unidentified
MEVMHPYCAGLDVHQKSVVACALVGEPGATAEMEKKTFSATTRGLLALSDWLRERGVTHVAMESTGVYWKPVWAILEGSFRLILANAAFVKNMPGNKTDSKDAAWLADLLRHGLIRASFVPPLEIQDLRELTRYRTQVSADRATVGNRIRKLLEGANLKLGSVATDVMGVSGRRILEAIIAGETDPAKLADHAVSHLRKKLPELEQAMEGRIREHHRRLLRLELAQWKFLDRLIEELDQAIAEAVRPFQSKLAICESIPGIRRISALTLVAELGCDMGQFPSAAHVASWAALCPGNNESAGKRLSGRTRKGNPWLKRGLCQAAWAAASTKNTYFSAQFRRLCAKRGKKRAILAVAHSLLAVAYTLLKTGRRYQDLGADYFIKLDEKKYKRHYLRGLRKLGYKVTLEPAAA

SEQ ID NO: 51889 - protein, 412 aa, unidentified
MEKRTIEFEQVIERGCGLDVHRDTVVATVMGKGLQTETRTFGTTTSSLKEMGDWLESLQITDGAMESTGIYWKPVLHVLREYPLNLLVVNARHIKNVPGRKTDKADSQWICKLLISGLLKGSFIPPDNIQALRDLHRYKKKLVGTIASEKNRIIRVLEDANIKLSSVVSDTSGVTATYLINGLIAGRRDLAKLVSECYHKKLQSTPEQIVEAINGRLTPHLSFLLKSMQKHIQSVEEQIAEIDAEIEKHIKDFEKEIELLQTIPGVGKEGAIGIVAEIGVDMDVFPSEHHLASHSGMCPGNNESAGKKKSSRTRQGNKHLKATLTELAWGATRTKKSFYKAKYESLVVRRGKKRALIAIGHKILCASYHIIKNKEAFKELGYEYLGERKKKNRLEYLKRELKEHGYKIEKAA

SEQ ID NO: 51890 - protein, 328 aa, unidentified
MCKHILGIDISKRTFDVALLDDESSYTAGQFTNSREGFRNLRRWLSNRDVDTLHACMEATGRFGDDLALFLVAEGHRVSLVNPARTSAYAKSKLQRTKTDKMDAKLIADYCATQTPPSWHPPSVYRSELQSLTRYLNELKSARTREINRAKSGIPSQAVRRAIQEHIDFLNEQIKQVEGEIEQLADDNDEHREQIELLVSIPGISTTTAAKVLAEIPDVSSFPQARHLASYAGLCPRQHQSGTSVRKKSRLSKTGNPYLRQAFYMPAVCVLRGNNPLLQPLVERMRSEGRKPIVIIGAVMRKLLHIVYGVLKTGKPYDPDYLSGAVQA

SEQ ID NO: 51891 - protein, 350 aa, unidentified
MKTITRVSALGLDIAKNSFAVHGFDDEGHSVIAKELKRGQVLGFFAKLEPARVGLEACASAHYWGRELMKLGHDVKLIPAQRVKAFLPRQKNDAADAKAIARAVRDPEMRLVSVKSVEQQASLMLFKSRDLLMAQRTQLINALRGHFGEIGIVVAKGAHEVKGLVDLVMGQETDQTLAPAMRQALKALVATLAGLEDEIEVLNSAILEQHKTNEVSQRLATVPGIGTLTATLLVATVSQPTQFSGGREFAAWIGLVPRQHSTGGKVRLGKISKMGNRDLRRLLVVGAHAALYRMKSGKTQGALADWARKLLAKKPFKLVAVALANKMARIAWAVMAKEDCYNPAHAAASH

SEQ ID NO: 51892 - protein, 318 aa, unidentified
MSDSVFVGIDVSSQTLEVASSNQAKTWQLPNDTGGLESLVSRLLELKPALVVLEATGGYEFETACALQAAGLAVAVVNPRTARDFARAMGALAKTDALDARMLAAVARVLHQHPERERFVKPLADAELQRLQALVLRRRQLVQMITSERQRMRVSHVAARPSIERVINFLKTELGDSDAEVAAHVQRHHAELAAALTSVPGIGAASVAVLLAELPELGKLDRRRVAALVGVAPLNRDSGQMRGQRSIWGGRADVRRTLYMATLTAVRHNPIVKTHYERLLAAGKRKKVALVACMRKLLTMLNAMVRHNKPWDPSVHNA

SEQ ID NO: 51893 - protein, 358 aa, unidentified
MQSNKINFKGQNIFIGIDVHLNSWSVTTITPSGYKRQTSHRADAVELYAYLTKNFPGGIYHAVYESGFCGYSCCYELRELGIDCVIVHAADVPSTQKSRLSKTDSNDSMRLAMSLSNGELNTIYIPPKEVLGDRDILRYRTIVQKGMSRTRSRIKHLLHTNGVSYPREFREPYKHWTRRFIKWLREDVKLLSGKRLELDFLLEDLEHQRSQLLKATGKVRDLSRTSRYAEDYGNLISIPGIGLITAMTMLTEVTDIHRFSSQKKFMSYVGLIPVMKDSGETIRQNEITPRGNQRIRRMLIESAWSAVRYDAQMAAAFGTFCRRMKKNRAIVRIARILASRTYHILKTRTKYDTALCTA

SEQ ID NO: 51894 - protein, 479 aa, unidentified
MAVGRMNRKQRKELTRQLRSEDPGLDVVHPRAAGIDVGNGAHYVAVRPDQDREPVRRFECFTADLHRLADWLQACGVATVAMQSTGVYWIPLYEILEERGLEVYLVNARHTKNLPGRKSDVQESQWLLKLHTYGLLNNSFQPTAEIRTVRTYWRQRAEHVHAASTCIQRMQKVLTQMNVQLANVISDLSGLTGQTIVRTILAGERDPKKLAELSHPRIQASREEIAKSLEGNWRPELLFVLKQEVEMYDIYQQRIGECDRELKAHLKRFADNVHRKPAEAGPVSEEQKDKKVPAKLPRSGKRAQGNAPCFDLRSELYRISGVDLTRIDSINVVVAQTVISEVGLDMSRWNTEAHFASWLGLCPDNRISGDKVLSKGTRHVINRAATALRMAATTLLRSRSYLGAQYRRLRARLGAPKAITAMAHKLARIVYRMLKYGQDYVDKGMQYYEDRHRCQQIELLQKSAAKLGLQIVEIQAVGG

SEQ ID NO: 51895 - protein, 444 aa, unidentified
MVRFVGCDVHKRTAVFTILLSDGTLFSTYTVPVTREALAAFAERQLAGEDRLAMEATTNTWAVAGVLRPFVKEVVIGNPLKVRAIAEAKIKTDKVDSQVLAELLRCEYLPVVWQPDQETQRLRRLTHRRAALVSDRTRLKNRLHSILHHTLVPLPGYELFSKKGIAWLRQVPLAQEEALARESDLRLLELTELEIAQLDDLLVREAWQDEKVRLVMSIPGIDYTVAQTCLAAIGEISRFPNAKKLSAYLGLNPSTRQSGPHCYHGPITKQGNAHARWLLVQAAQHLAQYRGPLGQTMRKIVKRKNRNVAVVACARKLAVLLWHVLSSGEPFRYAQPKTLQAKFSRLRIRATGRRRRGGVAKGTPRSPQYGHGRTRAVPSLPQVLAENGLPEVAPLSKGERVMLDRKRLDTFYRELQTPSRTEVNTPTPQVEEAEEVFKSELTQS

SEQ ID NO: 51896 - protein, 400 aa, unidentified
MKGFLHMKLIGIDIGKNKHFFCVMDQQTGEIISQPVSFSNDKEGFDFLVQKIKSYPKDSILIGMEDTGHYHFALLKYLLDLQYTVALINPKTTDFNRKMQGGITKNDKLDTINICDVLDTPERKKQYRITKVNSFDLYEQKQLTRHHHNLKEEENVYKNRLQKCIDIVFPEFNKLFNSKYGTVYMNILKTFGSAENVANTDIRTIRKCFEIEGRGNRISLTPERLKECAESSIGISSSAEVIQIKHLTAQIELIEEQLTEIDKKIEEFSIQNNSPILSIPGISHFSGTSILAELGDISNYSKPSQIIKFAGVAPLHYESSQFNAQHTAITKKGSKYLRKTLYQIILPVIRHNPVFNKYYQLKISQGKGHRCAQGHCVRKLLRIIYHLLKTNQQFDPQLLR

SEQ ID NO: 51897 - protein, 470 aa, unidentified
MTPRRTKKLRMPVSYEPLAQVHPHAAGIDVHAEEHWVAVPPGSAPPPPAHHPANLPPHIRKFGTCTADLETLAEWLMVCNITTIAMESTGVYWIALFELLERRGFDVKLVDPRRTKHVPGRPKSDVLDCQWIQRLHSYGLLAASFRPADDVVVLRSYLRQRLMLISYAGQHIQHMQKALEQMNIKLAEVVSDVTGVTGMSIIKAILRGQRDPQRLAQLRDERCKRSEADIARALEGNWREDHLFELEQAVSLYEMYRTHLRRCDRRLEAYLRKFPDHSGGKKLQAKARKHKLRSNAPHFDSRTLLYRFCGVDLTVIEGIEESTALVILSEIGHDMSPWPNEKHFVSWLNLCPIKDSSAGKDKKRRRRRRSNRAARAFRLAGQACHHAKSAMGAYYRRIQARCGGTKAVLATARKIAQRVYRLLKYGEEYVRQDMEAYEEAYRTHTLKGLARKATQLGYRLVPEAQPVTLP

SEQ ID NO: 51898 - protein, 336 aa, unidentified
MYSGIDLHSNNSVIAIIDDTDRVVTQKRLPNDITKIVGFLARWQDELTGVVVESTYNWYWLIDGLQDAGLHVHLAHTAAIKQYDGLKHSGDETDAQHLAHLLRLGILPTGTILPREHRAVRDLARKRMQMVHCCTSQVLAVENIMARQLGERMTSNQIKQLTNDAIDKMPLTADVGLAMKSNIAVIATLQCQIEVLEKRLQERVKPRPQYRLLTSVPGIGQTLATVIFLETGSIERFAEVGNFASYARCVDSVHTSNRKKKGEGNVKNGNKYLAWAFVEAANFAKRFCPEAKRFYERKKAKTNNIVATKALAHKLARACYHILKEEKPFDVTRCFA

SEQ ID NO: 51899 - protein, 345 aa, unidentified
MQTMYYIGLDVHKRTISYCVKDASGRVYAEGSVPATRCDLDRWMKTLPQPWTAAMEATMFTGWIYDYLQPHAAALKVAHPLMLRAIAAAKKKNDRIDANKICDYLRCDFLPECYMASTAIRERRRTLRYRNLLVRQMVQRKNKTGMLLMEAGVSYNKQRLHQAGYFRELLATNPDINEGLSSLLRLCRETMVRLQKTESALVRSLERDSLLMDRVERLMTIRAVGPITSLTWALEIGDVQRFPSIKKAISYCGLCGAEKSSANTVPRTPLSKQRNKHLQTTLIEAAKMAPRFSPALAMLYDKEKQKGNANRATLAVARKLVAYLMAVDRGQRNFQATETMNCVAA

SEQ ID NO: 51900 - protein, 465 aa, unidentified
MQEKRHIGLDLGVKSKSKIYLIDQAGKKVRAEFSIWTTPQGLDYMMQQALKGTSKEAGLDLTMEPTNIAWFKVAVYLRRKYPEVKIYRIKSEKVQDLRKFYRKHTKTDSLDAKTLAKMPVVDSDSLQEVYIRPRDILALNTRCKQRARLVENATAKKNSISDQIELGFPHLVDCFSSKFTTPFIRFCGKYANPFKVKRSGKEKLLKILIKLGFRKDLSSLAENIYQRAGEACILLGDEDSIIDYEDFQDRIRSEFRIFKALEKEIDKVTEKEQDLYEKCYPRKSLNSIPGIADVSGAVIASTIGDPFRFSSGRSLVGYMGYYPKEDSSGLSSKKGLRMTKAGPNIAKGSLYLTAETARLIDPQMGKIYYRQMVECGNPHIKAVCRVVRALIPRILRTMKEDQDYVICDLEGNPISKKEGRRIVKEQFFVPEEVRQRLSNRKRMPLNKKGRTKPQYKKRQSLNSSD

SEQ ID NO: 51901 - protein, 384 aa, unidentified
MKNPKSNVVCAGMDVHYKFSNVTFRDSDGRVVSRQRLDHPDRQGLAARLRRWPQGLPVVMEASFGWGWLSDVVEAAGLEVHLSNCYKLEQMRKARGWVKTNRKDADLVSLLAFEPSDWWKVWRAPPQVRNRREQMRFRADLVALQTEVKNRIHAIFHRHGIFHEFSDLFGGRGRRFLGELCMGGSEYLPPEALQALRGQVRLLDHLRRQLAQVAWVLRQQLAKTPLIRRLDRIDGFGLILSHVLAAEIGQMERFRNHKALASYSLLAPRSNDTGQEDPRESPKGRHLGQRGNRTLKWAFLEAARGAVRSGGRWRALYDRVTCGGTKDRNRGYIKVARELVKVVYVVWAKGVDYQRNPPVRPGSKTHKNKSRSGTGQLSHPMVHA

SEQ ID NO: 51902 - protein, 421 aa, unidentified
MDVMVQRCAGIDVHKDTVVTCVRTPGADGQREVVTKTFGTVTAELLALREWLVAMGVTLVGMESTGVYWRPVFYMLEDVTECWLLNARHMRNVPGRKTDVADAEWICQLVEHGLVRPSFVPPKPIRELRILTRHRKTEIEEHTRVAQRLDKVLQDAGIKLSSVATDILGKSGRDMLAALVAGTSDPEVLAELARGKLRKKIPALTQALEGRFGTTHALVVGEILAHLDFLDEAIERLSRRIDEVIAPFGTERDLLCTIPGIDRRLAEAILAEVGVDMSRFPSAAHLASWAGMCPGQYESAGKSRSGRARHGNSWLQRHLAVAAMAAARTKDSYFAAQYARLVRTRGKPKARKAVGHSILVAIWHMLEAGVPYQELGADWFEQRNSPDRRARRHLADLKSLGWTMTDTPEGIVLTRPQPAAA

SEQ ID NO: 51903 - protein, 420 aa, unidentified
MRESCKYGSVRGARGNSRPLYVADCLANTDLLSSEENGEPLASLWRMSLCGRLGPVFPSSAVQTGRYPGTRMSVDPVYKVARSGARVEEMRWRDRTVIDGILGIDVCKNTLDVSISSYTKVRTKSFTNSPDGWRHLLDWLIAQKIQRVHACLESTGRYSLGIACALYEADHVVSIINPAQIRDFVRTKLGRNKTDGVDASHIREYCELFKPSPWAPPSEAHRRLGELQTIRSGIIAGLTEWKNRKNSGIVDAEAQALADATISHFTSQLGAVDKAIALTIDNDCDLQSKRDLLLSISGVGETLAGVVLAELPGPDVLRSSAEVVAYAGLNPRRHQSGTCIDRATRISKIGNAVLRAALYMPALSAMRYNSAIVALVTRLKSRGRLKPKQIVVAAMRKLLVLCFGVLKTGRPFDAAIAMGG

SEQ ID NO: 51904 - protein, 343 aa, unidentified
MPHYVGLDVSQKTTAICVVDEQGKRLWRGVCATDPGPISARISQHAGVDAKVGIETGSMTPWLVHGLRAAGLDVACLDARRVKAALQMQLNKTDENDAEGLAQIMRTGWYRAVHVKSLDAHRARALLGARAQLVGMTTRLSNMIRGVLKTFGLLPGAGRGLRFDRKVEALLEGAPEIALVVRPLLATWRQLRQQIAVFDKAVLQQVRADPICRLLMTVPGIGALSSLMYVSTVENPSRFSRSRAVGAHLGLTPRRYQSGETDRSGHISRCGDGLARTLMYEAAIVILHRVKRSLHLKDWAEAIERRSGSGKARVALARKLSVILHSVWRSGEPFRWAAPAMAA

SEQ ID NO: 51905 - protein, 409 aa, unidentified
MPERMVYEMIDGEAPVLAFDVSKGCSHCQGFSSFGKPIGKPIKVAHTKSGMAAAEGLSEALERKTGRKPKVAMESTGVYSKPVIRWAESLGLEVYLISPLESAKVRKSRVRPTKTDALDCGVIAEVAYTRSLRRVTPKSSLYSQLYSLSRRRSAVVNRLTTSKNQYRKSLDAVWPLLDEACDPFSGYAIWAVGRYRHPANLAKASEEKIIRAIDKASLKTGPASKKAIVARLVAYARDALSGCCPEDGEVDSLLSALDDVIRDMRALDEITSRLLSLAKGLPHFAQILSIDGTGDVLAALLCAEIGEPSRFSCRNGLVAYAGLDPTILQSGRNDGLHYSITRKGNAFLRKYLYLAVENMIMSKADNAITEFYSKKKSSGLCHKAAATAACRKLLVTIWGMLRGGSFFER

SEQ ID NO: 51906 - protein, 373 aa, unidentified
MDYTTVFVGMDVHKEIFSLCCYTNEKETVEHNWKVTGHYSKILNYIEAMRNYYGDDTIFVCGYEAGCLGFTLYHQLTTHGVKCIVVAPTSIPVPAGQKKMKTDKRDAGLIAQCLAHHSYREVHVPTDEDEQVKEYIRMRDDHKLMLKKTKQQILAFCLRHNLRYDTTKSYWTQAHLKWLRSLNPEDVYKEILDEYLVTLSYLTEKISRFDQRIEDFASQDEYREKVSKLSCFLGIKTVTALSTIVETGDFHRFGCAEKYASYLGLVPGEYTSSEDRTNLGITKAGNSHLRRLLVEAAQSYGHGQAGHKSKLLADRQKGNPSTVIAYADRANERLRRKYYRMVLNRNKRSNVAKTAVARELACFIWGMMTDNIA

SEQ ID NO: 51907 - protein, 337 aa, unidentified
MYYVGLDVHRDTSFCAILDKAGDTIAERNLENDLLEFANFFAQFNQPMEAAMEATTDAYFIQALLDELQIPVHLAHPRKLRLIAESSSKTDRTDAHLIADLLRMGRLPEAYLAPSEVTEMRQLTRGRQSLVNTRTRLKNQVSAVLRRHGCKCPLSDKFGKAGRAWIESLQLPTIAAMMLDIYLAVIDVLSAYIAQCGSKLREISRHDERIRRLQEIPGIAEVFGPMIVAEIGEISRFWTKRRFVAYCGLAPVVRQSADKTYIGPLRGDCNRWLRYAFIEAAHSCARSPGRYRHYYQRKVEQRDTKVAAIATARRLCRLVFAILWSGERYRPDDAQAA

SEQ ID NO: 51908 - protein, 437 aa, unidentified
MSFKIVRFNCCGMDVHKDIIVATVGITDPATLVTSYFQESFGTFNSELDRMCGWLASHNCSDTCMESTGKYWIPVFNILEKRGFNVCLTHPKYVKAIKGKKTDKKDSKWICDLYKLDMVKRSFIPPKPVRELREIARYYSKLVGMNSSESCRYQNCLTVSNLGIGSIFTDVNGKSAQRVMNAVLESESPNDPESLSDDDILKLVHKSCKKKDKLLDAIRGCRIEPDQRFKMSEVTEHKKELDRHIANCFAEMFKRALPYFDQFLHITEIPGISVLSAILIISEIGFDMTVWENAGQLCNWAGLVPGSNESASKKKSTRVTKAGQYLKPLLVQCALAAIKNPDGYFGIKYRRIMKRRGHKKAIIAIARMILRCIYNMILTGESFNPSDFEEVTNPKPRKPRNYTIESAIDFLKSSGADIDTIIASLKEPPRDAAPAAG

SEQ ID NO: 51909 - protein, 395 aa, unidentified
MSAEGEAIRSNDYRKDTTVKAPSTRPAAVLGLDVGKSSHWACLVDRDGEVLDSAPVRNREAELDALFASAPAGTLVVVDQFRNIGSLAVRRARAAGLGVAYLPGLAASRAAGLFAGEAKTDERDAAVIARTALGVPDSLSGVPGRGEALEAARALSSQRDHVVACATRDKNRLRAVLLESCPALEAAVDLSDRRWLELLAGFGGAWGIARSGAGGPRAEAAGEAAAASTAPPPALVEAENRQVRFLAARISEALDEAGALEAETAALLEGDETYACLLTVPGIGPRTAAQLAVSVDIGRFPDHDHLASYCGIAPRVRSSGTSVRSVRASRRGDARLKSLLIFSCNSLVRSSGRYGEYYRACRTRGMGHGRALKAVARKRLRAIYAVMRDRVPYRE

SEQ ID NO: 51910 - protein, 412 aa, unidentified
MQTLVERGCGLDVHQATVVACLLMVRRDGRVQKQMRTFGTTTRELLGLREWLLSEGCTHVALESTGVYWKPIYAILEGALEIVVANAQHIKKVPGRKTDVKDAEWIADLLCHGLLRSSFVPPKPIRELRDLMRYRRKLVESQAAERNRLLKVLETANIKLATVATDVFGMSGRLMLRALIEGKATPQEMAELAKGLLRKKIPELELALEGKLEQHHRFLLELQLQRLEAAEKDLAVLEQRIRQMLEPYAAQLALLDEIPGVDWTLAAVIIAELGVDMSVFGSVSQLASWAGVCPGNNESAGKRKSSRIPSGNVYLKSGLVEAANAAARAKGTYLRDKFFRLKARRGYKRSVVAIAHKILVAIYHMLSQQVSYNDLGDLYLDKLNKNHLTRNLVHRLERLGYEVTLTPQQKAA

SEQ ID NO: 51911 - protein, 359 aa, unidentified
MTQSTTDPNAVIIGVDTHKDTHAAVAINGLGARLGDRIIPTTPAGYQQLLEWAKTFGGVTAFGVEGTGSYGKGLTQFLRRQGQKVIEVSRPCRRGQQRLQGKNDLLDAEDHSCQVLAGQATAVPKSDEGTVEMIRILKAARDTAVKAQTQVMVSLKAMIITANAELRAQLEPLSTPQLIKTCEQLEVGTLDTPMATMRYALAAMAKRWTQLHEEIEAHTQHLTKLTQAAAPELVQAFGIGPDTAAEMLLTFGDNAERVHSEAAFAKMCGVCPIPASSGKTQRHRLNRGGNRQANAALFRVVIVRMRWHQPTQDYVARRTAQGLSKREIIRCLKRYVAREIYHLIRKTCPTPKVSGVSHA

SEQ ID NO: 51912 - protein, 316 aa, unidentified
MQTEEKLEIVGVDVSKSALDICGIRGVSSVPNAEAGVDKLVQKLTAMPGCHVICENTGGYEALMVGRLQREGITVSSINPRQVRDFAKAMGRLEKTDDVDAKVIREYGLRIRPAATAALSASEVLLRELVTARSQLIEARTQEIAQAEHYAAKAVKKLSQARIRLIEKQILELDKQIEETIQEAEVLRTKASRIREIKGVGPATTGAILAYMPELGQLTDKQASKLAGLAPINHDSGLFRGQRHIRGGRPKARKAIYMAAMVAAHHNPILKAFYSQLVARGKSPKLAITAVMRKLIVLMNRLLKNPSFTLATGDRC

SEQ ID NO: 51913 - protein, 347 aa, unidentified
MMPNPDRLVVGGVDTHKDEHVAAIIDTAGRLLGVAAFKTTLAGYAELRSWMTQFGELVAVGVEGCGSYGLGLVRELTSAGVKVHEICRPNRQLRRRRGKSDPVDAEAAARAALSGEGLVTPKSADGPVEVMRALRLTRRSAIKARDTATNQVHALIVTAPDELRQRLDGKPIRHVVELILVSDGLTLAGGYAVAMRSLAFRWKQLDDEAAQLKVELERVVHDAAPAGLLDEQGVGSDVAAALMIAAGDNPERLHSEASFAALCGVSPLDASSGKQQRHRLNRGGNRDANMALWRIVLVRLRWDPTTRAYVERRVSEGKTRREAMRCLKRYIARDIYKILTQNAPMRA

SEQ ID NO: 51914 - protein, 406 aa, unidentified
MELVPIHKRVIGLDIHQAQITACAIIEESSGETRIEQRQFGAFKRDRRALAAWAAALEPDEVVMESTGIYWKSPYAALEAAGLRATVVNARHVKQVPGRKTDVGDAQWLATLARAGLLRGSFVPPAKLRELRLIARQRQKLVGLLSSEKNRMHKVLTDAGIRLGVVVSDIHGQSARAMIKGLLAGKPPQEVLNLASRRLKASREELHDALQGELTASHVFVLDELLRHIEELEARIARFDARLLGELASEMNALALLQTLPGVDLIGAAMLLVEIGSDMSAFGSPDRLASWVGVCPGNNESAGKRKSGRVRKGNLYVRRLLCEFAHAASRTKSAFQSKFQSLIVRRGYKRAIVALAHKMLRTIFFMLKRGEHYRDSATNYEQLSVQRNASRWIKALTRFGFIPAAA

SEQ ID NO: 51915 - protein, 418 aa, unidentified
MTKKLDTTFIQVVHPVCCGLDVHKKKISACLITIDEHGQEQYDIEEFGTFTNELLEMKKWLTDNGCLVIAMESTGVYWRPIHNVLEGSMEVILVNARHIKNVPGRKTDISDSKWLAGLLRHGLLRGSFIPPKEIRQWRELTRLRRTYTESLADYKRRIHKLFETANIKIDSVVSDLFGVTGRNLISLLCDESELSLASIRKNAKGGLKAKSRELHRSIQGFFEEHHRFQLIGMMEIISNFEKKITEITERLDNLTSGHQDLLDRLDEIPGIDKKSAQSIVSEIGVTLDEFICMAALASWAGLCPGNNESAGKRKGGRTSVRSHPFKTILVEVAWAAIKKKGSYYRAKYFKLKARRGPKKAIVAIAHRISKAVYNIIKNGDTYKDLGEDYLTSQTRQRTIKNIKQRAKQLGYELVPCMD

SEQ ID NO: 51916 - protein, 352 aa, unidentified
MNQTKYIGMDVHVSTTVIAIRNSEGKVVTEAIIETKASTIKDFFRGQRGTLHVTFEEGCQAGWLYDLIRPYVAEVKVCNPRKVVRSDRRSDRIDAKRLAELLRTNAITPTYHGEHSTRNLKELARCYIAIVHDSTRVKNRLKAVFRGRGIPCKGDSVYSKEDRNDWRRKIDNAARLSRANRLWKQLDYLTELAEEAKKELLKEARKHAAVKILRSAPGIGPLRAAILLAVADTPHRFRTIKQFWAYCGLAVRSKITGEYEMIGGQIRRTKKQPLIRGLNRNYSRALKNVFKGAADTASKGLWKKQYAAKVEAGTKSSLVRLTLARKISAITYSIWKKGERYNNKKLKFKQAS

SEQ ID NO: 51917 - protein, 337 aa, unidentified
MEYFAGLDVSMAETHVCVMNRDGAVVLEVKVPSTPPDIAAALAQAPACERIVFETGRMAPMLYHGLSQLGLPIVCIESRQAYQALKSLATYKTDRNDARGLAHLARTGFFKPVHVKSLPAHALRSLIIARKKLVGQRVTLENQIRGLAVVFGVRLPRALTAAFIRQALRASEGIAGLSAAMRGLVAARAAVLGAIVAIDADIRRMVRASEACRRLMAIPGVGQLTALAFTAAIDDPGRFRRSRDIGAYLGLVPRRYQSGEVDYTGSISKCGDRRVRTLLYEAANVMLTRYKGPLKLKDWAFAIAKRSTMREARIALARRLAIIMHAMLRHGTEFKPV

SEQ ID NO: 51918 - protein, 320 aa, unidentified
MSPNTTNTMTETNSVVHAGLDIAKAQLQLHLENRQHVLPNTVTGHQRLIRLLRVVAGVHVVCEATGGYERKVVSALHSANLPVSVVNPAQVRHFALAQGQRAKNDPIDAALLTAYGHALRPNATPVPQAVLAELRELVQWRDHLKEQLVRARQPAEHATLAFVHRQQSKEVTHLEKQMAAVEKELAAALTRHPRWREQVQRLAELDGVGTLTAVSVLSQMPELGQLNRGQAAALAGLAPWTRQSGPWEGQRHIGGGRAVVRRALYMSAVALARQTGSILGKFYARLRAAGKPAKVALTAVMRKLLLQMNQVLKYHVPDPA

SEQ ID NO: 51919 - protein, 359 aa, unidentified
MKNRKQQFGTIIGVDLGDKKHAICVTGKDGEVVEEVSVPNTAKALKALASDYPGARAAMEVGTHSPWITRLLEAEGWEVTVANARKVKAIYDNDRKCDRFDARMLARLLRVDPALLHPVHHGSERAQRDLLAIKLRDTLVRSRVRAISSVRSSLKSLGVRLPSPSTPAFTRHAREHLCEHPELLAAVEPLLKSIDELSAQIKQYDKVIDGACHKHTEAQRLREQLPGVGPITALTFVLAVEDPHRFEDPRDMGPWLGLVPRRDQSGESDKQLPISKAGNRYLRCLLIQSAQYLLGRWGPDCDLRRHGLKLAARGGKAAKKKAVTAIARKLAVLMLVLWQRQSDYEPFQNARPEELRPAA

SEQ ID NO: 51920 - protein, 340 aa, unidentified
MKITLFCRFIVGIDISKQWLDLYLLDCKTRNGTPYRVPNTKEGFCQLGRWLETQQASKARTRLISEHTGRYGEHLLRWTTQHGWSHAVVKTTALKKVSGEHHRKTDKFDARQLAEYGDRFSDRLPQTEAPKPAVGQLKRLQAERRGMVDQRASLKQKLTEADLHDADMGRLTDMWRQQVKLLSEHITELEERIRRLIDTDPALSQRHQTLRTAPGMGPVLISLWLSLFAGTSELNPRKVSSRFGFAPHPYQSGSSVRGSMHSSGFGNAEVRRVLHQAALSVKTHCPHYRDYYNRKKAEGKPHLLVINNIINKLIRLYCAMWNRREQYDPNYIQKKFKQSA

SEQ ID NO: 51921 - protein, 407 aa, unidentified
MDEKIWVGIDVGRHAHHAAAVDEAGTVLWSRRLPNDQHAIEALVDRVAGVETVVWAIDMTAPESALLRGVLAARRQQIRYVPGRVVHSMTGAFAGEGKTDARDAVVIAQTARLRGDLATITVPDDLAIELDLLTGHRNDLVAERTRGINRLRGLLTRIFPALERCFDYSTLTGLTFLTRFATPSAIAAVSDDEIYDHLRSHGVRRPTIPKMIDKARAAAAAQTVTLPGEATTALLVQHAATSLVMLTRQIADLDKQITEVFRRHRHARILESVPGIGTRSGAELVAITGGDLTSFGSPARLAAYAGLAPVPHDSGNRRGALRRPQRYHRGLRKVFYMAALNSSQRDGPSREFYQRKRREKRSHVHALIALARRLVDVVWALIRDGRVWLPRPTVERVSVDEVGAMAG

SEQ ID NO: 51922 - protein, 329 aa, unidentified
MRAVFGIDVSKASSEVAILVNGEKVHGYTMSNDALGFARLLGDLRTVHKPEIIFEATGVYSRRLQTFLEDNGYAYTRLNPLEAKKQLDSLRVRKTDQIDAEKLAQSQFVLNRKPTYVQEEVYQNLRALSRFYQNLTEDIVRAKNRLHKVLQVTFPELETILSTPSGQQYWNLVIDFPCKDFVLELSKDELSESIRQSTSKRISDKRVTYLVEKLTALANQSYCAVKKTSPIMEEVRYYAKELLRLSEQRQTVLDQMVELAQPLPEYDILLSIPGIAETTATSIIGELGDIRRFQSANQINAFIGIDLRHYESGNFLAKEHITKRGNPLR

SEQ ID NO: 51923 - protein, 387 aa, unidentified
MYFVGIDISKFKHDCAIIDEIGDVIMPSWSFNNDLEGFSILREVLSSLQGDIKIGLESTGHYGQNLKLFLESNGFSFMECNPLLISRFVRSKSLRKTKTDSIDAVMIAQHLMTVEYKPYPASFYHMDKLKSLTRFRDSLVRQRSRQLVDLTNVLDKVFPEFKPFFKGKFSVTALYILANYPTPEKIANMNARSYEVLRKRSSGKFTMIQFAQLKTLAKNTVGSSDDYLLQQMEVLLDIYTQLDAKIEEVEAEIIECIIGIDPPILSIPGIGAMSAAVILSEFGDFAKYANPSKMLSFAGLEPGYFQSGQSEHTGHMVKHGSSHLRYALLNCCLPLIKNEPTFAAYYAKKRAEGKPHRVAMTHVAKKLLRVIYTLQTKNIPYNADLVC

SEQ ID NO: 51924 - protein, 365 aa, unidentified
MGGADVGQVRTWVGLDVHAAKVVGAIADAQSGELAVRAMGGATGQVVDFCAGLPAPVRVAYEAGPTGFGLARALEERGIACVVAAPGKIERPATDRVKTDRRDAERLVRLLMIGGLHPVRVPSPAEEAMRDLVRAREDVRGDLMRARHRVGKLLLRHDLRFEGNNWTERHREWLGRIELPEPVAQSVLLDGVGAIEALLVRRDDLEARMVALVPGSPWGQDVARLRCLRGIDTLSALGLCAEVGDFSRFERPARLMSYLGLVPSESSSGERRRQGSITKSGSRHARRLLVEAAWHYRRVPCRGRELRRRQEGQPQEVCAISWKAQQRLHRSWVRLDHERGKRRTLCAVAVARELAGFCWAVSTAY

SEQ ID NO: 51925 - protein, 428 aa, unidentified
METPALNPQVVAWVGLDWADQSHEIRLQAVGSDVAESFTVEQKPEVLHAWITGLRARFPQGRIALALEQSRGAVIYALMNYDFLLLYPVPPKGLARYREAFATSGAKSDPTDAGLLLELVRTHRDRLRAWQPDDALTRQLRLLVEHRRRTVADRTRLTNRLTALLKTYFPQALEWAGELRGAAACEFLRTWPTLEAVQQARRSQLRRFYHDHRRLSAEDLKQLFREMDRAQPLSRDRALIEASALMAQTLAAQLEAVIAALEKLDQAIEELFGQHPDQDLFSSLPGAGEALAPRLAAAFGSDRHRFQSAEELQRFSGVAPVTEASGKMHWVHWRMACPKFLRQTFHEFAAASVRKSLWARAYYECQRQRGASHHAAVRSLAYKWIRVLYRCWQTRTPYDENLYLVALRRRRSPVWLAASLTATQLTRS

SEQ ID NO: 51926 - protein, 343 aa, unidentified
MEYYAGIDVSLKESSVCVVDATGKVVREVKVASEPEAVVRYFDELELSVCRIGLEAGPLSQWLHAGLGAVGREVVLLETRHVKAALSAMTVKTDRKDARGIAQLLRMGWYRPVHAKSVASQDTRAVLVGRKLLQGKLLDVELSIRGILRGYGLKVGEVSRGRFEARIQELIAGHATLETVIGAMLMARAALWSEFTRLHREMLKIARADKICHRLMSTPGVGALVALTYRSAIDDPTRFGKSSTVGAYFGLTPKKYQSGETDRDGGVSKVGDAMVRTALFEAAHIMLTRATRFSSLKRWALEVAKRRGMKRAKVALARKLGVVLHRMWVDATDFRWGATAMAV

SEQ ID NO: 51927 - protein, 360 aa, unidentified
MQIIGCDLHARQQTLAMLDTLTGEVVNRTLMHEGNEVREFYSQLPRPAVVGIEAIGPMRWFLNLLEELGIECQVGDATKIRAAEPRKQKHDRRDAELILKLLVEKRFPAIWMPSKELLDLRALLLHRHHWVRLRTQIQNALQAMALANGLRRGPGLWSSDGQAKIAFLPLPPHASYRRSALQTMYRKMEEQIEDLTEQVTEQAKQRCGARLLMTHPGVGPVTALATDVFLGDPQRFGDGKALASYVGLIPREYSSGGRQRLGAITKQGSPLLRFLWSEAAAHAARRDPDLQRFNHRKLVQKGLGKARVAVARKLGIRLWIMLRDQIDYQEFCRRGQKQSSAACAGMPEVGYGAHRHRPVD

SEQ ID NO: 51928 - protein, 349 aa, unidentified
MLHVGLDLSRRRVDVCLVSSEGELVGHFRAPADRDGLYGLTRRVAVYGEPVRGVVESMNGARFVHDELVRYGWEVLVADAQRVKGLAPLACKTDKVDARVLAELSFRDLVPAIWLPSPELRAERERSRWRLHLVKHRSILKNRVHASLIAFGHQVPMADLFGAGGRRLLAELDFPEPWLGHVRASVELIDDLDRRIAEIERWRQRSGADHRYIPLLLTVPGIGWVTGFTIAAEIGDISRFSSPVKLTGYTGLCPRVNQSGEVDRRGPISKHGPRYLRWGLIEAAIHASSHPLYKERYQRTKRRLGRQRGAKVAQIELARKLTEAIWYMLTRNEPFKPFAPAGALIRLTA

SEQ ID NO: 51929 - protein, 385 aa, unidentified
MQAHTIKAPAAIRVDLAAIFVSLELSRSKWLVTSLSPGGGERMSRHIVSAGDIPGLLDHFVELQRRAEVRTGQCFRIVSIQEAGLDGFCIHRILERESIESYVVDPASIATSRRRRQAKTDRIDGEALVRALLAYSRGEPRVCAMLRVPTPEEEDRRRLVRERKALTNERIRHVNRIKGLLFSQGASGYEPLRADRRKCLDRLVPGDGHPLPPALKAQISRELDRIELLLEQIKNVEEARDAMLASADVPTPAMLLNLKGIGPEFAAVLWSEGLSRKFDNRRQVAAYAGLVPTPWQSGQINCEQGVSKSGNPRLRSTLVQVAWLWVRHQPNSALSQWFKARVTQNGGRYKKTAIIALARKLLVALWKYVNAGVVIEGARLTRPSA

SEQ ID NO: 51930 - protein, 411 aa, unidentified
MRVHHNVCCGIDVHKKSVTACLMWGPADKEPEFEIRRFGTMTRDLQKLAEWLKQAGCEAATMESTGSYWKPVWNVLEGQIPRLILANAQHVRALPGEKTDRKDGKRLAELTRHGQVRPSYVPPRAILELRDLTRYRSKLLSAGSSERNRIQKVLEDANIKLGSVLSDVFGVSGQKMLQQLVKTDTVDIANVIQLAHWKLKPKMEAIEQSLEGKLTDHHRFLVKASLEHMRFIEEQLKRLDEEIQRRLQPYQEEYALLQTIPGIKETGAARILAEIGADMSPFPDGDHLSSWGGVCPGNNESAGKKFQSKIRKGNVHLLSALTQCAWAATKKKDCHFRNKYYRLKSRRGSQRAIVAIDHAMLKCVYVVLSQRKPYEEPKPTSLTEAQKQRKASSLCRQIRALGYDVKIQKTA

SEQ ID NO: 51931 - protein, 371 aa, unidentified
MKSILSVGMDVHKNSFSLCAYDGYTGEIVSESTFASDVKLVIKFIETLKSRYENDVEIKCGYEAGCLGYSLYKSLTARGVDCVILAPTTMQVSAKNKMVKNDRMDALNIAKNLASGSYKSVYVPDEEDVEIKEYIRMIHDFKKELKRVKQEICAFVLRHGYQYDGKSKWTIRYMNWIRELEMSEIQRETLNEYIAEMENLNDKINRFMNRIDEMYQSERYHEKVSKLRCFKGIETFAAMTIQVETADFERFPSAKAYASYTGLTTGEHSSGDKNNRIGITKQGNTVIRKTLVECAQSLAKGNVYAKKSQGLKSRQKGMDVNIIAYADKATERLKKKYQKLIERNVPRNKAIVAVARELACFIWGMETGNIH

SEQ ID NO: 51932 - protein, 336 aa, unidentified
MNETTCVVGIDVAKRKLDIALLVNGKTKFNVFDNIPAGHALLQQWLAERGTPQEHTHICMEATGPYSEAVAIALVEAGWRVSVVNPARIKGFAQGELARNKTDRADAALLARFCAAMCPSLWTPPSPAWRELHAWVDRLQALKDMHQQESNRLEAHEASGQLLLVKAVQAHLDWLGQQIDELERTINGHIDRHPDLKGDAELLHSIPGIGKTTVAKVLAYAGDVRRFANAKALAAFIGVTPRQRVSGSSVKGRTMMSRTGHADLRRALYMPGLVARRHNPVLRVFGDRLRLTGLAPKAVVGAVMRKLAHLIYGVIKSGQPFDANFTRARLDFQDGI

SEQ ID NO: 51933 - protein, 346 aa, unidentified
MSYSTTVGVDLAKNVIQVSVVSPRGKELLNRSFTRTKFAEFLGKQKPSLVAFESCASAHYWARAAKRHGHEARIIPAKAVAPFRQGHKTDSNDALAVAEAARRPNIKEAPMKTSEQQGLQAVQRSRELLIGECTALSNHLRGILLEFGVAIPQGFASLLRALPEILEDGDNELPDLYRPTLHRMHNRLIELREDIEAMTKEVDGLVKQHPVCKRLTSIEGIGPIGALSLYAVMGSGEAFTKSREFSAYLGLTPRQYSSGGKTNIVGISKKVGNRRLRSILIQGARAYVYRMKEPRSLKDRWLKDLIERAGPNRAAVALANKNVRTAWAMVTQGTEYQRRLQLEMAA

SEQ ID NO: 51934 - protein, 347 aa, unidentified
MSITMIGLDTAKSVFQIHGVNETGKVEIKCKLRRSELIPFFEKQEVCTVVIEACGAAHHWARILRGLGHEVKLIAPEAVRPFVKKGKKNDPADAAALCTAASRPDMMFVPIKNIEQQGILAVHSARSLLVKQQTMLANAMRGLATEFGLTVPRGIGRLDELLKLVDADKTFPEKARQVFMGLFVQCGALAESIGALEAAIVAHARQDETARRLQTIPGVGPITASLIATTVGDISLFKSARHFAAWLGLVPRQYSTGGKTRLGRITKAGNREIRKLLVLGATSMVYRAPQWNSALGGWIRKLLERRPVRLVTVALANKMARMAWALMTRKEVYRAKGRVAAATEAAV

SEQ ID NO: 51935 - protein, 381 aa, unidentified
MGNASTLHVGLDVHKESIAVAYATEDGATAPVPLGAIGTRQCDIDALVRKLQSKSARLVFVYEAGPCGYWLYRYLTRKGLTCFVVAPSLIPRKPGDRVKTDTRDAVTLARLARSGDLTPVYVPAVPDEALRDLARAREDALHDLNAARFRLKALLLRNDVRYVGRANWGAEHRRWLARFVFPTPAQQIVFQEYVRTVTERTELLQRLEAELLEQAKTWRLSPVVEALQALRGVQFTVAITTIAELGDLTRFDTPRQLMSYLGLTPSEYSSGERRRLGGITKAGNRHARRVLIEAAKAYRHRAKVSEQIHARQEHLPTVIRDIAWRAQVRLCGRLPQTARARQAPEHGGRRHRPRAGGLHVGDRQGAAGARVAVVTRTNEPT

SEQ ID NO: 51936 - protein, 401 aa, unidentified
MQDTQQHGAVDVFVGVDVGKGQHHAVALDRNGKRLYNKALPNDEVKLRALIAELKTHGRLLFVVDQPSTIGALPVAVARAEGVLVAYLPGLAMRRIADLHAGEAKTDARDAAIIAEAARSMPHTLRSLRLADEQLAELTMLCGFDDDLAAQVTQTSNRIRGLLTQIHPALERVLGPRLDHPAVLDLLERYPSPVALASASEKSLANRLTKLAPRMGKGLAAEIVQALSEQAVTVPGTQAATIVMPRLARQLAALRQQRDEVAAEVERLVLAHPLWPVLTSMPGVGVRTAARLLTEVAHKVFASAAHLAAYAGLAPVTRRSGSSIRGEHPSRRGNKVLKRALFLSAFAALRDPVSRAYYSRKIQQGKRHNQALIALARRRCDVLFAMLRDGTIYQPKSAPNA

SEQ ID NO: 51937 - protein, 348 aa, unidentified
MTPQKQPVTAGVDTHGATHHAAVVDQVGRHLGDHEFPATASGYRHLMTWAKSFGEVQCVGVEGTGTFGAALTRVLLSHGLKVVEVDRPDRKLRRYRGKSDPTDAYAAALAALSGRATATPKARTGVVESIRALRVVRRSAVKARTQTVNQIKALMITAPEQLRDQLRELSLSRLIHTCARFRPGSDLTDPSVATKTALRTLARRHEALSVEISEADKALAGLVGSAAPQLLELPGVGVEVAGQLLVTAGDNPDRLRSEGAFAQLCGVAPLPASSGRTDRHRLNRGGDRGANNALYTIVLSRLRHDEATRDYAQRRRSQGLSSREIIRCLKRYVAREIHRHLVATLDTP

SEQ ID NO: 51938 - protein, 331 aa, unidentified
MKINETIGIDVSKLTIDAYIFKSEKHKCFKNSNSGFTELLEWVKENSRIPLSEQLFAFEHTGLYSYSLSVYFTDKDIAYLLIPGLELKKSLGIARGKDDKIDAKAIALYAYRRREEIKPYKLPSRHLLELRRLLSLRDKLVRQRAGFKSTNKEIKGHLSKTDNETYFTVHENMINHISKEIVVVEKQLRLIINKDKNLKELFKLIISIKGVGEQTAMFMIAYTNGFTLFDNARKFASYAGVAPFPYSSGTSVHGRNKVNQLANKKFKSLLSNCATTALNHNTEMRMYYERRLKEGKDKMSTINILRNKILGRIFAVVQRGTPYVDTFAYAV

SEQ ID NO: 51939 - protein, 402 aa, unidentified
MNAVGIDVSKGKSMVSIMRPFGEIVSAPFEIKHTASGINSLVELINSVEGESRIVMEHTGRYYEVLAHQLSEANLFVSAINPKLIKDFDNDSLRKVKSDKADAVKIARYALDKWQNLKQYNVMDELRNQLKTMNRQFGFYIKHKTAMKNNLIGILDQTYPGVNTYFDSPARSDGSQKWVDFASTYWHVDCVRKMSLNAFIDHYQNWCKRKKYNFSQSKAEEIYGKAKELVPVLPKDAITKLIIKQAVDQLNSASTTVESLRTLMNETASKLPEYPVVMAMKGVGTSLGPQLIAEIGDVSRFTHKSAITAFAGVDPGVNESGSYEQKSVPTSKRGSSDLRKTLFQVMDVLIKTHPQDDPVYQFLDKKRAQGKPYYVYMTAGANKFLRIYYGRVKEYLSSLPES

SEQ ID NO: 51940 - protein, 425 aa, unidentified
MSSPSDQESVGWLESRGFGALDWASEKHSVVVVDPQGKVLEDFEIEHSALGWKKFRDRMRPYGSIPFAIETSQGAAVEQLLEAGMHVYPLNPKSAQAYRERKAPSGVKDDQLDAWSFADALRVDGQNWKPLRPEGSVIKELRLLCRDEVGLIEQRTAFINQLRHALAEYYPTALEAFEDWGAMSAWMFLQRFPTPHILEKAGKRQWEKFLHSRRLWRTKSGPQRMELFSKATEFCGSEPTAKAKSMLALSLVKMLFALENQLSEYRKRIEELFESHPDHDLFGSLPGAGPKLAPRLLGEIGDDRERFDGDAQNLQCFAGTAPVTKRSGKHRECHQRWACNKHLRYAVHLFSQHTITRCAWAEIYYKAHRAKDHSHATALRCLGQRWLKILHKMWMDRTPYNAELHHLNQVKHGSWVFQLKTVNCK

SEQ ID NO: 51941 - protein, 340 aa, unidentified
MSEITTIGLDLAKNIFQVHGIDETGTAVVVKRLRRSQVIEFFAGLPRCLVGMEACATAHHWARELTGLGHEVRLMPPQYVKAYVKRNKNDAADAAAICEAVKRPSMRFVPAKTIEQQSALLTHRARDLLIRQRTMLVNALRGHMAEFGLIEAQGLHKVAGLIAIVMDDRDERIPDTARQALKMITGQINELQARIAALETQVLAWHKNNPVSQRLATIPGIGPIIATAIAATVPDPNVFRSGREFAAWLGLVPRQSSTGGKARLGGISKRGDGYLRRLLVNSAHTVLLCSKAAKVDPWIVSLRGRKPRLVVAVALANKTARVAWAIMSRQDTYRRAAVAA

SEQ ID NO: 51942 - protein, 350 aa, unidentified
MDKELYIGVDVSKQTLDLAYYDGESIDWKNAHIKVSNNNAGFKKIGSWVAKVSKRFDIVLFCMEYTGLYTQNFRLWLEEKHYIYRMVEPRKMHRFEPDLDDGLRSLDRIKTDELDSFRIAIYCEQNHRKILRNPSKLPPPVYFKLKRLLAERKQTVKQSVLYKQQLHDICAYDTDLSVERKNGQLKTLNDALKGIDNEIDMYIKEDADISKNFSLLTSIPGIGRVVALETIVLTENFMAIDNPRKYACYIGVAPFKKESGTSVRKGSSVSKKGFKQAKADLSIACLVCMQHIPNIRDYWERKRKEKCSGIVFNAIKFKMILRMFAVIKRGTPYVETDNYRNGKNKQPGVN

SEQ ID NO: 51943 - protein, 418 aa, unidentified
MEKRSPFLYQATVGIDWADRKHDIFVRFANGSSYRRKIGSRPEAIQAWLLELRSACAEGKIAIALEQRRGALFYQLCTHLNWIDLYPINPHSLFSFRQTFFSSRAKDDPIDGQLLEELVRTHWDRLRPYQPAVTTERQLDLYCRQRRSLLDLATKIELRLISTLKQHFPVAVDLFEAIGMKSDIALNFLSRWPTLHELRRAKPHTVRSFFYAHNSRSQSLIERRLQQIDEAHEVTDDLALIEPMVLMTKCLVGQLRQFNQTINEFNQKIKEIFKSHPDHLLFESLPGAGEKLAPRLLSLFGSDRSRWPEAADIQRYSGIAPVVERSGKSLWVHRRLARPIFICQSFHEFAQQSTRFSSWADQFYKLQREKGKSHHSAIRSLAFKWIRIIFACWKANRPYDESFYVRALAKRNPSPSST

SEQ ID NO: 51944 - protein, 340 aa, unidentified
MEAIAVIGIDLAKSVFQVHGVDARGQVMVRKRLSRAKLLPFFAKLPRCLIGMETCASANYWARELMVLGHEVRLMPPQYVKPYVKRSKNDASDAEAICEAVTRPTMRFVGVKSPEQQSVLMLHRTRSILTRQRTQIGNAIRAHLAEFGIVAPVGRQGLDRLIAVIGDEQDARVPIPARRCLAMLVEQQRLVLAHLLDTDRAIRADSRASEIGRRLQEIPGVGPLVASALVATVPDPHVFKTGRGLSAWLGLVPRQHSSGGKERLGGITKAGDTYLRKMLFVGAMAVIRHAERYGTRPPWLTKLLGRRSPRVAAIALAYKIGRTAWALMTSGERYREPEVA

SEQ ID NO: 51945 - protein, 351 aa, unidentified
MSEYIAFDSHKRYTWVDREDHSTRKNSCHRLEHAPGAVREYLNGCEPGTAVAVEATGNWYWIIDEIEQAGLQPRLVHPRKAKLMMGLTNKTDKLDAQGLNRLQRNGTLPTVWIPPGPLRDLRELTRTRLVLVAQRTRLKNRLSATLAKYGTPASQCSDPYGKRGRAELEKHLEGLPEQTRWVSGQLLAQLDFVSAQVKQLEQRLQELVEVTPEMQWLLTLPGVGVILAATIALEIGEVERFPSAMHLASYSGTTPRVHASGGKVRYGPLRADVNRYLKWAFAEAANSVAVNHLRCPERHVSQLYRRLRQKKGHPKAIGAVARHLAEAAFHVLRGKQMYQDPSFGRGRTSQV

SEQ ID NO: 51946 - protein, 382 aa, unidentified
MNRIIKIGMDVHSTNYTLCAMEPVLDGEDRIFTNIQVTPDYENVIQFIDNLKERLGSSDSYSIECGYEAGCLGYSLYHQLTKAGVKCTILAPTTMLTQQGKRVKTDKRDAVMIAQCLSYGGYHAVHVPTDQDASVKEYLRMRDDHKLALKKIKQQINAFCLRHGYIYGGHKWSIKHLEWLKKLDLSELNRETLNEYMTSYEEQTAKIERFDKRIEELAADSDYHENVRKLSCLLGIQTYTALSLIVETGDFKRFRKGNTYAAFLGLAPGESSSGEKISRTGITKAGNSRLRTLLIEAATGICKGQVGHKSKALCARQAGNPAEVIAYADRGNIRMRSKYKRMIRHEKKRNVAVAAIARELACYVWGIMTNHIEPREEGKKAA

SEQ ID NO: 51947 - protein, 458 aa, unidentified
MGKFYLGCDVSKGYADFVIIDQAKRVVESNFQLDDTIAGHQLLEQILKAFFEKKPDAMLFAAVESTGGYENNWLHAFQRIGTRFAIQATRLNPVGVHHDKQAAMKRNSTDKISALAIAEYQINHAEAIRYNEADSYQSMRKLYSSYRMLLKVRTQLLNQLESWVYSGNTELVQYRKDNTPKWLLHLLSQYPTAPLLAQAQAEQVAKIPYLGADRAQKLVAEAQTSVASVTDLPAQIMIKTLADQILQLDEAIKATQQQAQSFVQFREIALISSIDSIGPISAIGLFIEMGGCVGVFKNAKKLSAYWGLHPVLKESGDGSYKPRMSKAGRKWPRAILFMAVLNGIRAKNFIYAIYLRELQKGKAKRSAIGICMNKLARIIYGVLKNDTVFDAEIDNHHRLRSAPKKLRSNVLDSRRFQKQDDQAPISRKQSQKRKGREQSQSEPVAISEIKSSPLHGYA

SEQ ID NO: 51948 - protein, 350 aa, unidentified
MKHYVGLDVSLEETSIALISASGRVIREGKALSDPASITAYCIGSGVDIERIGLEAGPLSQWLHEGLRVAGLPVVCLETRQVKAALSAQKNKTDRNDAVGIGQIVRTGWYREVHVKSRCTQEMRVLLSNRRLLLSQRVDIDNELRGVLRNFGLKVGKIAKGHFEDRIRELLSEEPLLAGIIEPMLAVRKVVVAEYTKLHKLLLAHVREDADCLRSMTAPGVGPVTALAYKAGVDDPRRFKSSQAVGAHFGMTPRRYQSGEIDRNGRISKCGDEMVRSALFEAAGVLLTRVKHPSAIRDWGLRLAKRRGLGKAKIAVARRLAVILHRMWVDGTEFQAQPEMRARTGLKLAA

SEQ ID NO: 51949 - protein, 334 aa, unidentified
MKPDAVYIGVDVSKAKLDVFVPAQKEGMRPTAKELDNDVAGLRELRDLARKAGATVCVEPTGGYELELIAFMHKSGVPVAYADALRVRQFARAEGCLSKNDSIDAALISRFADKIGVRALEEKDVEAVELKRRAKFRQTMSESRTVMMNRLETEVDPDMKALLREQIRRMNKLIAKAERLCLATARRNERTNTLCERFAQVGGVGAVTAVSILAGLPEIGTLPDEKLNRLVGISPEENQSGSKDRLRRIRGGRQDVRNALYMAATASLIWNSVLGAYYRKKRAEGHPHKWAMVPTMRKLLSLLNRIARDPSFSPRPEPESTKRNAKVGRRRKAA

SEQ ID NO: 51950 - protein, 429 aa, unidentified
MNFKPIAGIDVGKFFSEMAILSPSNKVVARMKINHDSYTDVKRAIELLKKAEKDFDSRPSIVMESTGHYHKILFHSLCKFGFEVSIINPIQTDSIKNIGIRKVKNDKIDAQKIALLHRFQELETTNIPNEDIECLKSLCRQYYKLSDELTTYKNRLTGIVDQLMLNFKDVFPDIYSKTAIAVLAEYPTPTTIIKADKDKLVSIIKGNSRKSLEWATAKYELLVLKAKEFEPLSVNNTANVTMLTVYISMVKNLQNSLTKILKAIHQLIDDDLSKDVPVISPTLELLQSIPGIGFLTAATIIAEIGDFSAFSKPKKLVAYFGIDPSVMQSGEFTGTRNKMSKRGSKLLRRVLYTTALANIRTKRNSEPCNPVLMDFYKRKSQSKPKKVALGAVMHKLVYIIFAVLRDRKPFELRTPEEHAKMLTRKHTAA

SEQ ID NO: 51951 - protein, 333 aa, unidentified
MSRFWVGIDVAKRKLDVALLDDAGKVKSKVLANDPAGFAALMTWLKERGADAASAHVCMESTGSYSEGCATFFADAGWTVSVVNPSLPKDFGKSELKRNKTDAVDAALLARYCSKMAPPMWQPPPLEYRKLRSLVERRQALQDMHQQEANRLEATIEAAARASITEHLGWLETRIAELEKDIDDHIDSNRETLGKDADLLTSIPGLGRTTAAKVLGLLGDLRRFDSGKALAAFIGVTPQRHESGDSVRGRSHISRAGHASARHALFMPTLVATRHNPRIKAFRDRLVAAGKPKKSAVLASMHKLVHLMHAVVCKGVAFNPRFGELALDGQDGI

SEQ ID NO: 51952 - protein, 385 aa, unidentified
MLYVGIDIAKNKHDLACINETGETVITNFRFANSYQGFNDLKRQLKRLSPITQDIQIALESTGHYNYNIVVFLRELGYNVFAYNPFIIKQFAKSQSLRKTKTDRKDALLIARKLRSDVTPEYYQTDKVMDELKELTRYQNRLIQSRSKCKNLYIRLLDIIFPELSSYVSNLHNHFVYELLTKYPSAQKIARARFSSLLKIKRLTADKAHQIQEIAKQTIGNASTALSLELVQLIESIKHYDKQINQVQEEINRLMTGLDSPITSIPGIGSRLGAIILAEMKTIHNFKNPNQLQAFAGLDPAIYQSGQMDNTGHMVKRGSSYLRYALIQAAKLISIYSPHFKAYLRLKISQGRHYNVAVTLVAKKLIRIIYHLLKNNQTFDEAKLR

SEQ ID NO: 51953 - protein, 345 aa, unidentified
MATLKVLGKSNLFVNLKDKVMQVQHFIGADISKKTIDFAIHQGGHFRTANCEAGFKDLLIWLQKEQVNVKGMLIVMEHTGLYSYPLERFLHHNELAFTKVSPLQIKLSMGMVRGKTDKIDARRIARYGFQQQAELQPCLASAVRIQRLKLLKSTRDRLVKNRAALKTALKETRAFCDLATDDILVKSQEQLIVTLSSKIALLEAEIQKTIKADADINRNYQLITSVPGVGQCTATESIITTENFSKFKNARKFACYCGVAPFEHTSGSSIHRKTKVSQLANKRMKSLLDAGAKSVINYDKELRSYYQKRIESGKSKMSTINIIRNKIIFRMFAVINRQTDFIKVA

SEQ ID NO: 51954 - protein, 464 aa, unidentified
MKGNKRRRQMKQRRISSHLEQVNLFAAGIDIGSQSHYVAVPEELDSEPVREFSCFTGDLNRMADWLVEIGIQTVAMESTGVYWIPAFDILEERGLVVLLVNARHVKNVPGRKSDVQDCQWLQQLHTYGLLEGAFRPPEATVALRAYTRQREMLVQRASDHIRHMQKALRQMNLLLDNVVSDINGMTGMKIIRAILAGERDPAVLAQFRDNRCKHDDKTIAASLEGHYREEHLFALKQSVELYDVYQQQIANCDETIQAQLDRMESRGDKDDLPSTKKRKTKSSPDFDLRGELYRMTGVDLTRIDGLNETSVLKVLSETGVDITPWPTEKHFASWLGLSPGNKITGGKILTSKTKPSANRAAAAFRVAAYGLFNSKSALGAYYRRQRARLGSPKAITATAHKLARTFYSMLKNGTEYVDQGQDYYETQYRDRVTKNLKKRAASLGFDLVPNKEDENMPDTVLSTA

SEQ ID NO: 51955 - protein, 355 aa, unidentified
MATYYIGADVHSNSTELAIEKRGKIVARYSVPTSIPAITNVLDSLQGKKYLAVEEGPMSGWLYRNLNKKLDQFISSDPRRNKLIASEGDKDDKIDSAKLASLLRGGFLREVYHSDDDRAELKHWDSLYHDRVRDAVRGINKIRARCRMHGVTISRATLRDPASRLKWLLKTKHNALANQLKMLWIGYDATVQQVKSAKRQLSTLSKKHNIIKQWSQLPGIGLIRATTIFAFLDTPWRFKKKNKLWKYCGVGLQRTTSGTDKKGRPKPARLQLPWAVNRTLKNAVLGAALSAINQKGNVFKDYYERMVKNGIIPSNARHAVARKMLTVMWAMWKTNSSFDEKMVCNELNMPTVSVI

SEQ ID NO: 51956 - protein, 344 aa, unidentified
MEPMYYIGLDVHKRKISYCVKDSGGKVYAEGSLPATGIDLDLWMKTLPQPWTAAMEATMFTGWIYDHLKPHAAALKVAHPLMLRAIAAAKKKNDRIDANKICDCLRCDFLPECYMASTAIRERRRTLRYRNLLVRQMVQMKIKISALLMEAGVSYNKQRLHKAGYFRELLATNPDIDEGLCSLLRLCRETVVRLQKTESALVRCLERDSLLVERVERLMTIPAVGPITALTWALEVGEVQRFSSIKKAISYCGLCGAEKSSGSTVQRTPLSKQRNKHLQTTLIEAAKMAPRNSPELAMLYDKEKPKGNANRATLAVARKLVAYLMAVDRGQRSFQVVETSNIAA

SEQ ID NO: 51957 - protein, 358 aa, unidentified
MNRNTGMNAGQIIGTMNGMQVIGLDIAKHVFQLHSVDMGTGEIVNMQLKRSKVLEHFANKQPCLIAIEACGGAHHWARELTAQGHSVRLLHAKIVRPFVSGNKTDATDARAIWLAVQQPGVKFVGIKTAAQQATLTLHRQRELLMKMRTMQTNALRGLLYEFGATFAQGRKALFKDIERTLEDLSEQLPQMVRDSLREQVARIKAMSEDMQAIEKRLAVQLKADPQMQRVAQIPGVGLLTATAAIATMGQASAFKSGREFCAWLGLVPKQTGSGGKVRLGGISKRGDTYLRTLLIHGARSVLAHANEQAAWLQQIKARRPANVVIVAQAAKMARTIWAVTAKDQDYQRGFKSVKPLAA

SEQ ID NO: 51958 - protein, 335 aa, unidentified
MKHYAGLDLSMETTQVCIVDETGRKIASMKVASTPDMIAHALREVGVVERAVIETGRMSPAICHGLRALGISVVCIDARQAHQSLKALKANKTDPHDAAGLAQLARTGFYKEVHVKSPAAHGVRSVITARNHLVESRVRLDNMIRGLCATFGFKPGPGQGKAFLDRVMEAANTPGLGQSITALLAVRTGLMKQIREMDRVLREFAHRSQSCRQLMSIPGVGVQTAAAFTAAIDEVGRFRRSRTAGAYFGLVPRRHQSGEIDWTGRITKQGDSMVRKLLYEAANSILTRSRGSFALKGWAMKIAKRRGLRKARVALARRLAVIMHAMLRDGTLFEA

SEQ ID NO: 51959 - protein, 341 aa, unidentified
MNYYTGIDVSLEYSSVCVLDGNGKIVREAKVLSEPEALIAWFGSLGFGVERIGLEAGPLSQWLFAAMNKAGLAVELLETRHVRDAFKAMPVKSDRNDARGIAQLMRLGWFRPVHCKSMEAQETRSLLTARKLVQSKLFDVKNSLRGILRGFGLKVGKTTELEFAGRIKELVAGHPHLEMIAKALLAVHEVLQKEFKAFEKQVRTIARSDTRARLLMSTPGVGPIVALTYASAIDDPGRFKSSKQVGAHFGLTPKKYQSGETDYTGRISKIGDSSVRTALYEAAHVILTKPVKGCSALKGWATRIARRAGMSKAKVALARKLAVIMHRMLVDGKPFIAAAVA

SEQ ID NO: 51960 - protein, 525 aa, unidentified
MLRGTVAADISLAVIHKRAKRPGTARRSELVNNCAAGENLAGERPAPARSQSQSPHPKRVIGRQLAEPEALAPTSNRKTPPEGHYISKMDGRAKRRKNHKKQKQTMNDSQQWQLHRAFGALDWASEKHSVVLVNQTGKVIEDFEIEHSALGWKKFREKLHPYGSIPFAIETSQGVAVEQLLEAGMLVYPLNPKSAQAYRERKAPSGVKDDRLDAWSFADALRVDGQDWKALRPEEPLIKELRLLCRDEVTLIEQRTAFINQLRHALAEYYPAALEAFEDWTSVSAWMFLQRFPTPEQLAQAGKRQWQKFLHSRRLWGSDQGPRRMEIFAHATEFTGTAPTVQAKSLLAQSLVQMLFAVEKQLAVYRQRIEELFARHPDHDLFGSLPGAGPKIAPRLLSEIGDDRQRFGGDPQNLQCLAGSAPVTKRSGKQRKYWPVHQRWACDKHLRHAIHLFSEQSLSRCAWAEIYYQHHRQKNQSHANALRRLSHRWLKIIYKMWIDRTPYNAELHHRNQLQHGSWIFQLQQS

SEQ ID NO: 51961 - protein, 350 aa, unidentified
MGHYIGVDFHKQFSSICVMDKDGVLTDERKLYHDNRNEMISYFSQFNKDTSVSIEATRNWYWLADLLQEQGLDVKLVHAKKTRIIAESTIKTDKIDARVLAHLDRCNFLPQAYLADKQTRSERELLRYHISLVKVQTSIKNRIHAILAKHNIQHGFSDLFGTSGRIFLKGLALPEIFRFELEGYLHLLDEIAATIKRAKKEIAEHCRAWPEAQLLTSAPGIGSLTGLMLAAEIADIHRFKTFKKFCCYGGFASSTHQSANTEYHGHVIKDSNKYIRFAMLEAVSHAIKKDQRIWRFYMKIQRTKGPNKARIATARKLLHAVYCMLKHNTPYRMECCQDIRQVNPWTKLGA

SEQ ID NO: 51962 - protein, 368 aa, unidentified
MGKSITYVGLDVHKKTIAVAFADEGDSEVRSYGVIDSDLSSLDKIVRKLVSRGVEPRFVYEAGPCGYGIYRHLKEQNIECMVAAPSLIPKKSGDRIKNDRRDAKKLARLYRSGELTGVHVPKSEDEAMRDLTRAREDSKTAERKARQQLNAFLLRHGLIYSGKSNWSLAHWRWISDIKMEHEAQQFTLQEYVDTARSCSERVERIIEKIRLLAGQWRFSPVVEAIQALRGVSLVVAATVVAEIGDLRRFDNPRKLMAYLGLIPSEHSTGEHTKRGGITKTGNGHARRMLTEAAWSYRMPARVSRRLRDRQQNLPEKVWKIAWKAQVRLCKRYQRLIARGKLSKVAITAIARELAAFMWAIFRTVEVGA

SEQ ID NO: 51963 - protein, 349 aa, unidentified
MRFYNRQHRHYCGIDLHVKTMYLCVLDATGQVLLHRNVATTPQALLAAVAPYRDDLVVCVECMFTWYWLADLCAAEGITFVLGHALAMKAIHGAKAKNDKIDSHKIAVLLRGGLIPQAYVYPAAMRATRDLLRRRLHLVRKRGQLLAHIQMTREQYNLPPFARRLAYPANRDGVSAHFPDPVVRKSVEVDLALIDEYDVLIADLEQVLVREAKCDDADAFHRLRSVPGIGPVLALTILYEIHDVHRFDRVQQFASYARLVKGRHESGGKVLGTAGAKMGNVHLKWAFSEAAVLFLRHAHTPRVQKQLARWEKQHGNGKALSILAHKLGRAVFYMLARGTVFSMEKFLAA

SEQ ID NO: 51964 - protein, 311 aa, unidentified
MGGVNAAIDVGKHQLDVALGSVGELFSEPNQPRAIRRLAKRLAQVGCERVLIEGGSYQNVLVAALRAAGLPVVIINPRRVREFAKSIGQLAKTDHIDARVLARYGERIEPPVRELPDKQSQALRGLWVRREQLIEMLVMEENRLEHAPKALHRSLRAHIAYLRKQIKQSDSDLDREVRDSALWDQYELLSSVPGVGPVLSVALLSDLPELGRLNRSEIAALAGVAPFNCDSGTLRGQRKIQGGRKRLRRVLYSATVAAVRCNPVLRPFYQRLRAAGKPAKVALVAVMHKLLLILNAMLKTKTAWRPPCLVA

SEQ ID NO: 51965 - protein, 332 aa, unidentified
MQYVGIDLHKRDLVIAVEDERGPVGHPRRFPCRDEAAIVAHLSGLRPFRAVIEASASYRWLYDRLKPLGEVILAHPLRLRASIARPAKTDKLDAALLARLLRMGQIPEAYAPPKAYQELRELTRARARLSRSATEAKNRLHWLLTVRNLHAPYKHPFGARGRRWMRSLDLGVVGNLERDELIARLEHYEVQLGRLDEMLEESAAEFPQIEALRDIRGIGTYTALLVVAEIGEPERFGEPGQVSSYAGLATRVYQSGAHDYHGHITRQGSPWLRWALVQAAIKAIGKDRQLANFYERVRKRSSRHIARVAVARKLAEICWIRLRRWHRERAAA

SEQ ID NO: 51966 - protein, 354 aa, unidentified
MKRTTKYVALDVHQATTFASVREDSGRVIARSVLPTDGPALTEFFRGMRGAIHVAVEEGTQAQWLHDLLAPRVDRVIVCDRRGHPRPGSKDDRRDADELSEQLRCGGLRVVYHGGGAGAGLKELTRCYQNLVEDTTRVMLRLKALFRARAIRTPGKGVYHPARRAEWLAQLPDGGARVRAEALWAELDALQALRPKAKAAMLAAAARAPGWSVLRTIPFFGPVRVAMLLATLQTPWRFRTKRHLWAYAGLAVVTRSSADYQIVDGQAVRRWRAPLTRGLNRNHNRVLKHVFKSAATAVKARPGPLQDWHRALVARGLREELADVTLARKLAAITLRLWKKGERYDPTQLTRQAR

SEQ ID NO: 51967 - protein, 364 aa, unidentified
MARKWLWVGLDVGADQSTVCATDEEGAVLFEDLIASKPAALHALLKTNKRRIKLIGLESGAFAIAIARSLLKIGYPIAMFDARQTSKFLAIRRNKTDRNDARGLADFARLAGESVSKVRIKSNESQQLRSTLVIRQKLVQLRTALEGAMRSLFRLNGGKLSSSYSAASLRRNVLQEVRRLRKCAKIDLSEDIEPLLSLSLATRGYLETLDAKLSKRAEDDPVCRRFLAIPGVGPITALAFYSAIDDPHRFRRNSDVGAYLGMVPMLRQSGQKIVKLHISKMGNTLTRTYLTTAAQHHLKHADSALANWGAGLSDRLGKGGVHVAVARKLAVTMLAMWKSEEPFDPYHGTSRADLATEAEHSPCQ

SEQ ID NO: 51968 - protein, 423 aa, unidentified
MEIMYERVAGLDVHKQTVVACVRAMAGRKVVRECRTFATTTDGLASLLAWLSAAGCSHVAMEATGVYWTPVWKILSDGQFDLLVANAAHIKNVPGRKTDLNDAMWIADLMACGLIKASFVPEEPFQDLRSLMRTRKQLGREQTRHVQRIQKTIEEANIKLDSVITDILGVSGRRMIEAMIAGVRDPYALAALAHRSLKASPQQLVDALRGRLTDHHRFLLKLHLGQRDALDAAIRAIDREVDRRIERIDQNRKDGEIPLRALILLLSAIPGVSTLSAITILSEIGRDMSRFPTAGHLIAWAGLCPGQNESAGKQKSSRLRKGAPWLKTMLIQCAWAAKRQKNSYYMAQFYRLQARRGPQKAICAVAASLLTAIYHMVKNSTGHHDLGVDYFDRRSPQAKAKRLVAQLSKLGFEVTLQPTATAA

SEQ ID NO: 51969 - protein, 467 aa, unidentified
MTPPKDYGLDLPPSVPTPLLPQSPILAEALQVCHPHAAGIDIGEAEHWVAVPPGCDPQPVRRFGTFTADLDALADWLLDCGVTTVAMESTGVYWIPLFELLEARGVQVLLIDPRQAKRVPGRPKTDRLDCKWLQRLHAYGLLAGAFRPDDQVCVLRGYLRHRQMLLTYAAHHIQHMHKALEQMNLKLTQVVSEITGVTGMAILKAIIAGERDPQHLAKLRNPHCHHPEDDIAKALQGTWRAEHLFALRQAVELYAFYHQQITQCDQQINAHLETFGDKSAGQPLPPKARRHKKTNEPRFDARTPLYRMAGVDLTTIEGIEEGTALVILSEIGTDMTRWPSVKHFCSWLGLCPQHKISGGKVLSRRVRPGAHRVTVALRLAARSLHHSQSALGAFFRRMKARLGTPKAITAAAHKLARLVYHLLKHGSAYVQQGLENYEAQYHERKVTTMAKQAKALGYTLVPLVTQG

SEQ ID NO: 51970 - protein, 353 aa, unidentified
MSNIKYVGMDVHKSITVIVVLDALGQVECRSQVKTKAENLCDFFRGLSGKIEVILEEGTHSAWLYKLLKPLVASVTVCDPRHNKLIEDGNKSDDEDAETLARLLRLGAVKAVYKGDDQQQQLKEICRAYDNLVEDSTRVQNRLKALYRGRGIDCSGHALYRADQRSDWLAKLSEEATRFRAESLLEQLESLSQLRKQAKQRLVAQARAHADYRILVKLPGFGPVRVAQLIAEVGTPHRFRTKRQFWPYCGYAVVTRSSADYQFVEGKIVKQRKKVSTRGLNRNHNPQLKQVFKGAALTALRHEAVKAYYHRLIDSGARPELARVSVARKLASIALTIWQRREEFDAKKAFAQD

SEQ ID NO: 51971 - protein, 278 aa, unidentified
MEGKKKTITRYVGIDLGKRAYQVAIVGKGGKVVRSGGKTYPYARQNLYKKLRSGDKVALEAGNMAFIMAKEIEAAVGCRVYVLNPSHLALIYGSMKKTDKEDSLKLAHILEDCREERLPLVSVPSDKEILRRNMLAGYKRAKQSRNREINQLHGLFVSFGITTKTRKDLCTAKNREQAIKELSGLQRQEAEYLLKRLSICEQRILELDEQMKEESAGDEVIQRLQSIPGVGPKVAFAFVAHVAAERFENAGQVSHYLGLVPRVYISGDTIKYGRISKR

SEQ ID NO: 51972 - protein, 308 aa, unidentified
MERFAGIDVAKDSLEVFIRPDTIRKSFPNDEKGRMSLARLLGKIEPCLVVLEASGGYEIPVVEVLVLRSLNVVVINPRQVRDFAKATGKLAKTDAIDAEVIARFGEVIRPEIRPLKDADAQRLQAFVARRRQLVHMLTEEKNRLHSAHSSTRPEIETHIAWLTECIDKVGKDISTLIKKTPLWREKEDLLRTFKGIGPVNACTLLARLPELGQLNRKKIAALAGLAPINRDSGKYRGKRTIFAGRADVRAALYMATLSAKCHNPIIKAFYERLIHAGKLPKVALTACMHTVLIILNATARTNTPWCAQ

SEQ ID NO: 51973 - protein, 345 aa, unidentified
MKHYAGLDVSVKETSICIVDETGKLCREMKVLSHPDELIEALKDPAWPLERVGLEAGPLSQWLFSGLAEAGLPVVCIETRHTKAFLKAQVNKSDRNDARGIAQMMRVNLFRPVHVKTLTSQKRRALLTARKLLQEKAIAVENDIRGLLRNFGLKVGVVGLIKFEERIVELVEGLPDLAEIMASLLEARRTLREQVGKLHQRLLSIVREDDTCRRLMTIPGVGPIVSLAFVATIDIPARFKSSKAVGPALGLTPILNQSGESNRVGRISQCGDGMMRTLLYEAAQVMLTRTIKWSWLKAWAMNVAKRRGKQKAIVALARRLAVIMHRMWSNGTEFRWTKELAPAAG

SEQ ID NO: 51974 - protein, 423 aa, unidentified
MDILYERVAGLDVHKDTVVACVRIVADGKTKRECRTFATTTEQLVELRAWLEECRCTHVAMEATGVYWMPVFRILGDGGFELVLANAAHIKNVPGRKTDMNDAMWIADLLACGLIKASFVPTEEMQELRALTRTRKQLVREQTRHVQRIEKTLAEANIKLDSVISDIMGASGRRIIEAMIAGVRQPRKLADLAGKQIKATPKQLYDALHGRLTDHHRFLLELHLHQWDGLDETVRKIDQEIDQRIARMDTKAATDQVPFRTLIELLDTVPGVNTVAAPAILSEIGRDMSRFPSAGHLVSWSGLCPGQNESAGKRKSSRLRKGAPWLKTMLVQCAWAAKRKKDSYYRAQFFRLQSKHGPQKAICAVAASILTAIYHILKDGTEHHDLGAEYFDRRPTEVKATRLVARLRKLGFAVQLQPITEAT

SEQ ID NO: 51975 - protein, 363 aa, unidentified
MRMKRHPQYFISKSQRRSSMVGMTIGIDLGDIWSHYCTLSEDGEVIDRGRFRTNPSGVDKRFRDLEPVRVAMEAGTHSIWVSEQIRELGHEVMVANVRELRAISHSDRKSDKVDAEKVARYARLDPEILRPIAHRTVAQQETLTLIRARDVLVRLRTGAVNSVRGLAKPCGYRLPASSTLCFAKRCLAALPPGLSQALGPLLQQIADMTVKIKEYDRAIKQLTETEYPETQALIKVYGVGHLTALTFVLTLGNKERFQRSRDVGCYLGLRPKRSQSGESDPQLGITKAGNGYLRQLLVECANHVVGPHGKDSALRQWGLSLGARGGGHARRRAVVAVARKLAVLLHRIWITQEVYVPFYAAAA

SEQ ID NO: 51976 - protein, 308 aa, unidentified
MITIYTGLDIAKLNLQLHLAGRVHDLPNTAAGHRRLLKLLAAQPGAHVVCEATGGYERDVVAALHAAKVTVSVLNPACVRHFARATGQRAKTDDIDAAVLSAYGQALQPKPTVPRTEQEQQLAELVRRRVQVVEVLVAQRQQAERLTVPALRRQAQSLVRQLERDVAQIEDQLKALRTQAATLDERVQKLEAITGVGTITALGVLAELPELGTLNRRQAAALAGLAPHPRESGQWHGRRNIGGGRAPVRRALYMAALVAAHTNRQLKEFYQRLRAAGKPAKVALTAVMRKLIVLMNHILKNPNFALQN

SEQ ID NO: 51977 - protein, 424 aa, unidentified
MREEGLSMAEEIEWFVGIDWASQSHQVCLVDARGECLGERAVAHGGLGIEELCDWLIARTGATPEVIGVAIEMTQGPVVEALLERGFCVYGINPKQLDRFRDRFTVAGAKDDRRDAHVLGDSLRTDRHAFRRLSNDEPVIVKLREWSRMADDLQQERARLASRMREQLWRYYPQMLELADDLAADWFLDLWNQAPTPAKAARLRQTTIERFVKAHRLRRWQAPEVLRILKQKPLSVAPGVVEAASDHIRTLTVRIRLVNQQLKAAHRKLDELCAQLVPSEEDEPGQQCEQRDVVILRSMPGLGRIILAVLLGEVWQPLRRRDYHALRSLSGVAPVTRRSGKTCVVVRRYACNKRLANALYHWARVATQHDALSRRRYAALRQRGHSHGRALRTVADRLLSVACTLLEQQTLFDPTYEVREAAGA

SEQ ID NO: 51978 - protein, 335 aa, unidentified
MMKKRYFMGIDVAKISFDFSLLSKEGALLWRGHWDNEPQAIEGFLAQLRTRGWKFSQLHVGLESSGVYGNKLLAALHEAGLAVSVLNPAQVKFFAVSVLRRTKNDRVDAGIIARFCLERKPLSTRPLRRVEEQLKLLVHERESRVADQTRERNRAKKDPFQIALPCLICRQRLHRLKQLQIEIRQLDCAINELIANDEYLKTQTRLLCSIPGVAQTTAAKLLSELAGKEFHSARQLAAYAGLTPSEFRSGTSAYGKTHLCKIGNAFLRKALYLPAAVAKKWCLPLKPWITLLEQRKLAKRAIRGAIMRKLLHIAFGVLKHQKPFDPCLVFLPKTI

SEQ ID NO: 51979 - protein, 355 aa, unidentified
MVQHEGEPVDGGIDTHADTHHVAVIDVHGRALGDVRVPATAAGYRQAVRFIGRWPQVVKVGVECTGSYGAGVTRELTAAGHTVIEVNRPNRFDRRARGKTDVFDAYSAAEAVMTGRAGAAPKGADGLVEALRVLRTTRTSALRERTATINQIKAMLIAGPESLRARYRGLSNTRLTATLGATRPTSTPVTATEATAYALRVLARRYLLLSEQIADLTGHLHRLLDDHAPALMAVFGTGPDTVAQLLIPAGDNPDRLRSQAHFAALAGARPIPASSGKTNRHRLNRGGDRQANSALYHVAIVRMRYDPTTRDYVARRTAEGRTKMEIIRCLKRYLARQLYPLIRDVLQRPATAAAA

SEQ ID NO: 51980 - protein, 345 aa, unidentified
MPIVGGLDVHRKQLTFDCVDLDTGELRRGKVAPADRKHLAVWLARNLGGNDEVHLAFEGCTGWRYVAEELVSAGVSPHLAEPADTAALRGRRRHAKTDRADSRHLRQLLVDGRLPECWVPPAHVLEFRALLETYHDLRVEHTGWVQRIHAVLFHQGARRLGEELGSAAGQAELAVIAATELSAAGQRQVATALSMLSASETQLGLLRGELVTAARRLSGAKVLSTRLYGVGPITGVALTCWLGGADRFSSARKAVRFAGLDITVHSSDGKRSPGHLSRQGPEVLRWCLYEAGKTSARASAPDHAYYAQVQERIDGKRAAWSQARKIVRQACHLLTELGDDALTLT

SEQ ID NO: 51981 - protein, 350 aa, unidentified
MIIIGCDYHPGFQQIAFVDTDSGEWNERKLGHREEAEQFYRQLKVRGKKVRVGMEASGHARWFERLLTELQFELWIGDAAEIRTKRVRKQKTDRQDAELLLRLLIEDRFPRIWVADGENRDLRQLLWHRHRLVQMRTRIMNQLHVLALNEGVRRKKALWRPAGRAQLQSLVLARWASRRRQDLLELLDQLTPKIQELTRALEQEVEKRPVARRLMTHPGVGPLTALAFELVIGTPERFGCGKQIASYVGLVPSEESSGDRRRLGHISKQGNSLLRFLLVEAAQVTVRTDPDWRRRFLHLAMRRERRIAKVAMARKLAVRLYWMWRKEWDYEQMRKFGSHVGEPGNRQGAS

SEQ ID NO: 51982 - protein, 388 aa, unidentified
MIVLGADMHKRSHTVAAVSAATGEVRDEKTVQVGVKGFAALLIWARDLGSERVWALEDCRHVSGAFERFLIGRGERVLRVPTKLMADVRRGARERGKSDSIDALAVARAALREGVQKLPVAQLDGPELDLRLLVDHRERLVRQRVALNSTLQWHLHDLWPELELPGSSLFYGKWAPRIARRLARAEQTMRVRIARDELRRIRELTQTIRALEHEIAALVAQIAPQLLNEPGFGPLTAGKLVGEIAGAGRFSTDAKLARAAGVAPIPVSSGKTNRHRLDRGGNRQINAAIHRVAVTRARCHAETIDYVERKKSEGKTQREAIRCLKRHLARRIWRLLQPPHPEMERRHPNQFLDIGAARAALAPCRTCDALCPVGGRARGPVSGECGSG

SEQ ID NO: 51983 - protein, 359 aa, unidentified
MQELINKKAFKEKRIYIGIDVHKASWKVTIMLDEITHKTFSQDPNARILAEYLERNFPGGTYLSAYEAGFCGFSVHRALINEGINNSVVNPADIPLSDKEKRQKEDKRDSRKIARGLRNNELTAIHVPSIETEELRLFLKDRMSLVKDLTRMKNRIKSYLNLFGIDVPVQFKETSKHFSKRYVDWLRNIQLATHQGNLALANLINRTEFLRKELLSINREIRKIANEEKFLPTVRLLSKIPGISTLTAMIIIAIVEDITRFKRSDEFFSFVGLVPSTNSSGDNEKTGNITPRRNKILRGVIIESAWVAVRHDPALMAAFTDLCKRMEKSKAIIRIAKKLLNRIRYVLKEQKEYVYNVAA

SEQ ID NO: 51984 - protein, 382 aa, unidentified
MQIVYERCAGLDVHKKSVMACLITEAPNGERRKERQTFSTMTSDLVRLRDWLIEQQCSQVAMESTGVFWRPIFNILEGHLEVMVVNAQHIKAVPGRKTDIKDAEWIADLLQHGLLRPSFIPPAWQRIVRELTRSRTSLSEERSRVIARLQKGLEDANIKLASVASDLMGQSAQQMLHALLQGELTPEAMAEFARGRMRSKREQLVQALTGHLQAHHRFLLAEHLKHLSELQDGIARLSTEIAERLRPYEELLARLETIPGVKRRLAEIILAEIGPDMRRFPSAQHLASWAGMCPGNHESGGKRLSGKTRKGNRWVRMALVHTSGPTSATMISAVRRPTPGIVSRWSSATSKGRCRSVISALNRSIVSSRKSIWVRISATRNC

SEQ ID NO: 51985 - protein, 416 aa, unidentified
MAPTAYAFYVGIDWGSERHQVCVLDHERRVHGERRVEHSSPGLAALADWLSALAPGQPERVAVALEVPRGAIVDTLLSRGLHVFAINPKQLDRFRDRHSVSGAKDDRRDAWVAAEALGTDRWAFRRLEAEHAVIVQLREVTRFDEDLQQELTRLANRLRDQLLRYYPAVLRLAPAADEPWLWALLELAPTPAAGAQLPRARVTRLLERHHLRRHTPDDVLAALRAPALLLTPGTVEAAGRHVALLLPRLRLVHAQRAECAGHMDRLLAALQAETPPGPHRKHHDLEILRSLPGVGRLVAARVLAEAAPLLAARAYHALRALAGCAPVTRQSGKCRGVRMRYGCNHHLQQAVYHWARVSPQCDLHSRAHYTALRQHGHPHPRALRGVADRLLAIFVAMLKTDTLYDAARPRRRELAA

SEQ ID NO: 51986 - protein, 394 aa, unidentified
MKLVGIDIGKKHFFCIMDKDSGEVLLQPSSFSNTKDGFDSLIQKLSSYSKDSILIGMEDTGHYHFALLKYLLEKNFTVALINPKTTDYTRKMQNGITKNDKLDTLTICDVLDTPVRKKQYRITKVNSFDLYEQKQLTRHHHNLKEELNVYTNRLQKCIDIVFPEFNSLFSSKYGIIYMNVLKTFGSAENIASTDIRTIRKCFEIKGRGNRISLTAQQLKDSAKSSIGISSAAEVIKIKHLISQIELINEQLAETDKKIEEFSIQNNSPILSIPGISHFSGTSILAELGEISNYSKPSKIIKAAGVAPYHYESSQYDAQHTAITKKGSPYLRKTLYQIILPVINNNNPVFKQYYDLKISQGKGHRCACGHCVRKLLRIIYHLSSTNQQFDDALLR

SEQ ID NO: 51987 - protein, 335 aa, unidentified
MDHVAIDLGGVESQICMRRGDATIVEERRHGTASLKKYLATLAKSRVVMETSAEAFAVADAALEVGHEVRVVPSGLVRSLGVGARGVKNDRRDAQVLSEVSCRIDLPSVHIPSQRARQRKSVIGMRDGLVAARTQLINTVRGWMRTTTTRIRSGAAETFPRRVRDYFRRHEQELPRAVERQLKAIDALSEQIAEADAELSDEANRDETCQRLMTVPGVGAVTALCFVAVVDEISRFGNAHALESYIGLVPGEDSSSTRERRTGITKAGAKRLRTALVQAAWVLRRSRPKDPMALWNIELEHRRGKRIAVVALARKLAGVLHALWRNGTIYDPLHR

SEQ ID NO: 51988 - protein, 463 aa, unidentified
MARNNNSKKRKKPVHALKAIQPDAAGIDLGSREHWVAGPPLKDNTPNVQRFGTTTPELLRLADWLKSQAVKTVAMESTGVYWIPLFEILDSRGFEVILANARQVSHVPGRKTDMLDCQWLQLLHACGLLRGSFRPSDDICRLRALLRERNTMIAQRSDWIRRIQKSLDQMNIRVHHAVSDITGVTGMAIIRAIVDGERDPRALAQMRDRRCRKSEAQIAEHLTGNWRPEHLFNLGQALKMYDQFCQVVAEYDAEILAYIKTLQPADVDDESIPPPASKSKAREIAKKGQEPMRKALYQLTGFDLTSIDGIGVDTAAVLISELGFDFSAFPDEAHFVSYLRLAPNLSISAGKKVPSKLKATTTSRVASALRTAALALRNSKTALGAFYRRISSRKGASVAVFATARKLAQITYRLVCYGQAYIDIGAKAYEAQYNNRRLKFYTKALKDMGYKVKPLEAEQAKAA

SEQ ID NO: 51989 - protein, 315 aa, unidentified
MECVSLFVGIDVSKAHLDVAVHGRPRSHRFANTPPGRDELVAWLATTAPQLVVLEATGGYEQAIIAALLTAEVPVARANPAKVRYFAKGVGTLAKNDRLDAKVLAHYAALVDLPRLAPDEAQRTQLAALAQRRCQALAARQAERNRRDTAHPAVLGDLDAMIDAYSAQIHDLEARLAALVASVPALAEEREVLVSAPGVAAVVSTGLMARLPELGREPLKRVTALVGLAPFDDDSGTQSSPRHIRGGRSDVRALLYMATLVAVRRNPTLQAHYQQLLARGKPKKVALIACMRKLLGILHAMLRDRRKWQPAQIAA

SEQ ID NO: 51990 - protein, 351 aa, unidentified
MMIIGVDYHPSFQTIAFFVEETGECGEQELNHSDGQAERFYRDLKQRGICVRVGMEATGYSRWFERLLAELGFEVWIGDPAEIKAKRVKKQKYDREDARLLLRLMRENNFPQIWVPGPENRDLRQLLWHRHRLVQMRTRIMNQLQALAMNEGFRWKKKLFSEQGRALLEKLSLAPWASRRRQELLELLDRMNPTIEELTAAAEREAKKRPEVLRLMTHPGVGPLTALAYVLIIGTPTRFQRGKQIGTYVGMIPCEDSSAGKQRLGHISKQGNSLLRFLLVEAAQAAARIHPDWRRRYMHLAMRRHKSIAKVAMGRRLAVRLYWMWRNGCEYSPSLEFGSYAGQLGTGHGVK

SEQ ID NO: 51991 - protein, 400 aa, unidentified
MKGPIVSIDVSNGNSHFQCFIQRGTKMGKVHRIQHTVEGFRFLKSKVEELAMKTKEEVVVVYEATGVYTTPLQRFLEKSEIKQYQISPLQSAKQRKTEIHNKKTDKKDPESIAEVYYAKELRKYEREADIYHQLRTANRVYEDCLEHLRKYKVTFQSHLSIVFPGYMKLFQDGYSPISLQLLEMYPHPDRLKNKQPETVAKKLNKHTDHSFEVCLKNAKRVIEFANKTYPGCDKEDPWVAVLVEDIHQLQAMIEQAEAKLDKIIKLAKTTPYYFIILSIDGIGPNLASRIIAEFGDISKFKTRGAMVAYVGNDPNRAESGDIDGYHLSISKKGNKRLRCILYLAVTCSIRSKKETPINAFYQKKRQQSTPLKSKAAKVACITKLIRTIHGMCKNGTEFTS

SEQ ID NO: 51992 - protein, 342 aa, unidentified
MLIIGCDYHPSVQQIAIVDTETGDYSEHRLRHSDGEAEKFYRDLKLRAVKVRVGLEATGHRRWFERLLMELEFEVWIGDAAQIAAMRVRKQKTDRQDVQFLLKLMMEDRFPRVWMSSLEDRDLQQLLWHRHRVVQMRTRVLNQLQAIAMNEGIQRKGGLRSAQGRKRLEQLPLGPWATRRRGDLLVLLDQLNKSVDELTAAVQQEAEKRPEVRLLMTHPGVGPVTALAFVLIVGYPERFQCGKQIGSYVGLIPAESSSGVHRRLGHISKQGNTLLRFLLVEAAQAAARFDPEWRSKFLRLAMRRERRIAKVAMARKLAVSLYWMWRQQRSFQPALEVGSYAG

SEQ ID NO: 51993 - protein, 402 aa, unidentified
MNCVGIDVSKGKSMIAVMRPFGEVVVSPFEVRHTANELSELAGLLKSLDGETRVVMESTGNYHAPVAWLLHDAGLYVSVVNAMLVHDYGNNSLRRAKTDKKDAVKLANYGLDHWLTLPRYIPEEDTRLMLKICYRQYQQYSKVQTMLKNNLISLLDTTFPDANRLFTSPPRADGSEKWVDFVATFWHCECVCGRSEKAFTTQYQKWCRKHGYNFSEDKALDIYASACRHFGVIPKTDTAKLLVEQAISQLQTTSSALAALKQEMQSLAASLPEYPVVMGMFGVGPTLGPQLLAEIGDVRRFHSKKALVAFAGIDAPPYQSGQIDVRSRSISKRGSASLRRTLFLVMSVILQCAPIDEPVYQFMDKKRSEGKPYRVYMMASANKFLRIYYASVKAYLDSLKHG

SEQ ID NO: 51994 - protein, 355 aa, unidentified
MSSEKYIGLDVHQATISVAVMDSQGKVVMESILETKASTILEFLAGLSGSLFVTLEEGSWAAWLYDLLKPHVTEVLVCNPRKIPLLKQGNKSDKIDARKLAERLRLHDLKPVYHGETGMRMLRELACSYLTVVKDLSRVMNRLKALYRSWAIPCAGRDVYYTRHRSQWLEKIPEAGTRWRAEQLYEQLDMLQHLRQQARRELLAEGRKHTITAKLRRIPALGPIRSVLAVALIQTPHRFRSKRQLWTYSGLGLETRDSGEYHYVDGQVRRRKKQATIRGLNKDYNHDLKGLFKAAAIRASVQPGPFQEFYQRSLTKGIKPTMVRLTLARKIAAIALTLWKKGEDFDIDKLNSQAA

SEQ ID NO: 51995 - protein, 327 aa, unidentified
MAKRTTICAGIDTGKWKLDVALDGSSEQLQVENTPEGHKVLLAWLRQHRVKRIGIEASGGYEQPVVAELRRKRFVVVVFQPAQVRAYAKFHLQRAKNDKIDAALIATCTAAVKTIHAPPDARLLPFAEHLTMIDQIGEDIARLKNRLETCRNPQFRQTWKEDIARLEKREKIELKALVAAIRKHGDLATRLDLIYSVDGIGLPTAVAILVRLPEIGRITREQAAALAGLAPYDDDSGTQVGVRHIAGGRKRLRLALYTAALPASFRWNPQLIALYQRLMAAGKEHKRALIACARKLLIFANTVVARGKPWERKPPAAASTIAVPQAG

SEQ ID NO: 51996 - protein, 358 aa, unidentified
MKYVGVDLHKKFISVCAIVIVRGKREVLRRGRFACSDTAGILAWFSKLGQFQVVVEATSAYEWFIQLVEPLAQRVVLAHPKKLRIIAESTRKSDKLDAKVLAEELAKDCIPEAWRPSPRVRAYRILVRQRCFIQRRITGVKNKLRHVVASYNRDVDSFTESGRKACLEALPSPWERKVFEQLWDELLNHQKRLGEADQNLKEFAQSAPLAEREARALLATVPGVGPVTVDVVLSELGDWRRFRSMSKVTSYAGLVPGFRESNGKEKQLGLTKEGSRWLRWAMVELAWRLVNKTRRWAQVYESIAKRSGAKKAIVAVARRILGVLYSILRTGKPYSLVLGDARQQTGRRTPRKKEKTCT

SEQ ID NO: 51997 - protein, 411 aa, unidentified
MKLFVGLDVSSFDIKACFLNGEGDKLNSFTVENDLPGATQLRDEILHAIQGNTVNELRIGLESTSVYSFHPSMFLHNDESIQALGGQVFVMNPKQIANFKKSYSDMDKTDEIDAFVIADYMRFGRLPMSIVKEEQYVALQQLTRARYNIVRQITKEKQRFLQYLSYKCNTFTEDLASSVFGKAMMDLFQESYSLEELSQIPLEDLADYLREKGRNRFPNAKQVAESIQKAARSSYRLDKVVEDSIDTILATSITLIRTFEKQIKELDKSIERIMKGVPQTLQSIPGVGPVFTAGIIAEIGQIERFENEEKIAKYAGLYWRKHQSGRFTADNTSLSRNGNQYLRYYLVEAANSVRRQIPEYSNYYAKKHKEVPKHQHKRALVLTARKFVRLVDALLRKNQIYTPKRSVINEA

SEQ ID NO: 51998 - protein, 369 aa, unidentified
MGDRITYVGLDVHKEGIVVAVAEGGLRGEVREYGRIANTPAALDRLTRKLGGEGVRLRFCYEAGPCGYGIQRHLSARGHECVVVAPSLIPKRAGDRVKTDRRDAAGLARLHRAGELTAVWVPDARHEAMRDLVRARLDAVHALRRARQQLSGFLLRQGCHYRRPAWTKLHRRWLAGLKFEQALHHIVLEDYIAAVEAAEARRDRLTAQIETMLPDWTLAPVVAALQTMRGMALVNAATLIAELGDLSRFANPRQLMAYLGLVPSEHSSGASLRRGGLTKAGNSAARRLLIEAAWCYRFPAWVSRELRLRQEEQPRPIREIAWKAQLRLCARYRKLARSGKPANVVTAAIARELAGFIWAIARRVPPAAS

SEQ ID NO: 51999 - protein, 480 aa, unidentified
MRPHIPLMEDAMDKNNKQKRKNKKHRKVNTSHLEQLNINAAGIDIGAEFHYVAVPNGRDPEGQDVRHFSTFTADLHQLADWLRQCNIDTVAMESTGIYWIPVFEILDSQGFDVRLVNPRNVKNAPGRKTDVLDCQWIQQLHTYGLLQSAFRPEDRICELRAYLRQRAMLVSYASHHIQHMQKALEQMNVKLTQVISNITGVTGMKIIRAMISGERNPVKLASMRDARCNNSETIIAKALEGNWRSEHVFALQQAVELYDFYEKQIIECESRIQDHLESFDDRSNGTPLEKPRRKSRGSSNQFHFDARRYLHRMTGVDVTRIEGIEGPTALNIIGEIGIDMSPWPSEKHFASWLGLCPGSKITGGKVLSSKTKPSANRAAYAFRLAAYSLQRSKSAIGAFLRRKKAQKGAPKAITATAHKIARIFYNMLKYGTEYVDLGQEYYEQRYQDRVIANLKRKAKQFGFELVNIKEHKLLTGLPAN

SEQ ID NO: 52000 - protein, 316 aa, unidentified
MGERSVFVGIDVAKAQLDLAQRPEGPRLSAANTESGIATVVAHLRRVKPTMIVVEATGGLERPLVRAVVDAALPVVVVNPRHVRDFAKATGQLAKTDALDAQVLARFAQAVRPALRPVPDAPTQELAALIARRRQVVEMLTAEKNRLEGTPKRVQKRIQVHLNWLTTELARADDDLDQAIRTSPIWREQEDLLQSVPGVGPVVTRTLLAELPELGTLNHKQIAALVGVAPLNRDSGTLRGKRMVWGGRAQVRAVLYMGALVAARFNPVLRMFYQRLRAAGKAKKVALTACMRKLLIILNAMMKHRTPWRPEMAQCA

SEQ ID NO: 52001 - protein, 401 aa, unidentified
MHDGFGVFIGLDVGKEGHHAVALNREGKRLHDATLPNTEAGLRKLFDKLARHGRILAVVDQPASIGALPVAVARACGHQVAYLPGLVMRRLADLHPGTAKTDARDAYVIADAARTLPHTLRRVDTGDEALAELEVMVGYDDDLAGEVTRVGNRIRGLLTQIHPPLERVLGPKLQHPAVLEAISRCGGPTGLRRAGRAKLTEIVKARAPRMGARLVEQIFTALDAQTVVVPGTTAAETVLPRLADSLRDLLRQRDQVAEQVEGMLDAHPLAPVLTSMPGIGVRTAARILLEVGDGSSFPTPGHLAAYAGLAPVTRRSGTSIRGEHPPKGGNKQLKRAFFLSAFAALADPLSRAYYDRKRAEGKKHNAALICLARRRVDVLHAMLRTQRPYQPTPADEPRLAA

SEQ ID NO: 52002 - protein, 343 aa, unidentified
MQSAMTIGLDIAKSVFQVHGIDAKGKVVIRQQLRRSRVLGFFGKLSPCVVGIEACASSHHWSRELQALGHAVRLMPPAYVKPYVKRQKNDAADAEAICEAVQRPTMRFVPTKTADQQACLMLHRTRHLFIRQQTALINSMRAHLAEFGIVAPVGRNGVEKLLDVVADPDDERVPDIARECLRALGSQLQGLKVRILEFDRRIKAWHRSSETSRRLDDLPGVGPALATALVASVPDPKVFRSGRDFSAWIGLVPKQHSSGSREKLGNITKQGDRYLRSLFFTGALAVIRYAKIHGSKHRPWLAKLLERRPTKVAAVALANKLARMAWAMMARGQSYKEPVALAR

SEQ ID NO: 52003 - protein, 342 aa, unidentified
MKFTCFIGVDIASETFVATTLKKSLKPLLTAQEFSNTSDGFADFVTWLSTAKIDKRTAVICMEATGVYAEALCYYLHAQDWWVAVHPPLEVKRAFAPVGHKTDPVDSRQIAEYAVRFTDKLRRWQPKKELLEQVGTLLNTREQFVRQRTAHKNTMHALKRKPVRTPLAEQLLLEGIAQLTKNIKTIETEIKELLKKDENLYEQFLLLLTIPGVRLLLASHVLVMTAILHSSHNPKAVSAWLGISPYEKRSGTSISRKARSRRYGPAIMRKLLHLAARSVRKHNPVFEKYFERKVAEGKPKKLVFNNISNKLVKIICAVLRENQPYIPTYRSVNPAVLSLTRS

SEQ ID NO: 52004 - protein, 526 aa, unidentified
MVTKTRKRKSTGSKKRFIGKPTGQIQQRVQAVGPERFGIVAVDCAKRRSKWMLCDFYGQVVVEPATVEHTAGALRAMTRRVAEACKQAGLTDTIVAVEMTGIYHKPVQRAFRKAGYDTRIVHPFASSHYRRPLHPDAKTDDNDLEAIFHAAVKGYGLVTLPMGEVYQSLQALSRHRNNLVKQRARLMVQIRWLLHQTMPGFADLWGDDKLFRDSIALPVALKFSSAETIRKAGVDAMASHLRQTKVRFQARTLQRIVAWASTAADPSELAAMQTRQWQQLNEVRTLFTQQIAATEREIAGFLVKTPYVLLLSVTGINVVSAARLAGEAGPIEHYTSARAINGRAGLFPSRYQSDQVDHADGSLARHCNRKLRGAAMLIAENLSKCHPHYRGLSDLWKQQKVDPRDRRCRIANRAMRMVYQLVGGRQLWHGKGVEREYLLAKLQEFHRQHESPIEQTVRDLQEVLAWLPKSAYATEAKPLETSVRKKRRGPQRIGDLMIPLLIRLGVTIEEEPETVKSKTSEAPSSD

SEQ ID NO: 52005 - protein, 422 aa, unidentified
MKNSAARKMKQVPEGFLIIGIDPHKRKHAAVAITQDMTTRTKFKFDNTRDGLEAMLERARTEMIKSGCRGVMFAIETGGHYWRNIAYFLDEQGIPFRFINQYTLKRRREGKDLNRRKNDYRDSEVAAQLLCTGEFVESTLPQGVYAELRTAHNAYRRLVKERTRITNLIKALLDSLFPEFTHVFKDPCAVTAMTVLTTCSVPSVISAMTEEEFVAAIEAKHDGRRLMRRKLKALHKAAKTSIGIAAGARSLSLEMSFLCEKIDLVRRHISVIDKNLAELVHQAEEGKYLLSIRGLNYIAVAGLLAELGSFKSYRSAKQMIKMAGSNPTESESGGKRSAHTPMSKQGRPVLRYCAWTAVIPMLRFNADFRAWAQRTKERPVHANPLNGREVVGAALNRLFRLAFALVKNQTYYEVSRAARSVA

SEQ ID NO: 52006 - protein, 352 aa, unidentified
MKGMNECGLQTSTIFVGVDVHLHQWHVTIRSKEVIVQRATIAGSFVELQKVLVHWPAETVMVVYEAGFSGFWLYDLVRASGARCMVIPPSRIPVESGNRIKTDRIDSAKLAALAASDQLTGVWVPGTIQRQERETLRERRRIIRQMGQSQRQIKAQLHCYGLSLPSRAGRWSKVYEASLWQVRFSSEYMQLSFERLLHRYQFLRDQLAEQTALVRGLARSEGYRQKVLWLTSLPGIGVLTAMEVLTELGEIRRFSTAEQLAAYVGLTPSEYSSGAHVRRGHITRCGKSALRARLVESSWVAIRYDVELAAIYQRIRSRQGGKRAIIAVARRLLLRIRRVWLEERPYKLSTAA

SEQ ID NO: 52007 - protein, 480 aa, unidentified
MAKRAVQHADLKAVPMLLNESLYVGIDIGKAKHVAGFLSKTLLERHERFEACPALVFENSREGFRLLIERIRSLAPLEHIFVLMERTGHYHRPLEQYLQELDITVYVMHVQSRSTGMLKTDKRDALTLANQLYNQLELGVQVPNKLQLIRRVVPPTQAAAELRGLIRHRYELIHESTRRKNKLTAICDELFPELVRVVKDPNGQVALALRERFPTPAALATVSLTTLQQIRGGARSFSDAKLLELQRQAAQSIGIKEVARLRGLVLEQTQLIKELQMLQEHIQQLDKEIGGIVEHAREGQILLSFPGIGPIMAATSIAAIGSIHNFPSAAALKSYFGWAPVVAQSGSTLDHTRLTHGGARTMKHMLFLAVFQAIRLKDNEWARLYERLVKTKCPFDERTQSYLGKTRVIGRVAGQMTEAIYALLKRDAELLSKVPPSQDPPPPLLSDPEVHRQHHLGHYRPLKSTPPPNTITLLHPFPAE

SEQ ID NO: 52008 - protein, 431 aa, unidentified
MKVIYSIACGIDVHKSFIVAVICDSTTLTPTYTKKRFSTFYKDLTKFRDWLLEHDCHNVCMESTGKYWIPVFNILEGYISNVVLTNPKWVKAVKGKKDDNKDAKWICDLFKLGLVQGSFIPEKQIRILRELTRNLFKVTNMRSSEKNRFQNALTVGNCNIDQVFSDVFGKSASAIINLILADKPFTLQDISASLHGRCKATAEEVSDAITGFSLEHVQKQRISLIQAHMEYLDSMIYHFQSLIDSIVSPYEPFITLLSSIPGVKRLSAITIISEIGIDMSPFGSHHRLASWAGLTPGSNESAGKKKSVKISRAGVYLKPCLLQVAHAAIKDNKNLYYANKFNKIAKRRGKKRAYIAIARKILVAIYHMIDTGEFFNPRDLADTETTVKKRIQYTKNNLRNDISSLLNSGLSQEDISILINSMLPNNLQLST

SEQ ID NO: 52009 - protein, 338 aa, unidentified
MQTDQAVLTYTLFVGVDIAAQTAMVATQRPGAKASRSFTIEQTPEGYTSLLHQLQATGSVPGQVLVVMEATGSYWISLATRLVHEGFAVSVMNPAQAHHFAKALLKRAKTDAIDAQTLAQLAMILQPEPWTPPPQIYYALQQRLAQRDDLLNLRQQVRNQLHALVQHPEVIAEVRARMERLLATFASQLTEVESEITAALSQDSAWAAAATRLQSIKGVGWVTAAWTLVTTLNFTSCDTVDSLTAYAGLAPMPRQSGSSVWHRPSIGHTGNGRLRTAFYMATLSAAQHNPVIKAFYTRLREVGKPEKVARCAAARKLLHIAWAVVKKDQPFDPNYALG

SEQ ID NO: 52010 - protein, 416 aa, unidentified
MNERGTVAAGIDTHKDTHALCVIDLVGRVVATGAYAADGEGYDRIAAAIGDPRDCVVVGVEGTGSYGAGISRRLAELGYDVVEVVRPKREKRMAGRDKNDPADAERAARDALAGKASGAPKAGGGWVEALRFRMVARDAAVSESTRAANSAHALIVTAPAPIRGELGGMKTPALMKALSRRRRARDVVESSLWESLRSLSLSWIGAKKAAAAHEEAMREILLANAPALLDIHCCGTISAARLAVTAGDNPERVSGESAFASLCGASPVEASSGKVKRHRLNRGGDRQANRALHTIARQRMKRDSRTKLYVDKRTKEGKSRREIERILVRYIAREAYGALMRPMDAACEPYRASARAAKSERLRAGATQAQASRALGVASARISEMERGRLVDAPLLQRYRSWLESLSAGERRESPE

SEQ ID NO: 52011 - protein, 340 aa, unidentified
MEQVSTIGLDIAKHVFQVHGVDALGAVVVRRKLRRDEIAAFFSALSPCLIGIEACATGHHWARVLQALGHEVRLMPASYVKPYVKRQKNDATDAEAICEAVGRPTMRFVPVKSEEQQSVLMLHRVRELLIRQRTMLVNALRGHLAEFGMVTRQGIVGVGMLIAWVEDAGQNLIPPLARSALLSLIGQLREVHERVSEMDRQIHAWHRSNELSRRLETIPGIGPITASAIAATVTDASLFKSGRQLAAWIGLVPRQNSSGGKDRLGRISKQGDPYLRRLLVVGAHAVLRFSRKAKVPPTQWAAELLARKPYNVVAVALANKMARIAWALMTTGRRFETAAL

SEQ ID NO: 52012 - protein, 532 aa, unidentified
MIGDNPSLDGMIPPGKIFPLFPLLAATNLVFLASRPSSNQGTGTMSKCKTCASPSKTSKSRSRQKHRRIRKAQQRIQKVGVGATAAASATPVPAPAVVHAHAAAIDVHSDNHVVCVGPNQVRTFGAYTVDLRAIADHLSQYGVTTVVLESTGVYWVPLFELLESRGFEMYLIEPSQARHCGARPKTDVLDCQWLQRLHTFGLLRPSFRPPESVLALRGYWRQRQMQVRYAASHVQHIQKALEQMNVKLSEVAADIMGLTGTRIIQAILDGERDAKQLARLRDSGCKKTQEEYAKALEGSWRPEHVFALKQAFALYQFHHQQITECDQRVAEELARLPNGAGNKPFQSRPRRCGRKSNDVRFNATEPLFKALGVDLTLIDGIDVNTTLVILAEIGVDVSRFPTEKHFASWLRLSPRLDQSNQTQKKRSPRRGKNRVAQALRMAAQAVSRTKTPLAAFYHRMKGRLGGKGAITATAHKLAVLVYRLLKYGVEYVRQSLDEYAAKVRKQAERSLRRKAQQLGYELVPITPAAEPA

SEQ ID NO: 52013 - protein, 412 aa, unidentified
MTEESFTWFVGVDWGSEKHHACILDTRGTVVGERQFPHSGVGLAELGDWLLSIAGTTATVAVAIEVPHGPVVDSLIDRGFVVYAINPKQLDRLRDRFSVAGAKDDRRDAYVLGDGIRTDRRLFRRLHVADPRIVELRAWSRLTEELQEERVRLGNRVQQQLWRYYPQMQKITNDLAAPWFLELWAMAPTPGKARQLRKSTVEQILKKHRIRRIDADTVLRMLREPAIKVAEGIAEAASIHLRSLIARLHVVNRELRQAEQKLDQLCAGIGETEGAPGECLQGQDIKILKSVPGIGRINLATLVCEASGPLRSRDYPALRTLCGAAPVTKRSGKSQIVVMRYAAHARLRETVYHWARTATQHDAKSRCRYAALRQRGHSHGRALRGVADRLLGLTCVLLQRQTMFDPHFGQAG

SEQ ID NO: 52014 - protein, 441 aa, unidentified
MSVNTIITRSQHVRMPVEKEEKLEPQFAAFLAIDWADQSHVWSLQSADSTTRERGEVAHTPEAIDAWVAQMSQRFAGRPIAVAVEQTRGALVFLLSKYEPLHIFPVPPAMSSNLRKAFYGSGAKDDPKDADLLLELLQRHREKLRCLTPDTEATRLVQNLVEERRKLVDEKTAQSNRLEAHLKIYFPQIPQWFDDVDSPLVCALLQRWPTLQALQKVRPATLRNFFRQHHCRKQELIESRVKAIAAAMPALGDRAIVEAKVQAVKVSVQLIQILHDGIKGLDRQIQEAAEAHPDFFIFDSLPGAGPVMAPRLLAAFGSQRERFQSAEEMQTWSGIAPVIQSSGQSRWVHFRFACPKFLRQTFHEWAGYSIAHSEWARAYYQLQCRRGKKHQAAVRALAFKWIRILFRCWKDKVAYDESIYQAALVKRNSPLAGAVVPAFVL

SEQ ID NO: 52015 - protein, 334 aa, unidentified
MAQITTAGIDLAKKVFALHGIEGSGNVVLRRTVRRDQLLGVVASLPPCLIGMEACSGAHEWARQFQKFGHMVKLMAPKFVAPYRKSGKNDGNDAEAICEAVTRPSMRFVPVKSAEQQALLVLHRVRKGFIVERTSTINRLRGLMTEFGVVLPLRSVTVRRQAAQAAEALPEIARRSVHDLLEHLRRLDERVDAYDRELEVQARLSEAAQRLMQIRGVGPTTALAIVATIGDAREFKNGRQFAAWIGLVPNQHSTGGKSRLGHISKKGDAYLRALLVQGARSVLHSAKGRADGISRWALLLQERRGYYRTLVAIANKNARIAWALLAKNEELRTA

SEQ ID NO: 52016 - protein, 297 aa, unidentified
MQKTIGLDIHKKFIYAMVLDSSGNLLLEKKVRNDPYKLDKFLRGIDKDSKIALESCSCWEYVYDYLTDKGFTNLVLANPSRVRLRATSRKKTDAHDAKVLADLLRTNMLPTSYAPPTVIREQRRITRHRASLGRLKGIVKNKIHAILIRNGINQEFGDVFGQEGIRYLMSLDLSVVDRYQMDQYLEFIRHYDIQIRKTEARIEKYVEYTPQVKLLMSIPGISFYSGLAITGEMRDIRRFSSAKKLTCFAGLNPSVSQSGDRCYTGHIAKQGNSHLRWMLNQCANIAIMHDSALAKIY

SEQ ID NO: 52017 - protein, 338 aa, unidentified
MGKITTIGVDLAKNVFHVVGCDARGKRVCRKQLRRGQLLRYFANLPPSLVGMESCASASYWARELQALGHVVKLIPPQYVKPYVRGNKNDYNDAQAIAEAVVQPQMRFATVKTVAQQDVQALHRLRERRVAERTALCNQVRGLLGEYGMVLPRGVASLRRRIPELLEDADNGLSTLFRRLLGQAYRQLQELDAHIADYTGELKRQSEQHVACQRLQTIPGYGPILASVFYSVVGDGAAYRRGREVSASVGLVPRQHSSGGREQLLGISKRGDRYLRSLLVHGARAVVRQAAGREDRLSRWINRIRAARGYNKAVVALANKLARIGWAVLAHNTTYQAA

SEQ ID NO: 52018 - protein, 343 aa, unidentified
MEHYVGLDVSLKLTAICVVDRSGKIEREGVVTSDPETIAAFVKSHAPHVARIGLEAGATSTWLWTELNKMGLPVICIDARHAKAALKMQINKSDRNDAVGIARIMQCGWYKEVRVKDLDSHAIKALLVSRALLVKIKRDIENQIRGLLKNLGLVIGRAKMNVFAVRAAELADARPAVAAAVEPLLKARDAVGRQIADLDRKVLRLARNNAQVRRFITVPGVGPITALCFLATIDDPTRFKRSRSVGAYAGLTTRRYASGEIDWTGRISKCGDKMLRTYLYEAANVLLTRIEKWSALKAWGIRLAKRSGLRKAKVAVARKLLHRMWIERTEFKWSSKEAANQPA

SEQ ID NO: 52019 - protein, 360 aa, unidentified
MFCERTSVGLDVHARSVVAAAIDGRSGEVFRARLTPSHADVIEGVGKLPGPCAVVYEAGPTGFGLARALSAAGLRCQVAASSKLLRPAGDRVKTDARDALNLARLLRLDEVVPVRIPSAAEEAARDLVRIREAARADLMRARHRLSKLLLRHGIVYYDGKAWTERHDRWLHHQRFDAAPTQSAFEDAYEAVVLATARRARLDEKITALAADSEFSPLTRRLACLRGISTLTGFALAVEIGDWDRFTGASIGAYLGLVPSEYSSGTSRTQGAITKTGNTHVRRLLVEAAWHHRSTYRPGPVLRHRWDQAPAAARARAHAGNQRLHARWVGLNLRRKPAVIANVAVARELAGWCWSLAVLPD

SEQ ID NO: 52020 - protein, 377 aa, unidentified
MNNVRFIGLDVHAETIAVAIAEPDGEVRSVGVIPNRSDSIRKLVKKLEPAEQLRICYEAGPTGYVVYWELTALGVKCEVVAPTLVPVKAGDRVKTDRRDALKLARSYRAGDLTAVWVPDAAHEALRDLVRAREAAKKDQLRARHRLGKFLLRHGRRPSTPMNAWTQTHLTWVKTVHFEHAAQEATLLDYLHEVEHMADRLERLERAIDEAVKTAPERMRAVIEALQALRGIALVSAVTIVAEVGELSRFTTPRQLMGYSGAVASEDSTGTRVRRGAITKTGNAHLRRVVIEAAWAYRYRPAVGATLRKRQAAASEEVKAIAWKAQHRLYARYRHLTARGKCKQETVTAIGRELLGFIWAIGVKVEEAQERKTQSAAA

SEQ ID NO: 52021 - protein, 377 aa, unidentified
MDQQIERCAGLDVHRDTVAAGVRVPGSNGRRRQEVRTFGTTAAELLALRDWLEAHGVTHVAMESTGVYWKPVYYVLEEAFTCLLVNAAHIKQVPGRKTDVKDCAWIAQCLECGLLRGSFVPPAPIRELRDLTRHRKVLIQEKTRAANRLHKLLQDADIKLASVATDILGVSGRAMLEALARGTTDPVVLADLARGQLRKKLPALRQALAGRFRPHHAFLLSQLLAHVDYLDEAISLMSAEVEQRLAPFAEVLMRLDAIPGINQRTAEVVIAEVGVDMSPFPSDRHLASWAGMCPGNNESAGKHKTGKTRKGNRWLRMALIEAASAAIRTKDSALGARYRRVMRHRGHHKAVVAVAHAMLRAIYHILAEGTTYRDFRS

SEQ ID NO: 52022 - protein, 372 aa, unidentified
MDTHSTAYVALDTSKLHNAVAIALAGRNGEVRYLGEFDNTPAATGKLVRKLTRQHAELTFCYEAGPTGYGLYRQIKDLGHDCIVVAPSLIPQKPGERVKTNRRDALSLARQLRAGDLTAVWVPDPQHEAMRDLTRARGAAVRELRVKRQQVSAMLLRLGHHYPGKTTWGKAHMSWLAGRKLDHLEQRIAYEEMLHAVRQAGERIERLEQAIRAAMADWSLASLATALMALRGIDFIAATTLLAEIGDLTRFRSPRELMAFLGLVPSEHSTGERVRRGGITRTGNRRARSILVECAWSYRHPPRVGAAKMVKLEAAPPMVRDIAWKAQSRLTARYRALRRAGKLDVVAITAVARELTAFVWAVGQAVGTAEAV

SEQ ID NO: 52023 - protein, 442 aa, unidentified
MKEEVSMKVVNTGAAGIDVGSRSHFVAVGQQSDDVREFGIYTQDHPGMIQWLKECGVTTVAMESTGSYWQTLFSSLQREGFEVLLVNGKQIKNVKGKTDVKDCQWIQRLHSLGLLTGSFLPDAEVEQIRGYQRHRAWLIEQCARLSNKMQKCLRLMNVRLDVAINDITGKSGQAIIGAIIQGVRDGQELASLADRRVKKTRAEIAQSLQGHWKEELLFELQQCFELYHIHQEKIFNCDKQTEQLLKKFTARQEHPPAFLKKKKSYRNQQKFDLPKLSYQYLGVDLFAVDGLSHGTVMTYLAEMGRGIYDFPSAKHFSSWLRLAPNNKISGGKTLSSRTPKGKNHLAQAFRNAANSIGLMKSGALKKFFSRIAFKKGRAAAITATARKLAVIVWNMIVKKQPYKPIDEDIYNSKVRSSVISNIRKNMKRLNLTAFDLQSVTSS

SEQ ID NO: 52024 - protein, 335 aa, unidentified
MKKASIGIDISKSNFHVCFKIRLEEGKIKILGTSSFQNNTKGFEELLDWVDKKNKEDPDPVFVMEATGVYGEDLVYFLHDQDRIASVVLPNRMKGYFKSLNIKTKTDKIDSKIIAEYGIERRLDIWKPMSSNYKALRELCRELLALKNTRTKALNQLHAMKYAHGRLGELVKMKESQIEFYDDNIAELKKHIQLAVESDQQLVEKLKKVVSIPGLGFETAVILASETNGFLLFHNIKQVVSYAGLDVSHNESGRFRGRSKISKKGNTKIRQALFMPALTATVHNQPIKGLYERICEKNPNIKRKGVVASMRKLLILAYTLWKKDEIFNKEYKWAA

SEQ ID NO: 52025 - protein, 400 aa, unidentified
MRAVFGIDVSKASSEVAILVNGEKVHGYTMSNDALGFARLLGDLRTVHKPEIIFEATGVYSRRLQTFLEDNGYAYTRLNPLEAKKQLDSLRVRKTDQIDAEKLAQSQFVLNRKPTYVQEEVYQNLRALSRFYQNLTEDIVRAKNRLHKVLQVTFPELETILSTPSGQQYWNLVIDFPCKDFVLELSKDELSESIRQSTSKRISDKRVAYLAEKLTALANQSYCAVKKTSPILEEVRYYAKELLRLYEQRQAVLDEMVELAQPLPEYDILLSIPGIAETTATSIIGELGDIRRFQSANQINAFIGIDLRHYESGNFLAKEHITKRGNPYARKILFKCIHNIASASHTNPCHIADFYEKRKRQSQTTSTKPHTIASIHRLIRTMYYLITHNKLYDYTSTQNR

SEQ ID NO: 52026 - protein, 387 aa, unidentified
MPQPNDLSRSLVALDQDSTIIAVVEMSQSSWLVAGMLPGIERQPRKKLEPSAERLLGLLHRWRDEAVKAGRKITRIALAFEAGRDGFWLARWLRVHGVEAHVIHPSSVAVSREHRRAKTDRLDTELLKRGFLGWLRGERGHCTMARIPTIAEEDAKRPNRERECLVRERTRIVNRMKGTLARLGIRNFKPTLRKATERVTTLHTPEGSALPPNVSAELQRNMARLGFVVSQIKEIEAARQKRLEQEPETEPHAMVRHLARVVGLGVETADILVNEVLSRPMRDRKAVARYAGLTGSPDESGAKRREQGLAKAGNARVRRGMIQLAWRFLRFQKESALALWYRARTADSRVGTRKTMIVALARKLLIALWRFVTTGETLEGVVLRPAG

SEQ ID NO: 52027 - protein, 316 aa, unidentified
MICGVDVSSKSLDARIGRDGAAACFTNNPKGIAELAEFCRCHKVHLVAMEATGGYEKKPFALLWAAGIQVAVVNPRAVRNFAQGMGFFEKTDRIDAGVIAWYAQTKGCVAVSPASAEQQQLKAMVTRLRQLTELRAAQRNQRLLVTDKMVLKSFRKLLDLVQKQIRDLEVAIAGLIDADAVWHKLDQSFRSIKGVADRTVARLMAEMPEIGTLSNKRISKLAGLAPLACDSGQWKGKRSVRGGRRTIREILFVVAAGVSRHNADFRAFRERLAAAGKAKKVIRIALAHKLLVRLNAKARDVLQQLREAPPAAVLLS

SEQ ID NO: 52028 - protein, 348 aa, unidentified
MEKLIRIGVDTSKSIFQLHGVDAAEQPILQRKLRRSQFLPFFRALPPAQVAMEACGASHYWARELQALGHDVVLIPPQYVKPYVQRGKSDAADAEAICEAASRPKLRKNFVPIKNTDQQAAQMLTKLRAQFVGRRTQLANSIRGYAAEFGITAPKGLSRLGQLLDDVRAAPGIPSLATDLIETLARDYRRVDEEIAELDKKLMRLHRSNEMSRRLAGIPGIGPIGATLLSIRVTDAHNFKSGRNFAAWLGLTPKNHSTAGKNRLGVITRAGDEMLRSVLVAGATAVIGDLRRGGSRIWPWLKALIARKPPKLVAIALANKMARIAWKLMISGERYRPIGGSAPVVMPT

SEQ ID NO: 52029 - protein, 322 aa, unidentified
MSSSTPSIIYLGLDIAKLTLELSALPPSVKARRSYSNDTAGHLALISALHRLQQQTSSIPHLICEATGGYEQVLLNALHQATLRFSLINPRQVRDFARAKGLLAKTDALDAAVLADYGKLLQPKPTQPRSVTQQRLAQLVARRQELLTLIRQEQNRSEHHQDTFVRRQAQRLLATLQRHVDGIEEQIQTLQQQDAILDQQVTRLCDIQGVGLRTAWGLLAALPELGSMQRGQAAALAGVAPFNHDSGPYRGQRHIAHGRTLARQSLYMAALVAARCNPVLRPVYQRLRAAGKPAKVALVALMRKLVELANLLLKYPDLSLQH

SEQ ID NO: 52030 - protein, 352 aa, unidentified
MYDKTKFIYVGLDLHKEQHTAVIMDCFNEKLGEVTFQNKPSEFSKLLVKAKRFCTDGKGMVFALENSYGYGRALAAWLIERNYIVKDVNPALSYAYRKSVPQYKKNDSYDAQCVARVAINELNKLPDAMPEDMYWTLSQLVNRRANLKTHHIRLKNQLHEQVCVAYPSYKQFFQDIGRPTALYFWEHYPSPRLLRGKTVEELAEELISISHNQFSTRKCQVILDAVKADGDTTKDYQPERDEITRGLVKDVRHYVAQIEEVDKAIADFLPRFECTLNTIPGVSNTTVAKLLSEIGDIRRFPNADKLANFAGIAPVNFSSAGKGDDKPSKQGNRRLQGTICFRRQLCCLCNCR

SEQ ID NO: 52031 - protein, 369 aa, unidentified
MSDVITYVGIDAHKKDLFIAMLVGQQAKPVAWTVANEPNAVRRLAKKLEREAPGPVHAFYEAGPCGYALQRQLTTPRVQCDVVAPGLIPQKPGERVKTNRRDARKLVELGRAGLLTTVRPPTPEEEAVRDLCRARDDAREDLQRCRHRLGKLLLRRGLQYRVGRQWTKAHRRWIDSLTWPHDAERVVVEDYLLAIDQHETRLKELDQQLAAVAETEPYREPVAWLRCFRGIDTLSAMLILAELHDFRRFPSPRALMAYVGLVPGENSSGEKHCRGRITRAGNALVRRLLVEAAWHYQHRPGVGVALARRRKGQPGRIIAIADKAQQRLCRRFQYLTVLNKPRPTIAVAIARELVGFLWAALQPALVVAN

SEQ ID NO: 52032 - protein, 428 aa, unidentified
MDFTQNKRIAQINEQTLIIGVDVAKRKHVARAIDDRGRDLVKRLVFTNFYQGFSELIDWAKNLSEKHGRPNLLIGMEPTGHYWLNLAYYLKAQAVSVVVVNPMKVKRFKEMDDDSPTKNDTKDAKVIAQIIRDGRYHEPTLPEDVYAELREGMKLYDIIQEDVASIKAQMQNALDRYFPEFLTVFKDWTGKAALHLLDKGYLPEDIRKKSEEELLFEVKQAATRAVGIKRIQALKEAADNSIGLKVGLHMARQEIRYLVDQYRMLEERLIALEAQLEELVLHLPGADQMIAIKGVSVITVAGFYAEVGDLSNYQDPRQIIKLAGLNLKMNQSGLFKGQTTITKRGRKRLRNLLYQVARPLSLHNEGFKQLHHYYRNRSNNPLSGKQSFIALSRKLIKIFFTIGTRQCAFREERMLRDIPMIPKRQKVA

SEQ ID NO: 52033 - protein, 363 aa, unidentified
MRMKKHTQDLIAEVPRGCSKVGMTIGIDLGENWSHYCTLNEEGEVVDRGRFRTNPSSVDKWFTDLPRVRIAMEAGTHSIWISEQLQELGHEVIVANVRELRAISHSDRKSDQVDAEKLARFARLDPKILRPIAHRTVAQQEALTLIRARNLIVRLRTAAVNAVRGLAKPCGYRLPASSTLCFAKRCLAVLPPALARALGPVLHQIADMTVKIKQYDRAIKQLTETEYPETQALLKVYGVGQLTALTYVLTLGSKERFQRSRDVGCYLGLRPKRSQSGERDPQLGITKAGNVYLRSLLVECANHVLGRHGKDSTLRQWGLSLASRGGKQSRNRAIVAVARKLAVLLHRIWITQEQYIPFYAEAA

SEQ ID NO: 52034 - protein, 427 aa, unidentified
MENNLENHFQHFAGIDWGSAQHRVCLIDRQGKVIQQRWFEHSGSGLAELAAWLPRRANQPPQSLAVAIEVPHGAIVETLLERGFPVFSINPRQLDRFRDRFSPAGAKDDSRDAQVLADSLRTDMHCFHPVRLDEPAMIRLRELSRLEDQIGEEFRRAANRLREQWHRFFPQLLQLVGAADEPWLWTLFEMAPDPASAARLTPAKIQRILTQHRIRRVQPAQILATLKTPPLCLAPGAAEAAAEHALLLLPHLRLLHQQRTHIARRVQTLLDEMAAHTGSQPDTAPDTQPQEHRDAAILLSLPGLGRKVAATMLSEAAQAIAERDYHALRSYSGAAPITQQSGKKKIVLMRRACNQRLRNALYYWAQKSTLNDPTSHNHYAQLRARGKSHGCALRIMAGRWLKILIAMLKSCTLFDKNQRASPALQAA

SEQ ID NO: 52035 - protein, 307 aa, unidentified
MFIGIDVAKDRLDVHLRPAGEAFTVARDSEGIEALTARLTDLNPTLIVLEATGGFETVVAAGLAAAGLPLAVVNPRQIRDFARATGRLAKTDPLDAAVIAHFAEAVRPPARPVASAEAQLLGELIARRRQLIEMMTAERNRRRQLTAKSVIKGIDRILAALQAQLSELERDINDAVRGTPAWREKEDLLISVPGIGHKIARTLIAELPELGSLDRRQVAALIGVAPFNRDSGKWRGRRTIAGGRAVVRSALYMSILVSIRRKLPLAAVYQRLRAAGKPAKVAIVACMRKLATILNAILRDKTPWQTA

SEQ ID NO: 52036 - protein, 349 aa, unidentified
MVVVGADVHKRTHTFVAVDEVGRQLGHKTVPATTAGHQVALRWARGRFGRDLRWAIEDCRHLSARLERDLLASGEAVVRVPPKMMAEQRRVARTRGKSDPIDALAVARAAQREPNLPVASHDEQSRELKLLVDRREDLVKHRTATVNRLLWRVHEIDPDLAPPKASLDRAVHQQQLAERLAGLPGIVAELARDELADVIELTTRINDLQRRIADRVEQVAPTLLAMPGVGHLTAAKLVGETAGVARFKSEAAFARHAGIAPIPVWSGNTAGRVRLTRSGNRQLNAAVHRIAVTQIRMDGLGKIYYEKKKAEGMSTPEALRCLKRRLARIVYNHLTTDQATARTPLAHAA

SEQ ID NO: 52037 - protein, 341 aa, unidentified
MTFYCGIDLHSKKSQVCIIDQDGKKVKEANLNNDLSLILEFFKPFGKDVHIVIECTINWYWLVDGLQEAGYDVRLAHTLGLYMITGAKVKTDRRDAFKLAKLLRMGEIPESYIYPNKKRPLRDLLRRRAGLVHERAECYSSLRVQFMKYNLNTMSGDGVKRLLPSDIGIMPVPQEVKDYCVMILQRIDLLSSQIEEIDKRLKDITLEDPRFKLLLTLPGVMYVLGLTIYYEIGDISRFSDARQFASYCRLVPGISQSSTTIKKGKGKKQGNHYLKFAFTQAANIAVRYYPKLRKFRDKHANRRKGSVATMVANCILAHKIATATFHMLKEGVPFDEAKLFG

SEQ ID NO: 52038 - protein, 415 aa, unidentified
MNVIYECCCGMDVHKNTIVACLILGRKKETRTFSTMTSSLLGLVDWLKNANCQCVAMEATGAYWKPIYNLLEMKEMKTLVVNAQHIKAVPGRKTDVKDSEWIADLLRHGLLNGSFIPNREQRELKELVRYRRSIVQERARELNRIQKVLEGANIKLASVVSNIDGKSSRDMLDMLIAGCNDVDLIADKAQMRMRRKIPQIKEALYGFMGEHQRILLGLMLKHIDTLEEQVLSLDQQIREKMKPVNEQVTIADSIPGVGERSAQVLIAEIGINMNQFPSSSNLASWVGICPGNNESAGKRKNGKTRKGNDILRTTLIECAKSAAHQKNTYLSSQFSRIAARRGKNRAAVAVAHSILTALYYMLKNNTVYKELGADFFDAGRKADIVKKSVKRLQTLGFSVTIEQSSAACYSNLVPS

SEQ ID NO: 52039 - protein, 495 aa, unidentified
MAVDLEREKVAKARTPLERLQEFLQTGPDLAINSSKESYMPKPRDKANRVRTVSKQELENLPLLNPDAAAIDIGSAQHLVAVPPGRDTESVRSFGAFTADLHALARWLKQCRIRSVVMESTGVYWIPAFQILEQYGLEVLLVDARAAKNLPGRKSDVLDCQWLQRLHSFGLLSGCFHPAAEIVPLRAYLRLREELVRAGSQSVQHMQKALFEMNIQLANVISDITGETGLAIIEAILAGERDGKKLAQLKHRRIQASKETIAKSLEGNWRVELLFALQMALDTYQFYQQQIAACDQRIAQALAKLPTRQPAAQSEPASQTDQSLKAQKLTPLQAELIRIAGVDLMRIDGIGEQIAQVILSELGTDLQSNFKSEKHFSSYLGLCPGTKISGGKVLKRKSRKVAHRVATALRLAARSLHSSDSALGANFRRLKARLGAPKAITAMANKLAKLVYRLMVYGKDYFDTGTQRYEQKFRLQQIRRLQKQAKMLNLKLVPV

SEQ ID NO: 52040 - protein, 421 aa, unidentified
MTDEIEWWAGLDWASEKHHVCVLGRTGQMIGECDVPHGGAGLTALSDWLIQRTGGRPQQIAVAIEVPRGPVVEALLERGFQVYAINPKQLDRFRDRFTVAGAKDDSRDAHVLGDSLRTDRQAFRRLAADDPVIIELREWSRMAEDLQQERNRLANRVREQLWRYYPQALQLTDDLAADWFLALWHQAPTPAKAAKLRKTTLERVLQAHRIRRLDATAALRMLREKPLTVAAGATEAATAHIRILAARIRLVNGQLKLVHHKLDELCAKLQQAMERAPGQASEQRDVAILRSLPGIGRINLATLLAEAWEPLRRRDYHALRALSGVAPVTRRSGKSCIVIRRLACNKRLERAVYHWARVATQHDPLSRQRYAQLRRRGRSHGRALRTVGDRLLSVACTLLQRQIFFDPDHSVDKVEQGAAAA

SEQ ID NO: 52041 - protein, 403 aa, unidentified
MFYCGIDIAKRSHEASVIDAEGKPLLDSIPITNTQDGCEKLFSLFGRLNIAQSDIIIGMEATGHYWLAVYEHLTEQGYDVRVINPIQSEAFRKMYIRQTKNDSKDSFIIAQVMRFGQYSETTLSDENIVAMRQLTRFRMALVDNCGDCKRRIIALLDQVFPEYERLFSDTFGVTSKELLLQYPTPEDMLAVSTRKLTNLLNKASHGRFGEQKAKEIRTAAAGSFGVGFAKSAFAFQIRQLVEQLLFLENQIEELDEQISRLLKQTNQVITTIPGIGDTLGAIIISEIGDIHRFDAPGKLVAFAGLDVKVTQSGEFTGTKQKISKRGSPYLRRAIWLAANRAAFCDPILSEYYQSLKARGKHHLTAVGAVSRKLCNIIFTILRENRPYEATPPKKKGEEANDCD

SEQ ID NO: 52042 - protein, 355 aa, unidentified
MTSTKYIGMDVHKESISIAVRNSAGKVVMECVIETKASMILQFIDGLRGDLQVTFEEGTSAAWLYDLLKPHVTKLVVCDPRKNKSMREGNQNDKIDARRLAELLRLDHLTPVYHGEHGLRTLKELVRSYLTITKDLARVMSRVKAIYRSWAIPCTGKQVYAARHRAEWLGKINEPGGHRRAEFYYQQLDALRVLRQEVRRDLLAESKKQKAWKRLCEIPSIGPIRAAVLLGILQTPHRFRTKRPLWNYGGLAIEMHSSADHRRVHGQLERSTKNILVRGLNRNCNHDLKNLFKGAAVVASSKPGPFQEFYTALVAKGMRPEMARLTLARKIATIVLMVWKKGVDFDAQHLKPQTA

SEQ ID NO: 52043 - protein, 469 aa, unidentified
MEKKLFKFSEDLTNVIFYCGMDVHKHEITSCIYAKDRSNIDFIKVNVFQADQNGLKQFYGFVSKYCPVVFAMEATGIYHHVIVQYLEQKRIDSRWNYEIVVSNPADAAGLPGTKKHDKIDAIKLAKYAASGLLKNGKQIIFAMEDLKSLFRMAVKLEKERTMLKNRIRKTLDRAGIRPRGLNLNNEWTKYLIFEFIQQSKALGAFIQHFLQNPTVLLKHRNSVLKNIDKFEGFYELCLTSVQRALIRQHLVDLDFKTSRKTILALEVDKLLLDCPRLRQQAFQLSTIPGISAFSAVWILAEIGSISYFSSWRKFRSYCGCCPNVVSSAGKVYSAHTNRHSNKYLRTLFYNAAIVVCNFVKSNSDLKTYATRILTRKGERSKKLAYCIIAGKIAKIVFASLRDQTQFAPKSPYPSITFESGFNVLELKDIRRARNLLRRVGNLKHLGLLGEDALLLAEGLDQAIGKKYGG

SEQ ID NO: 52044 - protein, 453 aa, unidentified
MPNERSRSKPSGLPIIHPFAAGIDIGSRFHVAAVSPDLCDEPVQTFQAFTSDLERMASWLVATGTKTVVMESTGVYWVAAFEVLESHGLEVILANAREARAVPGRKSDVNDAQWLQRLHACGLLRASFRPGRDIAELRAYLRAREKHTDYAAAHIQHMQKALTFMNIQLHHVISTITGATGMKIIRAIVAGERNPDTLAAMRDVRCKESLETIRSALVGNYQPEHVFALKQALALYDFYQQCIDECDAEIERTVAGLNIGKTTPDAPLPKAKHRSKLPSDPKFDARSALYKLTGTDLTQIHGVGPFLALRFIGECGTDFSRWRSAKHFTSWLTLSPGCKISGGKVLSAHTRKTSSRLTVAIRLAAVTVGRSNTALGAFYRRLAGRIGTAKAVTATARKIAVLFYNAMRYGMDYRDPGADHYEQQYRDRVIKQLHRRAAQFGFALQKQESTANV

SEQ ID NO: 52045 - protein, 414 aa, unidentified
MRIVYQNVAGLDVHKKVVVAAIIVQRADGSWYQERRSFETMTVNLLALSDWLQSHGVTHVAMESTGEYWKPIFNILENNFEIILVNAQHVSKVPGRKTDQSDAEWLAELMQYGLLKASFIPPLGQRELRELTRYRSSFVRERSNLMNRVQKVLESANIKLGSVVSDIMGISSRSMLEAIIDGQASPTEIAELAKGRMREKREALAKALEGRVKAHHRFVLTELLCQIDSLEETISRLDQEIEEYCRPFKAAVVVLDTIPGIACATAETIVSEIGTDMSRFPSADHLAAWAGMAPGNNESAGKRRSGKTRKGNKALGAALTQAAQAAAHTKNTYLAAQFQRIAARRGKKRAIIAVAHSILIMAYHMIQRNQTYQELGGNYFDKKDVEKVSQRLVGRLEKLGFEVSLQPSSTSATP

SEQ ID NO: 52046 - protein, 338 aa, unidentified
MTYGAIDLHTRYSQIRIVDAEGRVVRDQKIRTTAEQLVAAFAGHGPMRILVESSTESEWVAQALEAAGHTVIVADPNYAPMYGEVRRKVKTDRRDVAALAEANRRGWYRAVHRVSAAQRGRRQVLRSRRQLVQMRSGTISLIRTLLRQNGYRLPRCSAAAVPDRVAALVIPGAMQTTLAPLMRVVRLVSEEIATLDRDLAAAATSDPIVRRLMTVPGVGPVVALTFRAFVDEVRRFTTAAQVSAAIGLVPREDSSAERRHRGHITKAGPRELRSLLVQAAWVCWRRAKMSGTLKAWTEHLAARRGRRIAVVALARRLSRILYALWRDETEFRAATLAA

SEQ ID NO: 52047 - protein, 341 aa, unidentified
MNVLYYIGLDIHKKTIAYCIKKIDGTLIREGTVVAERKALSKWLSELPGPWCGAMESTIFTGWVYDFLMPYAVDLKVAHPAMLKAITTAKKKNDRADAEKIADLLRVNLLPECHMMPEALRELRRVLRYRNMIVSAAVKMKNKMSGLLMEVGAIYDKKRLHGKKYFGALLERVEDVPDSVKELLKMSRNGFEVFNDIQKKLVTALRKNKLIRERVQRLMSIPGIGELTALTWVLEIGDVSRFSSSRQAISYCGLCSGQHESAGKEQRGPISKKRNKHLQTKLIEAAKLAPHWNPQLALLHEKELARGNKNRATIVVARKLVEYMLAVDRRGTDFESLHEAV

SEQ ID NO: 52048 - protein, 415 aa, unidentified
MNNTISDIDTDLTAVSEVEGNAVQAEAQPAQNESDETYAQAVQEKLALARSRANCRYIGIDLHSNNIWLSVIVNEQRPSGPVGKVIFSRSIGTQRVDGTLPEDLIKPVLERFCKDQPHIACVEATYNWYWLADLFEKNGWNLVLADPSTVSEAKTKAADDRKDAEYLADRLRYNALRYAVIMPKQLREIRDLVRTRGTAVEQRAREKIIVINKLTNLIGRKITGKELKELIKEHAEFGTQAPMLLNWGLTEEVRCILNYHLAMATNIDQEIQKLEEHINAVGKNLRYTKELQKMPGCGPVISSILASEIGSIRRFATAANFVSYCRLASTSKLSNGKSKGLGNAKNGNAYLSWAFTELATLMVRYSEAAKRHFEKLMRKYGQLRVKAIRVLAAKLARSVYQCLSKNEPFDVLRCF

SEQ ID NO: 52049 - protein, 344 aa, unidentified
MTTIDYIGFDIHKKTISFCAKAQDGRILDEGTIAAQRGDLKAWAKERPRPWVGAMEATLFTGWIYDYLKPLAQELKVAHPPMLKAIAASKKKNDQVDARKIADLLRCDLLPECYMAPSPVRAMRRVLRYRNLVVRQATRMKNRIAGLLMETGTPYAKQRLHGKAYFGELLGSLRQMPDAVVELLKLSRGQLELFESIQRRLLRELRERPELSQRVERLQSIPSVGEILSLTWALEIGEVSRFSSIGEACSYCGLTSAERNSAGVEQRGPISKQRNKHLQTILIEAAKLAPRFNPQLAAVHERELQRGNRNRATLAVARKLVAYLMAVDKSGKPFQLRASEGGQA

SEQ ID NO: 52050 - protein, 412 aa, unidentified
MEPIYTSCSGLDVHSKSVQACVRQTERDGRIHQEVLSFGTMTRDILAMADWLSSKGVTHVAMESTGVYWKPIYNILEGRFNILLVNARHIKNVPGRKSDVMDCQWLAQLLQCGLLKGSFIPDRPQRELRDLTRHRAQLVNEKTAVANRIHKVLEDANIKLGVVATDVLGKSGRDMIRSLIQGDKDPEAMADLARKQLRDKIPDLCRALEGHVTDHHRFILSELMNHLEYLEGQIERFSRRIEEISGPFEEALREITLLPGFEQRSAENVVAEIGTQMAPFPSAEHLSSWAGMSPGSNESAGKNKSGRTNKGSRWLRTALTQAAWAASRKKGSYFQAQYRRLAGRRGKKRALIAVGHSLLVVIYHVLKTHTAYKDLGENYFDNLNSKRLVPYLVKRLQNIGYEVNLIPCQKAA

SEQ ID NO: 52051 - protein, 339 aa, unidentified
MNLYAGLDLHSSNTFIGVLDPQFNRIFKKRVSNDLDLILKSLEPFRDRLKGIVVESTYNWYWLVDGLMDSGYACVHLANPCAIKQYEGLKHSDDQHDAFFLAQLLILGILPQGYIYPKETRPVRDLVRKRLFLVQQKTAHILSLQSLLARCCGQRVSSNQLRKVTGHDLRQWLKEEHLVLSGQANLDNIVFLKQQIGRLEEAIQKQVKLSDAFNCLLTVPGIGKILAMTIMLEVGDIRRFATVGNFASYCRCVSTQRLSDGKSKDSGNRKNGNRYLSWAFTEAAQMARRFNSRFRSYFDRKAAQTNSILATRALSNKLARVCYYIMRDQVEFREESVSH

SEQ ID NO: 52052 - protein, 364 aa, unidentified
MEEPTHIGLDVHKETIAVAVLRPGTVECDERVIPNTPEALRRLLSRYPDGAALRTCYEAGPTGYDTQRLITSLGISCDVIAPSLIPRRSGARVKTDRADARNLARLHRAGELVAVRVPTPAEEALRDLVRAREDLKNDRRIARQRIRSFLLRYGKRYPARGSRWSFRFEVWLRALRFSEPASQAAFEHLLGAYFMRDSQLGAVDKQIAELALAEPLAGAVARLRAFRGIDTLTAVTLLTETCDFRRFGSAGSFMAFTGLVPSEHSSGQSRHQGSITKTGNAHLRRVLVEAAWAYRYAPAVRGKLRGRQIGQPPEVVAYSWAAQCRLHGTYRRLAAKKGPNKAVVAVARELSGFVWGAMSDRMAV

SEQ ID NO: 52053 - protein, 426 aa, unidentified
MKITHSAKKINLNQVVDVSVDVHKETLNYFFVIDDREYYDEGQNRTARIEAKLRKYLEIAKSKGRKNLRIICEPTGQYQNSLQRTARRLGCFTCLVNAESVAKFRVVESNDSSKTDSKDPRVIQTLGRLGKVINHRLLGEDYLMLRKLGKIVEELERECTRARCKLDRLLVELFCDYSFKKDFLYSNSGLALVELYGCNPYRIVEEGYKAFCRAMKKAAPRVKRDSLERLWGDAQSSALNEMPAGYVAVLEDRFYQLMEDYLKQLERKEDVEEQMIEILERLRAEDPLIPPPTPGVISARNLARLLGETGPLSDFGHWRKLMRYFGLNIRMRQSGSYYGQNKISKKGRPLGRKVLSQIVLPLVRQNSLYGDFYHRKREVDKMVGNKAMVVVARQFLRKFYGWYKSGQDFDRDRFFKTEAECLKLAA

SEQ ID NO: 52054 - protein, 342 aa, unidentified
MKFTRCGLDIAKRVFQVHGVDEAGVVRVQRMLPRGKVLEYFAQRESCVIGIEACAGSHYWARELGKLGHTVKLMAAQFVQPYRKSGKNDTNDAEAICEAVARPNMRFVPIKSVEQQSVLCWHRARSLAVGQRTAQVNQIRGLLGEFGVVVPQGIGKLREQLPRILEDAENGLGDLARQLLSDLLGQLRHVDEQVEHYERQIRQLARSSAAAERLMAIQGVGPLTASAVVASVGDARVFKNGRQFAAWLGLTPRQHSSGGKSRLGPITKRGDVYLRTLLIHGARSSLTRAAKQQDAKSLWAARLMQRRPLNVAAVALAAKHARIIWALLARDVPYRTCGAEAI

SEQ ID NO: 52055 - protein, 357 aa, unidentified
MNRDKYVGMDVDQSTCVIVIEDKAGNFVMETYLPTKASDLRTFFKGLEGRIHVGFEEGTQAGWLYELIEPQVEEVVVCDRRGEKVRGNKGDRVDAYKLVRQLRQGELRRVYQGERGHRELKELIRGYDYLIQDIVRIKSRLKAAFRSRGISCAGQAVYRKAECEDWLSKIDVDSLRARVSSLYEQLECLTKLRKKAKDAMITGAKKHPSYKLLVKQPGLGAVRSAQILGIVGTPHRFRTKRQFWPYCGLGVVVHESSEYEIVDGQRRRRKRAVRTRGLNKNFNRTLKMVFKGAAKTVIAREPFKQYYQRLIDKNIRPEMAKLTVARKISAITLAILKSREEFDPIRVNQAVSDSGDQ

SEQ ID NO: 52056 - protein, 344 aa, unidentified
MQVTTIGLDIAKNVFQVHAIDTAEKVVVRKQLRRSQVVEFFKALPACLVGMEACATAHYWARELTKLGHLVRLMPAKDVKAYVKRNKNDAADAEAICEAVRRPTMRFVQVKSAEQQGRLMLHRTRDLLMRQRTQLINALRAHLAELGIVAAQGNAGLKELLKIIAGERDARLPVDAHASLVVLAAGLHAVQTMIGSIDKRIMIEHRSNEASKRLRSIPGIGIVGASAIVADPMAFRSGRDFAAWIGLVPRQDSTGGKQKLGPISKQGDRYVRRILVVGAHAVLRYAKQNPEKYPWLTQLLARRPFKVVAVALANKMARVAWALLAKGGTYYRARALVTVVTAAA

SEQ ID NO: 52057 - protein, 368 aa, unidentified
MSKSVRFVGLDVHKDSIVIAVAEEGREPATVHSEILNDWPSLRKSLRRLGNFERLRCCYEAGPCGFGLYRKMRDAGIDCVVIAPSLVPSQSGSRVKTDRRDAKKLAHFLRSGDLTEIFVPDEEAEALRDLERAREDAKNAERGARHQLGKFLLRHDRRWSKTNWTKEHLQWIGRQEFEHEAQRRVLTDYVKAVEDATARERQLTEDLAEVIKGSRLFPLIKALQAFRGIRLITAVTIAAELVDLKRFGSPRQLMAFLGLVPSEHSSGQSQRRGRITRTGNSHVRRILIEAAWSYHFQPRMSRAIRQRNEGVAPGVQRLAWKAQKRLHHRLYYLISKGKRREKAITAVARELAGFIWAVGQETELLAKT

SEQ ID NO: 52058 - protein, 348 aa, unidentified
MMLHAIDLHKAVLQIASMRADGDQVIRTARLPASPQALRAYLAQWPASRHHVVVEATGSWYWIADFCRAHQVQLTLAHPWKLRAITGAKVKTDPMDAETLLTMLRLGLVPKAHQVSPERRESRDLMRLRLRLVNKRVSCLNSIARLLEKFNLDSVEALPELVRLQVPFHQEQIATLQRQIRQIEKTLHRRVIPHEDVQRLLRVPGIGRINALAIHLEIDDIGRFPSERHFFSYARLVPGADNSAHSVRSKRSRAGNRYLKLAFSHAAVRAIQVYPEIREAYRKRLRKKGKPLAQAWVRKELARIVYHLLKERRDFAGEFRGRKLSRTKQPQWPQRARPSQRPAVPSAS

SEQ ID NO: 52059 - protein, 321 aa, unidentified
MTTSEVFIGIDVARDSLEVASRPAGEQWQAANNPAGIAILLERLRTLRPTLIVFEATGGLELPLLAAIGSAGLPVVAVNPRQVRDFAKAIGKLAKTDAIDARVLAHFADAVRPAVRPLPDAATQALGALVTRRRQLVEMLTAEENRHKTAPNAIRSDIQAHIAWLRKRLKGVDKELSQAVRSSPLWREQEDVLRSVPCIGPVVSVTLLADLPELGTLDRKQIVALVGLAPLNRDSGTLRGKRTIWGGRATVRAALYMAALVGSRRNPILRALYTRLVAAGKTKKVALTACMRKLLTILNALLKHRTRWAPPAPAADVPGIV

SEQ ID NO: 52060 - protein, 337 aa, unidentified
MAFLMEETGECGEQELNHSDGEAERFYRELKLRGVSVRVGMEATGYSRWFERLLAELRFEVWIGDAAEIKRLRVRKQKTDREDARLMRKLLLENRFPRIWVPSPENRDLRQLLWHRHRLVQMRTRIMNQLQAVAMNEGYRWKKKLFSAQGRALLEKLSLAPWASRRRKELLELLDQLDPKIAELTAAVEQEAQQRPEVLRLMTHPGVGPITGLAYVQVIGTPDRFPCGKQIGSYTGLIPCEDSSAGKQRLGHLSKQGNTLLRYLLGEAAQAAARCNPDWRRRYVHLAMRRHKNIAKAAMARKLAVRLYWMWRNGWDYSQLVEFGSHAGKLATGHGVK

SEQ ID NO: 52061 - protein, 341 aa, unidentified
MDIVVLGIDLGKNSCSLAGLDASGRVILRRRMRRSSVESFVKGLGRCIVAMEACCGAHHLGRVFAAQGHETRLMSPEYVRPYVKAQKNDELDAEVIAEAATRPTMRFVAVKSQYQSDVQALHRARERLVSERTALINHLRALLLERGIVAPQGRRKLQEELAVFADEDGIEALSPRIRLLIEDLRSEWRALDERIAAFDVEFVRMAREDEAVRRLTTIPGIGTINATALAAAVGNARAFRRGRDMAAWLGLTPRQMTTGGKPRLLGISKRGNRYLRKNLIHGARAVLPYLVERETPLGRWARGLLARAHKNVVVVALANKLARIAWAVLARGRTYEAAAAA

SEQ ID NO: 52062 - protein, 346 aa, unidentified
MDQISRIGMDTSKHIFQLHGVNAAEAPVLRKKLRRKEMVTFFENLAPTEISIEACGGSHHWARLLQSFGHRVRLIPPQLVKPYVKRGKNDAADAEALCEAMSRPMMRFVPVKSTEQQAALMLVGVRDRLVRNRTQLANAIRGYAAEFGLSAAKGRAHLVPLLERIEADESLPGLARELFAIQAEEYKQLQAQIAAVDVKLTAWHRADECSQRLAKIPSVGPIGAVLLRMKTPDPALFRSGRQFAAWLGLTPKDHSTAGKVRLGVITRAGDEVLRSVLVVGATAVIQHARRHGKGSPWLIALLKRKSPKVAAVALANRTARIAWKMMLTGEPYAERSASTVLAGALR

SEQ ID NO: 52063 - protein, 407 aa, unidentified
MRPIYGRCCGLDVHKKTVVACRLTPEGSQTRAFGTMTTDLIQLREWLLAGGVTHVAMESTGVYWKPVFNLLENHGMELLVVNARHVKAVPGRKTDVKDAEWLAELLQHGLLKASFIPDRESRERRELVRYRRSLVEQRAHLVQRIQKLLEGANIKLGDVASDVMGVSGRAMLQALAQGVDDPAAIAGMAKTGLRNKIPELERALTGSVGHHQRFLLRSQFRLLESIEAEIARLDEEVAERMRPFQAALERLDEIPGIGRRAAEQILVQTGTDMRRFPTSAHFASWARVCPGNNESAGKRQYASIGGGNRWLRNALLEAAWTVSHSRKQTFFTARYRRIASRRGKKRAAIATAHSLLIAVYHVLRDGVVFQDLGPAHFERRNVDAIVRRSLHRLEVLGYKVTLEAMPA

SEQ ID NO: 52064 - protein, 368 aa, unidentified
MGRKSSKLFVGMDVHKELIDITLAEEGGEVRHYGRIGGEQSALIRTVRKLESLGKSLVFVYEAGPCGFWIYRLLQERGHECWVVAPSNTPRRVRDRIKTDRRDSWKLAGLARAGELTPIYVPDAADEAMRDLVRAREDAVATQRQARHRLAALLLRNDIRYCGKTAWTEAHRRWIARLHLPGAAQRIAFEEYVLTVNAATASVQRLTDSMEQELVHWRWQPVVHALQACRGIQLIHAVRLVAEVGDLSRFSHPRQLMAYLGLIPSEDSSGERRHQGPITKAGNRSARRALVEAAWAYRHHAAVSPIIVRRQTGLAKPVLDIAWKAQLRLCARFRRLSARGINRNKIVVAIARELAGFVWAIGQRVKLS

SEQ ID NO: 52065 - protein, 390 aa, unidentified
MYLIGIDISKFKHDCFIATETGQVVKSSFSFDNNQQGFSELLNVLLSLDHSQEIRIGLEATGHYGTNLKLFLHEHNFSFMEFNPILSDRFRQVSTLRKTKNDKIDAKLISQMLLSFDYKPNSLLSYHISKLKSLTRFRKRLVKDCTIYKERLINILDLVFPEFSNYFAQVWGKVSLYILKNYPTIHDIANINVESVLPTIKSLSRGHYSMPKLIKLIEAAKVSIGCKNDSHTLELKLTINLIEQMNCAVENVESEITNIMNQYNFKTATIPGIGIISAASIVSEFNGFSNFNNSNQLLSFAGLEPSIYESGTQTTYGHLVKRGSSYLRETLMNVAPFVMNYNNIFYQYYLKKRNEGKHHRVALTHLVKKLLRIIYYLETNEVSFDSSQLK

SEQ ID NO: 52066 - protein, 393 aa, unidentified
MTTIIGVDIGKDFHQATILDPGGEVLGGTIKFDNSAQGFVKFLSHLERLISDKESCLVALEATGHYWLPLYLYLLDKGYKVQVFNPYQSDALRKVFLGRAKTDKLDAELVARLARVGTQKATPLPGEELLSLRNLSRFRSELVFQSSDTKRRLIFLLDLIFPEFEKLFSNVFGKTALKLLSDYPTPEEILELDEEKLIKLLKDTSRGRLGEATAKKLQTLAKSSVGISFGQKSLVFELKLLLEQLKFLKVQLKDLEIEITQILSKTDQKLTTIPGVGPMIASAILGEIGDIKRFPNVPSLIAYAGLDPTTFESGSSISKKGKLSKKGSKYLRTALWQGAVYSLVHNPFLRAYYDKKLSEGKPKQVALGAVTNKLTRIIYGILRSGTDYQPDLS

SEQ ID NO: 52067 - protein, 415 aa, unidentified
MRQTHVLVAVDVGMQRHRVAVAVPGDALACEFDLDHTPEGFAAFFREVEAHTQGGAIPVAVAMEGYNGHARPLDRQVLARGWRLFNVNNLKLARYKEIFPGPAKSDPIDTRKMLELFSLHEQVPLAKDVLCEVAVVPEAHAQLQRLTRRRRVLVNEKVRGVNRMQSDLHAVCPGLAEITGAVDNLWFLRLLTCRDDLTKLARLQRSSLLKIRGIGVKYAAIIQTWQRRAQFAPEAAYVGPMIVADARRILELIEQIEALEAACAPIAEGSELAGRIDSIPGFGPIASAELAGEIGTLERFPTEASLALYVGMACLSQQSGQRSRGRAPRQVNRRAKAALMIALARHIEQVPQSKAYYDRKRAEGKRHNQALRALGRHLIRVLWAMARDQRNYDIQSPAQLPETAHAHEPKHTLAA

SEQ ID NO: 52068 - protein, 440 aa, unidentified
MSETQKGMKIALSFKVQTNNKLRAMEKKECIEFEQVVERGCGMDVHKETVVVTIQGKGIKTVTKSYSTFTSSLIKLREWLKKHGISHIAMESTGVYWKPVFNVLGDDFVILLVNARHVKNVPGHKTDKKDSRWLAKLLLSGLLKGSFIPERPFRELRDLTRYRKKLVQQVTAEKNRFMKILEDANIKLSSVLSQVFGASGTKMINHILSCDNYRPEELMQYVHGKIKASREEIKEALTGYITDHHKFMMRTILGNIAKIESTISEIDEQLDIVLKPYKLEKELLETIPGVGPGVAIGIIAEISTDMDNFPDQKHLASWAGMSPGSNESAGKNKSGRTTHGNKHLRGLLTEGGWAAARTKNTYFSSKYKSLVGRRGKKKAIIALGHKILIAAYFIIKDKVEYKELGEDYLNNFRKDKLIAYYKKQIERLDPNLEFDKQGVA

SEQ ID NO: 52069 - protein, 401 aa, unidentified
MTATHNTNCTASNAHMLYLALELGVTNWKPAFTVGLGQKPRLKTITARSTLSLVFEIKAAKKRFGLPEDAPVVCCYEAGRDGFWLHRFLLDQGVSNQVVDSSSIEVNRRRRRAKSDSLDAVKLMEMLIRWHNGERKVWSTIYVPTVEQEDQRQLHREMLKLKAERTAQGNSIKGLLAGLGLCVIVDETLPTQLQNLPQWDNAKLPPLLHQRLLREFQRWQLIDRQIRELEGERMAKIRDDQTPHVEKVRRLLNLKGIGDNGAWLLVYEFFAWRVIKNRRELASLAGLTPTPYASGESRREQGISKAGNRRVRFMITELAWGWLRYQPESELSQWYMRRFGRGNKRLRKVGIMALARKLLIALWKYVEGGAAPAGAEELGWDNKPRFRAVKSRRKKEVLQTG

SEQ ID NO: 52070 - protein, 345 aa, unidentified
MDHFGGLDVSVKETSICIVDDTGRIVKEVKVASEPAALLKVLGNPTYRFKRIGLEAGPLSQWLFSALAEAELPVICVETRHMQAVLKAQINKTDRNDARGIAQMIRVGLYRPVHVKTLRSQKLRMLLTHRKLLQSKAIAIENDLRGTLRNFGLKVGMVGKVRFEARIQELVENIPDLAVLVEPLLIVRRVLREQIVILHRRLLAIVREDEVCRRLMTTPGVGPVVALTYRATVDVPARFRKSKSLGAVFGLTCSRYQSGEIDWSGKISRCGDEMMRTMLYEAAQSMIHSKKWSWLKAWAMQIARRRGMKKAIVALARRLAVIMHRIWVDGTEFRWTREKAAAAAA

SEQ ID NO: 52071 - protein, 349 aa, unidentified
MSHKSAPPTVSTIGIDLGKNSFHLVGLDQRGAIVWQLKCSRAQLERRLANIPCCLIGMEACCGAHYIARQLAALGHDVRLLPAQYVKPFLKGHKNDYRDAEAIAEAVQRPTMHFVAIKTPEQMDLLALHRVRSRLVGQRTGVTNQIRGFLMERGIIVRQGVVPLRRALPDILSSNTGALSPRIVNLIAELVQDWRRLDERIAAVSADIETLAEQDEACQRVMTVPGVGPIISSAVVAAIGNGAGFTQGRDFGAWLGLVPKQESTGDRTILGKISKRGNKYLRTLFVQAAHVVLARRPSAAMRGLWPWIEQASRRLHRNMLAIALANKLARIAWAVLARGRSYQPRIVAI

SEQ ID NO: 52072 - protein, 347 aa, unidentified
MQIIGCDFHPSYQQIAMVDTATGEMQEGRLEHAQGEARRFYQALPGPVRVGMEAMGNAQWFEQLLAELGHTLWIGDAAQIRRLVVRQQKTDRRDAQHLLELLLDGRFPRLWVPSPAMRDVRQLLRHRQKLVEMRTQVKNQLQHLALNQGVRRKRRLWSGEGRSVLEKLPLQGWTARRRADLLAMLDRLQTQVGELDEAVRAEAERRPDVRLLMTHPGVGPVVGLAYVLTIGPTARFQRGKQVASYLGLIPREHSSGGRQQLGAISKQGNTMMRTLLVEAAQTASRFDEELRRDYRRLAARKHKALAKVMVARKLAVRMYWMLRENQPYPLRPVARMQGSPGHSVVAG

SEQ ID NO: 52073 - protein, 363 aa, unidentified
MNSVYHTELSSHEGTRRQFNGGKADIKLGIDVHQDFYVVVEQVDGSNPKPPQRFQKQAFLHWATKLKQSGAEVYAVYEACGFGFTLQRQLSELGIHCYVVCPQKLDEQNRRVKTDGLDAKALCLKLDRFVEGNRHALALVRVPSEEEEQARALHRQREQLVNVRKVLEAQGRSLLVNHGMEPVQGWWKKRAFATLAAPEWIKELLGNSQPVVLLLQEKIDQLTRQLQNAANAEPPRGLGKMTSVIIDREIGDWDRFNNRRQIASYTGLCPGEYSSGNTRLQSCVTKHGNPRLRAALVELAWRLVRFQPNYKPVRKWRQILAKGALATGAARKKAIVAVARQLAVDLWRIKTGRLRAEELGLIN

SEQ ID NO: 52074 - protein, 343 aa, unidentified
MEYYAGIDVSLESSSLCVVDATGRIVRESKVASEPEALIAWLQSLGFDLARIGLEAGPLSQWLYAGLKQAGLAAELLETRHVRNAFKIMPVKTDRKDARGIAQLMRMGWFRSVHCKSLPAQETRSLLGARKLLQGKLHDIELSLRGTLRGFGLKVGKTTPETFEARIRTLVADHPTLTLIAEALLRARAVLLDEFIKLDKKVHALARQDPRARLLTTAPGVGSMVALTYAAAIDDPARFKSSKTVGALFGLTPKKYQSGETDITGRISKTGDAAVRTALYEAANIILERPVKGGWLKAWALGVAKRAGMRKAKVALARKLAVVRHRMLVDGTPFDLNRVTATA

SEQ ID NO: 52075 - protein, 331 aa, unidentified
MIFSTIIGIDVSKLTLDLHVLPNNQDCQTKNDEKGFKEIVKWLAKVGQIDLSATLFSFENTGFYSYKLSLWLQDKGYRFVMLSGLELKRSLGISRGKSDEIDARKIAEYTFLRRDSITQTILPEQGIIRMKRLLSLRNKLIRQRSGFMATLREAKRAFSRKEDTLYYKIQEDLLKKLSIQIERIEKELHQIIENNSTLKEQYHLILSIKGAGPIAAFTFIAITHGFQKFQTWRKFACYAGIAPFPYRSGTSIIGRNKVSHLANKKIKSLLSNMAVSAVQHNTELKLYYNRRLDDGKNKSSTLNIIKNKLVARIFAVIERGTPYVNTAKFAA

SEQ ID NO: 52076 - protein, 404 aa, unidentified
MEVVLERCAGLDVHKKTVVACAITPAGKETRTFGTMTDDLRRLGDWLQERRISEAAMESSGVYWQPVFNVLEEMGLVLLVANARHIKAVPGRKTDVKDAEWIAELLRHGLLRPSFIPDRAQRELRELTRHRRSLIQERSQVRNRIQKLLEGANLKLTGVITDVAGVSGRAILTALASGMTEPERLADLAHGSVQHKREELVRALSGAMGDHQRLLLQSLLRQLDFLDAEIAALSEEVAARTVPFQEAIDRLDAVPGIGRRNAEDILAEIGTDMSRFPSAAHLASWARLCPANHESAGKRRAVSTGHGNRWLRSSLTQAAQAAAHKRDSYFRAQYQRLSARRGKKRAAIALAHTLLVVIYHLLAQPQPYRDLGALYFDERTQQATINAAVRRIERLGYKVTLEAA

SEQ ID NO: 52077 - protein, 353 aa, unidentified
MVIIGIDPHSTTHVAAAVDEHGQLLGSIQVGASPQQLQGLAGWVGGFQGPRLVAVEGARGYGLALTRVLLAAGERVVDVAPALTAAGRRRGRARGKDDRIDAIAVARLARQEPGLPALSLVGLNADLKLLVDARDQLVVEAGRVRNRLHALLLVLAPGYRTSTGALAKRPALRRARRLIERAAPGEAVRARLALAAIARLEALEDECAQLEHEVKTALTPLRPTRLLAICGVGALTAAKLLGETHSVDRFASAAAFAAHTGTAPIPVSSGNTQRHRLSRSGNRQLNRALFTIAMCQARWDPNARAYLARKRSEGKSPAEARRCLKRHLANVVYRAMIADAQALQATPTTNGLT

SEQ ID NO: 52078 - protein, 426 aa, unidentified
MTRDKSTPPEAALVAIDVAKHRNEVLIEQVRGGRRRRMTVLNSRADHDNLIASLLALKRPIIVGMEPTGNYHRVLAHRLIAAGFSVRLISSMALARTREALHNGWDKNDPKDAQVILHMLGIGATMTYQDPLVAGINDLQELSKTHEVVSKAKTEIWHRLLTHYLPLYFPEAERFAGNSRSDWFLAFLERFPTPASVTALAKGAFVAEAWDVVGRKVSKARLLGDIYETACTSAALPVPLDSAAIAMFRLVLAEARSLVRQRDVIEAHAHELLGEHPDYQRLRQVPGIGPIHALTILAEAGDLRRFRHHRQFLKFCGLDLATHQSGQFRGQTRLSKFGNARLRRIWLAAQVAIRQRDNSFRDRFGRHVAKDRENKDLRRKATIAVATKMARVVHALIKTGTDYRPFLEGPVPSGRTPLCRSREGMA

SEQ ID NO: 52079 - protein, 346 aa, unidentified
MKINRVGVDLAKNVFQLHGVDRKGKALWKRRLSRGKWLAVLCDTVDPGTEIGMEACGGAHHWARQLMQRGYPVKIIPPQFVKPFVKSNKNDANDAAAICEAMGRPDMYPVKVKTVEQQDLQAMHRIRDEIKGHRIAKANQIRGLVTEYGLVAPLQLFALRRAIPEWLEDADNGLTFLFRQLLQGLWGDLHVLDQRMAELDKQIAVVAQEDPTAKRLQQLRGVGPLIATALVATFGDGKQYRKGKDMAAALGLTPRQHSSGGKDRLLGISKRGDAYLRCLLVHGARSAVRTAKDKDDRLSRWIIDLQSRRHANVVAVALANKMARMAWAMMTSSADYDPDLAAASVN

SEQ ID NO: 52080 - protein, 346 aa, unidentified
MTTIAVLGIDLGKNSCSLAGQDATGRVVLRRRLRRGSLEGFVSGLGHCVVAMEACCGAHHLGRKFAARGLEVRLMSPEYVRPYVKAHKNDELDAEAIAEAATRPTMRFVSIKSESQSDIQSLHRARERLVSERTALINHLRALLLERGFVAPQGRRKLATALEDLFSGDDRGSLSPRIQALIEDLRVEWRSLDEKIVAFDAEFVRMARDDKAARRLLKIPGIGTLNATALVAAVGDATAFNRGRDMAAWLGLVPRQMTTGGKPRLLGISKRGNRYLRKNLIHGARAALPYLIERDTPLGRWARALLERAHKNVAVVALANKLARIAWAVLAKGNEYDPGFEAPMTA

SEQ ID NO: 52081 - protein, 448 aa, unidentified
MAKKQYPLPEERDTFEPLKGVKSVLNALKNRVRASTDILIAAVDIGKFRNCACFMISNGKVLAGKYYFPNTAKGFEWFLNKVGFYKNRDHCKDIIFGMEPSGQYWKHLYQFLILQGELTVTVSPLAVNRNRETMNVSKDKSDPKDARNIADLIMQGKFYFPVQRDKTVSQLHRFMQLYFRSMNAKSALRNRLRNAVGYVFPELEKYFSNIEAKTMLIILGKYPLPSMITRIPKDQFVKNVARLNPHFSHKRLKEIYDMAKNSVGIVGEDEAVLFEISTLLQDLGVLYSRIAQINEKVHKIVKDRKDYRLLLTLPGVGPITAASIIAEIGDVQHFTSGRQLIKLAGLDIWSEESGTSIHTLKHITKRGRKLLRTIMYQAAVRAIRRGSPLRSFYLRIIANQPEKKKKKKKALIAVACKLLRIIFRMLTEEIAYDGDYDSKLQARYKKAA

SEQ ID NO: 52082 - protein, 348 aa, unidentified
MTLVGCDLHARDQQVAVLDTATGEIQERRLVHDGDSVEQFYTALPGPVTVGIESTGYALWFHALLRRLGHEVIVGDAAKIRAMVVRKTKTDRRDAAHLLDLLRHDRFPTVWLPEPAVRDQRPLLAHRMRLVRMRTMVKNGVHAIALNYRLALGPSLFTRAGVAQLQALSLPPHTACRRSESLELLSWLNTRIKGLDDQIGEAAHAHPEAQRLMTHPGVGPLSALATVLVLGAVTRFPTSKHVVSYVGLAPAIESSAGKHRLGRITQQGNALLRYVLGQAGQAAIKRDPDLNRLYYAVLHRRGRSRAKIAVARKLLVRLYVMLRDQIDYPTFLHRAPAAARRKEMTPTS

SEQ ID NO: 52083 - protein, 415 aa, unidentified
MALKIVYKICCGIDVHKTFVVACIASTNDKGVTSYESHRFSTYTSGLKTLLQWLLNRNCKDVCMESTGKYWIPVYNILENDCSIVLAHPKYVKAIRGKKTDKKDAKWIADLFKHDLVAGSFMPPADIRQLRDLMRYRFKLTCFQSSEKNRLQNCLTVSNIQLGNVVSDTFGKSAQAILDKLLENPADTSFDLEPLVYKSLKKKLPELRDAIDGYITPEQVGKLKVIKAHYESLESRKAELEELILALAAPYQQELAILQTAPGIRSDFTAIGIISEIGTNMEAFPSAKHLCSWAGLTPTNNESAGKKKSVRVSKAGCYIKPLLVQCANAVVTSKKHPEIRNRYLRLKKRRGHKKAIIAIARMLLTALYHMLKNGENYNAELYRKSDLPPADREITVEQAIIIARNQGYKIKSATA

SEQ ID NO: 52084 - protein, 422 aa, unidentified
MLGVGIDWAEAFHLVALGRAEEGVIEVARVEHTPAAVDRLIQQIAGLEPDPAEVRVVIETRHGLLVEHLVDAGYTVLPVNPDLVARRRGPARKKDDAEDARIACLLALDRHAALRPLIPHGEQAGELRAIARDDERAARDQRRLLNRLRQDLISTFPAALVVAADDLGAPTVLKLLQRWPTHQALAAASREELVAFARAARHGWPDHLADKAAAALAGDQFTPRDYLVRAKADTIRLTATQLLAIGAQRRLWERRMGQLLLGAARYGRAKQPRTDQPGQAVPGGKVYLSFPGLGDRLAARVAGEIGDHINQFQSPNALACYAGKAPVTRRSGKSELVVATRLACNRYLADAVQQWAFCSLRTSGWAREFYDAQRARGKHHHAALRALGNRWLEILWHCLTRGVCYHEATHVANRNRALGKAA

SEQ ID NO: 52085 - protein, 348 aa, unidentified
MEINIVGLDLAKRIFQVHAVDAAGHVALRQKLQRSEVEAFFARLPPCLVGLEACSTAHHWARTIRRYGHDVRLVPPAYVKPYVRRGKTDAADAAAICEAVSRPHMRFVPVKSEEQQAALLHHRTRDLLVRQRTMLISALRGHFAEFGIVVPSGHHRVAQLVALLQDDEALDIPALAREGLRSLVGALQQTEDRIEAIEKVLMREHKANTVSRTLATVPGIGPITASAIAATIPDPTLFRSGRDLAAWIGLVPKPHSSGGKEKLGAVSKQGDRYLRRLLTVGATAVMRHLKDKTDRLSAWVRGLLERRPFRLVSLALANKMARIAWAVMTRGEACRPTLPAAPTAPATA

SEQ ID NO: 52086 - protein, 365 aa, unidentified
MKIIYWIGIDDHADKWTIAQYRGDEERPSREFELVPDDKGYRRLFSYLKGVDGEVRIVYEAGPCGYDLYRRLTKAGYKCQVAAPALTPRKPGERVKTNRRDAAKLARYLRSNDLTFIAVPDPDRESLRDLIRSRQSVQKDVGRMRRQIIHLLLRYGYRYRDGQAWTQRFWAWMKKVQLEGTHSRFVLTEMIGELEHRISVLDRYDDQVELASQTAEYQPYLAALRTLRGINTLSAMTILSEMGDLRRFATAPKLMAAVGVVPSEYSTGDKTSRFSITKTGNAHLRRVAVEAAWQYQRRPLLGRTVKARRKDQPKAIVDIAEKCEKRLHARFQRLTSRNKKSTVAVVAVARELLGFIWAIGQIAHP

SEQ ID NO: 52087 - protein, 355 aa, unidentified
MIGTDSHKRTHTVIALDEVGRRLGTKTVRTNSEGHLALVEWSAQFADYDEEGVRFALEDCRHLTRRLESDLLAAGQRVVRVPTRLMAGARRASREPGKSDPIDAEAVALAALRHPDLPVAELDGPAREVKLLSDHRRDLVVQRSRIAAQVRWHLHELDPDLQIPSRGLRRQRLVRDLLVELDRFEGVVARIVRRLLARCQELTTQINELERELRDLVRMLAPSLLEIPGCGVLSAAVILGETAGVHRFRNKDAYARFTGTAPVPVWSGSSRGKVRLNRGGNRSVNCALHMIAVTQARGVGPGQAYIDKQLARGKDRVAALRLLRRRLSDAVFSALRADQSTTARHLVGEPIPMAA

SEQ ID NO: 52088 - protein, 344 aa, unidentified
MSNLDTCGIEVSAKELVVRVRRQEDLEPLRNFTNTPEGHLLILRYLRGAGRVVRVCMESTGLYGLDLALALSGQEGIEVMVANPRAVRHFAHALMQRSKNDRIDTGVLEQFAVHMPFKPWQRPSAAMLGLHAIARRLRELVQIQTAEKNRQHAAGLSAAIPAVVRRDLARSLRAQQRAIERLTRQARKLIAQDPQLTERFALLDSVPGIGETSAVQLLGELGALAPDLDARQWVAYAGLDPREYSSGSSLHKKPRISKAGNRYLRHALFMPALVAVQHDPHLRAFYQHLLAKGKVKMQALVAVMRKLLHALHAMFRTHQPYDGSKLFPLASTPAPEVTHAPVAS

SEQ ID NO: 52089 - protein, 356 aa, unidentified
MKFHQSTTQFNCGIDLHARQMYVCLMDREGKKLVHTNIRNNDFAYFLKLVEPYKHDLTVCCECMFGWYWLADACQAANLTFVLAHALYLKAIHGGKNKNDRIDSEKLAHLLRSNLIPPAYVYPARLRPLRALLRQRTFFVWRRSDLLARLHSHQLAHNRPTLSGANRYNRDPWEQQLLAHEDHPLRQLALQHELALVRHFDTQIIALETQLQRLTREYAARDYTLLQTVPGIGQYLGLTILYEIGDIARFPTVKDFLSYCRLVKGTVASAGKIKGLRGAKLGNPYLRWAFGEAAVIAKRDHQVIGPLAQRLEAKMGGNKFKANTVVAIKLARAVYFMLKNKTGFDAERLTMALARN

SEQ ID NO: 52090 - protein, 458 aa, unidentified
MQLLYRRCAGLDVHEKSVTACIRRRGKGSSDVECEEAVFGTFTQELLRLRKWLRQHGVREVVMESTGVYWIPVWNVLEGRGLHLMLVNPATVRALRGRKTDRIDARRLAEYLQYGLLNGSFVPSRHVRQLRELTRMRVHVQQDRNRVINRIGRLLETVNIKLSAVASNIVGASGEAMLRALAAGVRSPETLANKARGVLRGKIPQLTAALDGRPDAHFEWMLNRLLEKLDWLDEELAGIDQQLDERMSDYADLIRRLDTIPGVDVIVAQAIIAETGTDMTQFPDAAHLASWAGLCPGNAESAGKRFSGRTRKGDRYLRRILVQSAWAAAHTNGCFLQSLFFRIARRRGEKKACVAVAHRIATIIWKIIRDGGIYEEAGADFFDRIRPERTARKLTRRLQRIGFEVEIKRRPIDPVPPDQVVPADICGKCHGWRLGQCIHHNPRPIRKRRPRKPLESQG

SEQ ID NO: 52091 - protein, 342 aa, unidentified
MKITTVGIDLAKNVFQVHGVNEQGKKAFNKQIRRNQMITFFTQLTPCLIGMEACSGAHYWARKLQALGHTVKLMAPQFVKPYVKTNKHDAADAEAVCEAVTRPTMRFVPIKNSEQQAVLSIHRARQGFVKARTAQANQIRGLLAEYGIIIPQGIKNVRKQMPEILEDSNQVLPGLFRQLLERLSEHLKDLNDQVDELDKQIQIWHRESDISKRLACVPGIGPITATALIASIGDARSFKNGRQLAAWLGLVPRQHSSGGKPLLQGISKRGDTYLRTLLIHGGRSVVRVSSAKKLPTYRWLANLEERRNKNIAAVALANKNARIVWALLTQDREYQSNFMAAA

SEQ ID NO: 52092 - protein, 380 aa, unidentified
MASMHDSVRFKTTVYAAIELSKKSWVVAIALPDRDRPSIHRIAGGNLADLIGRLRKAAGEKQRIVVCYEAGYDGFWLARSLAKIGIDCRVLDPASIQVNRRARRVKTDRIDSLALLRALIAIDRGERHVCAVVRVPTVEEEDARRSHRERQRLVRERTGHINRIKGLLFAQGIRGIEPKRRRTRIDFGKLTTAEGRPLAERLRRELEREYQRLELVQSQLRIVEKERDTADAQDPAVERKRELLCALQGVGGASAAILAREVFARPFASRRQLGSYLGLTPSAYDSGSTTRCQGISKAGNSWARRVLIEVAWLWRKYQPGSPLSHWYARKTADQSPRIRRIMLIALARKLAISLWRYVETGLVPDGTVMAKTTPHMAAAA

SEQ ID NO: 52093 - protein, 411 aa, unidentified
MDKVYDKCCGIDLHKKLIVACFKQGNKQEIRDFGATTRELLEMADWLKEGGCEMVAMESTASYWKPLYNILETCGLKAMVVNAQHMKAVPGRKTDVKDAEWIADLLQHGLLTASYIPDKDQRELRELVRYRKSLVGERARELNRLQKMLEGANIKISGTIRDINGKSARNILEHLLSGRQIDSAEYDILYEKKVIAHNLKATKEQIIDDLNGVMSALQKKMMRILLNHLDELNAHIRELDDDIDNFMKPEEKEAAKVIQDIPGIGNTSAQAIISVIGADMSRFPTDAHIASWAGLCPGNNKSANKRKSGKTRKGNGLLRDTLIVCAHSAVKNKSSYFHAQFARISAHRGSKRAYVAVAHSMLVAIYHILKDGVVFRDLGAEYYNQFNRERKINAYLKKLKALGWEVPVVAA

SEQ ID NO: 52094 - protein, 334 aa, unidentified
MENIALIGIDLGKNSFHIHCQDRRGKAVYRKKFTRPKLIEFLATCPATTIAMEACGGSHFMARKLEELGHFPKLISPQFVRPFVKSNKNDFVDAEAICEAASRPSMRFVQPRTESQQAMRALHRVRESLVQDKVKTTNQMHAFLLEFGISVPRGAAVISRLSTILEDNSLPLYLSQLLLKLQQHYHYLVEQIKDLESQLKRKLDEDEIGQRLLSIPCVGTLTASTISTEIGDGKQYASSRDFAAATGLVPRQYSTGGRTTLLGISKRGNKKIRTLLVQCARVFIQKLEHQSGKLADWVRDLLCRKSNFVVTCALANKLARIAWALTARQQTYVA

SEQ ID NO: 52095 - protein, 357 aa, unidentified
MQESLAERRDTPVYLGVDTHSEAHVAVALDGTGRRLGELAVPNDPAGYAHLWAWTLGFGVPVAAGVEGTGSYGSGLSRFLRAKGASVLEVNRTSRQHRRRYGKHDTGDAEAAARAVMAGTASGEPKGADGAAESLRALRVARRSAVKARTQAANQLHALLSTAPDGLREGLRGLPTKHLAGKAARFRCATGTVDPTAATRFAMRSVARRYRVLSEEISELDAHIERLVGDAAPGLVALDGVGPDTAATLLIAAGDNPERLRSEASFAHLCGAAPVQASSGKVVRHRLNPGGNRDANRALHVVVLNRMRRDPRTQGYVARRTAEGKSKKEAMRCLKRYIARETYRAILLDAVARIPPG

SEQ ID NO: 52096 - protein, 325 aa, unidentified
MADFIILGIDISKGWFDVCLLTPTSARFAQFDNDQRGFAALGDWLEPQLTGAATALQACLEATGRYGDELAHWLHEHGHRVSIVNPARVKYYASSSGARHKSDRGDAFLIAHFCLHNDLMAWQPLDEVRQALRAISRQRAALVGMRNQENNRLQAGKLPDTVQTAIKAHLAFIETMIAELDQQGQRLIDEHGDLSAQQQLLTTIQGIGQQTARTLLAEMPPLAALASARSLAAFAGLNPRREESGKGRPYTRLSKAGNAAIRKALYFPAMTAMRHNPPLKAFAERLTERGLAPQQIVAAVMRKLLHYVYGVLKHRQPFDPNYLPC

SEQ ID NO: 52097 - protein, 358 aa, unidentified
MAKLSLTRLEAFVLGFETTAFRVGIDVHKKSYALALLREDGACLTWTGPAKAETLLEPVRRFGLCIKAVVYEAGPTGFSLARRLEAAGLHVMVVAPSRVPRPVRAGAKSDRLDGIKLAEYADNRRARAIAVPTESEEAERSLLRRRHALASGRRRCKQRIKAHLLYLGVSAPEGLDHWSQAAVSALRGLGLKPSARLTLESLLRELDFHNQELRQVEGQLLELLASGAQGERLGYLRSVPGVGFLTAASYMLEVFRPERFNNARQVASYLGLAPMVHHSGDRRPRGKITPVGQSRLRSLLIEASWVWKRHDRYAAKLYNRFFSRMGIAQKAIVAVARRLAIILWRLSLEHRSYRRQPA

SEQ ID NO: 52098 - protein, 354 aa, unidentified
MNIKYIGMDVHKETISIAVMNGDGKLVMESIIETKASSILQCIQGLHGDLHVTFEEGTWAAWLYDLLKPHVTELIVCDPRKNALLKEGNKSDKIDAGKLADLLRGGYLRSVYHGENGLRTLKELARSYLTISKDLTRVMNRVKALYRSWGILCGGQQVYAPRHRAEWLNKIGEAGVHRRAEFFYQQLDALRALRQAVRRDLLAESRKHSATKLLRQIPSIGPIRAALLIALIQTPHRFRTKRQLWTYSGLAIETRDSAQYRYVAGQLQRSKKPQQLRGLNENHNHDMKAIFKSAATMASSREGAFQAFYQGLLRKGMEPAMARLTLARKIATITLILWKKGAHFDAEQLKPQAA

SEQ ID NO: 52099 - protein, 474 aa, unidentified
MARTRSRPASPPVPGDAGAEVTDEPVQVITRAAAIDVAKGSGMVCMRLPHESRAGRRTQKVWEVTAAFAAVVALMDHLVCQGVERLVLESTSDYWRIWCYLAEAAGLEVWLVNARDVKHLPGRSKSDRLDCVWLCKLNEWGMLRRSFVPPEPVRDLRALTRLRANLTHDRVRHQNRIEKILEDALLKVSSVISDLMGGSGRRFLQSLVDGERSPAALAALGDYRLHASKAELAEALTGRFRDIHGFEIGMLLELIDDLSAKITELDERIEAQLENVPGLGGVCTSCGQPGPDGPCTGCGEPVLGVIARLDEITGIGRGAAQVIVAELGTDMTQFPTPGHAASWAKLTPRAIQSGATSKAGRTGKGSPYLRGATGVAVMTAARTETFLGARYRRHARRRGKQKAIVAGSRTIIEIAWRVIADPGFRYIELGPDYHDQLDPGRKTRDKIRQLEKLNPGMTVTLTPRPEPGGQAPAA

SEQ ID NO: 52100 - protein, 452 aa, unidentified
MSNGNGVSRGDRNRNARLTKLRAAVPMRNAIVGIDLAERKQMVVVTDHDSKVLARRTLRCKAWDLGAALDWAAERSTRAGYAGVTVACEPTGHRWRVLGQLAAERGMSFVCVQPMLTSWARKSEDLTTDKTDDKDAVLIARLTAQLRCYLPEPVDETWGRLRHLGVRREQLLNEHVACVQQIRDLLECVWPAAVTTAQQPFKSSTWLAAMSVIMTRDGGDFTRTRRLGPARFEHAVRKELTRRGKIRPCLRILRRLYAALADPAGVIAHRPGAFERIGWLIEDWDTARAKLADTEARMVAVLDDLELTELACSIQGLSPVGAAAILAETGDLRRFTSSRAVVKHAGLAPRERMSGTFAGRARLTGAGRPHLRTAAWRAVWGAVKNNPVYAARYRHLTTRETNKLKPTRAQTVLAGAILRQLHAVITTGHAWDRDIATHGTRRKPTTLTEVAA

SEQ ID NO: 52101 - protein, 368 aa, unidentified
MGLDTIVALDLGKFTSVACVMDAAARTHRFETLDTTPRRLHELFAAHAGADPSRALVVVECCDAAGWVHDLAASLGLAVKVANCRHEAWRWSKVKRKTDKDDALKLAKMTLADELPTVHVPSPHKRQKRRLILHRRSLVGRRTQCKNGIRSIFSQQGLGERLPRGAAAWTKAGVEQLDAEARPLDECGPDDLWRGRLHLELQLLDALHRQILAAERKLDELGRDDARVKLLETVPGVGPRLAETVVNCLDDPRRFKSAAHVGSYAGLVPKQMESGTMKRVGRITRHGSTLLRGMLVEVAWMVWRHNPWAKSFVARVSRGMKLRKKIAIVALARKLLVILWAMLRDNKPWRGGPTMTCPALPGGAAAVT

SEQ ID NO: 52102 - protein, 414 aa, unidentified
MFAVGVDVSNGRSMVAVLGARRSVVVQPHEVPHTADGFAELAARLHALDGEDRIVMEHTGRYYESFAMSMYRAGFFVSAVNPLAIKGYQEGISVRKVKTDKADALKIAQFAIDKWEILPHYTPMDTIRYDLKTLHRQFQLSSKTKTALNNNLIALLEQSYPGANRYFDSPVRPDGSQKWVDFVDTFWHVDCVARVSRKAFVERYQKWCKRPGYNFSEAKAVEIHEDARQRFPLVPKSDTCKLMDREAVAQLNAVSRTVETYRAEMDRLASQLPEYETVMAMTGVGKSMGPQLIAEIGDLRRFAHQKSLVGFAGTDPIKDDSGDKVSDSKPSSKRGSPYLRRTLFVIMTILLQLQPPDDPVYQFLDKKRSEGKPYYVYMTAGMTKFLRIYYGKVRDCLKEKGLWEQPNVDEVNPV

SEQ ID NO: 52103 - protein, 327 aa, unidentified
MLSIGIDVSKGKSTVCGMKPGGEIVYAPFEVQHTREGMSELVSLLRSSGEEVRAVLESTGSYHCPVVAALLENGIFVSVVNSLRMKRFCSQSIRKVKTDRIDAMQIALYGLAYWQELQPTRLPEDTYRELQLLARQYYQMTSMLIKAKVDFNALCDQVLPGMQELMSDHAGRHKLSDFVLQYCHTTHILEMGETRFRKDYCKWAEKKGYRNCERMAALIFATAQNGIPVLPNAPSTQIVITEAIRVLHTVEASRDAILTQMQALAKTLPEYSLVREMPCIGDTLAPRLIAEIGDVRRFHSKRALIAYAGIDAPPYQSGKFRSLPAIE

SEQ ID NO: 52104 - protein, 350 aa, unidentified
MCSLPVFVGLDYHDASVRVCVLDTDGSELANADRRNDWKAIAEFADRFGRPVQAAIESCCGAADLAEELISCAGWSVDLAHPGYVQRMKQNPDKTDCQDAQLVADLERVGYLPRVWLASHYIRELRQVVRYRLQLTEQRRATKLRVRALLREQRRHAPKGLNAWTKAWEHWLRHEAELSEQGHWLVKQHLAELGRLGMQIRQVEKRLERLTAHDVEVQRLQEQRGIGPVTAWTIRAEIGHFDRFRTGKQLARFCGLSPCNASSGQRQADAGLIRAANPALRAVLIEAAHRLMNYDRYWQQFAQRLRAAGKPGSVVAAAVANRWIRRLYHEMKTPSGELAVAVGPAPSEDS

SEQ ID NO: 52105 - protein, 354 aa, unidentified
MSQNLDSAIAVIGIDIGKNSFHIVGLDSRGAIVLRQKWSRGQVEARFANMPPCLIGMEACVGAHHLSRKLKALGHDARLMPAKYVRPYSKGQKNDFRDAEAIAEAVQRPTMKFVATKTADQLDLQALHRVRERLVSQRTGIINQIRAFLLERGIAVRQGQRFLRAELPRILATPPGVLSPRMVRVIEDLASDWRRLDERVDSLSGEIEAVARQDADCERLMSVPGIGPIISSAMVAAIGRGEVFSKGRDFGAWLGLVPKQTSTGDRTILGKISKRGNRYLRVLFVQAAWVVLIKPKSWERHGLKPWIEAAKKRLHPNVLAIALANKLARIAWSVLARGRNFEARTNTNATAQAA

SEQ ID NO: 52106 - protein, 315 aa, unidentified
MNHDVFVGVDVSKARLDVFMSHPAQACAFANDERGVAELVRCLVKAAPTLVLLEATGGLERRLVACLMAVPLPVVVANPRQVRDFAKATGQLAKTDALDAQMLAQFAAVVKPAQRALPEKAALELADQLARRRQIVDMLTMEKNRLQQTHSVGVRKDLAQHIEWLQRQLQGSDGDLRRAVEASPIWSAKRELLLAVKGVGDVTALTLTAGLPELGSLDRKQIAALVGVAPLNRDSGTLRGRRTCWGGRADVRAVLYMATLTAIRWNPVLKTFYERLRHAGKLKKVAIVACMRKLLTILNAMLRDNQSFDPTLHST

SEQ ID NO: 52107 - protein, 458 aa, unidentified
MYRELLPLRQALSTELKANLPPAQPGVDPELLLQSYLDRLTMCVGCDVADQSFTLMALDAAGEDLGHLLHAPNSPLGFEHAWEWLEATRSQHHLRVVLLAIETTGVFYWAWWDFLAGRPNLARVLYNPRTTEHMTEVLSKKVRNDLVDAYALAEQVRLAATPEVVLSEDSELLTARLCSRAARDLAQQINRYKNQLRALLRAYNPALSQVFPGAKLHHPAVYALLQHAIFPDECVQAGVDTVTSILQAHCRSAFAPHHAQQLLTLCRQTLSRDIGRDAIRLRVHQLIDDITTSQQRKTFFNKTGYRLIQHRPQTPLLRAATGAGISNTLALVSEIGDVRRFRSGEHLASFLGLTTSKHISGTTLFVSKHVTKQGSPNARYAAVNVAQHLSQRVPKYQQMYQRIKSRKPPRKGHYIALVAIARDFVTHVLYDMWYSMRPFFLEVDDYRAYRQLNPRSDD

SEQ ID NO: 52108 - protein, 368 aa, unidentified
MSKHSHYKVGCDAHKHFSVFAVLDHRGRVVKRDRVDHEPGAIRTFLCQFPAGTPVALETVGNWYWIVDEIEAAGCVPHLAHAAKAKGMMGYVHKTDKLDAEGLGTLLHNGTLPSVWIPPSELRDERELPRTRMAFSKIRTKLKNRIHATLAKYALSLDTDSDIFAAKWRPQLLALVSRVPAETQRCMQQELELLDQVQEQIHRLEARILERVRVTRTIQLIQSVPGPAEILSIVIDREVGSIDRFSCPKHFAGYAGTVPKTKSSAGKTHYGRMIKQANNYLKWAFIEAANVVVRQRHHPNWRNKYVVRLYERTRQRKGHAVAVGSIARYIAESTYSVLKKGEPYREPLAEHPAGRRSVVPPRQGRVRA

SEQ ID NO: 52109 - protein, 437 aa, unidentified
MSDQKALELRVSVDVGYRRHSVAIGLPSGEVLEEFEIAHRPEGFEEFFSRIEKHHKARRCGVAVAMEGYNGCARPLDRMVRRRGYRLYNINNLKLARFKEIFPGAAKSDRIDARKGLELFQLSDHLPLAKEVLQEVKGTPQENEVLKRLTRRRRRLVDERIRVISNLQTDLQAVCPGLLEMTKNAGNQWFLNFLVSAQSLPQLARLRPSTLLKIPAVGRKYARLIEDWQKRAHFSEEVEWVSEMIHEDAQRGLELDEKIKALKAKIKEVAKDSKMAKILLSIPGFGTICSAELAGEIGTIERFSKEGSLALYIGMSTLDNSSGKYQGSKQPKHVNTRAKAAMMIALDRHRKYVPESQRYYEKKRSEGKKHNQAIRSLGRHLSRIIYKMLTEGREYEMRPEKGNTKGKVSPRSLIKTQIRKPKISAKGKNNKIYHRSA

SEQ ID NO: 52110 - protein, 345 aa, unidentified
MNVKVLGIDLGKTVFHLIGMDEHGKIVLKKRYSRSQLFKFLANTPVCLIGMEASCGCHHVGRTLSSFGHDVRLIPAQFVKPFVKSQKNDYRDAEAIAEAVQRPTMRFVPIKSEEQLDVQAVHRVRERLLAQRTSLVNQLRAFFLERGLMVRTGRAYLWRALPEVLARAEETVSPRMFRLMQSIVQQWRNLEMQIVELEEEIARVAQADPACQRLQTVPGVGPLAATAIVAAVGNGGAFRKGREFSAWLGLVPHQCSTGGQTKLLGISKRGNEYLRRLFIHGARSVCLHVNRERHAWGGWITELKDRKPSNVATVAMANKLARIAWSVLYRNEVYRSHGSVVPATA

SEQ ID NO: 52111 - protein, 422 aa, unidentified
MLNNRPSVGIDVAKNFCFYAAVSPTCTIFLKPFKTLNTKQGLLFALEQIKKVEEAFSSQPVIVLESTGHYSQRIVHFFLKQGFEVYHINPLISHSIKNSAVRKVKTDQVDALELAKLPFLQTFRPTTLPKEQIANLKVLARTRCNLIEQRITATNQLQTAIEQVAPLFPNVLNPGSLTALTLVNKFPSPAEWSKKSNRKLIMTMLETLPRRGKLYAQQKYEALLSCVQDAEVTGIWITAYFSTIQRYASIVQFLNSEIKLLDNQIGELSSQLPEVALLTSIPGIGDTLAPLLLGEIGDIERFINAKQLVAFSGIDPAVRQSGNYVGTKNKVTKRGSPFIRHALYIAATTSVRKESKGSQVNSVIYDYYTRKIETKTKKQALGAVMNKLIRIIFSVLKNKQPFRLITPDQQVEMYQKVQKKVA

SEQ ID NO: 52112 - protein, 321 aa, unidentified
MAMLETATGEVKVKRLEHESGEAKKFYASLPKGTRVGIEATGATQWFERLMAECGHELWVGDPAEIRARMVRKQKTDTRDALHLLDLLRTDRFPKVWVPSPEERDGRQLLQRRQKLVRMRTAVKNQLHGLAMGQGLCWKQKLWSERGRKQLEALELGPWASRRRRELLKLLDELDPQIRELDEAVKAEAEKRPEVRRLMRLVGVGPVTGLAYVLTLGPVERFGRSRQVVSYLGLNPQEDSSSTHQRFGHITKQGNTRMRWLLVEAGQTAARLDPELRRVYKRLKFRRGANVAKVALARRVAVRMYGVLREAPTAPDGSHVR

SEQ ID NO: 52113 - protein, 432 aa, unidentified
MKHNQSSKQNQRISRISETTLVIGTDIAKHNHVARAFNYRGIELGTRCLFQNDENGLLNLLAWAESIQQEHGLTDVLLGVEPTGHYWFPLFHFLKRRGVEVVLVNPHHVKKSKELDDNSPTKNDIKDAKVVAKLVIDGRYTQPQLPEGVYADLRVLMNQRDRLCGDLNRVKGRIHNWLDRFFPEYRQVFKDWEGKASLITLTHLPLPQDVVAAGETTVVAIWKKNGVKRAVGPKRAELLYRKARKSIGLTEGATAAKHELAMYLEQYAMLCRQIEELMEHVAALVEQIPGACHMMSIPCIGLVTVAGFLAEVGDLSGYDHSQQIVRHAGLSLRENSSGLHKGETTISKRGRCRLRALLYRAALTMVAKNPEFRALHLYFTTRRDNPLKKKQSMIAISSKLIRVMFELGRKQKDYDASKVLGPHREAQFQTAA

SEQ ID NO: 52114 - protein, 361 aa, unidentified
MHATTVAVDLAKSAFQIAVADEHWHVVETQRLTRSQFERWFLNREVGLVVMEACGSAHHWARWLNSLGIEVRLLPAQYVRAYVRRNKTDATDAAALLEAVRASDLRPVRVKSVEQQALQGLHRIRSLWMGTRTSRINALRGFCREFGLAIPQGARTGLEVLGRVLADPNSAVPGLIRDSAKLLLEEVRLLEARIAQVERELANAARHSPACTLLLSVPGIGLLTATAMVAATSGDVTHFQDARHFASWFGLTPREFSSGGTRYLGRISKKGDRYLRMLLTHGARSVLRAATAAVEKGKVLSGVRHWALQVQARSNHNKATCALANKLARICFATLRDHAVFDENDAPAARKARRLSFAVPA

SEQ ID NO: 52115 - protein, 465 aa, unidentified
MPENRKKTDQGDSQMEAEGLPVVRANVAGIDLGSKQHWVCAPKPGGQGREVKSFGATTPELERMAAWLKERNVASVAMESTGVYWIAPHEVLERHGLEVVLVDTRQLARVPGRKKSDPVDCQWIQRLHSCGLLMGAFRPVEQVCMLRTLVRDKAVLVAETGDWLRRMQKSLDQMNVRVHRAVSDIDGVTGMAMVRAIVGGERDARQLAKFRDPHCHQSEEAMAEQLSGHWRADHLFTLEQTLKMYDAIQERIAAYEQEIMRKLAELEREECRGKEAPKLNNPNKAKAIKKRGEEPLRQALYRSGGVDLTGIDAIGVETVLLVQSEYGTDLSMFPTEKQFVSHLTLAPHKPTSGGKPVKKQKKKRGSASSRVAAGLRMAALSLRNSKTALGAHYRHIAARKDGDVAVFALARKLATLIYRLLRWGQPYLDEGAAAYEKRYQEGRLKRLTATAKDLGYQLTPKAVTA

SEQ ID NO: 52116 - protein, 377 aa, unidentified
MHSENIAAYVGLDVHKETLAVAIAAPERLGEVRYYGTINNEAQAVRRLFQKLQGLYGNILSCYEAGPCGFGLYHQLTAMNIKCQVIAPSRIPKSPTDRIKNDHRDAISLARLLRAGELTPVWIPDLTHEAMRDLIRARAAAKRDSRVARQRILSMLLRTDKRYAGKHWTGKHRTWLANQSFSQPSQQIAFQHYCQSLEQIEDRILQLDQEISRLLPEWSLCNLVCQLQALKGVGQLIAITLVAELGDFSRFSNPKQLMAFLGLVPGEYSSGNSIRPRGITKVGNSELRRLLYEAAWSYRTPAKVGAWLIYYRPDSVTQYSKDIAWKAQQRLCSRYRTLTAKGKKSQVAITAVARELTGFMWDIALAAQSSFSQQKQN

SEQ ID NO: 52117 - protein, 412 aa, unidentified
MLKIVYPICCGIDVHKTFLVACIATTNDKGVTTYMSRRFSTFTNDLRKLSEWLSSNSCTHVCMESTGKYWIPVYNILETTCKITLAHPKYVKAIRGKKTDKKDAKWIADLFKHDLVAGSFMPPLPIRQLRDLMRYRFKLTNFKSSEKNRIQNCLTVSNIQLANVVSDTFGKSSMRIIDYLLENPDDKDFDFVPLLHASLLDKVDKIRLALDGMITPEQQQKMNIILQHFDGLEKCKSDLESVILSLSEPYAKELALVSTVPGFKNPFSAIAVVSEIGVDMSVFPTSKHACSWAGVTPQNNESAGKKHSVRISRAGVYIKPLLVQCANAVVKSDKHTEIKNRYLSIKKRRGHKRAIIAVARMLLTAIYHVLKKGEPYNPELYKKAETMPQMRNITVEQAILIAQRHGYSVIKV

SEQ ID NO: 52118 - protein, 345 aa, unidentified
MDHFVGLDVSVKETSVCIVDEVGKIVREVKVASEPEALLAVLKKPAYRFKRIGLEAGPLSQWLFGALAEAELPVVCVETRHMQVVLKAQINKTDRNDARGIAQMIRAGLYRPVHVKTLRSQKLRMLLTHRKLLQSKAIAIENDLRGTLRNFGLKVGIAGTVKFEPRIRELVENLPDLAALVEPLLIVRRVLHEQISVLHRRLLAIVRDDAVCRRLMTIPGVGPVVALTYRATIDVPARFKNSKAVGAVFGLTPSKYQSGEINRTGAISKCGDEMMRVMLYEAAQVMLTRTNKWSWLKAWAMKIARQRGMKKAIVALARRLAVIMHRVWVDGTEFRWTRKVVAVAA

SEQ ID NO: 52119 - protein, 400 aa, unidentified
MAEQLTRLWVGIDAGKAHHWLAAVDKTGATIWSKKIANDESAILTALGEILALADQVHWAVDIAGTASALLLALLAAHGQQAVYVPGRTVNRMSGSYRGEAKTDARDAYVIADTARLRRDFTSIRVPAQLAADLALLTGHRTDLIADRVRMLNRLRDVLTGIFPALERAFDYADHKGALILLTRHQTPAAIRRHGQARLTAWLRGRNVRNPDAVATTALQVARTQHVTLPGQDVAAGIIADIATQVLALDDRLKHIDQQIRQTFRTHPQAHIIESLPGMGPILGAEFIVAAGDLSAYADAGHLASAAGLVPVPRDSGRRTGNLHRPKRYSRRLRRVFYLSAQTSIIREGPNRDYYVRKRAEGCKHVQAVIALARRRANVLWALLRDDRPFTLHPPVAQAA

SEQ ID NO: 52120 - protein, 409 aa, unidentified
MKLFVGIDVSSQDMKACVMNFEGEALTALTVDNNLKGASYLKDQIVKIAQSNSISEIQIGMEATSVYSWHPAMFFHEDESLKKFKTTVFTINPKLIKKFKESYVDLDKTDQVDAWIIADRLRFGRLPLTAVMQEQFIALQRLTRMRYHLVHNLTREKQYFLQHLFYKCSSFTTEVDSSVFGNAMLELFLEQYSLDEISSMDLQELADYLQDKGKNRFADAECVAKSIQKAARSSYRLSKCVEDSIDLLLGTSIESIRSITKQIKELDKAIQKLLEGIPNTLQTIPGIGPVYTAGILAEIGQIERFENQASIAKYSGLTWSKHQSGKFQAEETKMIRSGNRFLRYYLVEAANSVQRCEPEFRAYYLKKYREVPKHQHKRALVLTARKLVRLVDALLRNDQVYTPRRKVNN

SEQ ID NO: 52121 - protein, 355 aa, unidentified
MSQTPNTAIAVIGIDIGKNSFHVVGHDARGAIVLRQKWSRGQVEARLANIPPCLIGMEACVGAHHLSRKLASLGHDARLMPAKYVRPYSKGQKNDFNDAEAIAEAVQRPTMKFVATKTAEQLDLQALHRVRERLVSQRTGIINQIRAFMLERGIAVRQGIGFLRTELPTILATRTDALSPRMLRVIEELAGDWRRLDQRIDGLSGEIEALARQDQACSRLMTVPGIGPIISSAMVAAIGTGDVFSKGRDFGAWLGLVPKQISTGDRTILGKISRRGNRYLRVLFVQAAWVVLVRIKNWERYGLKSWIEAAKKRLHHNVLAIALANKLARIAWAVLAKGRAFELTRTDDAGVVQPA

SEQ ID NO: 52122 - protein, 384 aa, unidentified
MLDREQIQTNLPEVAVFVTLELSKSAWLLAAQAVPSGKTSAHRVSGGDVEGLLALLRRLQAREQRSSGREVAIILGYEAGYDGFWLQRRLAAEAITCFVMDPGSLQVDRRARRAKTDRLDAAMLLRALMAWCRGDHAACRMVQVPSVEREDARRTHRERQRLIAERVQHVNRIKGLLATQGVYTFQPLRRDRWERLKEVRTGDGRDLPQRLRGEIEREFRRLELVLEQVAAAEAERDAAVADPAVTDADAEKVARLARLGGIGTELATVLVREALYRPFANRKQVAAYAGLTPSPYASGDRQRDQGISKAGNPLLRKSMVELAWLWLRYQPGSGLARWFVERVGTGRGRIRKITAVALARKLLVALWRYLATGLVPEGARLKAA

SEQ ID NO: 52123 - protein, 410 aa, unidentified
MSVLGVALDPATVIVAVDPGKVSNRVWVSDGCGLLVDPVSLPVAREGVSRLERLLEEHGAVDPVIAIEATGSLHRSWVAEMERRHPGSVRLFAPSETKAARIQLGSGRFKTDDRDCAALTYLARQGAGRLHAEESAVDALRAAVRHRRGLVADRRVAQQRMHDQLNALCPGLSAPAGHGRSLPLDSPTGLAVLACATAFAGRPPRLQSLTCRAPGRLTTSTAQFWVQRWRGCLPPPADADQRARRLGRDLERYRRLQIDIAAVDEEIAVLLAATTGQILTTLPGVGATRAAAFAAHSLPIERFPDAEHLYSATGLAPALYQSATLHRRGRISRQGLAEHRDALMGIAWGLSQRSPSFAERDAELRARGMAPIQARVALARHACRLAYRLLRTQQPFDEQRYRRGRLGRER

SEQ ID NO: 52124 - protein, 427 aa, unidentified
MSEAESVKQEPQFAAFIGIDWADKKHVWCLQSVGSEKRESAELEHTPEAVEAWVGQLCQRFANRPIAVAVEQSRGALVFMLSKYEPLHLFPVPSTMAANMREALYPSGAKDDPRDADLLLDLLLQHRDKLRRLSPDTEATRRVQNLVEERRKLVDEKTEQTNRLMSHLKIYFPQMLDWFERLDTELVCALLERWPTLEELQKVPPAKLRAFFQKYHCRDQELIERRIVAIRQAIPAIRDRAVIEAKSTVVKVSVQVIRSLVEGIANLDEKVEEAAAAHPDFFIFDSLPGAGQTLAPRLLAAFGSQRERYSSAREVQSYSGIAPVMESSGKKKWVHFRWACPKFLRQSFHEWAGHSIVSSVWARSYYQQLRSRGKGHHAAVRALAFKWIRVVFRCWKDGVAYDESKYLASLARRGSPLSAIVATGKTL

SEQ ID NO: 52125 - protein, 353 aa, unidentified
MKSKTQSNTASLAAIGIDIGKEVFHIVGLSDDGKIAFRQKIRRLALKDVFEKLPLSIIGMEACLSAHFVSRTLRALGHEPRIIPALYVKPFMKGQKNDYNDAEAIAEAALRPNLRVVQEKSQDQLDLQACHRVRSRLVSRRTAAINQIRAFFIEQGIAVRAGPRALRNSLFAILENRKDEISPRMASLILGLYDDWCRLDERIETVTSEIEELSQRETTCRRLMSIPGVGPLISTGVVAAIGTGEAFDRGRDFAAWLGLVPRQYSTGGRSILGRISKRGSKYLRMLLIQAARVLLMRPHNWSRYSFGAWLKTASERLHRNKLAVALANKLARIAWGVLRHGKAFDTHLETAAI

SEQ ID NO: 52126 - protein, 415 aa, unidentified
MQALYRCIAGMDVHRMLYVVTILVELADGTEEKHQRSFGGFKRDRRALVAWLVELGVELVVMESTGIYWKSIYSTLEKAGIPAHVVNARHVKNVPGRKTDLSDSEWLARLGRYGLVKPSFIPPEDLRELRVVSRYRDKVAQTLAGEKNRLHKVLDDAGIKLGAVVSDIHGVSAQAMIDGLIDGTPIEQLPDLAKGTLREKHELLELSLDGELTPRHLFVLKNIREHIRYLESELASLDAYLIDAMAPYADYWRFLQTLPGLDQISAAMILVEIGTDLKAFDNVQHFASWAALCPGNHESAGKRKTGRIRKGNHMIRHLLCEAANAARRTHSVFRSFYQSLVPRKGHKKAIVAVAHQLLRTIYMLFTRRQAYRDPGIDYQAMVVNRNAPRWIRALKKYGFWPKISTLNAPIAAPVH

SEQ ID NO: 52127 - protein, 405 aa, unidentified
MYFIGIDWSSSFNDISILDHTGEFIKHFRADVTSSGFACIQTELNLLSEDHSDFCIGIETHKNILADYFITAEYTVYSLNPLCVKRFKESQSPTPKKNDKYDSFIIAFMLFRDKEKFKPVLKSGYDSELLKNLCGIINDLTLQRSRLINALRSNLMLYFPAFSEFFTAMDSTVALNILKHFPSPDAFLSAEKSDSINIIKSIKYLSAQRFEKIYEFMKENALNIKTASFTACARKSVMLADQILLLNHQIAELDKDIKKLYEASSMHKSFSSIPGAGLRIGTQLMSLFGDNPERFDSYNAVQCYAGTCPSTQSSGKNYHSIKMRKACNKDFRKVLYQLSFAGLQKKEQWSSQEYYAHRKNGKSHSAALRIISNKWAKIIYTLWRDKTEYNDTNFVSRRNKITAAA

SEQ ID NO: 52128 - protein, 348 aa, unidentified
MKFYTQNHMHYCGIDLHARTLYLCILDAGGNVLLHKNLPCDRARFLEAIEPFIDHIVVGVECIFTWYWLCDLCAEQDIPFVLGHALYMKAIHGGKAKNDKVDAFKIATLLRGGNLPKAYVYPPEMRATRDLLRRRLYLVRRRGSLLAHIQNTHHQYNLPEPRAKVAYKANREGVAEAFAEPDARKSMEVDFRLIEQYDEIIRDVELHLDRRAKQHDPQAYHRLRSVPGIGKILALTILYEIHDVGRFERVQDFLSYSRLVKCDHSSAGKKLGTGGAKIGNVHLKWAFSEAAALFLRNNPEGQKHLRRLAGQHGKAKALSILAAKLGRAVYLMLSKERTFDMERFLART

SEQ ID NO: 52129 - protein, 346 aa, unidentified
MDITTVGIDLAKNVLQLHAIDGRGKVALRKQLKRTEMRRFFANLPPCLIGMEACASAHYWGRTLEQLGHRVRLMPPQFVKPYVKANKNDVADAEAICEAVTRPHMRFVPLKSVEQQSMLALHRVRQGFVRARTAQANQIRGLLGEMGLVIPQGIWRITPRIPAMLESAGDDLPGSFKTLIERLTEHLKLLDRQVEEVHRQIIAWGQSCALSQKLQKVPGVGPVTATALVATVGDARSFKNGRQMAAWLGLVPAQHSSGGKPKLLGISKRGDKYLRTLLVHGARSVILAAKLRRSRRENPWLAGLLERRHCNIATVALANKNARVLWALMAHGRDFDPTLAAARSAV

SEQ ID NO: 52130 - protein, 306 aa, unidentified
MQKHELDFAGQDIYAGIDAHLKSWKVTIMVQGISCKTFSQNPDADILRKYLSKNYPNGDYHSAYEAGFCGFSPHRELINQGINNIVINPADVPPTDKERKQKEDKRDSRKIARSLYNNELAAIYVPDMEIEGLRSLVRYRKTLVKEINRYKNRTKSLLYYYGIRVPLELEKSSTHWSKRYTTWLKGLELKTSYAESTLNSMIDTVEHLRAKLLEINRQLRKLEKEGDYSDTIVLLRSVPGVCLIISMTIVSDLEYNQRFGNLDSLCSYVGLVPRTNSSGDNERIGEITPRSNRQLKCNIVNRTKPE

SEQ ID NO: 52131 - protein, 413 aa, unidentified
MWFAGIDWADQHHDVVVLDADGQPVGQMQVAHSAEGLEHLTTFLRTLAPESDPATHVACLVETNQGLLIAALLEAGLSVYPVNPTAIEGLRPPSGVKTDQLDALLLARKGRSDWPHLRVLRPDSPLLAELKTLTRDLQSLIQEQTRLVNQLTTCLKAYYPAALQCFDGVTRQVTRTFLHAFPTPEQACAARVENLEQVLRSVHYPHPADQARRLVSLLQQPRLQAIPGVALAKSRFMLVLFMLVLLAQHDLVLEQIAAYDQAIHSVSHQHADAALFASLPGAGPRLAPCLLAEWGEDRERYAGAASVQALAGTAPVTMQSGKWHRVRRRTACVNSFRQALYHLARESVLFEPWAKTYYTRKRSEGKTHAMALRALAHHWVRIMYAMWTRQELYRAETFVTAQRAHAGLKQENG

SEQ ID NO: 52132 - protein, 385 aa, unidentified
MSYRIAGIDVHKKMLAVVVSDVEIESEYQFERRMFSSNPEQLRSLAAWLVEQKAEEIVMESTAQYWKPVWGTLERYWKPLCEKREGARRRSGTLHLAQALSNRGRRGRKRDFVDAERLVKRLVARELTLSFVPDAEQRLWRTVTRKKYQLRRDLVRIHNQLEALLEEAHIKLSSLVSDLLGVSARRMLKALADGETNPAALAALAHQRLRATPEQLCDALGACTELKPVYRRLLKMTLEHLQILEQQIGQLDQELATLLHPHQDAVQRLAEVPGFGVDSAQQIIAEVGPTAATFPSAKCLSSWVGACPGDEESAGVNYSHRSPKGNRHMRRLLNQAANAAVKVKGSIFEIIYRRCVPRVGHNQAIGVIAHRRCRLIWLILHQATP

SEQ ID NO: 52133 - protein, 345 aa, unidentified
MELHTIGIDLGKTVFHLVGLNLRGEVVVHKKFSRKQLLHFTANLKVELIGMEACGGAHFLGRALREQGHEVRLMPAQYVKPYVKTNKSDYIDAEAIAEAVGRPKMRFVPIKSDDQLDLQSLHRVRERWVMRRTAVINQIRGLLLERGITLRKGRCHVDAALPGILEDASAKLSGALRVLLAQLKLELDHLQMRIDEADAVIKKTAGDNEACRRLVAIPGIGPITATAIIAAIGNGAAFKKGREFSAWLGIVPGEYTTGGKQKLLGISKRGNSYLRRLFVQGARAVLQQSAKQSSGLSAWLAQLTARAHHNVVAVALANKLARMAWAVLAKNESYRPPVLVDVAAA

SEQ ID NO: 52134 - protein, 355 aa, unidentified
MKRGHFIGIDVHYQFCETAVLNSAGNVAHRDRCETTIPKLAEVIEAVPRPRFVVIEEGPLAGWLWRNLHRLVDEMVVSEPRRNRLIAKEGDKDDDLDAEKLARLLRGGFIKPVHQCASLEQAVFKQQVAVYHHRVGQRVREAHRLTSLFRRHGVMIRERDYVAEADRPKLLERLPANESLREMITWLWESYDDAVVHEEKWRRRLVQLAQSVEVVRRFEALPGVGWIRAATFYAYLDTPWRFASKSALWKYLGIGLLRKHSGNGPEYLGVPLQAHRLLKWTILGAAQSAAAQGDNPFADMYRRWIAEGLSRKLARRNVARRLAATMWGLWKNSSVYHPEWVGVAAAAPVAARVSR

SEQ ID NO: 52135 - protein, 357 aa, unidentified
MPSITSHREPDFDVAGGVDTHQDTHTAAVIDVVGRVLGTEQFPATSVGYEALLAWMCSFGRLGKVGVEGTGAYGAGLARLLRERQVQVVEVDRPDRKTRRFQGKSDPIDAIQAAKTALAGERTGLPKQRDGRIEAVRNLRVARRSAVDQRADVQRQIKALIVTAPNELRERLRGLPVAKLITTCAALRPDRADAAQPVTAAKIALCSLARRHQQLTTEIGELDELLEPLVTSINPDLIAVHGVGPDTAGQLLVTAGENHDRLTSEAAFAMLCGVAPIPASSGKTNRHRLNRGGDRQANCALYRIALVRLRWDPRTRAYMERRIQDGLSKKEIIRCLKRYIAREIYQVITKNDHERVA

SEQ ID NO: 52136 - protein, 364 aa, unidentified
MKIIGCDFHPSFQQIAMVDTESGETTERRLLHGDGEAQQFYESLSGPVLVGIETSGNTLWFERLLEKLGHQLLIGDATAIRAAAPRHQRCDPRDARNVLQLLLEKRFPTIWVPTLAERDLRQLLKHRHTLVQMRTRAKNQLQHIAMNQGMQKKRQLWSKAGLEQLKSLALEPWTKRRRDDLLKILEQMDSHIAELSKAVAAEAQHWPQAVLLMSHPGVGPIVALATVLTLGEVSRFARGKQVASYLGLIPREDSSGEHRRLGSITKQGNSFMRFLLVQAGMSAARGDAELGRVYKRLAQRKHHGVAKVAVARRLVLRLYWMLRTNRRYPEVVRMQGSSSHPVAEVKADRLSEHPASRCGTHPGR

SEQ ID NO: 52137 - protein, 344 aa, unidentified
MQHYIGLDVSVKETSVCIVDKAGKVIREVKVATKPVAILAVLTEEALAIERIGLEAGPLSQWLYSALAEAGLPVICVETRHMKAALSAQINKSDRNDARGIAQMMRVGLYRPVHVKTLASQKRRMLLTSRQLLQAKALDIENHLRGTLRNFGLKVGMVGTVKFEARIRELVADHPDLAAIVEPLLIARRVLREQLDVLHRQLLEIVRHDEVCRRLMTTPGVGPVVALTFRATVDVPSRFTSSKAVGAAVGLTPRRQQSGEIDRMGGISKCGDAMMREMLFEAALVLMTHSRKWSWLKAWGMKIARHRGMKRAIVAVARRLAVIMHRIWVDGTEFRWTREEAAPA

SEQ ID NO: 52138 - protein, 303 aa, unidentified
MKKDTTYVALDDSKNSLVAGLLRPGAEGPELRSIPNEPRHLRRFFDRLKREGPVVACYEAGPAGYDLYRQLTALGVPCQVMAPALTPRKPGDRIKTNRRDAAKLVRAFRAGDLTPIRVPEEAQEAVRGLLRCREDVKEDLLRWRHRLLKFLARHGRGSREGRHWTQRHWAWLRGQRFADSVLGRTCQEYLFTVEQLLTRRADLEREIETLAQQAPSRIPVGWLRCFRGIDTLSALALLIEVGDFQRFPHPRQLMAYIGLVPSETSTGDRERRGSITKAGNTHVRRVLVEAAWHARHPPRLGPA

SEQ ID NO: 52139 - protein, 347 aa, unidentified
MNFYNNMHPYYCGIDLHARILYVCIIDQLGEILVHKEISANPQNLLKLLEPYRGNIVVGVECMHCWYWVSDFCQNHSIDFILGHALYMKAIHGGKAKNDRIDSFKIAKLIRGGNFPLAYAYPKEMRATRDLLRRRTKIVRHGANLKAHVSNTTSQYNLPPNKVNLKNVCAREQLKSAFPDFVVQRTVDLDMAILDAYAKELSKVEWFIGQQAKQHNPVHLKLLKTVHGIGAILSLTILYEIGNINRFDSVQNFASYSRLVKCKAESAGKSYGTQGNKIGNAHLKWAFSEAAVLHLRGNDKAKKYLVNLQKRMSKAKALSVMAHKLGRCVYFMLKNETVFDENRFLKG

SEQ ID NO: 52140 - protein, 317 aa, unidentified
MDSRTAETFAGIDVSKASLEVAVSGGRRVLSFRNDKRGVRALTGYLRDEQPALIVLEASGGYQRLVVAALIAGELPVAVVNPRQVRDFARATGTLAKTDAIDARIICHFAAAVRPELRRLATADEQELSDLQARRQQLVEMITAEKNRLRTSGPRVARQIGRHVRWLEKQLKDVESELRDLVQSSPVWRAKDELLQSVPGIGPALSGALVANLPELGELNRHEIAALVGVAPLNRDSGVFRGKRRVWGGRQNVRTKLFIGALVASRYNPAIKSLYQRLCAAGKPKKVALVACMRKLLTILNSILRTRTPWNPKPAYA

SEQ ID NO: 52141 - protein, 351 aa, unidentified
MNINHYIGFDVHKKTISYCVKAADGKILEEGKLRATREVLRGWAQKRSHAWHGAMEATLFSAWIYDTLKPFAGELQMGNPSMMKAIGAAKKKNDQLDARKIADLVRCNLLPACYVASPEMRDLRRLLRYRNLVVGQAVQMKNRMSGLLMEVGADYSKQRLHGAKYFSELLDQLEEVPESVKELLRLSRGALETFEATQRQLLQHLQKEALLAKRVKLLRSIDGVGEVTALTWALEICDARRFPSIGDAVSYCGLTSALNASADKQKRGPISKQRNAHLQTVLIEAAKLAPRWNRQLAAVHEREINHSGNCNRATLTVARKLVAYLLAVDKSGQPFVVRTPAEKPVEVAAMA

SEQ ID NO: 52142 - protein, 462 aa, unidentified
MQQPPPVSNARPRVVGLDVHPDSFTASIVEGPTPLSANVLKTFNKVPIAQLGSWAAKNTLPTDTLVLEASGNSFEAVRRLRTAGRTPLVLESVFIGRLKEAHANNDRISAVRIARAYLSGNARTVWVPDESTQRRRDLFHAHRKAVRGVTAANNSLVSYLSDNGVRLGRTLLKLAPAARRESVLGARAWNPTQLQVLEIHLLGLEHQIELEARLSSLLAQQVLEDPRLLELTRLCGIRDVIAFAIGAIVGDVTRFPSPRSLVKYVGLNPAFDDSGEKVWKGGIKGHGRKDLRSLLIEAGHSILRSRNHPHGEWGRKLLARKGEDPGLVLPPRADRTDGGAHQVHVREDRPDRLEGREGRPCPAGPRCPGPSPAGLRDPPNPHGGPGVPPAGRSVPAGSGHIVLRSGSLDATTASGPRTERQAAIAWWRPRIPDPRPRPSRPHPLPTQIPNTTPPPPVSKANH

SEQ ID NO: 52143 - protein, 339 aa, unidentified
MSEFTTVGVDLAKNVIQIHGVDSDGNVVVRRQLRRSQFLAFFEERPGCLIGIEACSGAHHWGRQLQEMGHEVRLMPPSYVKPYVKRNKTDAADAEAICEAVTRPSMRFVPVKGEADSAALVLHRARDFLVGQVTQVGNAIRAHMAEFGIVTAKGSKRVASLAEELHNVPEAARLPLQALFDQLAETQARIDQLTDEIEEVHRKNEVSRRLVSIPGVGVLTATAIAATTPDVSNFGSARDYAAWLGLTPKQHSTGGKPRSGGISKMGNRYIRRLLYLGAMAQIMVRRRSRHPGTDWLSRKLATKETRVVAIALANRMARTIYALLRDGTSYKPRVEVMHG

SEQ ID NO: 52144 - protein, 339 aa, unidentified
MNKLYVGIDLHSNNSVVVVADEEDKVMYRKRLPNELDAVLGALGPFAKDVAGVVVESTYNWYWLVDGLMEHGYRLHLANTGAIQQYSGLKHGDDEKDARWLATLLRLGILPEGYICPKQMRAVRDLLRKRGYLVRQRTSNILSIQNLIARNTGRRVSGDGIKKLTNSAVDDMLPNRDHALAAQTSVAAMHCLTGQIKKIEKVVLERVRLRQQFKNLKTVNGIGDILALTIMLEVGEIGRFASVGNFASYARCVNSTRLSNGKKKGTGNPKNGNRYLGWAFMEAAGFAFRYDETIKRYYQRRLAKAHVMVARKAVAHKLARACYYILRDQTVFDVSKAFG

SEQ ID NO: 52145 - protein, 342 aa, unidentified
MDYFAGLDVSVKDTSVCIVDDTGKITREVRVASEPDALLAVLTNRSYRFKRIGLEAGPLSQWLFSALAEAGLSVICVETRHMRAVLKAQINKTDRNDARGIAQMMRVGLYRPVHVKTLRSQKLRMLLTHRKLLQSKAIAVENDLRATLRNFGLKVGMVGTARFEARIKELVENVADLVVLVEPLLVVRRTLREQIGVLHRRLLAIVRDDAACRRLMTVPGVGPVVALTYRATVDVPARFRKSKSVGAVFGLTCSRDQSGERDRPGAISRCGDEMMRAMLYEAAQAMLLRSTKWSWLKAWAMQIAKRRGMKRAIVALARRLAVIMHRIWVDGTEFRWTRQVTA

SEQ ID NO: 52146 - protein, 388 aa, unidentified
MNKIIYIGMDVHSTNFTLCSFEPGYGFEADKIFGQTQIKEDIFNSTVKYINKLKSMRPDVDVVCGYEAWCLGYNLHRKLKAKEIESVILAPTTMAVSRNCSKKKNDYRDAITIAKCLASSAYKAVYIPDDKDEDVRDFIRMRDDHKTALKQIKQQLNAFCLRHGHHYDKTKWTGLHLNWLRKLELSKFQRETVEEYLATYETLTSKIAALDVRIEDIASEERYAEKVNKLKCIKGIKTHTALSFVCEIGDFNRFKSADKFAGFIGLVPGECSSGNTERMLGITKAGNRHLRRLVVEISNTYRRGTVGRKSAALKERQKDMPKDVVAYADKATNRCQRKYQRMMFKGKNSNQAVAAVARELCCFIWGMMTGHHSRTAQAEASVYRSELD

SEQ ID NO: 52147 - protein, 355 aa, unidentified
MDNITLLGIDLAKNIFQLHGVDKLGRTKLKRTLRRRALVKYVSQLPVCTIAMEACSSSNHFSRKFQKFGHEVKIISPQFVTPFVQSNKNDAADAEAICEAASRLNMRFVSTKSVAQQDIQCLHRVRKRLVGNRTSLTNEIRSILGEFGIVFSQGRSALEEGIKGLLNGSHPPEELSSKGLVLLQALYSELLELDKRIEDYELKLEQIARQPQCQRLLKVGGLGILSVTALTVALADPEQFKNGRNFAAWLGLVPKHVGTGGKSRILGISKRGNTDLRTLLIHGARAKLRGINRKFINGTKLDPLEDWAYRLCQRQGFNKATVALANKNARIAWSISANKTDFDPKEAVALLKEAA

SEQ ID NO: 52148 - protein, 363 aa, unidentified
MQVVYSCCAGLDVHKANVVACVMITGSHGEVQSQTKTFGTFTGELLALSDWLRQQGVTHAAMESTGVYWKPVYNLLEGVFELLVVNAQHVKAVPGRKTDVKDAEWICDLLRHGLLRGSFIPAPAQRQLRELTRHRANLVQRRAQGVNELQKCLESTNIKLASVATDITGVSATEMLSALLAGQTDTESLAELARGRMKSKKPLLAKALEGKVQPHHRLILSQLLADIGWLEEQIQEVNVEISNRLKDHQQWLERLDEIPGVNLRIAEVIAAEVGTDVKPFPTAAHMASWAGLCPGNNQSGGKRHATHIRPGNRHLKSALIEAANAAGHKKHCYLRAKYRRLAGRKGKKRALVAVARTILQSTY

SEQ ID NO: 52149 - protein, 297 aa, unidentified
MQTQVTKKIDFKDQNLFVGLDVHKKSWSVTIIVDGIEHRTFTQPPDPGSLCNYLHRMFPGASYHSAYEAGFCGYGIHRELNFLGIKNIVINSADIPTTQKDKLQKRDPVDSRKIARSLEKGSLHAIHVFDRELEELRTLNRTRFYLMRDLRRSKNRIKSFLQYYGEPIPEEFDNNQWTLKFVSWLKQVKMKTISGQDAFSHLIESYEHHRGQLVDVSRLVRQRIREYDNELYSLLKSISGIGPLTSSALITELGNINRFNNIDQLSSYVGFIPRIRESGETTHTGGITFRCNTFLRT

SEQ ID NO: 52150 - protein, 323 aa, unidentified
MSTFYLGIDVAKAKLDCALLLPNGKWRSKSGLANTPQGFAELARWLDGHQANAPIHVCLEATGIYWEAVAESLAQAGHTVSVVNPFQIKAFANACLVRSKTDRIDARLIARFCAERHPEPWQAPSLSEQTLKALVLRLDALHAMRVQELNRVEVARDAVREGIMAHIDWLDAQIKRLLADIRRHIDSDPDLRSRRELLDSIPGVGEHTMALLLAFCIHPGRFDNARQAAAFAGLDPRLHESGSSVHGKPRLSKIGHAVLRKGLYMPALVTLYRTQWGKQFRQRLANAGKPPMLIIGAMMRKLIHVAFGVLKSGKPFNPALHGS

SEQ ID NO: 52151 - protein, 406 aa, unidentified
MMWYAGIDWADQHHDVAVIDEQGKQIAKQRVPHTVEGLADLIAFLKATGDVAQHPDHLACILETNKGLLITTLLEAGLLVYPVNPKTLEKWRKPSGAKTDAIDAFLLARKGRSDLDQLRRLEPDSSLVQELKQLTRDQDGLIQMQTRLVNQLTACLKAYYPVALDLFALLQQPTTLAFLQAFPTLEAARQASVAEIAALLRRSKHPQPETKAHWIVEQVQHPQLQADAITKRTKSRLLLAVVAQLASVVETIAAYDKEIARLFLTHPDAAMFANLPGAGKRIAPRLLAEWGDDRTRYQDASSVQALAGSSPVAFQSGKFAKAHRRYACNKPLRNALHQFAWQSTRAEPWALAYYQRKRAEGKTHSVAIRALANQWVRIVYAVWFHRRSYDAQQFLAAQLAHAPRVA

SEQ ID NO: 52152 - protein, 410 aa, unidentified
MELLHRRCCGLDVHKETVVACLRLISDGKVTTEVRTFQTTTSDLLRLSEWLAANECTHVAMEASGVYWKPVWHILDDGEFELVLANAAHVKNVPGRKTDVNDAMWLAELLAHGLIRASFVPDSQTQEMRNLLRTRKQLVREQSSHVQRVQKTLEDANIKLDSVLSDLMGKSGRAMIEAMIAGETNPAKLASLAHPRAKASHEEFREALRGRVTKHHRFLLRLHLNQIDALNAAMATLDTQVEANLGPFRTAVELIMSIPGIKNLGANVIVSEIGIDMSRFPSDAHLVSWAGICPRNDESAGKRRSNRLRKGAPWLKTTLVQCAWAAVKKKNSYLQAQFYRIKARRGPKKAIMAVAASILTAVYHMLKDGTMYKDLGSNHFDRRSTDQQKNRLIKRLADLGYAVQIKPLSA

SEQ ID NO: 52153 - protein, 341 aa, unidentified
MDKELYIGVDVSKKTLDLAYYDGETIDWKNAHIKVSNDTSGFKEVASWLAKIANRFDNLLFCMEHTGLYCQDFRMWLESHQYIYGMVDPRKMHRFEPDLDAGQRSLDRVKSDELDAFRIAIYCEQNHKKILRSPSRLPPAIYFKLKRLYAERKQDSKQSVLYKQQLHDTCAYDTESSMERKRLLLGSLKESIKAVDEEIACCLDEEASIRKNYDLLLSIPGIGHVVALETIILTENFTAITNPRKYACYIGIAPFPKESGTSVRKRTSVSCKGFSKAKADLSISAVSAITHSPTLREYWQRKRKEKCGSIVLNAVKFKLVLRMFAVIKRGTPYVETDAYKN

SEQ ID NO: 52154 - protein, 344 aa, unidentified
MKHYAGLDVSVKETSVCVIDETGKTIREVKVASEPEAILSVLVDEALTIGRIGLEAGPLSQWLYSGLAETGLPVICVETRHMKAALSAQLNKSDRNDARGIAHMMRVGLYRPVHVKTLASQKRRMLLTSRQLLQAKALDIENDLRGTLRNFGLKVGVVGTAKFEARIHELVADHPDLAAITEPLLIARRTLREQLGVLHRRLLAVVRQDEVCRRLMTVPGVGPVVALTFRATVDVPARFKNSKAVGAVFGLTPRRHQSGEIDRMGSISKCGDAMVRTMLFEAAQVMLTRTIKWSWLKAWGMKIARHRGMRRAIVAVARRMAVIMHRMWADGTEFRWSNTNAATA

SEQ ID NO: 52155 - protein, 417 aa, unidentified
MRKNSKSAGKKEQTSKRAKWQRPVQRETKEVLAELVGKLRGKLKQKATPASPGETGQRPEPRPNLDRLTVGVDLGDQWSQYCILGLEGGTLSEGQLRTTQSDVAEFFTAIMPARVVIEVGTHSAWVQEIIAGCGHEVLVANPRLMEGSKRRKRKNDRIDANKLARLGRVDPQSLYSIRHRSREVRQDLVLLRARDALVAARTELINTTRGLVKSLGTRLPKCSSRSFGHKAGEAIPEQVQEALLPLVQLAEGLSACIQGYDRRIEELASKKYGHTKLLRQVKGVGPITALAYVLTLENAERFAKSRDVGPYLGLVPKQEDSGESQPQLGISKAGDTMLRKLLVGSAQYILGPFGPDTDLRRYGLRLCERGGKNAKKRAAVAVARKLAVLLHRLWVSGEVYEPLGYRVSGTIVQPAAA

SEQ ID NO: 52156 - protein, 371 aa, unidentified
MQNVSTFIGMDAHKDTIAVAMLSPEQSKPLEWTIVNEPGAVRRLARRLQREAGGEVRCCYEAGPCGYVLQRQLAAEGITCSVVAPSLIPVKPGCHIKTDRRDARKLAELHRAGLLTEGFAPTAEEESVRDLCRARNDAQRDLTRARNRLSKFLLRRGLVYCVGRRPTWSAKYRRWLHGQTFEHPADQVVFEDYLLTMEHAEARREALDEQLERFSQEPRYQAPVAALRCFQGIDTVTALALVAELHEPRRFAHPRQLMAYLGLVPREASSGLHERKGGITGAGNRHVRRLLVEAAWHYRHKPLVGRGLGLRRRGQPPAVLALADRALRRLTLRQRRMLHPGKHPNLVTVAIARELVGFIWNALQATVPARA

SEQ ID NO: 52157 - protein, 338 aa, unidentified
MTYITGIDVSKKFLDCAFRCDPGQAKAKRRRFKNNSESYDSLLAWTETLAGRGCQDITFVVEPTNIYHELVVAFLFEAGARVYLVNPARVRKFAEGIGILSKNDVIDADLLTHYGLMSKKLIPYTPLPRDISTLKSLLGRLDTLERDLRREQNRQEKVGKTSVFHKLEEQSIQRFVKHHEVETKRFKKFIRETVEQSDLLQRDYELLTTIPGVGEKTAWTMLVILKSRPFNSAQEVASFIGLNPIEKRSGTTEYRRPRLSKAGNSYFRQSLFYPAMVATSKNPDIKVQYERLLGNGKSKMCAIGAAMRKLVHICYGVVKNQEAYTVQSAYRIAQSRRN

SEQ ID NO: 52158 - protein, 361 aa, unidentified
MPTATATSAEIVESPDLIVGIDTHKDTHVAVALSSNGARLGSLKLEANRAGYKSLINWTAELGSQPVFAVEGTGSYGAGVCRALRAEKLSVIEVNRPDRATRRRLGKDDGIDAEAAARSFLAGTAKVIPKAGDDLVEMIRMLKVTKDSATSNRTAALNQLHALVVTGPAALRERLQRHKRKELIDVCSGFRCGDITTPLAAAKLTLRTLARRIQQLDAELKETNAQLDQLTMQLCPELRHSYGIGVDISATLVVTVGDNPERMKSEASFAALCGVSPLPASSGKIVRHRLNRGGNRQANCALHRIVICRMKRHQQTRDYVERRTVEGRSKKEIIRCLKRFVAREVFRILCGAAATRTAAVQ

SEQ ID NO: 52159 - protein, 427 aa, unidentified
MTDQAKNKPYCSWIAIDIAKDFNVVMIETADGKRRRFRMANSGKDYERLIEVLHALPQPCHVGFEATGNYHRPLAFRLLTEGFDVSLISSLASARYREAIFNSWDKNDPKDAGILLELLKRGIVQTYNDPIKSGFHDIQELSKTYYHITLSRTRLQHSILTHYLPLYFPEMGKFWNSTRSEWWINFLLHFPTPASVTQHSEQDFCSIAFPIIGRKVNKQAKLQELYATAQNSIGLPVATDSLACQTFKLQLQRYQELTSQRHQLEKQAESVLSDHPDYCILRSVPGIGPIIAMTILAEGGDLRRFAHHRQFLKYCGLDLAKNQSGNFRGQDKLSKRGNARLRLALFMATINAVRQTENSFREKFHRYTKATPDDADCKRKARTAVMAKMARVIHSLVKSSTPYQGYFEVSPSGSIPLCRAVGATRTP

SEQ ID NO: 52160 - protein, 418 aa, unidentified
MTRRDDSRIIRIVHPICCGLDVHKESVSACVIFPNDKGDEQYDVKVFGTFTDDLMRLRDWLAAHNCPVVAMESTGVYWRPVHNVLEDSVAVVLANARDMHNVSGRKTDIGDSKWIAGLLRHGLLKSSFIPPQDVRQWRDLTRLRKKYVHTVGDYRKRTHKLFESANIKIDSVVSDLFGVTGRNLMQLLVADRKLTLSDIQTCVRGKLKGKEAELFRSIQGFFTDHHRFVLKMILETIATLEAQIEALDLQICCAMKEHEALLDRMKQAPGIADVASREILAEIGPTLDSFPKDTALVAWCGLCPGNNESAGKRKSGKSPVRKNHLKTIMTEVAWAAIKKKDSYFKDKYYRLKARRGAKRAIVAIAHRILLGIYHVIKDGADFRDLGGDYLTLRNKSQKVFHLRKQALAMGFNLVPQAV

SEQ ID NO: 52161 - protein, 345 aa, unidentified
MKYYCGLDVSLNNTAICVVNHDGDIIRESEVPTEPAAIDQWLKATGLPMERVGLEAGGLTPWLCHELLAADWPAICIETRHAKAAMQAQQVKTDRNDARGLAHIMRTGWFREVHVKSHESQKLRVLLGNRRCLLDKRIDIDSQIRGTLKVFGHKTGKVTVATYERRIRELVEEDKELQAYIFPMLEVRRHLVQQCNILEKMILNCVKKDPICGLFMTIPGVGPLTALVFKTCVDRPERFRHSKAVGAAVGLTPRKYASGEVDYDGHITKCGDAFLRSHLFEAAKCMLNRGQPNPLKSWGLRLAKRSSKKNACVAVARKLAVVMHAMWRDGTVFQLDDEATVATAA

SEQ ID NO: 52162 - protein, 345 aa, unidentified
MKKIVKQVAAIDVAQDELVVRLGRMYDDWSPELYASKTFANTTKGFESFVAWVKKLTSREVVVRYVMEATGVYHESLAYYLDENGYEVSIVLPNKISNYVGTLEIKTITDKTSAEAICLFGLEKKLERWSKPKEIFKQLRQLTRERDQLIAERTMLKNQMHAEQSEAEPSKKSIARLKKRIGLLDNQQKEIMQEIKQLTEKDSELKQLIRLVCTLPGVGLLTAAIVLAETAGFDLIRNKRQLTSYAGLDVVEKQSGTSVKGKPRISKKGNRHLRKALHLPALSAIRHDERFKAVFSRLVSKHGIKMKAAVAVQRKLLEMIYTLCKTGKPYDKNFFKKLESSMATP

SEQ ID NO: 52163 - protein, 412 aa, unidentified
MELVVQRCAGIDIGKEEVVACVRTPASNGERCKETLTFSTFTSQLEAMADWFSANGVTQVVMEATGSYWKAVWYLLEERGFELLLVNARHVKMVPGRKSDVADAEWLAALLEHGLLRGSFVPPQAIRELRDLTRYRKRLIQEHTSECQRIQKTLEDAGIKLDSVASDVLGVSDRMMLRALIAGERDPEVLAELSQKRLRNKIPQLREALRGRFRDHHGLLIGMSLDHAEYLEARIAALDTEVDRVVAPFAEARDHLDTITGVGKRAAECIIAEIGTDMSVFPTAAHLASWAGRCPGNNITGGKRRSGKTTKGNVWLADVLTECAWAVAHSRNTYLSAQFWRLSRRIGKKKAAVAVGHSILVICWHLLSNNCGYDDLGGDCFTRRSDTDRHRDHLVRQLQQLGYGVSLSKVAA

SEQ ID NO: 52164 - protein, 378 aa, unidentified
MARTTLHSDGILFVSLELSKSKWVLTSSDGGVGLRRVVIDAACWERFEKEICAAKEKFGLPKNAAVKSCYEVGRDGFWIARKLQALGIAVCVVDSASIEVNRRKRRIKNDRVDGEALLRMLIRYERGEQKVWSVVRPPGEDAEDARRPTRELQRMKKERTAHRNRIGSLLALEGLSLPPGVGFEDALDDLRRWNGEPIGENLKKELGREMARLRLVEQQIKQLKLTLANKLRTEHVSEKESYVKHVKALMNLRGMGSSAWVLVVEFLAWRKFTNGKEVGSLAGLTGTPYSSGTTQRDQGISKAGNPRVRTLMVELAWCWLRYQPNSKLSRWYEEKYGGFNKRSRRSGIVAVARKLLVDLWRYVEFGQLPQGAELREAA

SEQ ID NO: 52165 - protein, 445 aa, unidentified
MARKSMKKRLEIVHPHCAGIDIGSREHWVAVDPDQDDEPVRCFSTFSDDLYALADWLESLNVEIVAMEATGVYWIPLYEVLDARGLQVNIVNSRATRQVSGRKSDVLDCQWIWQLMSYGLLRGAFRPSDKVCMLRSLVRQRATKVQEQSRCVLHMQKALTQMNVQLTNVVSDLTGKTGMAIVRSIVAGERDPRQLAKLRDGRLRADEATVARSLYGNWRKEHLFALTQALAHYDFEIEQIRECDQAISEILADLPARSQGEVPKPVKPLCNRQRTRTEQTVLHQALYAVLGVDLIAVPTLGIETVLVIASEIGPDLLRFPSSGHFCSWLSLAPPTNISGGKPLPGKTPKVLNRAGQALRQAAANARNSDSFIGASHRARLARMDTAKAIKATAHQLARLIYAMLTQGQPYVEQGIEAFEARRQARQLRALQRKAARFGLALVDAA

SEQ ID NO: 52166 - protein, 415 aa, unidentified
MMHPKMQYTYVGIDSHKETHTAVFLDCFFEKLGEITFDNMPSKFGAFLAKAEKLKLDGTTLLFGLEDISMYGRLLAVFFRDNGQKMKHVNALLVAKERKNQNVTQKTDAIDAECAARLLLSKLNDLPDAQPDDKYWILQSLVTRRDFIVKNNISLKNHLHSLITQHYPNYKHWFPNIDSHASLAFLMRYPSPSTMADVTHESLATFIREASSYRVGGGVNSTVRAKIILDTMQDTTVPYQEIRDRSVQSTLRQIGVHTEEIKQLEKDIASFMENFACTLTSMSGVDTVAAAQLLTQIGDIRRFSTPAKLARYAGVAPVTYASGQSDTQHADRRGNRVLNSILYLLAVRLIGSAANKILNPFIHSYYHRKLSEGKTKRQGLKCVQRRLVNIIWRMLMYNEAYQNPPMVDKPVIENT

SEQ ID NO: 52167 - protein, 410 aa, unidentified
MEVLHAHCAGLDVHKESVVACVRHMFDSKVTTLVRTFKTTTQELMALSNWLSAEGATHIAMEATGVYWKPVWHILSDGEFELILANAAHVKNVPGRKTDVNDATWLADLMAHGLIRASFVPDEPTQQMRDLLRTRKQMVRERSSHVQRIQKTLEDANIKLDSVVTDILGLSGRRIVEALIAGQTMPQALASLAHRRIHASADELEAALRGRVTRHHRFLLKLHLDQIDALDAALARIDEEVSANVEPFRTAVEMLSTIPGISTLSAEVSVAEIGIDMSHFETAGHLISWAGLCPKNDESAGKRRSNRMKKGAPWLKTTLIQCAWAASRKKNSYLQAQYLRTRSRRGAKKAVGAVAASMLTAAYHMLKDGTLYQDLGADHFDNRAKGKHVLRLVNRLQNLGFDVQITPLAA

SEQ ID NO: 52168 - protein, 349 aa, unidentified
MNETITIGMDLGDKYHIAVVFDAEGNELDVAKVANTKTALGNYFKRYQGAMVAIEAGTHSPWISRFLEEMDCRVCVGNPRKLRFIWDSQDKSDERDARMLGMVCRIEPRLLSPLRHRNSQAQADLALVKSRDMLVQSRTKLINHARGLVKANGERLPGCSSDSFAKRCSPHVPVNLWPALESIFNVIGQLTEQIRVLDARIDRLCQEKYPETERLQQVPGVGPITALSYVLTIEDPGHFSKSRQVGSYLGLTPRRDQSGETDKQLHITRAGNPYLRQLLVSNAHYILGPFGPDSHLRRHGLHIAARGGKNAKKRAVVAVARKLAVLLHQLWQSGETYEPFYRTAYKNAA

SEQ ID NO: 52169 - protein, 415 aa, unidentified
MEGLSPLHRRVAGIDVHRMLHVVTVLIEQPDGSVSKHSREFGGFKRDCHALAEWLAGLEVQLVVMESTGIYWKSVYAHLENAGITAWVVNAHFIKHVPGRKTDMLDSEWLAVLARFGLVRGSFIPPKDLRELRLVSRYRRKLNSMCSSQINRLHKMLDDAGIKLGAVVSDIHGVSARAMVRGLIEGQSEAVLLSHARGALKRKTEELAASLDGDLSERHLFVLRHLSESIDALPRQLADIDAYLMRAMQPYAWAHRLLQTIPGIDATAAALILIEIGQDMARFGSPERLACWAALSPGNHESAGKRKSGRTRHGNNTIRFILCECANAARMTKSTLASKYRSLMVRKSHKKAIVAVAHKMIRLIYILLSRRQPYLDQTIDYAAMSAKKNAPRWIKQLKAIGKWPETGATAAHATT

SEQ ID NO: 52170 - protein, 317 aa, unidentified
MTESVRVNVGIDVSKDFLDVHVGDVALRRVPNRSSGLSVLKRILSRYTVSLVLLESSGGYENLAVTYFQSLGYDVCVINPRQARDFARSMGRLAKTDKIDAHMLCRLADVIDASPERDRFVKPLTDERRQRLVSMVRRRRQLCDLMIAERNRRSRTDDYGSESISTVLDFLTDEVARIDRDIAAHVGSCFSDISSLLQTFTGIGPVTASTLLGELPELGKLNRRQITALVGVAPFNRDSGYMRGRRRISGGRSGVRNVLFMAVLSAVRFNPVLKAFFARLVAAGKPKKVALVACMRRMVCILNAMLRDGSRFEVAVG

SEQ ID NO: 52171 - protein, 340 aa, unidentified
MRMIGCDLHAAKQTIAMLDRDTGEIVEKTLNHDGEAVREFYASIPAPAVVGIEATGSMGWFVRLMEELGITCRVGHPAAIRKAETRRQKHDRRDAHLLLRLLAEDRFPAIWMPATEFRDLRALLLHRHQWVRMRTRVQNALHAIALGQAVQRGATLWSRDGQAMLAALPLSSHAAHRRDELQALYRQLDEQVDRLDDRVKHAAAQRPRATELMTHPGVGHVTALATEVFLGDPARFVDGKALASYVGMIPCEYSSGRRQRLGGLSKQGNPLLRFLWGEAAMHAVRRDPDLQRFYRRKLQQKGLGKARVAAGRKLGIRLWIMLRDQINYDEFCRRSPRRQL

SEQ ID NO: 52172 - protein, 326 aa, unidentified
MELYVGLDISQATTHLCVVDGKGKRVWEGKCPTTPEAIGQAIHNHAANAQLIGMESGALSPFLWHALTSAGLPVVCIEARHAHKTLSEQLNKTDKHDARGIAQLVRTNFFKEVKVKSMTSHQVRTLLGERAQLIGMRTALKNQIRGALKTHGFVVSHSVEKGFKAKVAGIVRDCPTLQKMVAPLVRVLESVEREVQELDKLFAEYAENHVICRNLMTIPGVGAITSVAFTAAVDDPKRFGKSRNVGAYFGLTNRRDQSGERDVAGRISKRGDNLVRGYLFEAAGSLLTRTKAKVAVARKLAVIMHQMWLTGEAFRWSESEVVAATA

SEQ ID NO: 52173 - protein, 344 aa, unidentified
MEIRTVGIDLAKNVFQIHGMNERGKPLLRKQLKRDQVVVFFANLPPCLIGMEACGSAHYWARKLEALGHTVRLMAPQFVKPYVKSNKNDAADAEAICEAVTRPTMRFVPIKNIEQQSVLALHRARQGFVKARTAQANQIRGLLAEFGLIVPQGIAHITTRLPSVIEGAANELPVSFRQLIERLIEHFKVLDKEVEELEAQIKAWHRADEISRQLERVPGIGPLTASALVASIGDAKNFKNGRQLAAWLGLVPRQHSSGGKSTLLGMSKRGDAYLRTLMIHGSRSVIYRASQKNDPDSWLVKLIKRRNVNVAAVALANKTARIAWALLTHKSEYQPDYRQSLTTA

SEQ ID NO: 52174 - protein, 313 aa, unidentified
MKYTSVGVDIAKHLIQVHFINEHTGEVVDKQLRSRDFLTFFSNREPCLIGMEACGGSQHWARELTKLGHKVRLLQARFVKAFVMGNKNDVMDARAIWMAVQQPGKEIAVKTEEQQSVLVLHRTRRQLVKFRTAQINSLHGTLLEFGESIHKGRAAMEREFPEALERMKERLPPYLITVLEDQYNRLSELDSLIDDIEKQLTSVARQNETCKRLLDIPGIGPLIATAAVATMGEASAFKSGREFAAYVGLVPKQTGSGGKIRLLGISKRGDTYLRTLFIHGARAAALLTREPDPWITVSASSEPSGLFPPAPQK

SEQ ID NO: 52175 - protein, 364 aa, unidentified
MANNITWVGMDDSAKTINLAIFRGQENNPREESIVTNDSTGLGRMVKKLKAISGEVRCVYEAGVNGYHLQRFLAKHGISCDVAAPSLTPRRAGKRVKTDKLDAKALARLYRAGELTCIFIPQNEQESLRDLVRAREDALEDQQRARHRLARFLMRRGLKYASGKNWTQGHLRWVKSLRFEDDRDQMVLDEYQLILAEQTDRLQRLNAKIEEVAKQPTYEKRVRYLMALKGIRVLTAMTIIAEALDLRRFTDAPAFMAAIGVVPSEDSSGEVERRGRITKTGNNHIRRVMIESAWTYQHSSVSGKTVQNRRNGLPAEVIEIARQCDKRLHQKFRRMASRGKDRKKIAVAVSRELAGFVWAMGKVA

SEQ ID NO: 52176 - protein, 316 aa, unidentified
MAETYVGIDVSRDSLDMAIHGSEKGWRFTNDPDGVSKLCTFLVELKPALVVFEATGGYEMPLYVGLDEAGLPAAPVNPRQIKEFARASGRLAKTDMLDARVIAHFGYALRPQARRIPESQEIKEIVARRTQIVQMITAEKNRLRSARKSIRTRIQSHIDWLEKELDDVDSQLKRSIKDNPEWSEKDKLLRSAPGVGPVLSTALLAGLPELGKLDRKKIAALAGVAPLNNDSGTKRGRRTVWGGRAAVRGPLYMAALVATRFNPTIRKLYHRLLSAGKLKKIALIACMRKLLTILNAMLKHRTPWRYTDSFVIGPCS

SEQ ID NO: 52177 - protein, 415 aa, unidentified
MKGTENTRGAGRYIALDIHKEYVLAGGQNAAQAWALAPRRIGMARFREWASANLHGGDAVVIETTTNVWDIYDIVAPLVTRTAVAHAGAVRQIAEARVKTDKEDVKRLIRLLIADIVPEVWAPPMHVRELRGMISYRNRLVKTATMIRNRLQSLIHRHNLILPKGKLLDATWWQEQTMSALEQIQIRQELAMLAELDQHKAEVDAELGRQCLGERWGQQAVRLLQLPGFGVVMTMIVLSAIGDISRFEDAKKLVGYSGLGAGVHDSGKEHIQKRITKSGRKELRWALVEAAWQAIRISPYWKEQYERHLRRMRKPNQAIVVIARKLLVAVWHVLTKEETDLHASEEDLAYKMLVLAWDLDENVRMGLSYKQFAKYALMKLGVETDITRFVRKNVPRCVASRAETLARMEALGIPA

SEQ ID NO: 52178 - protein, 348 aa, unidentified
MRFYTHTHQHYCGIDLHARSMYLCILDTQGEILLHRNFKAEPESFLKAVAPYRDDLVVAVECIFTWYWLADLCAEEGIAFVLGHALYMKAIHGGKAKNDRIDARKIAVLLRGGMLPQAYVYPKAMRATRDLLRRRNHLMRKRADLLAHIQNTASQYNLPPLGTRVDRKKEREQIPAHFPDPVVRRAIELDLSLITHYDGLLKALEQELALLAKAHDAFAYHLLRSIPGVGRILTLVLLYEIDNIHRFPRVQEFLSYARLVKAQKSSAGKVLGHSGKKIGNAHLKWAFSEAAVLFLRGNPEGQRYVERLAKKHGKGKALSILAARLGRAVYVMLQRRQPFDPARFLAHG

SEQ ID NO: 52179 - protein, 357 aa, unidentified
MGKSIRNLTAVTRVGLDLAKKVFQVHAVDAKGEVVVARKLTRGRLVAFFAELAPCVVAMEACSSAHHWGRQLLALGHEVKLIPPAHVKPYVRRNKNDAADAAAICEAAGRPGQRFVPVRSVDNQAELMRHRARELLTGQRTSLLNALRGHMAEIGVVAAQGAQHAYDLKRLAADGFDDNGEIVVPDRVRAALRPLIGQIDALDEAIGAIDKELATSVKADETARRLMTIPGIGPVTASAITATIQDMSAFASGREFSAFLGLTPRQNSSGGKERLGRITKMGDRYLRKLLVVGACATLSHRKGHNDALRRWASGLLERKAVKHKFKLTAVALANKVARIVFVLMTRGGQYDDRPVAA

SEQ ID NO: 52180 - protein, 389 aa, unidentified
MEARTVYNPRPAAPHDDAVRCVLAIELSKKSWIVAVNTPLSEKISRHTLGACDWKELLKLCERIRTRIARELSKDVELVSCYEAGYDGFWLHRLLEAHGIRNYVIDPASLQVDRRARRAKTDRVDVERLLRSLMAYLRREPKVWSVVCVPTVAEEDDRRLHRERGRLINERIQHVNRIKGLLAIHGIYDYPPLRHDRMQQLEGLRTADGRTLSPRLKAEILRELQRLELVIGMIKTIEAERDAIASAKIETEHSSAKRIQDLAKIKCIGPEFATTLVGEVFYRFFDNRKQLASYVGLTPAHFQSGETCRDQGISKAGNAKARRVMIELAWLWLRHQPASPLSVWFHDRVGKLKGRIRRITIVAVARKLLIALWRYLETGLAPEGAILKV

SEQ ID NO: 52181 - protein, 409 aa, unidentified
MEVLYPRCAGLDVHSRRVNACVRVAAGRTVTTEHREFATTTAGLLELAAWLTEAGCTHVAMEATGVYWKPVWHILEDEESFTLVLANAQHIQNVPGRKSDRNDAAWIADLLAHGLIRGSFVPPAPIQALRDLTRTRKQLVGEIARHAQRLQKTLEDANVKLTRVVTDILGVSGRAILTAIIAGQTDPERLADCTNGRLKASRADIVAAVHGRVTPHHRFLLELHLSQVDALSAAVQKLERQADEVLRPFREAADRLKTMPGVSETVARVIISEVGVDMAQFPSAGHLVSWAGLCPRLDESAGKRRSTRIRHATPWLKTALVQAAWAASRKNGSYLQAQYRRLKGRRGPKKAIVAVAASMLTAAYFMLRDETDYHDLGGRYLADRDADRVKQRLLRRLRDLGVEVEVKAA

SEQ ID NO: 52182 - protein, 343 aa, unidentified
MQTVTTIGLDIAKSVFQVHGHDGAGQVVIRRQLKRRSVLAFFQKLPPCLVGIEACASAHHWSRELQALGHKVRLMPPAYVKPYVKRQKNDAADAEAICEAVTRPNMRFVPTKTPEQQSGLVLHRTRHLFIGQQTAVINAIRAHLAEFGIVAPVGRHGVEELLNVVADPNDKRVPEIARACLSAFGAQLRRIQEQVLEFDRLIRAWHRSDEMSMRLDEAPGVGPVLATAVVATVADPKSFRSGRNFSAWIGIVPKQHSSGGKNRLGNISKQGDRYLRGLFVAGALAVIRYAKIHGTKHRPWLTALLARRPTKVAAIALANKLARMVWAMMARGERYKEPVALAA

SEQ ID NO: 52183 - protein, 349 aa, unidentified
MGEVSTIGVDIAKSVFQIHGVDADGMVVIRRRVGRAKVLEFFAGLPPCLVGMEACATAHQWARELKKFGHDTRLMPPTYVKAYVKRGKNDAADAAAICEAVTRPSMRFVPIKSVEQQSALMLHRTRDLLIRQRTQLINALRAHLAELGLVAAKGHEGLHQLVTAVAESSDERLPSNARFACQSIVAQLSAVQTQINGIDTRITQAHRANADSKRLDAIPGFGVILSTAVVATMTDPKAFKTGREFAAWIGLVPRQNSTGGKERLGSISKQGDRYLRRLLVLGAISIVGTARTRPDKYPWVTELLGRRPAKVVAVALANKMARTAWAVLARGETYRAPTRSSSAAIAAAA

SEQ ID NO: 52184 - protein, 339 aa, unidentified
MDRNRTVAGLDVHKDSIYLCIMGHDETIIFEKTYGVLTPDLRQMCQDMIERGVTEAAMESTAVYWVPVWNELCGSMELKLVNPYFIKQLPGRKSDVKDAQWIAECLLKNLIRGSFVPEPIVQDMRKLNRRIMDLNEDMTYNCNKLDAALQRCGFRLSNYVTTIKSRSYQSVLQAIINGITDPEELVKMVHGRTVNKHGRDTVKAAVSGLFSKTDITVFRQIKEVINTIERQIEECQKELTALCREHFPEQYRRIQTIPGVKERAATAIIAETGVDLKMFATAACLVGWCGLKPRNDVSNGRCKSGKVTHGNRYLRQILIEIAWVASRTRNCFFSNFSYI

SEQ ID NO: 52185 - protein, 311 aa, unidentified
MLKLVGAESVRSRRVRCAKFEFWKSGFDAVDGLHRELRYVRREAGRGESTMKSVTAIGLDIAKSVFQVHGVDAAGRVVVRQRLTRGRVLAFFEKLAPCLVGIEACGSSHYWARELMARGHEVRLMPAQYVKPYVKRGKNDAADAEAICEAVTRPTMRFVPVKTPEQQSVMMLHRVRLMLNRQRTQLSNSMRAHLSEFGVVAPLGRRGIDQLLAVVADAEDTRVPAEARFCLQMLAAQLAVVKEQILENDRRVRASARQTELGRRLMEVPGVGPLLASAFIATIADPAAFKTGRDLAAWIGLVPKQNSSGGK

SEQ ID NO: 52186 - protein, 415 aa, unidentified
MDVLYPCCAGLDVHKDSVVAAVRLAADGPAKTGVRTFDTTTPGLLALSAWLAECGCTHVAMEATGIYWKPVWHILADGEFMLILANAAHVKNVPGRKTDVADAAWLADLLAHGLIRASFVPEAPTQEMRALLRTRKQLVREQASHVQRIQKTLEDANLKLASVLSQVMGASGRAILQALIDGERDPDKLLALVRRGVKASPDKLRAALQGRVTERHRFLLRLHLRQVDTLAVAITEIDAEVERDLDPFRQAVRLLRSIPGVSDLTAQVIVSEIGTDMSRFPTAGHLISWAGLCPRNDESAGKRRSTRLRKGAPWLKTTLVQCAWAATHKKHSYLQAQFQRLRHRRGPKKAVCAVAASILTTAYHMLRDGTFYLDLGADHFDRGTAEARANRLVRRIANLGFACTLTPLPQEAVSV

SEQ ID NO: 52187 - protein, 344 aa, unidentified
MSEVSMIGLDISKHVFHAHGVDGRGRAMFRKRISRGKLLDFFATQPSCTVALEACGGAHHWARQLAQLGHQVRLIPPAYVKPFVKRQKNDAIDAEAICEAAQRPSMRFVAVKSEEQQAAGMVFRTRDLLVRQRTQLINAIRGHLTEYGWVAPKGPSHVAMLADLIDEEEMASSLPGAARMMFRVMLDLLSGLSRKIADLDKEIARRAREDEVSRRLMTVPGIGPISATAIVALAPPAESFAKGRDFAAWLGLTPLQRSTGGKQKLGAISKMGERTLRRLLIIGSSAVVKQAGKRGAPRGSWLEQMLARKPRMLVTVALANKMARIVWALLIKHENYRAPVAAKA

SEQ ID NO: 52188 - protein, 343 aa, unidentified
MKLHVIGIDLGKMVFHLVGLDSTGRAVIRKKCSRKQLLAFTANLEVKLIGMESCSGSHFLGRALREQGHEVRLMPAQYVKPYVQTNKSDFLDAEAIAEAVQRPRMRFVPIKTEEQLDLQALHRVRERWVMRRTAVVNQIRSLLLERGLTLPKGRRYVDQQLPRILEDAELRLSGSFRVLLAQLKLELEQLGARIEEMDRVIQKTAKENEDCQRLTEIPGVGPVTATALIAAVGNASTFRKGRNLAAWMGIVPGEYTTGGKQKLLGISKRGNKYLRTLFIQGARSVLQQRDKQSPALSSWLAQLLVRAHQNVVIVALANKLVRMAWAVLCKNERYRAPVLAVAT

SEQ ID NO: 52189 - protein, 420 aa, unidentified
MIAAVIERCAGIDVGRKFIDVCVMVGEAQAEPTQQTRRFSTLNEDLERMHQWLRENHCTHAVMESTGSYWRPVHNILDDGEMEVLLANSQHVKNLRGHKTDRNDARWLAHLLRHGMIRPSFIPDRETRELRDLTRRRKQLVGCAADERNRVQRVLQEVNVQLGTVLSDVFGESGLNMLDALMYPDATPAEIADLAVRQARKKIPLLKKALQGHRMTDHHRRLIRHSMEHLAFLEEEITELDREISEHVKTHTALHVASQLAQSVTGIKQIAAAAVIAETGPDMTQFSNGGKLAAWIGTCPGNNISGGKRKGGQTRKGNPWARRILVECAWSATRKKDSEAQRYYERLKPRLKHKPALIATAHLLTLQLYKALATGNPYTENAQTELTTTQAQRLIRHHSRRLKKLGCWLSAHRQRCASTT

SEQ ID NO: 52190 - protein, 313 aa, unidentified
MSEKSTIGIDVSKLWLDVWVLPSGLTLHVGNDAAGWATLIERFKGKVKAIGLEPSGGYERDLVKALLRAGLPVRMVNPYRLRQYAKALGTLAKNDRIDARLIARFTAELPTRKPRHSALTDQMAELVVARRQLSDDKVRLGNQLEQVRDPVLRRMMDQRLRRIEADLLLLDKRLAELVASDTQLRTRDRLIQSFCGAGPVYSHTLLALVPELADPSLDRRQLAALVGVAPFDNESGRRTGKRAIWGGRAAVREVAYMAALAASRSNPVLKAYRDRLVADGKAPKAAIIAVARRMLGIILALLRTGKEWDPQYA

SEQ ID NO: 52191 - protein, 569 aa, unidentified
MCCVRVPDEDHPGRRLQEVMAYSTLTRSLLSMADHLASLGVTRVVMEATADYWKPVFYLLEAAGFQTWLVNAKDVKHLPGRPKTDKCAWPGGHPGGMKCSPRLTGRGRRIQSGALESPRQVWRRARGTWDCRYEHEPQLRLLPGPPWWVVTAAQRGGEMELIYQRVAGLDVHRDEVAACVRTAGPRGGVHAEKARFSTTTGGLAVLAGWLAEREVTLVAMEATGVYWKPVYYALEDRFELWLCNAHHVKNVPGRKTDMSDAEWLADVAAHGMVRPSFVPPPAVRELRVLTRYRQKQTSIRAGEIARLEKVLQDAGIKLTSVASKVLTQSGRAMIEALIAGERDPRALAGLAKGKLRPKIPQLTAALDGHFGAHHAVAAARILAHLDFLDTTIAELDTQIAGRVAAGYQSAARLLREVPGIDRASAEVIIAETGADMSRFPSPAHLAAWAGLCPGNHESAGKRRMVATRPGNPWLRRSLIESARAAARTKGSYFGAQYRQIARRRGPNKAAVAVAHSLLDVAWHLLTTGELFADLGEDYFLSRHDKQHQTRRLISQLEKLGYTVELSPAA

SEQ ID NO: 52192 - protein, 425 aa, unidentified
MNSTTKFAATIGLDWADQKHDLWIRPADGSKAEHLQLEHTPEALHEWVAKLRERFGNRPVAIGIETSRGAVISALMAYDFIVFFPINPKALKDYRAAFAVSGAKTDRVDASLLEEFVRLHGDKLHALEPDTELTRKLAGLVQNRRLLVDERTRLVNQLHATLKTYYPLAQSLLGAQMNTSMAAEFLARWPELQSLKKAKVEVLRAFFYKHNSRSAQLMEERLEAVQKAKALTTDPAIIEPARALVTALAAMLKPLHKVIAFLDKQIELTMDQHPDAAIFRSFPSAGPALAPRLLVAFGTNRARFASATDVAQFYGLAPVVEQSGKSRTVRMRYRCPKFGRQSFHENAACAIRGEPWAQAYYAQQKARHDDKHHLACRALAFKLIRIYFACWRDRRPYDSAVYLNALEKNGSPLIARLEASTIHPL

SEQ ID NO: 52193 - protein, 397 aa, unidentified
MSTHQRIWVGIDAGKGHHWAVAIDSDGSKLLSRKVVNDETEILDLIGDVCPLADEVRWAVDISSRPSALLLALLLAHDQEVVYIPGRTVNRMSGAFAGDHKTDAKDAQTIAETARMRSDFRALELAPDLVGELSLLTSYRSNMTADRVRMINRLRELLVGICPALERAFEFRKRPGLVVVSGYCTPSSLRRIGVTRLSTWLAKRDVRNASYFAEKAVEAARSQTTSLPGEKRAAALASDLAQQILDLDERIKKIDREIAEVLSQDERSAIIQSMPGMGPLLTAEFIALTGDLSGYRDAGHLASHAGISPVSRDSGKRTNNHRRPKFYNRRLCRLFYLSAQSALLRPGASQEYYRRKRAEGMLHPQAVLCLARQRINVLWAMLRDGRAYSPDPGLHRP

SEQ ID NO: 52194 - protein, 353 aa, unidentified
MDRVIGIDLGDKKSHYCVLGEGGVVVEEGTVVSTPAAFNAHFGVLASSLIAMEVGVHSRWASRVLRELGHEVVVANPVRLRLIHKSSKKSDRVDACALARLVRVDPELLGPVEHRSDEDQSMLAVLRVRDMLVRTRTRLINCARGLVKPTGTRLPSCSPVSFANRARPEVPSELRLALDPLLDQIQSLTNLIKRYDRKIARIAETSYPATKHLEQIRGVGPLTALGFVLTIGRSSRMARSRNAGAYFGLRPRCYQSGESNPQLGISKEGDGFMRRMLVQSAQYILGPFGPDTDLRRWGERLIARGGRGARSRAVVAVARKLAVLLHHLWVTGEVYDPLYNNRIRQHALEPVSA

SEQ ID NO: 52195 - protein, 457 aa, unidentified
MAKQSGKRKKGGAKADATEGLPPLNLHAAGIDVGSAEHYVAVPLDRNVEPVRRFGSFTADLHRMAHWLKDCRITTVVMQSTGVYWMALHDVLESHGFEVNVANARHTKTLPGRKTDVQECQWLQKLHTFGLLNNSFRPPEEIRVLRGYLRQRENLVAAAATCIQHMQKALTEMNIQLANVISDISGTTGLAILYDIVRGERDPYKLAMHKHSRIRASRQEIARSLQGTWRQELLFVLEQSLDLYQTYQQKIQTCDERIDGQLRSMEPKIDPVSEPIPEPRRGKDWRGHQSGFDLRGQLYRITGVDLTRIDGIEVQNAQTIISEVGVDMSRWKTEKHFASWLGLCPDNRISGGKVLKRGTRHVVNRASTALPLAASALLRSQSALGAKFRRLRSKLGAPKAITAMAHTLARLVYRMLKFGHDYVDRGIDFYEAKYQHQQLQRIRKQAAALHMQLIPLT

SEQ ID NO: 52196 - protein, 434 aa, unidentified
MSKEVLYLGLDVHAENIAVAIAEAGRDGEVRNHGLISSGLHSVDKLLHKLGHPGKELRVCYEAGPCGFVLARHLKKKGIACDVVAPSLTPKGSGDKIKTDRRDARMLARLHRAGELTAVHIPDERDEAIRDLCRARTDAVHDLRSGRHQLKAFLLRNGYRYSEKTAWSQAHLRYLRELSLPHPAMRVVLEEYLMAIDTVGERIERIEAQMTALLEDWHLAPVVKSLMAFRGYQTVAAMITVSEIGDIHRFAHPRQLMAYLGLVPSESSRGTEARWTKRSVARRVPERAERRHQSSSGGSRAQGSITKCGNGHLRWIFNECAQHYRLPPKVSSPLSRRQEAIPKPHRRAVMELSWRCQHRLHEKGRLLAARGKTRQKVQTALARELCAFVWELMRITTPPPEGAAPFERRQRPRPQGKQAGRKGREYTLKLQAAK

SEQ ID NO: 52197 - protein, 350 aa, unidentified
MVLEINQTENKMTRYIGVDLHTNSLTACYIEEGKEIRFKTYQLLPAALRCFKQSLQPTDELAVEATGNTEFFIESLGEKISRIVVVNPREFKVIRSSVKKTDKNDARALAYFLSKDMLPEARRKSKRHQKVGSLAQTRDKFVKSRTYFMNKVHGILNTCGIKLKKESLGTEKGLQRVLTHELDEISQFEIEALVSQIRALNESIKKLDKKLIEVGSELEGYKNLVSIKGIGDRSAAILLSVIGEVNDFEDESKLFAYFGVVPRVSNSNETERSGRITKRGTKLGRTTLVQCTLIAIRYSSYLRKFYDRIKGKKGSGKAIIATAKKMLGIIYKTLKNNWVFEDFANFVLAK

SEQ ID NO: 52198 - protein, 361 aa, unidentified
MTAYCGVDFHARQQTVAYCDSQDGEIKLIKLIHDDRESLHRFYTQFQPPVVVGLEAGGYSDWFERFLEELGIEPWFGNPTEIRRRARSRQKNDRRDAELLLDLLLKGEFPRVYRQHPDSRAVLARLRYRHKLVQLRTKATNSLHALAIREGLTLGSRLLSKQGRLRLMTLPLGEVQAIQRQEWLQVIDHLSTHLQRIEQELQFLAQKDQVVMRVRTHPGIGVLTGLALVHTLVPISRFQNSRKVAAYIGLEPREFSSDNKQRWGGISKAGSPLLRFLLVEAAQQAARRDPGLKTAFLRLSARRGRSKARVAVARKLLVRAYIMLRDEIDYATYLRRTVAVGKPGISRDRSGSPEMPDQLDH

SEQ ID NO: 52199 - protein, 407 aa, unidentified
MEVQHARCAGLDVHQTSVVACARLVVGHEVVQHVETFGTTTRELLRLLAWLEGHGVTQVAMEATGVYWKPVWHVLEGHVPLLLGNAKEIKNVPGRKSDVKDAVWIADLVAHGLIRASFVPPEPIQELRDLTRTRKQLVAERTQHVQRIQKVLEDANVKLASVLTDILGASGRAMLDALAAGEQDPATLAQLAHGRVRASRAELAEALEGRVRAHHRFLLRLHLRQIDALDSSIAAVEARVEDLLVPFAPLVRRLTTIPGVSKVVVAVLLAEIGADMGVFPTAGHLVSWACLAPRQDQSAGKRRSTRTRQGQWLKATLVQAAWAAVRKKDTYLYAQFHRLRARRGAKKAILAVAASMLTAAYHMLQAETDYIDLGGEFFQRRDKKGVAFRLVQRLQHMGYTVHLTTAA

SEQ ID NO: 52200 - protein, 405 aa, unidentified
MPYILALDVSMGHSYSVLYKDDTCLFEDEIEHTQRGFHALLEEIQHLPERPLIVFEATGIYSRPVEKFFQDHHFPYCLLNPLEAKKQMEESTLRSWKTDKSDAHRLAQTHLKNQRQPKEVQSNFYLEMRDLARFYQEIEKKITRLRMDLHNCLQLTFPELEQFFSNRLTPYALTLIRLFPHPDFVLASTRTKIKNKLINETRKKISANRAEQKADQIIHYAQCAYPAVEKDSIHCQKTIYYAELLQDLLEQKKALATQMIKKAEGSPCFLLYQTFPGIGALTAALLLGELGDITRFKTHKQLNAFVGIDIRRYHSGKYTGQDRINKRGNPKARKIIFFTIRNMIRQQRAAPNHIVDYYYKLKKQPIPKKEKVATVACMNKLLKCMHAMVRAHTEYDYAYAVSVDH

SEQ ID NO: 52201 - protein, 416 aa, unidentified
MKLFVGIDVSSEKLDVCFLTDDNQLSILSEISVANDIEGASFIRETILEFNNSYHFDQIVIGMESTSMYSFHPSMFFHEDEKLKKLNTLVTIENPFRVKQFSRMFDENKTDRNDALRIADFLRIQRFTTSPIKEEKYMALQRLTRTRYQLIKQLIRTKQHFLENLTYKCNTLAREIRDESTSLFSATLISLMTEDFTLDELAELPLEAFCDLLQEKGKGRFKQPEKIAKAIQRAITMSYRLGALAQESINVVLSVLVREIRALEKNIKELDKAIEQVIVVIPEYQCLTSIPGVGKVYAAGLIAEIGQIERFEDQTKLAKYAGLSWKVNQSGNYQSQNTPLTKQGNRYFRYYLVEAANSVKNYLPEYKAFYQSKYKEVPKHQHKRALVLTARKFTRLVDTLLRKHQLYTPPRNVIEK

SEQ ID NO: 52202 - protein, 360 aa, unidentified
MYSAGIDYHKRYSVVNIMDDHGTIVVDNARVNGNTLYGFRQVFAGVDGPLQATFECGRNWGYLYDLLEETGSVERIVPAHAAKVKVIGEAEIKTDKIDARMLAHLLRADLIPAVHVPDAATRMRKDVLRQRAQWVQLRTRVRNRVHGIIDRYPEAAMPKVSDLFGRQGMRALKKVELPGDERALLDQHLAALALLAKLIKACQRLIDRAAQGDADEHLLLTVPGMGPVIAPLVSVEVDGITRFSSAAKLCAYAGLVPSTYSSGGRTRHGRMLHSCNHWLKWAFIEASWVAMKHDLYFGGLYKRHRARGKKATTAITIVARRMCTIVYHMLYEQRAYEHRPLRFAAPGRPGRLLTESHMVA

SEQ ID NO: 52203 - protein, 298 aa, unidentified
MLKQSHYKVGCDAHKHYSLFAVLDHRGRPVEQTRVNHEPGAIRAFVSRFPPGTPVALETVGNWYWIVDEIEQAGCVPLLAHAQMAKKMMGHVHKTDKLDAQGLAILQHLGSLPTVWIAPGEIRDARELPRTRMALSKVRTMLKNRMHSTLAKYALSLDTQSDIYAPKWRPQLMQLTCSLPDETRRCMEQELELLDQVQEQIHRLEARILERVQMTPTIQLIQSVPGPAKILSIVIDREVGSIDRFPSPHHFASYSGLVPKVKASGGKTHYGKMIKAANNYLKWAFRGGLGFLDRGISG

SEQ ID NO: 52204 - protein, 454 aa, unidentified
MARPKKRKYRKLDRSLPVMRPNAGGADMGAREIFVAVPPDRDTESVRSFPTFTQDLHALADWLQRCHVDTVAMESTGVYWIPLFQILEARGIEVHLVNAQHVHHVPGRKSDVLDCQWLQYLHSVGLLRASFRPEHAVCEIRSLMRHRENLVQMACVHVQHMHKALDQMNLQIHHVISDITGVTGLAIVDAIVAGKTNPKELAKLRDHRIKASIETVTKSLVGDYRAEHIFTLKQSLTAYRHYQQLIADCDQEVQQRVQAFDTQNTKDDGPTATATDESSSTTTSTSSFDLHSHLERIFGTDLTLIPGFECLRIQTIFSELGADLSKFPADDSFCSWLNLCPKDGTSAGRRIHSPKIQTKNRVANAFRLAAQSLHNNKSYLGDYYRSQRARHGALKAIKNAAHKLARIFYHLVTTRQAYDETVFAKLETRNHKRRLNKLQSLARQMGYSLVEVLA

SEQ ID NO: 52205 - protein, 383 aa, unidentified
MKKNSIAKLQANKSQIRKMAAKQKLTVGLDLGDRTSRYCILDGAGNKVGDDQLPTTKVGLDSLFGKMAPSRIALEVGMHSPWVSRQLAALGHEAIVANPRKVRLITQSVKKNDRMDAEHLARLARVDPQLLAPIRHRGVEAQADLAVIRARAELVEARTKLINAARGLAKPMGERLKSCDADYVKESLADGLGEATQNVIRPLLKSVEDISQQIGVYDKKIREVEKRYPETELLKQVHGVGTLIALTYMLTLEDAERFEHSREVGPYLGLTRKQRDSGDRQPELGISKAGDELLRRLLVQAAHCILRDGAPDSDLKVWGMTKVQTGAKTGNGKKGSKRRKKKAAVAVARKLAVLLHKLWVTGEVYDPQYNRKAVEAGKGKAAA

SEQ ID NO: 52206 - protein, 349 aa, unidentified
MAARTPSADFVIGVDTHKHSHTGSVVDSLGAELAFTTLPADPSGYRRLLQFARSRADGRRLWAIEGTGSYGRGLTTFLLEHDERVVEIDRPARPARRNGAKSDRLDATRAAREALSRRHLTQPRRRGDREALRVLLRTRESAVSSCSQAICNLKSLVVTAPAQLRHRLAGLGTNALMERCSRLRILRTHEVEYRATVMALRTTARRVLALRQEAEELKSALDELVRKMAPRLLAEDGVGPITGAEILCAWSHRGRIRSEAAFATLAGVAPIPASSGQTTRHRLNRGGDRHLNCALHTIVLCRLGHHEETRRYAARRQAQGKTPREIKRCLKRNLARRLFKLLETMPQPT

SEQ ID NO: 52207 - protein, 316 aa, unidentified
MRKATRFVGLDVHADTIAVAVAHPGREGVVESLGIVPNRAEAVRRLVKKLSAGSKWRACYEAGPTGYALYWQLTELGVHCDVVAPSLVPVRAGDRVKTDRRDAARLARMYRSGDLTTVWVPDQAHEALRDLVRAREAAKKDQLRARHRLGKFLLRHGRRPALPMTAWSGKHMDWVRTVSFDQPALEATLVDYITEVDHARARIERLEHAIDDSVAGMPAKMKAVVEALQALRGIAQVSAVTIVAEVGSLSRFPRPKQLMGYSGAVPSEHSSGARTQRGSITKMGLIHSRRHLTKGGYDAQRDGREEAAERAADLHG

SEQ ID NO: 52208 - protein, 324 aa, unidentified
MMIIGVDYHPSSQTIAFLMEETGECGEQELNHSSGQAEKFYRDLKQRGICVRIGMEATGYSRWFERLLAELGFEVWMGDPAEIKAKRVKKRKTDREDARLLLRLMLENNFPQVWVPGPENRDLRQLLWHRHRLVQMRTRIMNQLQALAMNEGYRWKKKLFSEQGRAQLEKLALAPWASRRRQELLELLDRMNPTIEELTAAVEREAKKRPEALRLMTHPGVGPLTALAYVLIIGTPTRFERGKQIGTYVGMIPCEESSAGKQRLGHISKQGSSLLRFLLVEAAQAAARVHPAWRRRYIRLAMRRHKSIAKVAMGRKLAVRLYWM

SEQ ID NO: 52209 - protein, 315 aa, unidentified
MERSPAAPTFVGIDVAKNRLDVHLRPSDEAVALSRDGAGLEVLVERLVALRPALVVLEATGGFEVAVAGALAAAGLPLVVVNPRQIRDFARATGRLAKTDRLDAEAIARFAEAVQPAPRPVPSAAAQALGELVTRRRQLVEMITSEGQRRRQARDPRLGRRLQAHVTWLQKELAALETDLDDAVRGTPAWRAAEDLLASVPGIGKTSARTLIAELPELGSLDRRKIAALVGVAPVNRDSGTFRGRRMVMGGRASVRTALYMPTLTAIRHNPALQAFYQRLIGRGRPAKVAIIACMRKLLVILNAILRDHRPWQPA

SEQ ID NO: 52210 - protein, 355 aa, unidentified
MIVIGVDPHKQTHTAAAVDAAVGELLGERTVKARRAGHEQLLAWARGYGEERLWALEDCRHVSVSLERFLLASGERVVRVPPKLMAGARRSARERGKSDAIDALAVARACLREPSLPAARLEGPEREIRLLLDHREDLVGERTRIQQRLRWHLHELDPELELPAGCLDRHCWLDRVGRRLARGEQTAQVRIAGELVVRCRELSARCRELERELAARVRAQTPALLELPGCGVLTAAKLVGETAGVARFAGDAQLAMHAGAAPLPASSGNSNRHRLNRSGNRQLNCALHRIAVTQGRHYPPARAYLARKQAEGKSRKEALRCLKRHLARTVYRTLTAPTEAKMKPPNQAALTPALT

SEQ ID NO: 52211 - protein, 429 aa, unidentified
MNIKPIAGIDVGKFFSEMVIISPSNELFARMRIHHDSNADMRRAIELLKKAEKDFASRPFIVMESTGHYHKILFHFLQKSGFEVSTINPIQTNCIKNFGIRKVKNDKVDARKIALLYRFHELKPTSISNEDIDCLRSLSRQYYKLSDELTAYKNRFISIVDQLMLNFKEVFPNVYSKTAIAVLEECPTPTAIIEADRDKLISIIQNNSRKSLEWATKKYELLVSKAREFEPLSINNAANVTMLGIHIAMIKTLQENLDKVLKAIHQLIADDLSKDLPVMALTIQLLQSIPGVGFLSAATIVAEIGDFNAFSKPKKLVAYFGIDPSVRQSGEFTGTHNKMSKRGSRLLRRVLYTIALANIRTKRNNEPCNPVLMEFYKKKSQNKPKKVAIGAIMHKLVFIIFAVLRDRKPFELRSPEQHAKILAKNRTVA

SEQ ID NO: 52212 - protein, 364 aa, unidentified
MKLVKDIVNRVVRYIGMDVHKDSTTAVVLDAQGNLVMQVTLRTEGTVLVDFLRGLSGSLHLTLEEGTYSAWLYALLSPWVEKLIVCNPRQNALLKQGNKSDPIDARKLAELLRLGSLSAVYHGAPEMRTLKELAASYATLVQDSTRVMNRLKSLYRGRGIRCGGTQVYSPRHRARWLEQLVEPGARQRAKLLYQELDLLLQLRPQARRALLAQSRQHPAQKILRTIPGLGPVRVALLLAWLQTPHRFRNKRKLCGYGGLGLLTRGSAQYRLEKGELVVSPKGVMVRGLNPAHNTHLKDIFKGAALAACQRPGPLREAYERLLREGTQEHLARLTLARKIATLVLTLWKRGERFDAQRLRREQAA

SEQ ID NO: 52213 - protein, 350 aa, unidentified
MTIKHYIGFDVHKKTISYCVKAADGNIHEEGILRAIPMVLREWAGKRQEPWHGAMEATLFSGWVYDALKPFASALEIGNPSMMKAISAAKKKNDKLDARKIADLVRCNLLPACYVAPQEMRALRRLLRYRNVVVAQAVRMKNKMSGLLMEVGAEYSKQRLHSKKYFSELLDQLEEVPESVKDLLRLSRGSVEMFETMQRQLLNRLQKDPLLVKRVHLLRSIGGVGEVTALTWALEICDPQRFHCIADAVSYCGLSSALVSSAGKQQRGPISKQRNAHLQTVLIEAAKLAPRWNRQLAELHERERKRGNRNRATLAVARKLVAYLLAVDKSGQAFQVRNPPPAEPGVDKVA

SEQ ID NO: 52214 - protein, 407 aa, unidentified
MNAVGIDVSKGKSMMAALRPMGEVVLPPKEYPHTEVGLERMALDILALGEDTRALMEATGRYHEPVAAALHEYGIRVTVLNPLFIKQSGGGSIRKVKTDKADAMKIAKYALDNWVDLREYTPMEPIREQLKLCSRQYNLYMKNVVALQNNLISLTDKVFPGVNELFSSPDRADGSQKWIDFVITFWHCECICLVSEAAFTQRYRKWCKRKGYHFSERKAAELYMGSMGHITTLPRNSNTKLLITTAAKELASAKATLAVLRAEMNRLAQQLPEYETVRAMYGVGETTAVQLMAEIGDVRRFPRRSSIVSFAGVDPAVDDSGKHISKSNPTTKRGSPHLRKTLYQIVCTYLRKAPFDEPVYQFLDKKRAEGKPYFVYMTAAQNKFLRIYYARVKECLVAADTKEFSED

SEQ ID NO: 52215 - protein, 403 aa, unidentified
MAAISAIDWASEHHDVHVADETGAVLERRRFPHTEEGVGALVGLLVDHRVQLVAIERPDGLLVGRLLAAGLRVMAVHPNQLAAARGRFRAAAGKSDRFDAMVLCELARTDAHRFRVLVPLGDGTAALRSLVRAREDLVEAKVALANQLRAQLDASWPGAARIFASIDSPIALAFIGRHPGPADARGLGPGRLRGFLARHSYCGRRSPEELLARLRDAPVAALGEGEAEARRTAVAGLAGALGQIVAEIRRLEAEIGGAVRAHPDGEIFLSFFRDPKSVLTAAGLLAEIGDDRGRYRDADSLAADGGVAPVAVESGKSRHASFRWACDKRLRGHLGVLADSTRHWHPWAADVYARARARGQDHPHANRTLGKAWTRVLWRCWQDRVPYDPAKHGNLRRLESAGG

SEQ ID NO: 52216 - protein, 361 aa, unidentified
MAQVRSWAGLDVHARSVLAVTLDAESGEIRTYRLTAETTKVVEFLAKLPGPTRVAYEAGPTGYGLARALHAAGIGCVVAAPGKIERPAQDRIKTDQRDAERVLRLLMIDALHAVRVPTVEEEALRDLVRAREDLRGDLMRARQRLSKLLLRHGIVYEDTSSTWTQRHRAWLRAQDLGGGAQATLLDYLGGVDTLELRRGQLETTIAELVPSSPYAQTVARLRCLRGIDTLSAVGLAAEIGDFHRFDRPGKLMSYVGLVPSESSSGETRRQGKITKTGSKHARRLLIEAAWHYRKTPARGVTLQRRQDGQPANVIAISWQAQRRLHRVWQRLAEERGKRRTIVAVAVARELAGFCWALARAD

SEQ ID NO: 52217 - protein, 409 aa, unidentified
MATMIAGIDVHKRLLVVAVADARGEKLKFVGRRFGTGAGDLQQLAAWLSQQQVEAVVMESTAQYWKPVWLALEPQFQLHLAQAFSNRAPKGRKTDFRDSQRLVCRFIAGELILSFVPEPAQRQMRTLTRRRVQLSRDRVRLQSQLECLLEEARVKLSSVLSDLLGASGLRILRALAAGEKDPHALAELGDARLQCSREQLADAVSIPLDSTHQQLLGLYLEQFALLDTHLETLSVLAAETMRDSQQAIGRLAEIPGIQVIAAQQIVAEVGPQAASFPTAEQFSSWVGTCPGHEESAGENHNARCPKGNRYMRRVLCQAAQAAVKTKNSRFQILFYRLVGRLGYAKAIWAVARHLSVVVWKILHEAVRYVEMGQATTPQAAKRRAQRMVRKLRQLGYTVQISALSPEVTM

SEQ ID NO: 52218 - protein, 402 aa, unidentified
MNAVGIDVSKSKSVVAIMRPFGEIVSTPFEIKHTASDIHSLVELINSVEGESRIVMEHTGRYYEVLAHQLSKANLFVSAINPKLIKDFDNDSLRKVKSDKADAVKIARYALDKWQNLKQYNVMDELRNQLKTMNRQFGFYMKHKTAMKNNLIGILDQTYPGVNTYFDSPARSDGSQKWVDFASTYWHVDCVRKMSLNAFIDHYQNWCKRKKYNFSQSKAEEIYGKAKELVPVLPKDAITKLIIKQAVDQLNSASTTVESLRTLMNETASKLPEYPVVMAMKGVGTSLGPQLMAEIGNVSRFTHKSAITAFAGVDPGVNESGTYEQKSVPTSKRGSADLRKTLFQVMDVLIKTHPQDDPVYQFLDKKRAQGKPYYVYMTAGANKFLRIYYGRVKEYLSSLPES

SEQ ID NO: 52219 - protein, 436 aa, unidentified
MSTHRNIVYDCAPLPDFFHESEEETMQVIHPRCAGLDVHQKTVVVTSMITQQDGTVERERQTFSTMTVDLLVLDDWLRQRQIEVIALESTGIYWRPVFTILEEGRTVILVNARHMKAVPGRKTDIKDSEWIADLLRHGLLQASFIPPEPIRELRELTRYRKTLIQERADEVNRLQKVLEMANLKLSAVATNVLGKSGRAMLDAILGEQQNPLVLAELARGRLRSKLSDLQQALDGRVQPYHRFLITRILAHIDFLEQSLLVLQQEIEKRLIPYAEAVELLKGIAPLQEKAIATVVSEIGVEMDRFPSDKHLASWAGVSPGNYESAGKRLSGKTTHGNPYLRAVLCELAWVVAHTKGTYLSAFYHRIARRRGKKRAILAVAHKLLVVIYHVLKTKKPFVDLGADYFDKLETTHIQRRAVQRLEQLGYQVTLTPVQVT

SEQ ID NO: 52220 - protein, 419 aa, unidentified
MPFKIFRKNCCGLDVHKTWIYACIGITDPNGRTEYKQTRFSAFTKGLQNLADWLAKYDCEEVCMESAGKFWIPVFNVLEKSCWVTLAHPKYTKPQKGNKTDRKDAKWICDLFMCDMVKPSFIPPPDIRQLRDLMRYRMKLTNILTGEKNRALSCLTVSNLKLDDVFSDVFGKSSRSIISYILEHPGEKFDVAPFIDKRCKHPLDEIQAAVDGAVSREQAAKLRECLQHIDEIGAHKANIEREILRLAEPYATQLSLIQTTPGLSGNPMTAIAILSEIGADMSVFPSAKHLVSWAGCCPRNDQSNGKVKSTRISRAGSYLKPILVQVANAVIKSDKYPECKERYRRLKARRGHKKAIIAICRMLLTAIWNILSKLEPYSSAGYFAGKLTEHSVVITRAQGLALLRQRGYIFKDELVPTPE

SEQ ID NO: 52221 - protein, 362 aa, unidentified
MRPAPSMQVGGQAMEHYVGIDVSLELSSVCVVDVGGKIVAEAKVESHPDAIINFLRKLGLSVKRIGLEAGPLSQWLHAGLTKGGFETVLLETRHVKAALSAMTVKTDRRDARGIAQLLRMGWFRPVHCKSPGSQEVRALLVARKQLLGKLLDVEFSIRGILRGFGLKMGVVTRTGFEARVRELCAGQAMLEQIAEAMLAARAALRKEYSKLHKAMLALVRRDEICRRLMSAPRVGPLVSITFKTAIDDPARIRKSKAVGALLGLTPRKYQSGETDVTGGVSCVGDEMARTALYEAANAVLSRVTRFSALKRWGMDVAKRRGTKRAKVALARKIGVILHRMWVEGTSFRWTKEASKAPQLARA

SEQ ID NO: 52222 - protein, 391 aa, unidentified
MKKRYASVAYGGMDVHRKFSNVTLRDAQGEVVARERLDHLDRRKLREHLAQWPKGTLLVMEASFGWPWLSDEVEAAGHEPRLSNCYKVEHMRKARALPKTNKRDADLVSMLPQESKPWWVVWRAPPEVRDLREWMRHRVGLVGMQTEVKNRVHALFHRHGIFYEEATDLFGGEGRRFLFALADKGRHEHGTLPEGSLEALRSDLRILMMLRAELATILWRLHGRLKRDLLVRRLMTVPGVGLILAHVLASEMGDIGRFKNHRKLAAYVCLAPQCDDTGEPDPTRDPLGRHLGDRGNRTLKWAFIMAAHGAVKKGGKWRALYDRHTAGGKKNRGRGFIKVARGLVKVVFAMWSKGTEYTQTPPPRPGIRPAGRRRKDSRPGTGQLDVAMVQA

SEQ ID NO: 52223 - protein, 354 aa, unidentified
MSLITSMTIGCDVGDRTSQLCLLDNASVDVLERLAIRTTPTAFREFFSKVSQCRVVLEVGVHSRWMSELLAELGHEVIVANPRQLPLIYKGPKKTDRTDAEHLARLGRMDPKLLCPIRHRGKAAQLHLSMVRARDLLVRERVRLVNHARGIVKPLGARLPKCTTVSFAKRVRDEIPAELLPILGPVLLLLEQLNTQIAHYDRRLIETAKQAYPETQRLQQVDGVGDLTALAYVLTVEDKDRFRKSRDAGAFLGLVPRKSQTGSSDPELHITKAGDGYLRSLLVNCAHRILGPFGKDCDLRRYGLRIAGNGGKNAKKRAVIAVARKLAVLLHKLWVSGEVYQPLGYRSSGQRRAA

SEQ ID NO: 52224 - protein, 391 aa, unidentified
MSRYFVGIDISKYKHDCCIISAVDQNVVSKFVFANDMDGFNQLLSFFYSLQEPNEIRIGFESTAHYSLNLKLFLEKAHHSFMEVNPVLISEFKKSTTLRRTKTDIVDSEVIARWLMSVEYKPHPIGFYHAYSLKSLTRLRDRLVRQRSFYLVKITNILDHTFPEFKPFFKGRISKTALYLLENYGSADKMTRMNSASYDKIRSISRGKFSPQQFIELKKLALDTVGENNRIYEIELKSLLNLYTNLRDQIEVLEAEIIQSIEEIAPHFITIPGIGPISAAVIYAEYGDISNFSSPNQMLAFAGLEPGISESGTQAYRGRMVKRGSSQLRYTLLNCCLPLIRFDLAFANYYAKKRAEGKPHRVAISHVAKKLVRLIFALERQGINFDPKLVR

SEQ ID NO: 52225 - protein, 313 aa, unidentified
MSQNNNHILYVGLDVAKLSLQLHLAGRFHLLANDAKGHAQLLKRLRGQPAAHVVCEATGGYEQAVVRALQSAGVPVSIVEAGRVRYFARAQGQRAKTDPIDAAVLSEYGALFQPVATAPASRQQQQLAELAQRRRQLIHLLVSERNHAEHYADAFRARQSRQLVKTLEKQITQCDEAITTLIAQDTELAHKAERLKAIPGVGPVVAATMLAEMPELGKLTTQTAAALAGVAPYNRDSGNQTGTRSINGGRAAVRCALYMATLSAVRHDRILKEFYLRLRAAGKKPLVAMTACMRKLVILMNRLLKNHDFQLAS

SEQ ID NO: 52226 - protein, 365 aa, unidentified
MKKGSTAAATSKRNLDQKLTVGLDLGDRSSWYCVLDEAGEVISEQKLGTAPKAMREVFAAMPRSRIALETGMHSPWVSRLLSELGHEVIVAHARNVRLIGESRRKDDRFDAMTLARLARIDPQLLSPVKHRSAQAQADLTVVRARASLVRARTALVNAARGLTKSYGERLRGCNPRNLDKEKAQALSPELQAALGPLLQVLESLSERITEYNQQIEAVAQQRYPQTALLKQIKGVGTLIALTYMLTLEDPHRFHKSRDAGCYVGLQPGRRNSGQSEPQMHISKEGDPYLRTLLVQGAHHILGPFGADSDLRRWGLKLAERGGKAGKKRAIIATARKLAVLLHRLWVSGEVYEPLRNSKRTMSAAA

SEQ ID NO: 52227 - protein, 341 aa, unidentified
MKNLFIGVDFSKEKVDVAILFADGLVETAARVFNEFKTTVSGYRQLVKWVEQNSCGIDSSLWLFCGENTGDYSKGLCNFLYGKGYDMWLENAKSIKDASGLRRLKSDRADASMIAEYAMRNYDKAVMYEPLSESLTQLRELFLYRQMIVRHRCSFQVRRGEKRLTMEKSPVKTMISQSGRHIVSELNKEIEKIDKRIADLIKSDEELTEVFTIVTSVPGIGTQNAVCLMVYTDNFRRFNYDSRKIACYYGLAPFGKDSGTSVHSDPHVHYMANRQIKAMLTQAALAAVNFNPIMARYYMRLVERGKKKQVALNNVKNKLVHLVTAMVRNRQTFTPEYKISA

SEQ ID NO: 52228 - protein, 375 aa, unidentified
MKKVRFIGLDVHADTIAVAIAEPTGEVRSAGVIPNRPESIRKLVKKLGPAEQLRVCYEAGPTGYVVYWQLAALGVRCEVVAPTLVPVKPGDRVKTDRRDALKLARSYRAGDLTPVWVPDAAHEALRDLVRAREAAKKDQLRARHRLGKFLLRQGRRPPTAMKAWTQDHLTWVKSAVHFDHAAQEATLLDYLHEVDHVAGRIARLERAIDAAVQTAPMRIRAVIEALQALRGIALVSAVTIVAEVGTLSRFVKPRQLMGYSGAVASEDSTGERTRRGAITKTGNAHLRRIVIEAAWAYRHRPAVGATLRKRQAALDHEVNAIAWKAQHRLHARYRTLTAKGKTKQQAVTAVGRELLGFIWAIGVMVETKGRHAVAA

SEQ ID NO: 52229 - protein, 355 aa, unidentified
MKDQAMHYVGLDVHQATVVATSRNESGAIVLKATVPTEAKAIVGLVRGQGPRVQVAFEEGTQAQWLHDLLQPVAERVIVCNVRGKKELVNKNDDIDSGLLSERLRLGSLKGVYHGAASVLALKEMVRSYGNLVEDATRVMQRIKAMFRARAIPTPGTGVYGTRQRADWMAKLKGSGVRLRAESLFAQLDALLPLRRKAKEAMIAEARRQPAWKILRSIPFLGPVRVAQIIAIVGTPFRFRGKRRFWPYIGLGVITHSSADKEIVAGTIRRRRRAPLTRGLNRNHNRVLKDVFKGAATAAAHKDGPLKDLYEQTLAHGVDADMALLTLARKISSVALRLWKKGELWDPKKLTTQAT

SEQ ID NO: 52230 - protein, 370 aa, unidentified
MSVRRILAKTIDTDLEYEAIGIDLAKNCVSAALLTTDGEVVCIDRLDHSELEKSAQALSSTTFAMEPCTEMNYLVQKLEAWGHRCLVIGGKNVQNYVENHFSGQKTDLNDAQALAFLAQDTQLRTIKAKDVEQQKYASLTTLREQYIKQYRQAIVSLKGICQAWGLNISKGISGKARLKDLIENHAAFPEELKESLVDMVTHAQTAQKALNKITKTLEELAKSDKVCQLIQTIPGLGSICSCRLRATVGDIKRFKSPKDFPAYYGLVPRSIATGHNERKGKITHRGDRTMRSLMVQAAGSLVNMATKGKLKSKQLTKWILKKQKEKMPWGKLVCAVAAKLLRIVRAVLISNKPYNSKIAGVAKCSLPKGS

SEQ ID NO: 52231 - protein, 279 aa, unidentified
MQSSINYIGIDISKPFFDVALPNGQAYTYYKFDTSQDGFEALLKVLPQNSVVVMEASGPYYMKLAAYLTQQGIGVSVVNPLVIRRFCQMRMSRAKTDKKDAKMIAEYGQMEKPALWQPPQKYVVALQQMQALLDNLHKEHTALSNQHEGFSSSGMLGTKLEQIIEQELKHKQELIDKLTKQMEELAKKHYGSMLADLETIPGLGRKTSILLIVLSGGFNRFSNYRKLSSYIGLSPRIFESGTSVKGKARITKMGMSRIRAMLYVCAWSAKRYNKACREL

SEQ ID NO: 52232 - protein, 285 aa, unidentified
MNASKEQPHMTAGLDIGDKYSYLCLIDQQSGEVVEEGRLRTTPEALRRRFASEQPPMRIAIEAGTHSPWVSRVLEECAHEVLVANARKLRLIYANKRKTDEVDAENLARLARLDPKLLYPLKHRGEDSQAHMALIRSRQALVGARTQLVNHVRGAVKSFGGRLPKCPARSFHNRAPGHIPEALLPALGPILETIGSLTERIRDYERQLEAIAKERYPQETELLRQVEGVGPLTALTFVLTLEDPYRFEKSRSVGAYLGLVPASEKSGDRDPQRRIFRRKEIRCIA

SEQ ID NO: 52233 - protein, 311 aa, unidentified
MKLNTVHVGIDVSKEHLDIDPFDTMPPRIKNTSAGINALIKRIKVHPDKIIICCEASGGYEKLLNSMLSAEGIAVACVNARQVRDFARSRGILAKTDAIDAQVLSAFGQTHQPRVLEAQPVWQELTKALLIRREEMMAIRKAELSRLDPAPHPDVAVLIKQHIEVLSEHIRLIEDPLRELIREHADLAVRFNRLVAVNSFGLITALSLLAYIPELGTVSDNQAAALAGLAPYNRDSGTMKGKRVIHGGRARIRRALYMPAVGASHCNPVFKEVYQRLIANGKPGKVAITAIMRKMVVLANRLMADPAFQIS

SEQ ID NO: 52234 - protein, 366 aa, unidentified
MKKISTMQAFSNEILKEQKLTIGLDLGDRWSFYCVLDEAGKIILEQKVATTPEAMKQTFGKIPRSLIALETGTHSPWVSRLLTELGHEVIVAHAQKVELITKSNRKDDRHDARTLARLARIDPELLGPVRHRSAKAQIHLTVIRARAELVSARTALVNAARGLVKPFGERLPKCGTQQVSRELAGGLSAELREVLEPLLQEVESLNQRIQEYDERMEKIAKEAYPEVSLLKQVKGVGTQIALTYVLTIEDPYRFPKSRAVGCFLGLRPGRRNSGESEPQKGISKEGDRYLRTMMVQGAHYILGPFGEDSDLRRWGLKLAERGGKNAKKRAVVAVARKLAVLLHRLWVSGEVYEPLRNSQKVMRVVA

SEQ ID NO: 52235 - protein, 360 aa, unidentified
MSTATAPGPKTRTGPDVVVGVDTHKHTHMAVALSGTGGLLGSLKIEASRSGYKELLRWAAGFGSSPMFAVEGTGCYGAGLCRTLQAAGLQVVEVNRPDRSTRRRLGKDDTIDAEAAARSYIAGKATVIPKAGDDLVEMIRMLKVVKDSATENRTAALNQLHAIVVTAPAALRERLQRLKGKELVECCVGLRSGEINTPLAAAKMALRTLARRIQHLEQELKDTLAQLDQLTMKLCPELRNTYGVGVDISATLVVAVGDNQERMKSEASFAALCGVNPLPASSGKVVRHRLNRSGNRQANCALHRIVICRLQRHLQTKEYVERRTAEGRTMKEIIRCLKRFVAREVFGILRGGPAVRTAAA

SEQ ID NO: 52236 - protein, 412 aa, unidentified
MDAILECCCGIDVHKDNLKACLIKGSLTKKPSITIKSFSTLTSDLLDLKDWLEQEGCTQVAIESTGVYWKPVFNILEDSLTIVLANARDIKNVPGRKTDIKDCQWIAQLLRCGLIKSSFIPPQPIRELRDLTRYRKKLIEQITAEKNRIQKFLEDANIKLSSVATDIHGASGRAIINALLEGHTDPAELAGLAKGVLRNKLKELEAALRGFLRDHHRFMIKHCLDHIAYLESAIADLGVQIDKLLEPYQAEVARLMEIPGVKKKAAECIIAEIGVDMSCFPSADHISSWAGVSPGNNESAGKFRSGRTTHGNRWLSATLQEAAWAAAKTKGTYFKAKYHRLAARRGKKRASVAVGHAILKTAYYLIKEKFSFKDLGEDFFDKLNEQKTTERLVKRLEKLGHKVILQPLENAA

SEQ ID NO: 52237 - protein, 343 aa, unidentified
MGEVSTIGLDIAKSVFQIHGVDAGGAVVIRKRVTRAKLLEFFATLPACLIGIEACPTAHYWSRRLQALGHTVRLMPPSYVKAYVKRSKNDANDAAAICEAVTRPSMRFVATKSEQQQCGLMLHRSRQLLVCQRTMLSNAIRGHMAELGIISAKGRNGTAELLKIIADEQDDRIPAAVRLSLDVLARQYAAVRAEIVAIEKRIHAWHRSSEESRRLEEIPGVGPIVATALVAEVGDWKVFSSGRSLAAWIGLVPRQHSTGGKERLGRISKQGNRHLRWLLVAGAMAVIRYARQHGTKRPWLTRLMDRRPIKVAAVALANKIARMAWAMMVRGERFKEPKLLPAA

SEQ ID NO: 52238 - protein, 415 aa, unidentified
MLDTTTFVGLDVHARSIKAVSLDVMTGEVRCATFGYDAGAVAGWVRSVDPKARCVYESGVTGFDLQKRLSGLGVDCVVGAVSKMIKPSADRRRKNDRNDAEFLARMLSVGNVVEVWVPDDECEAARDLTRALEDARDDLSRSKQRLSKFLLRHGLVFDERTPTGRRKGNWTRAHWSWIESIRFAEGADNDVLAYYVDAVRRAAEEKARLEGLVEAEARKPRWRRRVDSLRCLKGVDTATAADLVFEAGEFSRFRNARSFAAWVGLTPSEHSSGESDRRGAITKAGNKHLRKALVEAAWHYLTCSGRPKGLAKGQAPDRGARRHAAKGVRRLVDEAGGAARARGPRQQGERGHGARARLLGVGGRPHGRGGVGGRSPAHKPITPEAVRSEAVEANLRSLFCERPGRHTRAQTVGST

SEQ ID NO: 52239 - protein, 350 aa, unidentified
MNRRMGSLRLRRANYYSAVHLHLVLTERKYESMQALKTHVAGVDVHKEILAITVLIGAPDEEPVGTQFECSTFTDDLMACGLKMKEMGVTDVAMESTGVYWKPVFNVWDKLGLRVIVGNATHIKNVPGRKTDMNDSQWIAELHRFGLIRASFIPDGEFQRLRLLSRHRTNLTEDLARVRNRVQKVLEDGNIKLGSIVSDVFGVSGRQVLELIAKDYTHPDILVTAVTTKIKRLEDAKKALTNCLTKEHCFVIDQLMKQFVDLESRIRDVDNELVTRVQPYAHLVEKLDAIPGIDVILAMGIIAEASADMSAFRDERSFAAWAGVASGNNESAGKKKDPKPGGVTPLCVGS

SEQ ID NO: 52240 - protein, 410 aa, unidentified
MGRCIGLDVHRDFCEVAIWQDGAVGRAPRVAARREALEQFARALGAEDRVALEATGNALAIARIIRPHVGEVVIVNTRRLAAISQSKQKTDRHDARTLAQLLAAGMLQGSWQPDETTRALRRRVARRAKLVTHRARAKNEILAVLHRNLKARPPMTDPFGVAGRTWLAEQSLPADERDTIAAALRQVDFHSEEITVIERDLAAFVLGSADARRLMTVPGVGMITVAAFLAHVGDIARFGDPRRLVGYLGLNPKVRQSGNGPAHTGRISKEGAAIVRHVLVEAAHTTVRSPGPLRGFYERTRARRGHQIAIVAVARKMCTLFWHLLTRGEDYAYALPTSTAKKLRGVELKAGATRRQGSPGQPRQPLNRDQRSAQERQTAEHAQAAYQRTVADYHLQQRQRAKNTKTAART

SEQ ID NO: 52241 - protein, 317 aa, unidentified
MDHHSEPVRFVGIDVAKRHVTVHVRPDAITFSCTTDTQGLADLLTRLQPLEPTLIVLEATGGYEAIVAATLAQAGLPVAVVNPRQTRKFAGAIGRLAKTDTIDAADIAHFAEAIRPTPRPMPDQQTVQLRALLARRHQLVVMAGAEQQRHDRADNPLTRRSCAAMLRSLKAEITRIERAIDTLITASPIFCAKQDLLKTIPGVGDIVARIFIAELPELGAVDRHKIAALVGLAPMNHDSGRMRGERHIKGGRPQIRTPLFAACLSVIQHNPPLRSFYRRLVGAGKPKRLALVAVMRKLVCIANAMLRTQQPWAQAQD

SEQ ID NO: 52242 - protein, 342 aa, unidentified
MKIHTIGIDLGKTSFHLAGLNERGEVIVRKRFSRAQLLRFTANRKVHLIGMEACGGAHYLGRALQEQGHEVRLIPAQYVKPYVKTNKNDYIDAEAIAEAVGRPTMRFVPIKSDDQLDLQSLHRVRERWVTRRTAVINQIRGLLLERGITLRKGRRYLDEALPGILEDAEAKLSGTLRMLLTQLKLELDQTALRLEEAEALIEQTVQESEACQRLMKIPGIGPVTATAVISAIGNGAAFRKGRDFSAWIGIVPREHSTGGKQKLLGISKRGNRYLRKLFVQCARAVLQQKTKQAPGLKVWLEKMTSHTHRHVAAVALANKLARMAWAVLATGEAYRAPLPAAA

SEQ ID NO: 52243 - protein, 416 aa, unidentified
MKKGQNTRGYERYMALDIHREYLLVGGWNEEKEWVLTPRRVGIEKFPEWAKKNIRAGDIVVLETTTNVWAIYDIVAPLASRVLVANAAEVGEIANARVKTDKEDIKRLLKLLIGGIVPEVWVPPMEVRELRAFISYRGRLVKTSTMIRNRLQSLLHKHNLMLSEAGLLDQDWWEAQKNISALEKLQIRQELVLLQEVEKLKAAVDEELQRQSTSTTWGKQALQIMQLPGVGYIVAMTVLAAIGDISRFENAKQLVGYAGLGAGVHDSGKTHKEKKITKKGRRELRWAMVEAAWRAIRLSPFWKAEYEKHLQRMRKPNQAIVVIARKLLIAIWHVLSKEETDMHASEEDLAYKMLLLSWSLKEETRRGLTYKQFAKYALMKLGVETDITRFVRKNVPRRLASREEVLAQMTELGLSA

SEQ ID NO: 52244 - protein, 445 aa, unidentified
MPVVNLAAAGIDVGSRSHFVAIGQNTEDVKEFGVYTEDLHTLCKHLVASGITTVALESTGSYWQPLFVLLQQYNLDPILVNGKFTKNVKGRKTDVQDCQWIQKLHTMGMLEGSFIPDLFTEQVRQYYRHRQTLVANAASYINKMQKALRLINIRLDTALRDVMGRSGKDIIEAILKGERDAKVLASLAQPTVKTSKEEIVAALTGDWREEYIFELRQCYEIYQHYHKKIDECDEVIKQIVTAEVQRKQTEENLAKAEGVKIKKKKARKNEAGINIQQLAVDLTGGVDISRIEGVGLGLVLCITSETGLDLKAFPTAKHFSSWLSVAPDIKKTGGKVINSRTRKGKGRLARALMHAANAIGNMKTGNYLVHFFKRIERRRGRPTAIIATANKLSKIIWNMLVKKQTYNPIMPKEYLDKIRKREVKNIQRKIKQLNIQEEEIVFATP

SEQ ID NO: 52245 - protein, 356 aa, unidentified
MPMLAEQVDGVIGVDTHRDTLTAAAVTRLGGVLAHITTSADAAGYRRLLDFAHAQLPGRRCWAVEGTGSFGAGLAGFLQQHGEQVLEVGRPKRPASRSGAKSDALDAVRAAREALGQDHLATPRRRGEREALRVLLTTRRCATLARVAAIGQLKALLVGAPEELRAELRGRSTAGQIDYCAGLRARPARSLEHQATVRALLATAQRIQALAAEADELEAELTVLVGAVAPWLLEVPGVGPLSAAQVLVSWSHAGRFRSEAAFAALAGTNPIPASSGQVTRHRRNRGGDRQLNRALHTILLVRLRIDPDTRAYMARRTAQGKSRRDAKRCLRRVIARQLFRLLERYDRPGVEILQAA

SEQ ID NO: 52246 - protein, 337 aa, unidentified
MTKISMLAIDLAKGSFQVCAVGPDGAVLYNRALSRPRLMALLAGEPACVVAMEACATSHHWGRVAQAHGHEVRLVPAVYVKPFVKRQKNDRADAEAIAEAASRPSMRFVAVKSTETQGRAVAFRTHQCLVRQRTQLINALRGHLAEFGLVAPKGPANLKVLEGALADEASDLPAVVREMGAIYLGQIAQLTEVIERLADELETASKTDTELRRLCTIPGIGPVTAGAVAAFAPDLDTFDSGRNFAAWLGLVPRQRSTGGKSKLGSVSKMGQTDIRRLLIVGAMSVIRWVVSKGGSANRWLANLVARKPKMVAAVALANKMARMIWAMTMKKEDYRMA

SEQ ID NO: 52247 - protein, 345 aa, unidentified
MTTMNYIGLDVHKKTISYCVKDVSGRIQQEGKIRSTRRELDGWMKALPQPWTVAMEATIFSGWIYDHLLPHATQIKVAHPLMLRAIAAAKKKNDQIDASKLADCLRCDFLPECHMMPRAIRDRRRTLRYRHLLVRQMVQMKNRVSGLLMETGVEYNKQRLHKVSYFRELLSANGEVPSSIRPLLKLSRETIERCQKTEYALVSSLQRDPVLAERIKRLRTVPGVGPITALTWALEIGDVSRFGSVKKAISYCGLCGDERSSADKAMRMPLSKQRNKHIQRALVEAAKLAPRQNHEMAVIYDQERQKGNSNRATLAVARKMVAYLLAVDRQQRDFVPAEERRTTAA

SEQ ID NO: 52248 - protein, 344 aa, unidentified
MYHYAGIDVSLECSSVCLVDGTGKILREAKVASEPEALIGWFQSLGSPLERIGLEAGPLSQWLYAAMRDAGLAVELLETRHVRDAFKAMPVKTDRNDARGIAQLMRLGWFRPVHCKSIAAQETRAILTARKLLQSKLRDVENSLRGVLRGFGLKVGKTNERTFAGRIRELVAGHPGLEVVAQALLEADAVLRREFNSLDKQVARLARSHPQASLLMTTPSVGPIVALTYASAIDDPKRFRSSKATGAHFGLTPKKYQSGETDYTGRISKIGDASVREALYQAAHVMLTKPVRNCAALKGWAMRLARRAGMRKAKVALARKLAVILHRMLADTTPFNPMAKAMAS

SEQ ID NO: 52249 - protein, 339 aa, unidentified
MQYGAIDLHRRSSVICLAGAADGSYEEQTVGTSRAALTAFFAGRPPCRILIESSTESEWVARLLESLGHEVVVGAPSYAAMYATRSRRIKTDRRDGRALCDACRAGRYKAAHRTAEPWRSVRKQLSVRDALVRSRTRMINVVRALCRQEGCVIASGSADAFAARAQQAQLPPELAQTVRPLVRSIGLLSRRVDRCDRTLAALAGGHERVRRLMTLPCVGQVTALAFAAVVEPAARFASPAAVACYLGLVPSEDTSSDRRRVGRITKGGDRRVRWLLVEAAHRLMRSKDPRAADLRKWSGRVLKRRGRGPAAVGLARKLAGRMWLIDKQERDYETRACAP

SEQ ID NO: 52250 - protein, 394 aa, unidentified
MLQNVMMNVPIGSGLVEEASVASRRDQTGRREIELLLANKAVPQRDPRRAYGNSPNSRLSRRRTTRSPSSHRQDREIIMSVTLYVGIDVAKDSFEVASDPAGLKLSLPNDPLGRQKLLDALQAQPVALIVMEATGGYERSLAGELLQAGHNVVIANPRQVRDFAKGIGTLAKTDAIDAAVLAHFGRIVQPKPRPRPSEQAETLAELVTRRRQVSDLLTQESNRLPMARHASVRKSLKKSIRALEQQIIDLDKLIRDDIESDDGLRRKDEIVQSFKGVGPGTSAMLLSHLPELGKLNRQEIVALAGLAPWDVQSGKWAGQSRIWGGRMAVRNMLYMAALSASRSNQIIRKFYQRLRSQGKRFKVAITACMRKILVILNTLVRNNCLWSPQPAKNT

SEQ ID NO: 52251 - protein, 455 aa, unidentified
MTRQRRITQKIKSLEELKIVHPHAAGLDIGSRDMWACVPAPHTTENVRVFGTFTVDLQALADWLVACGVDTVAMESTGVYWIPVFELLEARGLKVYLVNSWHLKHVPGRKSDVLDCQWIQQLHSLGLLRASFRPDAEMCALRAFLRHRAALLQHRAPHVLHMQKALQQMNVQLPLVLSDIMGETGQKIIRAIVDGERDPLKLAQLRHPSCKSSEDDIAKALTGTWQPEHLFALKQSLELVDFYTHQLAACDAELARQFAAIKPRWDVPAEVPTLPKTKPGSRSKNQPAYHARAELFRITGVDLVAVEGISASLAPTILTEVGTDMSRFPTEKHFCSWLGLSPHHEISGGKILRNHTLPTDNRAGQAFRQAAACVIRSDSVFGAFYRRKKAQLGPMQALVATAHKIARAVYHLLKYKTAYQDSGAEAYEQKYKERELAHLRKKAAKLGYTLAATEV

SEQ ID NO: 52252 - protein, 310 aa, unidentified
MERIFVGLDVSKARLDVHVRPTDEQFAVASDEAGVATLVHRLAGLRPTLIVLEATGGYESTVAAALAHAGLPVAVVNPRQVRQFARATGQLAKTDQLDARVNARFAELVQPAARPLATEQAQVLGELVARRRQLVDMLGAEQNRHRQARAQGLPQRIRAHITWLARAIEELEGEITRLVRASPVWRETEDLLTSAPGIGDITAHALIADLPELGQLTRRRIAALVGLAPWNRDSGRWRGRRMIGGGRAAVRRALYMPTIVAIHHNPVIREVYRRLTAAGRPKQVAVIAAMRKFLTILNAMLRDRRLWQPA

SEQ ID NO: 52253 - protein, 422 aa, unidentified
MIRLNGASQAAALNPNGVLLSAPFKFDANYHGLHHTLWDKLKQRTEKFNTQNLVFAVETSCNLWQPLCFYLRGSGFSVLLVSPLTTKHSRPFISHDFSRTDPKDALLIASNARDGYFDFYQDFTPHNNAMHRLSITYDKLRRNYVQTRLRIRAFMEQLFPEFFQVLNLDTDTGKYLIKRYFLPGQYIQMDIEKESKVIVKISHQQHGRDTLNKLKELAGQSIGIPLKPEEIPAAQLTLNCWVAMLETVEEQMKAIMNELIRLAKETPYFKSMVSLKGISTKLTALFIAETRDLSRFTHYKHIEKYAGMNIRQSQSGQYVGARHISHIGNHRLRWIIYKMAEETCRYVPEVRLKYLKRQLKRKIYRKNIIACVPVLLKLILVLTRENRVYENRTGRLKELHKLEAAYEKTKKPGKNKKQKQAA

SEQ ID NO: 52254 - protein, 410 aa, unidentified
MKKHNYRTKKVNEINWPELGQQLGGEAVTFAVDVAKAQQYALLTNDTQSLSIIVKWELLETKGLIHELKQLNCPVTVVMESTGTYGDAMRHQFRQAGFILYQASAKRVHDAKEIFDGVPSLHDAKAACLIAKLHKEGLTKPWQELDEAGRELNAVRREYDMHQSQYERNQNRLEAYLSRHWPEVLGLFDLDSVTLEKLLITYGSPQAIAADAEQAAKDMKAWGGHFLSAEKIACAIDSAVGTIGQPCIDAERRYLQALATEMQHSRCQRQAAKKLLEASVEADAGLKEMAALIGKLTTAILIGLHLDPRNFSSAHSFLKALGLNLTEKSSGQYHGQLKLSKRGSATARKYLYLAALRLIQKDPVIGEWYRAKADPKVKMKTVIACLRKLAKALWHVARGERFDARKLLTI

SEQ ID NO: 52255 - protein, 366 aa, unidentified
MTLPTLGIDVAKATLAVVLLLANRTYRKEFANTASGHASLLAWLAHHARGQFVHAALEAPGVYGEEVALALHQAGHTVSVVNPATIAAYAHSQGARTKTDAADAALIARYCQKEQPAAWPPPAPEVRELRALVRQRQALLEMRQQEANRLSDGAPPASVRSVLTAHVEFLDKQIAGLEQQIDQHIDDHAELKRQRDLMTSIKGVGRRAASDLLGEIGDLRSFSNARELVAYAGMNPREFRSGSSVQKHTRLSKPGNARVRALRSMPALSAIQHNPLVKALRERLVASGKAKMAAVGAAMRKLLQLMYGVVKHHRPFDPHYAGRALAERNAGCAPVPAARPGHKPGRVSGAGVERAAPKALCLETAT

SEQ ID NO: 52256 - protein, 412 aa, unidentified
MQILYPCCCGLDVHAKNVVACLIRDGRKQIRTFSTMTDDLLALLDWLTAEGCTHVAIESTGVYWKPVFNILEGSMQVLLVNAREVKAVPGRKTDVRDCEWLADLLRHGLLRASFIPPAHIRGLRELTRHRQSLVRELAAVANRVQKLIESANIKLAQVASDALGSSGRAMLRALAAGEEDVTKMAELAKGRMKAKKPQLRLALKGKLTTPQRWVLEELLDHYEELEVRIAKTNERIEVEVAQDHHPEVAEAVELLKTIPGVGQSVAQTVIAEIGVDMGRFPSDAHLSSWAGMCPGNNESAGKRRSGKTTKGSPYLRAALVQAAWAASCTKQTSLSAQYHRLYKRLGRKKALVAVGHSLLVIIYHVLQNRAGYAELGGNYFDSLQVDRQRKRLIKKLESLGVKVTVEALSEAA

SEQ ID NO: 52257 - protein, 289 aa, unidentified
MESMYYIGLDVHKKSISYCVKDASGRIHAQDKIAATRYDLDVWMKTLPGPWMAAMEATMFTGWIYDHLKPHAVALKVAHPLMLRAIAVAKKKNDRIDADKICDALRCDFLPESYMVSTEIRERRRTLRYRNLLVQQAVQLKNRISCVLMQAGVTYNQEKLHNTGYFKELLTTNPDIDESLRRLLHQCREALVRLRKTEGALVRSLERDPFLAERVERLMSIPAVGPITALTWALEVGDVKRFSSIKKAISYCGLCGDEILQEQSAKQPGEHLYRQEKVGAAGDPPGTIR

SEQ ID NO: 52258 - protein, 461 aa, unidentified
MRILYERSCGIDIHKKMIVACLLICTAQGVEKEIQTFTTMLQDLYRLRDWLKAKQCQAVAMESTGVYWKPIWNVLEEEMELLLINAQHIKAVPGRKTDIKDAEWIADLLQHGLLRASFVPPRPQRELRELTRYRSTIVAERARLVNRLQKVLEDTNLKLTSVITDIMGKSGRAILQAMLQGEQDPEVLADLARGRLREKREQLKEAVQGTLSEHHRFLLGSQLRQIDFLDGQLAELDQEVAQRLGLPIGPDDPASSADQRDKQEGESRQEASAPVAAEASQSPSSLSAAPEPPTRLCSAQVISILDEITGINVRIGEIVVAEVGTVVDRFPTEDHLVSWAGLCPLAKISAGKRLSNKTGKGNRWLRQALIEAASAAARSKGTYLGAYYQRLRKRMGHKKAIVALAHRILVIIYHLLDEQQPYRELGPGYAEEQATEASKRWAIRRLEQLGYQVTLQSEEVA

SEQ ID NO: 52259 - protein, 372 aa, unidentified
MKKNTTDSTSTKSDGRTWKASEKNLTVGIDLGDRSSSYCILNQAGEVLRASTVATTKKDLTRVFGALPHSRLVLEAGTHSPWVSRHLRALGHEVIVANPRRVRLISSSSRKNDRLDAETLARLARVDPQMLFPIRHRGEAAQSDLTTIRARAALVEARTMLINNARGLTKSFGERLKKCDARYVNEEMAEELPPALKASVRPLLEEIGRLSACIQEYDEAIEGMARERYPEAALLTAVPGVGTLIALTFLLTIEDPHRFGRSREVGCYLGLRPKRNQSGGRNPELGISKEGDVYLRKLLVQGAHVILGRRGVDSDLRRFGQRLAARGGKGAKKKARVAVARKLAALLHHLWVTGEVYEAVRTAPEPALAPAA

SEQ ID NO: 52260 - protein, 333 aa, unidentified
MSKYIGLDAHSSTCFFCVMNEAGETEDTVKIVTNGRLIINYIRSIAGRKELVFEECELSSWLYEILKNEVDKLIVCNPVENRQYKRAKTDKLDAQNLAKLLRGKFLKEVYHDGSDKEKLRDLMSGYQDLIEDGVRVKNRYKSLFRKDGKRQSGKLLYQDESFLDGLKRKDFKFIGKQSLNFLEVLEKSRLEYIKEIKRYSKTFKEIKLLKTLPGISDIHAAKIVAQVINPQRFRTKYKYYSYCGLVRHQQTSGGKSYGDKKIWGNRVLKCVYKMAAVSALRSNNGLKRYYEYLLTKGKGERNAKSGVCRKLAEISLAMLKKGEKYCEKKIQTV

SEQ ID NO: 52261 - protein, 345 aa, unidentified
MQAVTIGIDLAKHVFQVHGVSAGDKVVFSKPLRRAQMLPFFARLKPCLIGMEACASAHYWARELKKIGHEVRLMPAKDVKAYVKRNKNDAIDAAACCEAVRRPVVRTVPVKTPEQQARLMQHRVRDLLIKQRTQAINALRSHLAELGIVAAQGYDGLKTLLSIVADESDARLPEDGRASLSVLVHQIAACQAEISAIEKRLLAQHRKNEDSKRLETIPGIGIIGASAIVATVPDASVFKTGRDFAAWIGIVSREDSTGGKQRLGPISKQGNRYLRRILILGALSVVKRARCCPENYPWLTKLLARKPAKVAAVALANKMARVAWAVLTKKETYRVPQITAALIPA

SEQ ID NO: 52262 - protein, 335 aa, unidentified
MNFEWFIGIDVSKSTLDFHVRHKQESIIYHQGSNSKTGINSFLSRCKQLRVDFQNCLFCLEHTGLYNEVLVEVLWKKKMNIWVEQGLHIKKSLGMRRGKTDKVDAHRLSEYGSRFQDKCRLWQPVSTSLRQLKHLMVLRNRLIKAKKMLSVPVAELDTHAANQKDKALIKRLNKPILTQLEKQLKAVEQQADELIKQDERLNELEQIITSVDGVGPVTARAIIIATNQFQNITEGRKFACYAGVVPFDHQSGTSIKGRPRLSHFANKEIKTLLHLSALSAAFMKGELNDYYTRKIQEGKNKMLVLNNIRNKLVLRIFACVNQNRKYQKEYLSTLA

SEQ ID NO: 52263 - protein, 317 aa, unidentified
MADPCGIGVDVAKATLDLACSMTPTRRWQTTNDEAGWAALVTHVRTLAPAVVVLEATGGYETGAASALVAAGLPVAIVNPRQVRDFAKALGLLEKTDALDAGVLAAFAARIQPTPRPLPDDLQADLHALVTRRRQLVERLTAERNRVPLARGGVRKNLLAHIDWLAKQLGKTDRDLRTQIEASPIWRVRDQLLQSVPGIGPTTSACLLACLPELGTLTHRQISKLVGLAPLPDDSGTRRGYRRIQGGRGTVRTALYMATVTAITHNPTIRASYRRWRAAGKLPKVAVVAAMHKLLIHLNAMLKHQTPWHPIPTAPIA

SEQ ID NO: 52264 - protein, 409 aa, unidentified
MQVLYGVCCGLDVHKKAITAALKMGAGKAEVKEFSTTTGALRQMVEWLKNAGCEQVAMESTGVYWKPVYNILEMERIPAMVVNASHMKAIPGRKTDVNDAEWIADLLRHGLLRASFIPDKDQREYRELVRYRSSRTEERAREINRLQKMLEGMNIKLGDFVSDITGKSAGKLLGLALSHDELTDEQIAEASDPRLKASVHELKASLTGIVTPLQRDLVSLVLDVITEQTQQIARVEALIRKYTKEAYEDASKRLEALPGIGTKSAQAIIAEIGIDMDRFPSANHLCAWAGVAPGNNESAGKRKNSKSRKGNKHLKKTLTQSATSAIKNKNNFFHAQYQRLVVRKGSNKAIIAVAHSMLIAIYHVMSGAQFNDLGADYYTLFNKDKKIRSHLKQLKKLGWTPPVPETKTA

SEQ ID NO: 52265 - protein, 422 aa, unidentified
MSENQREIQYATFLAIDWADEKHVWSLQEAHSSTRERGEVGHMPEAIEAWVAQMSQRFAGRPIALAVEQTRGALVFLLSKYEQLHIFPVPPAMTASLRKAFYSSGAKNDPGDADLLLDLVQRHREKLRRLSPDTEATRRIQNLVEERRKLVDEKTAQSNRLEAHLKIYFPQIPHWFEDVDSPLVCALLERWPTLEALQKAGPATLRSFFRKHHCRKEELIESRIKAIGAAMPALKDRAVVEAKVAVVRVLVQMIQVLREGTEGLNQQIQEAAEAHPDFFIFESLPGAGAAMAPRLLAAFGSQRERYQNAAEVQTLAGIAPVTESSGKSNWVHFRFACPKFLRQSFHEFAAYSIPRSQWARVYYEQQRRRGKKHHAAVRALAFKWIRVIYRCWKERVAYDENVYLAALAKHNSPLVATTKAAL

SEQ ID NO: 52266 - protein, 466 aa, unidentified
MKQNRRRSPGKPRVSPTVLDRINPNVAGIDCGAAEHFVAVPPDRDPTPVQSFKAFTSDLLRLADWLMACRVTSVAMEATGVYWIPMYEILEARGFEVLLVNARHLKNVPGRKSDVSDAEWLRELHSVGLLRGSFRPPDAIVALRAYLRHRQTLIESAGTYVQRMQKALVQMNLQLPLVVSDITGVTGLRILRDIVAGHRDADHLAQHRDHRCRASKADIVAALTGNYRPEHLFVLKQNLELFDACQTQLTACDLALETHIRTLTAHMPVPVAPLPAPRVTKKPRNNEPRFEIRAPLHQLTTGVDLSQIDGIAPYTALKLLSEIGTDMSRWPTEKHFTSWLTLAPKNKISGGRLLSSRTQPSANRAAAILRMTAMTLGRTQTALGAFYRRLAARIGKPQAITATARKLAVLVYRALKGELVYQDPGAEAYDLQQRTRILRRLRQRAATLGFELVNRGTGEILEACAS

SEQ ID NO: 52267 - protein, 338 aa, unidentified
MTCYSGIDLHSNNSVVVVIDEADRVLYQRRLPNELSGIVAALEPYGSELAGVVVESTYNWYWLVDGLKAAGYRVYLANPAAMKQYEGIKHRGDESDAQYLAHLLRLGILPTGYICPPAERAVRDLARKRLQLVRTRNAQVVSVESNLARQTGGRLSSNAVKRMTPAEAGALGLPEDVTSAMAANVAVIQALNIEIAKLEARLRQRLRLRRQYRVLITVPGIGEVLATIIMLETGAIERFAAVGNFASYARCVDSVHRSNNKKKGAGNVKNGNKYLAWAFIEAAHFARRYCPQAKRFFERKQAATNNIVATKALAHKLARACYHMLKEGQPFDVNRCFA

SEQ ID NO: 52268 - protein, 345 aa, unidentified
MQSMYYIGLDVHKKTISYCVKDGSGIVHAEGTIPATRWDLDRWMKMLPQPWTAAMEATIFTGWIYDHLKPHAAALKVAHPLMLRAIAAAKKKNDRIDANKIADCLRCDFLPECYMAATEIRERRRTLRYRNLLVHQAVQLKNKISGLLMEAGVSYNKQKLHKVGYFKELLATNPDINEGLRPLLRLCRETLVRLQKTESALVRSLQRDSLLAERVQRLMTIPAVGPITALTWVLEVGDVKRFSSIKKAISYCGLCGAEKSSADTVKRTPISKQRNKHLQSVLVEAAKMAPRLSPELALIYDREKQKGNANRASLAVARKLVAYLVAIDRSQRDFLVVEKENCAAA

SEQ ID NO: 52269 - protein, 342 aa, unidentified
MDEYDGRQFVGIDLHRRRSVIVRQSESGEQLSAVRIVNDPVALGLEIERAGPNPEVVLEATYGWYWAVDTLQAAGARVHLAHPLGVKGFRYRRVKNDVRDATDLADLLRMNRLPEAWIAPPATRELRELVRYRAKIVAVRSGLKAQVHAVLAKAGVLIPVSDLFGVGGRQRLAKVPLGAAYVQRVISLLELIDALDAHETRFSIMVADKLGGHAGYQAFQQLPGVGPILGAVFVAEIGDVHRFADPAHLCSWAGLTPRHHESDTVVRRGHITKQGSKLVRWAAVEAIQRHPATSKIALDRTRIESRRGKNIAKIAAARKLLTLVYYGLRDGHIRALAPRRAA

SEQ ID NO: 52270 - protein, 427 aa, unidentified
MPYKIAGIDVHKRMLHVVVSDVQVDGEYDFTRRIFGSMPEALCSLAAWLVEQQVQEVVMESTAQYWKPVWGTLERYWKPTCQTREGALATSGTLHLAQALSNRGRRGRKKDFRDAERLVKRLVAHELVLSFVPDVEQRLWRTVVRTKYQLTRNRVQLQNRLEALLEEAHIKLSSLVSDLLGASARRMLEAIADGETNRETLAALADRGLRATQQQLQDALGVCQELNPVYRKLIRMVLDEVTSIDKRIEQLNQEMANLLRPHEDQVKRLAEVPGLGVDSAQQVIAEVGATAASFPSEKHLSSWVGACPGDEESAEVNRSRRSPQGNRHMRRILNQAANAAVKYKGGIFEILYRRYVPRLGHNQTIGIIAHKLCRLVWKILHRGIRYEERGPEVNKASKQKRTRKMIQALRRLGYRIEPSPSQSPITP

SEQ ID NO: 52271 - protein, 332 aa, unidentified
MENFYFIGVDVSKKKLDFCVTFEGKVLREEQVSNHQQAVAGLIGDLKNDFGMDNEQFLICAEHTGQYTFPLVCACKSAECRLWLENPSQIKYSSGIQRGKNDKVDAKRIAIYAARFGDRVRYYDRPTEQIERLKQLERERVLYTTDLAKYKAQLKDQKGYMPEDIYRKKTKRLESLMNELQAAITSITSEMEEIILSAEVLNRQMKLLMSIDGVGKVIALNMIIETEAFTRFDDPRKFCCHAGVAPFSYTSGSSQHSKNKVSHRANKNIKRLLHMAAVCITHRTGGELKGYYLRKVDEGKNKMLVINALRAKIVARMFAVIKRNEYYSPIYN

SEQ ID NO: 52272 - protein, 426 aa, unidentified
MNTLEFAAFVGIDWADEEHAVCLLEPGREAAAQHARLPQQAGAIADWAQGLAERYGGRPVAVCLEMSRGALIYALMKYPQLVLFPLNPKQLAKYRQALSPGGAKDDPGDAELLASFLARHHQRLRAWRPDDALTRSLRLLCEARRSAVDDRTALGNRLLQHLKEAYPLALSLVGKHVYNAALLSLLARFPSERELRRGAPRVVTKYLPKRRRAAGDDDVDARIAAWRASPTLVVDEAVLQHSRLAVKHLVAQLKQLNAMIAEYDEEIAKLMTQHPDAQLFASFSGAGPALTPRLVAAFGSDRSRYASADELQQLSGVAPITVQSGKSRQVRMRRACPRFLRQTFHEFARCSLKTSRWAKAYYELLRAKGHKFHSAVRALAYKWIRILFRCWQTRKHYDEDRYLKSLRLQNSPLLKFLPPPKITPTA

SEQ ID NO: 52273 - protein, 496 aa, unidentified
MTAGTGRQKDGAGRGAAAAAGEAGGDGAEVAEERVEVVTYAAAIDVAKGSGMVCTRVPGSRPDRKRQKVWQVDATYGSVVALMDHLRCEGIQRLVLESTSDYWRIWYYLAEAAGLEVWLASAKDVKHLPGRGKSDREDSVWLCKLNERGMLRRSFVPPEGIRDLRSLTRTRSRLAQDQVRHQNRIEKILEDALLKISVVISGLSGASGRRFLDALVAGERSPRALAALGDTRLKATRQQLADALTGQFREVHAFEIATHLRLIDAINDEITRLDARIEQQLTSIPGVAPACGSCGLIGGGHSPGCASDGTPVLGLVERLDEVTGAGVRNAQVTIAELGTGMSVFPTPGHAAAWARLTSRTLQSGNTARPGRTGKGNPYLRGALGQSVMAAARTDTRLGEQYRRIARRRGKQKAIVAVSRVICEISCILIAGPAARFTDPGADYYSRANPARQTRSRIREIERLNPGMKVTLMGATGSHRAGRQSGAGDLVPVAAGG

SEQ ID NO: 52274 - protein, 391 aa, unidentified
MTEDASRPAQAAIRTALGAIFVSLELSRRTWLITSLSPGGGEKMSKHAVPAGEVSGLLRRFAELRRKAAARTGRDLPIIVIQEAGLDGFWIHRVLQSEGIESHVVDAASILTSRRRRRAKTDRIDGETLVRTLMAYKRGEPRVCSMARAPTPQEEDRRRVCRERRTLMGERVSHVNRIKGLLSAQGVFGYEPLRKGRRERLEDLRTGDRRPLPVRLKAQIIRELDRLEVLLEQLKTVEAERDALLKPASDEAASPAAMLARLKGIGPETAAVLWSEGLFRQFDNRRQVAAYAGLAPTPWQSGSIDHEQGVSKAGNPRLRTAMVELAWLWLQNQPTSALSLWFHERVQRLGRRVRKTIIVALARKLLIALWRYTTAGVVIEGAVMKAAAVTN

SEQ ID NO: 52275 - protein, 367 aa, unidentified
MKKVSTRALAQSKNISQKKLTIGLDLGDRNSWYCVLDEAGQIQLEQRVRTNATALREVFGVMPHSRIALEIGTHSPWISRMLTELGHEVIVANARKVRLIAESRKKDDRMDAQTLARLARIDPQLLSPVKHRSAQAQADLMMIRARAGLVRARTGLVNTARGLAKSYGERLRGCNVRNMNPEKAEGLSPELQAALEPLLNTIESLSERIVEYNDRIEKLAQQSYPQTALLKQIKGVGTLIALTYMLTLEDPHRFRKSRDVGCYLGLQPGRRNSGQSEPQLHITKEGDPYLRTLLVQGAQHILGPFGIDCDLRRWGLKLAERGGRSGKKRAIVATARKLAVLLHHLWVSGEVYEPLHNSSRTTVAAAA

SEQ ID NO: 52276 - protein, 357 aa, unidentified
MAMLADTVELVIGVDTHKQTHTAAVVTATTGAVIAQATAAATPAGYRQLLALAEQQPGERVWAIEGTGGYGAGLTRFLHAHAEQVVELDRPKRAARRHGAKSDPLDATRAAREALGRDQLAQPRAAGSRAALQVRLTTRRSAVQAGTDAQRQLHALVVTAPDVLRGRLRGLTTRQLVTACGRLRQRAAWDAETIATAASLRALARRIQLLDAEIADHTRAITTLVRAWRPDLLTPCGVGPIVAAIVLCAWSHPGRCGSDAAFAMLAGAAPIPASSGQTVRVRLNRSGDRHLNQALHLIVLTRLRYDPATRAYAERRRAQGKTNREIRRCLVRYVARQLYRILEANPGFDPTQERPTE

SEQ ID NO: 52277 - protein, 759 aa, unidentified
MEVVVERAAGLDVHKRTVVATVHTPEVRETRTYGTMTEELRELGRWLEGLGVTHVAMESTGPYWRPVYNILEEFGFELLVCNAQHIKAVPGRKTDVHDSAWLCDLLRHGLLRPSFVPSREQREIRELVRYRRTLIRERARELNRIQKVLEGANIKLASVATEVLGVSGRQILEAMVAGEHDARVLAAMAKGRLKRKQADLERALAGRVGAHQRLLLREMLGHIDELDARIERLSREIEERMRPFEEALGWLDTIPGIARRGAEEVIAEIGVDMDRFPSAAHLASWAGLCPGHDESAGKRRSGRTRKGNPWLRAEVPSKGVETAKAVYPPLGCLLNPGPGSPERRVTAMDQRTTSASLSSSPTWEGLHEWLRDAIQQLLQEALEAEVTELLGRIRYQRQPAVDGPGGYRNGHGKPRKLTTPLGTITLRRPRVRGLEERFESRILPLFARRTKEISALLPELYLHGLAEGDFDLALRGLLGEEAPLSSRTVARLKERWQAEWEAWRVQRLDGLQVVYLWVDGVYVKAGLERERAALLIAVAGLADGRKVVVAVTPGYRESVESWSAVLRDLRERGMNAPRLVIGDGHLGIWGALRNVWPGAEEQRCWNHKVVNVLEELPRQRQAAAKSMLRAVAYAPTEAEAERKRKAFETWCSRHGYGKAAETLARDWERMVTFYRYPKEHWVHLRTTNVVESPLAALRLRTDAAKRFKKVERATAVIWKMLMVAQQRFRRLNAPGLLAKVYEGARFQDGVEVKGEEVAA

SEQ ID NO: 52278 - protein, 311 aa, unidentified
MTETTIGIDISKATLDAHRLSDGTAAQFGNDKAGFRALKAWLKGLDIERVVYEPTGPYHRDFEIALEANYPLVKVNPLQARRFAQSLGTKAKTDAVDAGMLAVMGAAFSLLPQQRISAKQRDLKELHVTRLALVKDRTRILNRQRSLTIVLLKRQAKARLKLMIAQIAQVDAEIQGVLQNAPDTARMTEIICSVPGLSKVSSAAILTEMPEIGTLSKKQVASLAGLAPMTRQSGQWRGKSFIQGGRKLLRDALYMPALVAMRHNPDLKAKYTALIKAGKPAKVALVALMRKLIILVNTLIREDRKWERNRG

SEQ ID NO: 52279 - protein, 422 aa, unidentified
MSYCPVAGIDVSKRFSDMCILSPDNKIFAQEKIYHDETSINRANALLQKAERLFFSKPVIVMESTSHYHLILFQFFSEHGYDVIVVNPLQSNSMKDFSIRKRKTDRVDAFKLAMMYRTKTLRPSQIPQTATRALRQLCRHRAELLNDVSSYKNRLTALLDQTFPGYDKVFSDVGGVTSCAVLVRFPTPTILLVEEESELVEVIAAASKSGYSFAKKKAGLLISAAQKAQTLGIHSCADETLIACTIQMLRTLSESVLQIETAIDNLLAQIKEMRNNVSLLQSIPGIGSHSAALLLGEIGDISLFKKPKQLAAYFGLDPTERQSGSFRGTKNKLSKRGSSYARAALHMGVVNSICKRGKDSAANPVLLSYYEKKCKNKPAKVAQAASMHKLVFIIFAVLRDQKPFELKTPEQHAVEQGFVKAA

SEQ ID NO: 52280 - protein, 325 aa, unidentified
MKQKQIVAIDVSKLSLDLCLRPVGKPFKISNNLAGFKQLKAAIDPALEPIVVMEHTGQYSFKLEQFLQKQGIAYCKIPALEIKRSIGMVRGKSDKIDAKRIAEYAWLRRDQLVPTVRVEENVLRLDQLLSLRAKLVKDCSGYKTRLKEMIFTGNCFKGDAIYKAQQVILKTFRTEIKKIETCIEQIIAGDSGLRKNFDLIRSIKGVGKIVAAKVLAVTNNFKKFSDARKFNCYAGLAPFKHESGTSIKGRSRISHLANKEIKTLLSLAAFAAIRHNPELKNYYLKRVAEGKRKMSCINIVRAKLVTRMFAVIKRQTPYELLVLAA

SEQ ID NO: 52281 - protein, 330 aa, unidentified
MIPKTIPQTAPVYVGLDVAKATLQVHLQGRQFPFSNDPAGHTRLCQQLKGVAAHVICEATGGYEAAVVRACHAAHIRVSVLNPAHVRHAAKAQGKRAKTDALDAALLTDYGQRFHPVATPPVSAVQHQLTELTLWLSQTVQAQALAKNQTEHQTNPFVNAQHQLRLDHYAAQIKAVEVEIKALLRQDPVLTQRVECLDRIVGVGPRTAWLVLAHLPELGQMNRQQTAALAGLAPWPEDSGAFTGQRHIRGGRHEVRRALYMPALSTIRSCPVLKPFYQRLVEQHKPAKVALTAVMRKLLVHMNSELKKLAAQPPPAVTGKPKKIKKTVAK

SEQ ID NO: 52282 - protein, 481 aa, unidentified
MSKPTQHSKKPGEKKTAAGQGKRSRKRKGMCLEDRPILEPNAAGIDIGAREIFVAVPPDRDADPVWVFSTFTEDLEEMAKWLVSCGVTTAAMESTGVYWIPAYDVLEQHGVKPCLVDAHGMKNVPGRRTDWHECQWIQFLHSVGLLRAAFRPDGEVCTVRSLMRHRSDLVQMTNQHIQHIHKALTQMNVQIHHMIDDITGVTGLAIVDAIVDGQRNPLELAKLRDPRIKASEETIVKSLQGTWRPEHLFTLKQSRQMYRHYQDQIAACDEEIEKLLVAFQPRVDPAEKPLPPDRKKRKRGRQKKNAKTKQGFDLRTESYKIFGVDLTQIPGLMAMVLTLFSEVGRDMSRWKTAGQFVSWLALCPDNDITGGRVAWRGMRRVHNRAGELFRMAAYSLHHDKSPLGDYLRRMKSKLGPTGATTATAHKIAIIFYTMVKKQVEYDATLWAERDTQREKRFEAKLKRQAQQLGYKLVPIEEKPAA

SEQ ID NO: 52283 - protein, 416 aa, unidentified
MTDAPESTYERYLAVDIHKHYLVVGGVNKWQEVVLTPRRIDYEHWEGWLKVNLKASDAIVIEATTNAWHIYDQVEPYVGRAVVAHPGLVKLIAYARVKTDKRDVLNLARLLAADLIPEVWVPPQEVRDLRALLAHRRHMIKRRTMLQNRLHSVIHRYNLIPPTGDLFATSHQEWWQQTPLSTVEHLRIRQDLETLHHLETQIAECDAILEKISGQAMWQSQVVFLLQIPSFGLLTVMTVLAAVGDVHRFPTAKHLVSYAGLGAGVHISGETHHTGRITKQGRKDLRTALVEAAWSAVRWDPDWQARFERLEKRRGKRKAIVAIARKLLTVAWHVLTKQVAYRQANPEKVAYKLFRWTWKLNENQRLGLQARQFVRYQLLNLNIGHDLDAIHHGGKKRTLPPPDEVIDLIQASLVTD

SEQ ID NO: 52284 - protein, 382 aa, unidentified
MTTQTRSESYRSGASLYMSMELAEKRWKLAFGVELAANPRLRTIAARDLVSLQREVKLSRKRYGLSEDCAVVSCYEAGRDGFWIHRYLESEGVRNQVVDPSSLRVSRRRRRAKTDRLDAEELLRHLIRSASGEPRVWSVVRVPTVEQEAGRWLHRELETLKKERTAHFARMRSLLALYGPRIKGQKDFLARALGSEQWDGRPMPDEIQLRLAREWERQVLVEEQIKALQRQRREMVREREDLAKVRRLATLKGIGDNCSWNLVMECFGWREFDNRRQLGGFAGLVPTPYNSGESVREQGISKAGNRRVRWLMVQIAWGWLRHQPDSALTRWFMERFATGSKRSRRVGIIALARKLLIALWRWVEFDELPEGALLKAGAQLQA

SEQ ID NO: 52285 - protein, 355 aa, unidentified
MKYYTSTTDYNCGIDLHARQMYVCVMDRQGKKLVHTNVKDNDFKFFLKLIKPYQHSLTVCCECMFGWYWLADACQAAGLTFVLAHALYVKAIHGGKNKNDRVDSEKLTHLLRSNLIPPAYVYPARKRPLRALLRQRIFYVWRRSELLARIHSHQLAHNRIPARQTRRVRDSWEEQLLAAEDNPLRQFALKNDLAMIGHFDQQIVALESELRRQTKKVAVRDYTLLQSVPGIGESLGLTILYEIGDINRFPTVKDFLSYCRLVKGTVASAGKIKGLRGAKLGNPYLRWAFGEAAVIAKRDHSTIGPLAQRLEEQMGGNKFKANTVVAIKLARATYFMLKNKTVFDPDRLVSALARN

SEQ ID NO: 52286 - protein, 404 aa, unidentified
MKETFAGIDWASEEHALCVVDADGGTLAGELFAHEEAGIGQLIARMRGLGVVRVAIERPDGLLVDRLLAAGFTVLPIHPNKLKATRSRFEASGGKSDGFDAFCLAELARTDSHRHRALRPDSDETKALRALTRSREDLVGAKVRLANELRAQLDAFWPGAARLFSDIDSPISLSFLERYPSPADARGLGEKRLAGFLARNGYSGRRSPAELLEKLRSAPEGCAGALEVEARRGAVLGLAAALGPIVAKIRELSAQIAHAVRSHADGDVFLPLFKDPKSVITAARLVAEIGDDRSRYPSSEVLAADAGMAPVARESGKRKVAGFRWACDKRLRDAVACLADSTRHHHPWARSVYLGARSRGLDHPHAIRVLGRAWLRVLWRCWQDEVSYDPAKHGNLRRLQPTGG

SEQ ID NO: 52287 - protein, 402 aa, unidentified
MVACIRIAATGRKTRSETRTFETLPAGLRALRAWLQEQGATHAVMEGTGVYWIPVYTALEGALDLTLANAHHVRNVPGRKTDVGDAAWLAQLLAHGLLRKSFVPPAEVRRIRDLTRFRINLVRARATAANQLIKTLETYGLKIASVVTDVLGATGRALVRALADGVTDAAALGNCARGTLRSKRPELAAAVATPLAPHQRLLLDFALRRIEGADREVAALDEVIAAALVPHAALLDLVKTVTGLEVVSASALLGEIGVDMRAFADAHHLASWAGLCPGQRESAGKSKGGKTRRGNPYVKRVMTQAAWAATRVKGSYAQAKYHRLKARSSAGTALVAVAHKLLTAIYHMLLTGQPYRDLGAQHIERKDAARSARRLVQRLEHLGYAVDLKPNNSEGGSAMSRS

SEQ ID NO: 52288 - protein, 360 aa, unidentified
MAKARSLVGLDVHATKIVAAVLDVETGELEFFMLGGDVGQAAGLCAGLLRPVRAAYEAGPTGYGLARELAARGVECVVAAPSKIPRASGDRVKTDRRDAEHLVRLLLAGKLHAVRVPGGEEESLRDLVRAREAVRMDLMRNRHRLSKLLLRHGYRFNDGPAWTDRHRAWVADIRMPHQAAQDTLTDAVGAIDALVHRRDELERGIVAALPGSPWATQAGRLRCLRGIDTLTAAGLCAEIGDFERFAKAGQLMSYVGVVPSESTTGQQRRLGAITKTGSGHARRLLVEAAWHYRKTPRTSKALTDRQDGQPTQAVAVAWSAQRRLHRTWQRLEAKGKRRTLIAVAAARELTGFCWSITQIE

SEQ ID NO: 52289 - protein, 409 aa, unidentified
MTAPPVAVQPQFFAGLDWASKTHMVCVVDQSGEIRARFEIPNMGKSFTGLVKRLTKLSVAGVAIERCDGPLVEALLEASVPVFVITPRQVKGLRSRYSGSGSKSDAGDAYLLADVLRTDRHRLTPLTQDGEATQVLRALSRTRKQLVESRVGLVNQLHAELERCFPGAIGLFARLDSDVAITFLRRYPTQHAAARLTRARFAAFLRRISYCGRTPVDELFARISDAPTAGLTATEAEGHAVCVLALIRAIQTTRGEERELEAEIIERLDAHTDAHIFTSLPKAGHGVRAALLLAEIGDVRGRFPDEESLAALAGVAPVTRASGKAHSVGFRWAADKKLRNALIDFADDSRHASPWAAKIYRDAITRGKRHPHAVRILARAWVRVIWRCWQDHTPYNPQLHGGAMQLIAA

SEQ ID NO: 52290 - protein, 343 aa, unidentified
MQEITTIGLDIAKSVFQVHGIDASGAVIVRRQLRRSQVLPFFRKLSGCVIGIEACATAHHWARELEKVGHEVRLMPPRYVKPYVKRNKNDAADAEAICEAVQRPTMRFVPIKSPEQQSVLMLHRTRQLFIRQRTALINAIRAHLAEFGIIAGIGRNGVEKLLDLITRGEDERIPPAAHACLMALAAQLAMVKRQILEADRRLLAWHRTSKTSKRLEAIPGVGPLIATALVASIPDPNVFRSGRDLSAWIGLVPKQSSTGGKERLGSISKAGNRYLRSLLVVGALSVIRRAKQLGYTRHPWLVRLMERRSVKIAAIALANKIARIAWAMMARNESYRTPLPASA

SEQ ID NO: 52291 - protein, 460 aa, unidentified
MRKPTEKQLSGMKRAGKSGFPLLNPDAAGIDVGAREHYVAVPADRDAQPVRCFGAFTEDLHRLAQWLLQCGIKTVAMEATGVYWIPLYQILESYGLAVKLVNARHVKHVPGRKSDVQDCQWLQQLESFGLLAGSFRPEAKICVLRSYMRQREMLIRQASRHVQQMQKALTQMNIKLHQVISDLSGDTGLRIVRAIVAGERDRLKLAALKDRRIKSEVGLIAKALEGDYRAEHLFALKQALELYDYHQRKIAECDAEIYKEMQTLETRGSAAPLAKHKPRSSHNPLGFASQAELYRIMGVDLTRIDGVNENTAQLILSELGLDICQKWPTEAQFTSWLGLCPNHEISGGKLLKRGTRKVVNRVANALRMCAQSLLNSKSALGAYARRLRARKDTPVAITATAHKLARLIYRTLKYGQAYVDVGSDNYEAKYKAAVVKSLQKRAQSLGYQLVSCQTPGAVVP

SEQ ID NO: 52292 - protein, 354 aa, unidentified
MLIIGCDYHPSFQQIAFVDTETGEFQEERLLHREEAEKFYRDLAGQGRKGRVGMEASGHARWFERLVAELNLELWMGDASKIRAKRVRKKKTDREDARHILQLMRKDDFPQIWVPSWDNRDLRQLLWHRHRMVQMRTRIMNQLQAVALNEGLRCKKRLWREKGRKQLEAFQLAPWASRRRRDLLELLDRLTPTISELTQQIEREVEKYPAAQRLMTHPGVGGLTALAFVLIIGEAERFECSKQISAYLGLVPEEDSSGERRRLGHISKQGSGLMRFFLVEAVQVTVRSDPEWRSKFFHLAMRRGRKIAKVAMARRLAVRLYWMWRNQWDYQQLKKFGPHTGQPGTGVAVQQTSA

SEQ ID NO: 52293 - protein, 420 aa, unidentified
MGRLKIVYPICCGMDVHRDFVVACIASTNTQGVTEYASKRFSTYSGGLRDLRDWLAMNNCRDVCMESTGKYWFPVHNILESTCNIVVSHPKFVKAIKGKKTDKKDAQWIADLFKHDLVRGSFIPPEDIRQLRDLCRYWQKLVWCATGEKNRAQNCLTVSNLKLDSVFSNVFGKSASAIISHMLEHPGEKFDVAPFIHPRCKASVGDVQAAADGAFSPWQADKLKIIREHLDDLDKCKALVEDLILRLAEPYLHQIELLCTVPGITEPMTAIRIIAEIGVDMTQFESAKHLCSWAGLTPQNNESAGKKKTTRIGKAGQYIKPLLIQCALAASNPRSKKSPEILSKYQQLKKRRGTKKARVAIARRLLTAIYQILLKDEAYAPYIVPAQESIPENRVLSPEQALAMLRAKGYVISDVNHATA

SEQ ID NO: 52294 - protein, 351 aa, unidentified
MLIIGVDYHPSFQQMAFLDQETGECDERRLNRGDGEAEKYFRDLKQRGVSVRVGLEATGYSRWFERLLAELGFEVWIGDAAEIKKLRVRKQKTDREDARLMRKLLLENRFPRIWVPSPENRDVRQLLWHRHRLVQMRTRIMNQLQAVAMNEGYRWKKKLFSEQGRALLEKLSLAPWANRRRKELLELLDQLNPKIVELTAAVEQEANQRPDVLRLMTHPGVGAITGLAYVLVIGTPDRFPCGKQIGSYIGLIPCEDSSAGKQRLGHLSKQGNALLRYLLGEAAQAAAQCNPDWRRRYVHLAMRRHKNIAKAAMARKLAVRLYWMWRNGWDYSQLVSFGSNAGKLATGHGVN

SEQ ID NO: 52295 - protein, 339 aa, unidentified
MERQYVGIDLHRRSATIYRMAEGGEVLGTERIVSQPFELAQAMAEAGPEPEVVLESTYGWYWAADVLEDLGARVHLAHALGNNWGHRRVKNDERDAQDLAAMLRFGRLAEGWIAPPAVRERRELVRYRHSLTRHRTSAKAQIHGVMAKNGILPVVGELWGPLGQAQLDSLELPEAYALRMHSLRKLLAHVEREITGLDAQLHRRLKDDPGYRALVRLPGVGKVLGAVFFAEIGDISRFDSPKQLCSWAGLTPKHRESDTVVRRGSITKQGSGLVRWAAIEAVGNYRAKGNEKLLSDYKRIAERLGKYKARVAVARKLLMLVFYALRDGEVRCLDTSAAA

SEQ ID NO: 52296 - protein, 317 aa, unidentified
MSTAPIFVGIDISKAHLDTATRPARQVDRHTNDPAGIATLVTRLGSLAPSLVVVEATGGLELPLLAACQVAGIPTAAINPRQARDFAKATGRLAKTDRIDAEVLAHFAEAVRPAARPLPPAEVRALDALLSRRQQLLEMQVMESNRLGSCTDPTVRAGLERHLAWLKAEVAGADRLLAEAVKASPAWRQKDELLRSIPGLGPVSSLTLLAALPELGSLDRGKLSALVGLAPFADDSGTHRGVRHVRGGRAAVRRVLYLAALSAVRHNPALKAFRDRLASRGKRTKVILTAVARKLLVIANAVIRSGLPWDQKLAMAR

SEQ ID NO: 52297 - protein, 360 aa, unidentified
MKVQRTSVGLDVHARSVVACGLDGDTGEVFQRRLCPDHQEVLEWIKGLPAPVAVTYEAGPTGFGLARFLLAAGIMCLVAAPSKLQRPAGDRVKTDARDAAHLARLLHLGQIVEVTLPSVAQEAARDLVRAREDCRGDLMGARHRLSKLLLRQGIVYHGGQAWTGKHELWLRAQRFDNPALTLAYEAALDAMVACVHRRDRLDEAITTMAVDSEFTPVVARLGCLRGISTLTAFGLAVEIGDWHRLTGRSIGAYLGLVPCEYTSGTTRVQGGVTKTGNGHARRLLVEAAWHHRAPYRPSRDLRRRWDAATPSARARAHAANHRLHTRWAGFDQRKKRAVVANAAIARELAGWCWSLAVMPD

SEQ ID NO: 52298 - protein, 343 aa, unidentified
MAILGGLDLHRRQLTYDYLDVVTGQVERGRVVPADRDQLRSFLARFEGQGEVAFAVEGCTGWRYVVEELERAGIGAHLAEPAETAAKRGRKRRAKTDRSDARHLRELLVKGDLPESWIPPAQVLEARARVRLYKDLEEERTAWLQRVQATLYHQGVPVIASLTSAAGQARLTAAELSPAGRAAVEVGLRQLDRLTGELDPLRAELARFSRRQPGCRALRTTHFGIGPITSVAIWAEMGDTRRFSSSDAAVRHSGLDITVYASDSKRARGHLARQGPATLRWALYEAAVCATRPNSPDHGYFLAVKRRADGHLGVISVARKLARRVHHTLRALGDQAWEPVPAG

SEQ ID NO: 52299 - protein, 366 aa, unidentified
MKKNSTVAKNRNEIFKQPKLTIGLDLGDRWSFYCVLDEAGQVILEQKLPTTPEAMKQTFGKIPRSLIALETGTHSPWVSRLLTELGHEVIVAHAQKVQLITKSNRKDDRHDARTLARLARVDPELLGPVRHRSVQAQLHLTVIRARAELVSARTALVNAARGLVKSYGQRLPKCGTYQVNRELAAALSTELRDVLEPLLKEIESLNERVKEYDERMEKIAKEVYPEVSLLKQVKGVGTQIALTYVLTIEDPYRFPKSRQVGCFLGLRPGRRNSGESEPQKGISKEGDRYLRTMMVQGAHYILGPFGEDSDLRRWGRKLAERGGKNAKKRAVVAVARKLAVLLHRLWVGGEVYEPLRNSQKAMREVT

SEQ ID NO: 52300 - protein, 327 aa, unidentified
MTQKQDVVGIDVSKATLDVYALASQQARQFANSPAGHGELAGWLKQLGIDIAVLEASGGYERTATQSLRQAGLTVHVVDPKRVRHYARAAGQRAKTDRIDARMIAAFGAAFLLGRSAGIADAGNPARQMLSDLVAARQALIDHRTTLQQQADALPPGLAKRELLATLKPLGRRLEALERHIAATIAKHQAFAALARRLDTVPGLGPVSIAALIAWLPELGHLGRRQLAALVGVAPFADDSALRAGQRHIQGGRMKLRNVLYMATVAAATQHNPVLKVCYQRLVKTGKTPKVALIACLRKLLTILNAMVAHQQDWTPTRPPATELVAA

SEQ ID NO: 52301 - protein, 391 aa, unidentified
MLKGAPQPPQAAIRTDLGAIFVSIELSRRTWLITSLSPGAGEKMSRHSVPASDMSGLLHRFAELRRKAATRSGRDFPIIVIQEAGLDGFWIHRVLQSEGIESHVVDPASILTSRRSRRVKTDRIDGETLVRTLMAFKRGEPRVCSMARAPTPQEEDRRRVCRERRTLMGERVRHVNRIKGLLFAQGVFGYEPLRKGRRERLEDLRTGDGRPLPVHLKAQIIRELDRLEVVLAQLKTVEAERSTLLEPATDAAASPPAMLLELKGIGPETAAVLWSEGLFRQFDNRRQVAAYAGLAPTPWQSGSIDREQGVSKAGNPRLRTTMVELAWLWLQNQPTSALSLWFHERVRRLGGRMRKTIIVALARKLLVALWRYTTAGVVIEGAVMKVVPATI

SEQ ID NO: 52302 - protein, 342 aa, unidentified
MEITTVGIDLAKSIFQVHAVDAAGQVVVRKALRRAQVVPFFAKLLPCLVGMEACGTSHHWARELMRLGHDVRLMPPAYVKPYVKRGKTDANDAAAICEAVTRPSMRFVPVKSTEQQAALALHRTRDLLVKQRTQLVNMIRGLLAEFGIEMARGLRHALELAARLSAGDAAEVPPLAQRVVIGLADQIGAVQSQLTRLEKELLAWHRDSDLSQRLATIPGVGIVSATALAASVSEPERFRNGRQFAASLGLTPLQNCSGGKERLGRISRMGDRYLRRLLVVGMTSLVRRAKATPTSVDPRLPALLQRKPVRVVTVAAANRTARVAWAIMTRGGTYRAPAATAA

SEQ ID NO: 52303 - protein, 311 aa, unidentified
MTEEKTWVGIDVSKEVLDIYVLPQGLTLQQPNSDVGVQSLIEQLHPLSPSLVVVESTGGLERALVSGLQAATIPVAIANPRKVKGFATALGKAKTDKLDAQVIAQFARAVQPQPQPVVAPQAQQLSDLVRRRQQLVEMQVAEKNRLSRASETVQLDIKAHIEEIQQRIESLNEQIQSLAQQQADWQRKNEILQSVKGIGKVSSALCLAELPEMGTLSEKQIARLVGVAPINHDSGQHKGKRMISGGRTSVRCGLYMATLVAIRHNPVIRKFYERLLTNGKLKKVALVACMRKLLVILNAMIRDNKCWQAPA

SEQ ID NO: 52304 - protein, 420 aa, unidentified
MRGGLPRCYEKAGSPDVLHPGKNALKVRKGKPAMKKAYRKEEQQAKANRKEAKKTIAKISEFGDRAANSLVIGMDLGDRTSTYTVRSRDAQEVLMRSTVTTAPEKILEAFCGLQRQRIIVETGTHSRWMAQLLEMMGHEVIVGDARKLKLISENNTKSDKVDADLLSSLGCMNVDWLHPVYVRKDETHRDLMLVRSREALMQARTALINHVRGTVKAFGMRVKSCDADQFVEVAAEGIPKVLEPALSGVLEILAALSEQIYEYDCHIAHLGQTKYQDEVKWLTQVKGVGPITGLTFVLTIEEPGRFEKSRDVGAYLGLTRKTKQSGNKDPQLGITKAGDELLRKLLVNCAHWILGYRGEDCDLRRWGMDLMERGGSEGKKGARNRAAVAVARKLAVLLHLLWARREQYEPLRKGVVPKAA

SEQ ID NO: 52305 - protein, 380 aa, unidentified
MSTSRAILRHKDTTSTGALYMSFDLGEKQWQICVGDGRSGISRFTVAAGDKVAVADRVNRAAKHFRLDSRSGVHSVYEAGRDGWWIHRWLREQGIDNIVVDPASIEVNRRARRAKTDRLDADKLLAMLIRHHAGERVWSVLHEPSPEDEDARREHRELHRLMRERIAHTNRIGSLLVLHNLRPGIVIGGRDWPRWWEAHSAQVPPLLRAELERECERLKLVKDQVRAIEGAHRRELAEGKQPLIDQLTQLRAIGPKGAWILVKEVFGWRQFANRRELASSLGLTPTPHASGSIDREQGISKAGNRRVRALLTELAWSWLRFQPDSDLTLWFNRRFASAGGRMRRVGIVAMARRLAIALWRYVKDGEIPAGAQLKPALAEA

SEQ ID NO: 52306 - protein, 328 aa, unidentified
MSIYAGLDVSDKATHVCVVDIEGKVVRRDVVASDPEVLAKWLSRHCPDLVRVVFETGPLSTFLYHGLAERGVAVECICARHAKGVLSARVNKSDVHDAEGLAQLARTGWFKRVHMKASATHIDRAALRIRVQLITARTAMANQLRRLLKLFGLRMGTARTSGRRTERLAALYAQRPDLTPLLAPLIASMEAIEEQLRASGRLLVERAAADPVSTRLMSVPGVGPITALTFTATIEDPRRFARGEDVGAYAGLVPQRNQSGERDTSGHISKAGDPMLRWSLYEAANVLLSQVKRPFALQQWGRKLAEAKGAKRARVAVARKLAALLHSL

SEQ ID NO: 52307 - protein, 343 aa, unidentified
MDYFAGLDVSVKETSVCIVDDAGKIVREARVASEPEALLQVLTNTIYRFKRVGLEAGPLSQWLYSVLAEAGLPVICVETRHMRAVLKAQINKTDRNDARGMAQMMRAGLYRPVHVKTLRSQKLRVLLTHRKLLQSKAIAIENELRASLRNFGLKVGMIGTMKFEARIRELVERLPDLAVLVEPLLIVRRVIREQLGILHRRLLAIVRDDDVCRRLMTIPGVGPVVALTYRVTVDVPARFRKSEAVGAVFGLTPAKYQSGENDRTGAISRCGDEMMRIMLYEAAQSMLVRTAKWSWLKAWAMKIARHRGMKKAIVALARRLAVIMHRMWVDGQEFRWTRELPVA

SEQ ID NO: 52308 - protein, 347 aa, unidentified
MSHKTAATVAPIIGIDTGKNTLHLIGLDDNGAIVLREKIARGRIAARFANVPRCLIGIEAGMATHYVARELIALGHDVRQVPPAYAKPFRQGHKNDFRDAHAIAEAVQRPSTRCVPVKTDDQLDLQALHRVRSRLVGQRTAVINQIRGFLLEHGIAVRQGLRFLRQQLPDIMAKRSDVLSPRMIRIIGDLSADWRCLDERIEHVTEEIEVLAHGSEGCRQLMTVPGIGPIIASAMVAAIGNGAAFAKGRDFAAWLGLVPKQMSTGDRTILGRITKRGNRYLRTMIMQGARVILLRPANWAKHSFGPWLTAAAQRLHHNVLATALANKLARIAWTVLMQARSYEARVN

SEQ ID NO: 52309 - protein, 360 aa, unidentified
MYFAGLDAHLKYVTVAVRDRLGTLVLETTVSTREPERLLAVLAPLRPLEVVVETCPFWPWLSDLLVPAGIGFHLAHAQRLRAIATAPQKNDRVDARLLARMLLAGLIPEAYPRSGDQREQLRLLRHRTALVRARTRLAGRIHSQLHQQRLLLPREQLLRQATRTWLRETAWPRLTAEQQAIVTTHLALIDHLTPLIQALERRIDTAAGANPPAALLATIPGIGPYRSLLLAAELSPLSRFPRVEHLASYAGLAPVTRSSGGHTRHGSIPQGANRWVRGALVSAIPSHVRSAPTSSVTRAYAQLTARLGWRVARVAAARKLLRIVYLMLRRGEPWRGTGRVEADVRDEVHASHVARRPQYA

SEQ ID NO: 52310 - protein, 347 aa, unidentified
MAAVMIGVDPHKGSHTAVAIGPAEEPMGELRVRACTAQAERMLAWAVAWPDRTWAVEGAAGLGHLLSQQLLAAGERVLDVQPKLGARVRLLAAGAVNKNDPNDARSVAIAALRSPSRREVQADDHAAVLKVWSKRHRDLGRTRTQVACRLHAVLCDLVPGGVSKEITAGHAAQLLKAIKPSGAVEEARCELAAEFLEDLRRVDAQMGDTKKKLTAAVRASGTTLTEIFGVGPVIAATVIGYVRDVSRFPDRDHFAAYNGTAPIEVSSGNRKIYRLSRRGNRRLNHAIHMAAVTQIRYHHSDGRAYYDKKLAEGKTPREAKRALKRRISDAIFAHLQNDARKTSTVTR

SEQ ID NO: 52311 - protein, 362 aa, unidentified
MVIIGCDFHPSGQQVFGIDTESGEVIADRWIAHRGGELEEFYGSLPAGAEVGVECSGNMLWFERRLAQYGHRLRLGDAAQIRARETRQQKHDRRDAELIARLLVENNFPDLRWVPTLAEHDLRQLLMHRHKLVRMRAQVKNQLQHIALNQGQQKKRQLRTKAGRELLEKLPLEPWTARRRDDLLRWLDGLDRDCAGLDREVEQAAEARAEARLLMTHPGIGPVISLAFVLTIGSIERFQRSRELVSYLGLNPSEASSGERRRMGGISKQGNVFMRLLLIQGAQTAVRGDEELGRQYRRLAAKKHRAVAKVMVARKLAVHMFWMLKTEKTHTELVRMRGSSSHSGVVETGALSEHPASPRIQP

SEQ ID NO: 52312 - protein, 415 aa, unidentified
MERVYERCCALDVHKEQVTACVHVPNQAGERAELGAEFGTMTADLLGLCDWLKGLGVTHVAMEATGVYWKPVNYLLEDDFELLLVNAQHVKNVPGRKTDVQDAQWLCQLLEHGLLKSSFVPPRPIRELRDLTRYRKALTWERGREANRLQKVLEDANIKLASVASRPLGASGRAMLRALCEGESDPQALADLARGKLRAKLPALTAALEGRFREHHALLVSHLLAHIEYLDETIEQLSAEIEERMRPFERQRELLCTIPGVAERTAEVIVAELGPDVERFPSHRHAASWAAVCPGHDESAGKRRSGKTRKGDRWLRVALIEAANSAAGRTKDTYLRAQYLRVKRRRGHKKAIVAVAHSILVSAYHVLAEGRPYEELGGDYFLRREDYERVTQRLVRQLERLGQRVTLEPVADTAR

SEQ ID NO: 52313 - protein, 347 aa, unidentified
MQRTTIGLDIAKRVFQAHAVDPASGAVTRTKLQRAEVLPYVAQLQPSLIVMEACGAAQHWAREFAKLGHEVKLIAPQFVRPFVKTNKNDVADAQAIWTAAQQPEMRTVAVKTEEQQAVLALHAIRERLKKARTAAINQLHGLMGEFGIELPRGWRTMLPQAAAALDPAESAVPALLQPQLRRQLEEVRSLTAQMTEVERQIASWRSRQEQCERIAAIPGVGLLTATAAVATMGDAKTFRSGRQFAAYLGLVPRQRGTGGRVQLLGISKRGDTYLRTLLIHGARSVLVNSQAAKDPNTWLGHLTQRRPRNVAAVALANKRARQIWAILAHDRTYEPNYGLPQALATPA

SEQ ID NO: 52314 - protein, 351 aa, unidentified
MLLIGVDYHPSFQQIAFLDQETGECDERRLNHSDGEAEKFYRDLKQRGVSVRVGMEATGYSRWFERLLAELGIEVWIGDAAKIKTKRVRKQKTDRQDAQLLLKLLLENNFPRIWVPSPENRDLRQLLWHRHRLVQMRTRIMNQLQAVAMNEGKRWKKKLFSERGRAQLEKLPLAAWASQRRRDLLELLDRMNPTIEELTAAVEQEAKKWPEVLRLMTHPGVGPLTALAFVLIIGTPERFRCGKQIGSYIGLIPSEDSSAGHQRLGHISKQGNALLRYLLGEAAQAAVRCDLGWRRRYIHLAMRREKNIAKVAMARKLAVRLYWMWRKSWDYSQLVEFGSHAGQLVTGHGVN

SEQ ID NO: 52315 - protein, 339 aa, unidentified
MSVKTVGLDLAKDVFQVHGISENGRVIFNKAIKRAKLLAFFENLPPCIVGMEACGSSHHWGRTLRKLGHDVRLMPANYVKPYVKRGKTDAVDAEAICEAVRRPTMRFVEIKTEDQQAVLSIHRTRDLTVRQRTQMANMIRSLLREFGHILPLGVGAVTAFATRHLDGDQPDMPDIANGMLGMQCYQFIGLNERIAGYSKLIQQHALSSSDARRLMRMPGIGPITASAIVATIGDAQQFRTGRDLAAWLGLTPLNKSSGGKERLGKITKKGDRYIRKLLVVGMTSRAVMAKRSPEKVDLWTAKIIADKPFRLATTAMANKAARIIWAILTKKQEYRQPAF

SEQ ID NO: 52316 - protein, 392 aa, unidentified
MVISVGIDVSKDKHDCFIVSSEGEVLADVFTVPNNMDGFHCLLQRVQSCAVSQDKIKVGLEATGHYSYNLLGFLLDNGLTTYVLNPLRTNLYRKSLSLRKTKTDRVDARTIASMLLSDAGLKPYTSTAYHNEELKSLTRYRFDKVKERAKLKSSVSRLVCILFPELEKLVPSLHIASVYALLEAFPGAKQVASVHLTKLKTLLEAASKGRYKRDMALEIRDAARNSIGSRMPAKSLELQHTIRLIRELDAEIAETEEQIQSILDELHSPITTIPGLGFRMAAMILAEVGDFARFDSPDKLLAYAGMSPSTYQSGQLKNCYPHMEKRGSRYLRYALYNATKYVCQWEPGFSAYLAKKRAEGKHYNVAISHAAKKLVRLIFAMEKSGTPYHLTV

SEQ ID NO: 52317 - protein, 402 aa, unidentified
MNCVGIDVSKGKSMIAVMRPFGEVVVSPFEVRHTASELSELARLLKNLDGETRVVMESTGNYHAPVAWLLHGAGFYVSVVNAMLVHDYGNNSLRRGKTDKKDAVKLANYGLDHWLTLPRYVPEEDTRLMLKTCYRQYQQYSKVQTMLKNNLISLLDTAFPDANRLFTSPPRADGSEKWVDFVATFWHCECVCGLSKKAFTAKYQKWCRKHGYNFSQDKALDIYASACGRFGVMPKTNTAKLLVEQAISQLQTTSAALAALKQEMQSLAASLPEYPVVMEMFGVGPTLVPQLIAEIGDVRRFHSKKALVAFAGIDAPPYQSGQIDVRSRSISKRGSASLRRTLFLVMGVLLQCAPMDEPVYQFMNKKRSEGKPYRVYMMASANKFLRIYYASVKAYLDSLEHD

SEQ ID NO: 52318 - protein, 317 aa, unidentified
MTQDLFVGIDVSKARLDLARQDGGRAPPLPNTPDGHARLVELLAGWGPALVTVEATGGYERDLVMALQGAGIPVAVVNPRQVRDFARATGRLAKTDALDAALLARFAQSLRPPASPPVPEAERRLAALVARRRQLVDMGAQERNRLEQARGTARASVERVLGLLQAELAGIDREIAGMVAADAELCGRAALLESVKGVGRRIAAVLLAELPELGRVEHKQIAALVGVAPMNRDSGTRHGSQHITGGRLGVRCALYMAALVAVRHNPPLRAYYKRLRDAGKPAKVALVAVMHKLVIILNAIVRDNKPWNPAIPQQDGC

SEQ ID NO: 52319 - protein, 344 aa, unidentified
MTTIDYIGLDVHKKSISFCAKAQDGRILDEGKIAAQHKDLNAWAKARTRPWVGALEATLFTGWIYDDLKPLAQDLKVAHPAMLKAIAASKKKNDRVDARKIADLLRCNLLPECYMAPSGIRELRRVLRYRNLVVRQSTRMKNRIAGLLMETGTIYNKERLHGKGYFHDLLGNLQETPASVRDLLKLSRKQLEFFETIQKRLLKGLREHGELKERVERLQTIRGIGEVGALTWALEIGEVHRFPSIGDACSYCGLTSAQRNSAGKEQRGPISKQRNKHLQTILIEAAKLAPRHNPQLAAVHERELQRGHCNRATLEVARKLVAYLMAVDKSGQPFQVRTGGAEQL

SEQ ID NO: 52320 - protein, 340 aa, unidentified
MQAVTTIGLDIAKSVFQVHGVDAEGKVLIRRQLKRRYVLAFFQKLSPCLVGIEACATSHHWSRELKALGHTVRLMPPAYVKPYVKRQKNDATDAEAICEAVTRANMRFVETKTPEQQSCLMLHRTRQLFIRQQTSVINAIRAHLAEFGIVAPVGRKGVEHLLAVVTDRSDQRVPELARACVAALGAHLGRLKAQILEFDRRIMAWHRSNEISQRLDELPGVGPALATALVASVADPKAFRSGRNFSAWLGLVPRQHSSGGKDRLGKQGDRYLRSLFTAGALAVIRYAKLHSTKHRPWLTALLARRPTKVAAIALANKIARMAWAMMVTGERYKEPVALAA

SEQ ID NO: 52321 - protein, 356 aa, unidentified
MVTGPKHQKEKRSMEHFAGLDVSVKETSVCIVDDTGKITREVKVASEPDALLAVLTNPLYHFKRIGLEAGPLSQWLFSALAEAGFPVICVETRHMRAALTAQINKTDRNDARGIAQMMRAGLYRPVHVKTLRSQKLRMLLTHRKLLQSKAIAIENDLRATLRNFGLKVGVVGTVKFEARIRELVENVSDLVVLVEPLLLVRRVLREQIGILHRRLLVIVRDDDVCRRLMTVPGVGPVVALTYRATVDVPARFRNSKSVGAVFGLTCSRYQSGQVDRNGRISRCGDEMMRAMLYEAAHIMLVRSTKWSWLKAWAMQIAKRRGIKKAIVALARRLAVIMHRIWVDGTEFRWTREAAAA

SEQ ID NO: 52322 - protein, 372 aa, unidentified
MRTQTLPPRHAILYVGVDVHKDTHTAVAINAFGEKLFEKVIGNSKEDFGTLVAMAHQVSLTHSLSPVFGLEDSWGNGTRLARYISSHHIMVKMVPPVLTDVFRKYETHPEKNDSLDAFAAAKVLIQRIDTLPTYTITKQDELSKEIKELSLDREFLVKERTRIKNQLHRLLHKAYNGEYRKKFKDPFSVKALNFWKTHAIPADTSDIPGDAVILKNQIKRKVKRLIDIREETEELEGELETLMEKTGQKLTTMNGCGIVLASKVMAEIREVKRFHSPSALAKYAGLCPRERSSGNTFRHVKTKSGNRRLNMAMHRIALSQISRTGNQEARTYFQRKVSEGKTKGQALCCLKRRLIDIIYMMLKYQQPYKYNV

SEQ ID NO: 52323 - protein, 341 aa, unidentified
MAKFIRMAIDLGKNYFQVHGLESEGGRSVSRKVKRSKMHEVFSQIEPCRVGMEACGSAHYWARQLTAMGHEVVLIPPAYIKPYVKRGKNDAIDAAAICEAMSRPDMRFVPIKSADQQAVLMLHKTRELLVKQRTMAVNALRGHLAEFGIVAAKGIGRVDELLALAKADAALPPIAMAAVACLDQHLEGLDLSIATVEKEIARSHRQNPISRVLDEIPGVGTLIASVIAASVPDPGVFKSGRDFAAWLGLTPRQNSSGGKEKLGAITKQGNRYIRKMLVTGATSVLRAVGKRKGSFADWINALRVRKPERVVAVALANKLARICWAIMTTGEGFRTDTYVKA

SEQ ID NO: 52324 - protein, 359 aa, unidentified
MLGSRPIKGVNAIQLLTRKNKFMKKSFTAFVGIDVSKHKLDVCLLQTDEKQGSCQVFDNNVKGIKTMINWLGKLSTSAKEEYLFCLEYTGIYTMPLCCYLSEQQYLFAMVPALEIARSIGIRRGKTDKADASAIAKYAQIRNSDIQLYQLPEKQLIKLKVLLTHRNRLVKARKVFYVAMTEPAGFIDKQITIEGNRQNKQLVINLDKKIKQTEKQIAELIASDQQMKKMYDLLISIPGVGPHIAAYLIVYTRCFTVFENSRKFACYAGIAPFEHQSGISIRGRSRVSHLANKRMKTLLNLAALTARKTDGQISQYYDRKLKEGKNPMLILNNIRNKLVARIFATIKRQTPYVFTMKFAA

SEQ ID NO: 52325 - protein, 329 aa, unidentified
MYIEADVHERESQLAILEPSGTLLTEKRLPTTNLPTFIDSLPGEKHVAIESTGFIYPIYDKLSTLNSCHISVAHPNKVKLIAKSKLKHDRADARILGELLRTNYLPASYMPPPDTREKRLLINDRVRYGLRGGELRGSIRWLLKRRGITVQRPFSPEGRRKLRELGLQEINIRLDELQLIEAITRKLNHQIAKIVQEDPNAKLLDTLPGVAPYTALFLSSEIGDVNRFPDSKHLCAYLGLVPSLHQSGDTTITGHITREGNKWLRRNLTECSRAAVRKDPHLRRFYLKLTHKRGEKKAILAIARKLVAYAYWMLKRNQTYEELSPWDGS

SEQ ID NO: 52326 - protein, 312 aa, unidentified
MPKKTFKFYIGIDVSKSHLDVAISDEVVYHVANNEAGWEEIIKVLPAKKKSLIVLEATGGYEQSITNYLKKKQFNVAIVNAKRVRDFARACGKLAKTDKIDAITIMNFAKAINPEPQVLASEHESLRTQLVKRRTQIVKLIAVEKQHLEHASRLQADSIERHIEYLKEELASLEEKLDAECSQDADLQEKAQRLQAIEGVGKITSLSVLMLIPELGQLSSKAMSALVGVAPFNKDSGQRVGKRSTWGGRSQVRASLYMAVLSAKKHNPVIKRFFERLIANGKAKKVALVACMRKLIIIINAMIRDGSCWMSK

SEQ ID NO: 52327 - protein, 398 aa, unidentified
MTESSDYESVQVFIGVDVGKDTHHAVAINRSGKRLFDKALPNDENKLRSLISDLKQHGQILLVVDQPATIGALPVAVARSEGVLVGYLPGLAMRRIADLHAGEAKTDARDAAIIAEAARTLPHALRTLKLADEQIAELSMLCGFDDDLAAQTTQASNRIRGLLTQIHPALECVLGPRLDHPAVLDLLQRYPSPEKLASLGEKKLAAQLCKLAPRLGKRLAADIAQALAEQTVVVPGTNAAAVVLPRLALQLITLRKQRDEVALAVEQRVLAHPLYPVLTSMPGVGVRTAARLLTEVACRAFASAAHLAAYAGLAPVTRRSGSSIRGEHPSRRGNKALKRALFLSAFAALRDPLSRAYYTRKMSQGKRHNQALIALARRRCDVLFAMMRDGTFYTPQAS

SEQ ID NO: 52328 - protein, 380 aa, unidentified
MGWPGRAQRPRTTVVPDGEASKLKELTMHTHQQSTEPVATIGLDIGKNTFHLVGLDRRGAIAMRIKVSRNQLVRRLVNLPPCLIGLEAGSGSHHIARQIQSLGHDVRLIPAQYVKPFLKGHKNDYRDAEAIAEAVQRPTMNFVAIKTPEQSDLLSLHRVRSRLVRQRTAIINQIRGFLIERGITVRQGPGPLRKVLPEVLCSPPEALSPRLLRLISELDQDWRRLDDRLEVLSGEIESLSENDAACQRLMTVPGIGPIISSAVVAAIGTGSGFKQGRDFAAWLGLVPKQESTGDRTKLGRISKRGNKYLRTLFVQAAHVVLERRPAAAMRALWPWIAQASKRLAHRNLLAIALANKLARIAWAVLARGRDYEPRITPNAP

SEQ ID NO: 52329 - protein, 316 aa, unidentified
MDEAGEIVEEVRVENANLDGLAQRYAGAEAALEATSNYYHIHDTLSEHLDVTVAHPKELNQIANSDKKTDRVDAKELARMVRLNSVPESYVPTDEIREARAPVRGRQSLVENRTKYANKIHGLLSDHGITEDVKPLNKEGREFLRELSLPTPWGALLESYLELIETLTEEIQELEETIEERAGSLKETQLLMTIPGVSYYTALTIYAELGEISWFDGDKSVVSYVGLNPVIRESPDSRIEGSISKRGSGRVRWLLVQAANTAVHTCNDAYLSRFYERLASRKNSQKAIVATARKMLVSIYHMLDRREVYDPPDVSA

SEQ ID NO: 52330 - protein, 343 aa, unidentified
MKLFVGLDVSLDKTTICVISEHGKIMKETQVASEPEALSCWICDQDGAIVAVGLEAGPLSQWLHRGLSDAGLPVVLMETRQVKGALKAMPIKTDRRDAEGIARLLYLGWFRPVHCKSVSAQEVRAVLSARKAVQQGFITLEMSLRGLLRNFGLKVGIISRGRFEQRIRELAAGNPMLEAATEPMLRARSALRRELAGLERNVRQLSQEDPVCRRLMSMPRIGAVVALTYRSAVDDPARFTSSKKVGPWVGLTPSRNQSGERDVSGGITKAGDVNLRRALCQAATVMMHRGRANWLRTWAAKLARRRGAKRAMVGLARRIAVILHRMWKDDTDFRFDIPVLHAG

SEQ ID NO: 52331 - protein, 321 aa, unidentified
MNKYKEIYGVDISKDVFDVYGSLSGHNQFKNDEKGFLDFLKSLSKDVLVVMEATGYYHYRLAQFLYRSNICVSVVNPLSVKRFIQMKLAKVKTDKSDAKAICEYGQMNDVPFYTAITDVQSECLQLFRLLDNYLKKRTQTKNKKHGEDVLGIPSKYVYKSLQRDLKHLDKEIKGIEARLLELVKQDQQEQLTLLKSIPGMGVKTALFLIVATDGFSKFETASQLCSYVGITPTIRVSGSSVRGRSRISKVGNKKLRNLLFLCAFSACKYNKACKAIYERIVNKGKSKKLALIAVANKLLKQAFAIAKSGIPYDENYVSKLA

SEQ ID NO: 52332 - protein, 345 aa, unidentified
MQPMYYIGLDVHKRKISYCVKDGSGRIHAEGSISATRLDLDHWMRSLPQPWSAAMEATMFTGWIYDHLQPHAAVLKVAHPLMLRAIAVAKKKNDRIDASKICDCLRCDFLPESYMASTAIRERRRTLRYRNLLVRQMVQMKIKISALLMEAGVSYNKQRLHKAGYFRELLATNPDIDEGLCSLLRLCRETVVRLGKNESALVRSLERDSLLVERIERLMTIPAVGPITALTWALEVGDVQRFSSIKKAISYCGLCGAEKSSGNTVQRTPLSKQRNKHLQTTLIEAAKMAPRNSPELAMLYDKEKQKGNANRATLAVARKLVAYLMAVDRGQRNFQRAETSSSIAA

SEQ ID NO: 52333 - protein, 407 aa, unidentified
MKHVIALDVSKGKSTVAIYNGYKQCEFEGELYHTRVDFEHLHQRIEEIKILDGHAPEIVFEATGIYSKPVEKFLRDYGHIYCRMNPLEANQQMASMRRYKTDISDAHELAKTHFKMEREITYVQDAYYDQMRAITRYYDEIDGEIILLRSRMHAILHISFPELEQLLTPSSALFLNFVQLYPHPALLMAHSKTIIKNRLKSNTRKNLSLERAEKKAIVLLEAAENSYPAIEPTDIRCDQVRDYARRIADLLEKKEQLVKQMVEMSKGRKEYTVLRSFPGIGDTTACRLIGEMGDLRRFKNAKQLNAYVGIDIMRYQSGNTQYHDRINKRGNKKLRKILYFMICAMLMTKGKPNHFVDYYYKLKTQPQRKPHKVAIVACINKFLKVTFHLLKHDILYDYESALPAQKS

SEQ ID NO: 52334 - protein, 387 aa, unidentified
MKKVNSNVACVGMDVHYKFSNVTFRDAGGKVVSRQRLDHPDRKQLAERLSRWPTGIPVVMEASFGWGWLSDLVEQTGHDVHLSNCYKVEQMRKARGWVKTNKKDADLVSLLVFEQSDWWKVWRAPPDVRNRREQMRFRGDLVGSQTRVKSRIHAIFHRHGIFHEFSDLFGGKGRKFLVELCLYNPANLPAEALLALRGQVKLLDHLRRQLADVALILHKQLLKTPLTTRLKTIPGFGLILAHVLAAEIGKIERFKNQKSLASYSLLAPRADDTGEDDPSHSPKGRHLGLRGNRTLKWAFIEAAHGAVRSGGKWRAIFDRATNGGKKNCNRGYIKVARELVKVVYVVWAKGVDYQVIPPVRPGRKSNKKKSRSETGQLLHPMVHALPA

SEQ ID NO: 52335 - protein, 310 aa, unidentified
MVMCFAGIDISKDTLDVHVIPDALSFSVSRDEAGLEALVARLQPMTPQLVAMEATGGFETLVAASLSARGLPAVVVNPAQVRHFAEALGKRAKSDPIDAAVIAAFAEAVRPQARALPDAETLALSELMARRRQLTEMLKAERAREPRAASKRARQSIRRVITTLEAELADLDGDVDKKIRASPLWQVRADLLQSVPGVGPTTARTLLAELPELGALSRREIAALAGLAPWTRQSGQWRGRSMIGGGRPQVRTALFMAALVASRHNPTLKAFRDKLIANGKPKIVAIIAVARKLLTILNAIIRDQKQWQTD

SEQ ID NO: 52336 - protein, 405 aa, unidentified
MEVIYERCCGLDIHKASITACVIVGKKKEICTFGTMTDDLLRLTSFLKERNVQMTAMESTGSFWKPIFNIMEVEGVAAILVNAAHIKAVPGRKTDVKDAEWIADCLKHGLLRPSFVKPRDQRELCELIRYRGSLIEERAREYNRMGKVLEGANIKLTSVASKMDTVSGTNMIRALSEGVFDPALLASMAKGALRKKTDELKRALNGLIQPHQQMILKAMLGHIDQLSVLIDTLDREIDVRMSQDVELVEALDEITGVGKVSAQTILAEIGTDMTRFPSANHLASWACICPGNNESAGKKKSGKTRKANSTLKKTLVQCGRGAANSKDTYLNSLYHRIASRRGAKRATVAVGHAILVICYHMIQNRSRYNDLGSDYFSKRNKDALVRQSVKRLEALGYNVSLEVAA

SEQ ID NO: 52337 - protein, 423 aa, unidentified
MQILYSRCCGLDVHKASISACILVYQDGGEPEVRRRTFSTFTQDLIRLKMWLTSSKVSQVALESTGVYGKPVWNILEHGSLQLMLVNPQHFHAIPGCKTDPKDSRWLAELLSYGLLRPSFVPPQPIRELRDLTRYRVHLKQDRNRIHNRIHKVLEDANIKLDCVATDILGVSGRRMIDGIVEGRYSAEWLADRARSRLREKLPSLRLALRGRVTDHHRLMLRELLGDLDAVDSKIRRLEQEIIARAEPHANLMARLCTIPGIDMVTAWTLLAEIGVDMAPFPDADHLASWAGLCPGLKESAGKRMSGRTRKGDRYLRRALCQAAWAVSHTKDNYLAALFYRIAGRQGLKKATIAVAHQLLRIAYHIIRDGGSYRELGGNYFDRLHPERTRNRLVRRLENLGLEVTLQPRNPGAAPAGSNPVDS

SEQ ID NO: 52338 - protein, 404 aa, unidentified
MGTNSDLRVSIDVGCYRHSVAIGLPGGELLEEFDLAHGPEGFDQFFGRVDKLQHHYGGSVLVAMEGYNGWARPLDTLVRAHGYRLFNINNLKLARFKEIFPAAAKTDRIDARKGLELFQLRDHFPTARDVLQEIAATPLVNDKLKQLTRRRRALVDERSRLIARLQADLQAVCPGLLEITKDTDNLWFLNFLTHGDDLRKLGRLRKTTILGIAGIGRKFGAIIEHWQKTARFSHDAEWVGPMVVEDARRVLELRRTIKTLEAACKVLMQDSKIAVLTKTIPGFGLTCSSELAGEIGTIDRFDKEGSLAMYLGMANLTNSSGKHQGSKNPKHVNSRAKAAMMAAVDKHRKLVPESKRYYDKKRTEGKKHNQAIRALGRHLCRVIFVMLKQGRGYELRKENDSNIA

SEQ ID NO: 52339 - protein, 339 aa, unidentified
MKVTVFGLDLAKRVFQLHWVDMETGEIGRRQLKRAQVAEFFANREASVIAMEACGSAHYWARKFAAMGHEVRLIAGQFVRPFVKTNKTDAADAQAIWEAAQRPGMKFVSVKSEAQQAVLMLHRMRSQLVKMRTMQIQQLRGLLYEFGADLPQGRQAGMERIPAELERLEKTLPAMVIETVRAQIKRIEALDQDISDIEKKLAAWQKEDKSARRLMEIPGVGLLTATAAVATLGDAKTFKNGREFAAFVGLVPRQAGTGGRVKLLGISKRGDVYLRTLLIHGARAVITHAKEREPWLEKLLERRPLNAAVVALANKMARMIWALLAHDRKYQKGYAAHAA

SEQ ID NO: 52340 - protein, 460 aa, unidentified
MTLLAQLGSQLPQRYYLSLDIGYKEHVAVVIDLQTFVRGDDRWKRARCLHFPSTRVGLKKFQKYVDRFCPDPAAFLGLCEPTGGFYGATVLQYLLDGGYQMLLVENATTRHMREKIFPNLPKTDEMDARVMARIGYLHEAVGEEFTLRPLELPDPDDADLMALCRDSWKLSTLITRARNQFTQLIAVTFPELKTFFTSSVSTVVPVSLITAYPTPALLAEAPAEEVHQVLWEARDYQHARRVDGLQALARNSSGLLPDPGRVWRLNWLTCFLLTNSRHQAALDKRIKELLEQREDYELIVNVPYSGPATLGVILAVTGDVGRFSNYRQYVAYTGYFAGLEKSQTIDRTRMSKRGNRDLKRALFQIAAPLVWFDQGDNPYKALYERKMAEGRAWYEAMPFVCAALARHIYHCLKFKDPYDVERAFRGSSPIPASEQALVDLRADLDERFEVMDVHLCQIEG

SEQ ID NO: 52341 - protein, 369 aa, unidentified
MKQDSEVFVGMDVAKVRHAVAIAEDGRQGEIRFLGEIDADPTSVRRLVNRLEKRHTRLHFCYEAGPTGYGLYRQLIEMGHRCMVVAPSMIPRRPGDRIKTNRRDAMQLARLLRAGELTEVWVPDKAHEAVRELIRSREAAVDDLRRKRQAISSLMLRYGRSYPGKKTWGARHRQWLQAQRFDHPAQQLVLQEMALAAQHAQERLQHIEAAIVEFVPTWSLAPVVDALQALRGVQLISAATIMVELGDMRRFDNPRQLMGYLGLVPGERSTGDTVRRLGITKAGNGRVRRALIESAWSYRHLPRTSKLKYYVHERVSPAVRDIAMKAQMRLCARYRSLAGRGKKLTVAVTAIARELVGFIWAIGRIAQAS

SEQ ID NO: 52342 - protein, 341 aa, unidentified
MYDVSTVGLDIAKQIFHAHGVDSAGSVLFRKKLRRHEVLGFFSQLPRCLVGIEACATSHHWARQLRAIGHEVRLMPATYVKPYVKRQKNDAADAEAICEAVTRPTMRFVPIKSEEQQGLLMLHRGRELLIRQRTMTINALRAHLAELGIVARQGDVGVQSLLGLVRQEGSDSLPSMVRAALLPLVHQIEQTTAKISAFDLEIQVWHRQNETSRRLASVPGIGPITASAIIATITDVSTFRRGREFSAWLGLVPRQSSSGGKDRLGAITKKGDAYLRRLLVVGALSALRVSRTNESRGIPGAARLLERKPYKLAAIALANKMARIVWALLTTGERFKLQPRA

SEQ ID NO: 52343 - protein, 389 aa, unidentified
MIYLGIDVSKFKHNCYLADENNFDKGCHFEIKNSKEGYDFLLKKLSDFDKDKIRIGLESTGHYHLNLSRFLLDLNFNIHFFNPYQTSLYRKADSFRNTKTDKVDAFFIAKLLRATDSNPTHNELYHNYELKSLTRYKSSLKNDRIKLKNAIVGHLDLIFPELSKICNDIFCKYTLAILKEYPSADKIAKANLTRITNLIKKASNGNHSKERAIEIREAARKSIGINSPAVSFRLVQDIKALEFLIEQIDEVNEQIKLLLNEMDNPIMTIPGVGIEIGPSLIAEIGNIDKFESPSKLLAYAGLDPSINQSGTMNSSYSSMSKRGSSYLRDALFLAAFLICQNDETFRLYYEKKKSEDKHHYVALTHVARKLTRVIFHLLKNNQQFVSQKN

SEQ ID NO: 52344 - protein, 375 aa, unidentified
MNDHSEAFVAFDTSKLRNAVAIADGGRAGEIRFLGEIENTGAATAKLVRKLAARHQRLTFCYEAGPTGYGLYRLIKSLGHECMVVAPSLIPRKPGDRVKTNRRDALSLVKLLRAGELTAVWVPDRHHEAIRDLSRARGTAALDLRRKRQQMSAFLLRQGLHYPENRHTWTKAHMNWLASQKLAHVEQRIVFEEMMLAMRQAQERIERLEQAIRAAVPDWSLAEVVTALMAMRGMDLVSATTFLAEIGDLSRFQTPRELMAYLGLVPSEDSTGGTVKRGPITKAGNGRARRMLVECAWSYQHPPRVGKDKQEKVAAAPRAVREIAWKAQCRLNRRYRALVRRGKLKTVAITAVAREFAGFIWAVARAANAARAEAK

SEQ ID NO: 52345 - protein, 345 aa, unidentified
MRKDLCERRSSHVMSAFVGLDVHSEKTFATVLDQDGRVVAQRRMMNEHVPDFLKLFNVEKVGLEASTYVAPLYRALVREGFQVLVSHPKKTRYIAEAKIKSDRVDSKAIAELVRLDALPQSYMPPAEIAELREKVRRRAFLVRERAKLMTKIRGVLAYEGLKPPKEYGLFTKKGVEWLQSLKLEPIECYLRIIEVLNGEIRQLSRQLRRLARDDEDVRLLMTIPGVGYYLALLIKAEIGDISRFRSGDHLCSYAGIVPSTHSSGGVARHGRITREGSRWLRWAAVEAAMTHIKYDTAITRAYHRIAERRGRQVAIVATARKLLLCCYSVLKHKRPYRPFPSRSGV

SEQ ID NO: 52346 - protein, 346 aa, unidentified
MVVGIDVHKRSHAAALLDGNGVVLAALTIPNSLVGVERLLGWLNEHDAREAAIGIENAAGYGRLLCAALAAAGCEILNVPAWRTHRDRHEQGRGKSDPGDAVAIAHVVLRKREQLGPALEPELIRALALLEGLRRQSVYDRTQAIQRLRAIWTQVDPEGEARVIHCQRQRELRKLTRIAFGAGIAEQAAARCIRELAREIERLNDRIAALEHELEQLLRECGNPFADLAGAGATVAVALIAHSGDVRRFKDKGAYARFCGVAPIRCGSGRTADHHRLDRGGNRQLNAALHRIAVVQARVDPRAQAFLARKRAEGKTAREARRALKRHLANVVYRRLHAWAEIALPA

SEQ ID NO: 52347 - protein, 333 aa, unidentified
MDTETGDYGEQRLEHSEGAEKFYRDLAAQGKQVRVGMEASGHARWFERLLAELNFELWIGDASEIARKRERKQKTDRQDAQHILQMLMENRFPKIWVPSGENRDLRQLLWHRHRMVQMRTRIMNQLQAVALNEGLRCKKRLWRQHGREQLESFRLAPWASRRREDLLQLLDRLNPTITDLTQVIEQEVEKCPEARRLRTHPGVGALTALAFVLIIGRTERFQCGKQIAAYLGLVPLEDSSGNRRRLGHITKQGSSMLRFLLVEAAQVTARSIPEWRSKYFHLAMRRGRKIAKVAMARRLAIALYWMWRKGWNYEQSRKFGSHAGKLGTGDGVQ

SEQ ID NO: 52348 - protein, 343 aa, unidentified
MQAVKTIGLDIAKSGFQVHGVDADGQVVFRRQLKRRNVLAFFQKVPSCLVGMEACATSHHWSRELQALGHTVRLMPPAYVKPYVKRQKNDATDAEAICEAVTRANMRFVATKTPEQQSGLMLHRTRHLFIRQQTAVINAIRAHLAEFGIVAAVGRNGLEQLLNVVADAGDKRLPEVARTCLMALGTQLQALKAKLLELDRMITAWHRSNETSKRLDAIPGVGHVLATALVASIADPKVFRSGRDFSAWIGLVPKQHSSGGKDRLGSISKQGDRYLRSLFTAGALAVIRYAKIYGTKHRPWLTALLARRPTKVAAIALANKLARMAWAMMSRGERYKEPVALAA

SEQ ID NO: 52349 - protein, 446 aa, unidentified
MRWLGLDVHKDFAEVAEALPGGNVRQLGRIRTTPAELRAFAESLRPDDQLALEATINTFAVARLLEEHAGRVVISNPMRTRAIADAKIKTDRVDDGVLAQLLAADYLPAVWQPDETTRVIRRLVARRAHIVRQRTRLKNQVHAILHRNLVNGCTATDLFGIRGRAWLESCSLPDDERELLGSCLRLFDFLTEELAAADRACAEAAIGRDDVRRLMTVPGIDFAIALALLAAIGDIQRFPAPHKLVSYFGLDPQVRQSGNQPSASGLRITKVGRAHARAMLVEAAWAVARTPGPLRAFFDRVRARRGPQIAAVALARKLAVLTWHLLTRGEDYLWARPALVAAKYRRLDLRAGAPGRRGQRGAAANYWASAESRERDRALPTAAEAEYRQLTANWRQRPRATAADGREGRGRPKGEATVWPAAGRAAEVASPSSALLHGGRPRPDGG

SEQ ID NO: 52350 - protein, 421 aa, unidentified
MTPPNEVVWAGIDTHTDTHTIALLDERGRPLGAETFTADPDGYDRLIGMLPGPGRVAAVGVEGTNSFGAALARRLTAAGYEVREVLRPRRSVRRRDGKSDPLDAVAAARSVMAGDGTSLPKSSDGWVEALRHLNARRSQLVSAMTAIPDSTNGLLAAAPEPIRERYRGLRSETRMNRLAECRPAGGLVERSVLAALKSAAKAWKALKRQAGLLEERMRLILEEHARPLLDMYRAGTVIAATLAIVAGDNPERIRSEAAFAKLCGVCPIPASSGRTNRHRLNKGGNRQGNMALHRIAIVRLRYHKPTRDYMAKKTREGKGKLEIIRCVKRFIAREAYRALISIRNGEVGRGTPAERGAKLRELRVSRNITQQQIGEALCVPSSRISEIERGARDLPELEQRAIQWIHSTTNPKQHTQTLDNV

SEQ ID NO: 52351 - protein, 436 aa, unidentified
MRGCRCSGFMGIAKPIDLKSIPKGGENVNQLYVGIDVASRDNAVYIMLPDGSKHSSFSVQNNLGGAQALSKRVVAALTDVRLQDVVIGMEATSVYGDNLLCFLREDGALAKFNRKLHVLNPKQVKKFKGAYSDLPKNDPVDAFVIADNLRFGRITVPVHLDDYRYKALQTLTRNRFFAVQNLTREKQRFKNYLFMKCSGLAQESIFSNNFGAAALAVFEEFESPDDIADMELGQLAAFIAEKGNNRSPRPDEIAKAVQSAAKGSYRLPKTVNDSVNQVMSISISSMRAMQTQVKALDKEIQRQFANIPNTLNSIPGIGPVLSAGIIAEIGDINRFPDDAAVAKYAGLAWTQHQSGAFEAEHTRLIRSGNRFLKYYLIEAANSLMRCDMVFKRFYDLKYNEVNKYQHKRALALTARKLVRLVFRLLKDNRLYIPVQA

SEQ ID NO: 52352 - protein, 318 aa, unidentified
MKNIETYVGIDVSSDTLDVAAHPRQQAKSFRNNEAGINEAVTYMKNLAPVLAVMEATGGLEMSPAAALGAAGIPVAVINPRQVRDYAKSMGKLAKTDTIDAQVMADFAAAVHPEPRPLSNRQAQELKDILTRRLQLNEMITAEKNRLHRARRPVSDHIKAHIAWLEQELDDMNSNLNRFIQESPIWRENDNLLQSVPGVGPILSSTLLAELPELGKLNRKQIAGLVGVAPLNRDSGRYRGKRMVWGGRAKVRAALYMSTLVATRRNAIIRCFYERLIAAGKAKKAAITACMRKLLTILNSMLKHRTTWRHVSNPAAVS

SEQ ID NO: 52353 - protein, 572 aa, unidentified
MSRSARKAESFSPPDSGGDETLEAYLNPYGVGIDTHSRFIQICVLVRSEARIDRHEREFSTNWPDLIEAKRWILGHLQGLATERSLEFTIESTGCYHYPVLRAFEGHPHVVNPLLAAPGRRKTDRLDAKTLARHALSSLWPESFIAPDDCQVLRLILRAREDQKRTRVRAMNRANGLVLRFGHTFVALTGLKGGLCRSLLDDLAAGRFPQSAGVAPIALPPHVRWLLDLELHRADAAEQIVRGLESSAREYLKTLQVPVGDRLLPGHEAEKLLRTVPGVLEMCSLHWIAEVYDWRRFPCPKAAVAFAGCDPTLKISAGKVTQHVRRGGNKRLHQTLKFGAAALLRLRKEPIGQWGASLMGRTKKGAWKKTCSAVARRVALGLYHVQRTGQPFSYAGYKLYELHAFDDRPLEGLLPGRFVITLAKIGVQTTSQLYAKWKNGLAKEPGVGERCLEAVQKWVASLPRKTACSSVDTSSAGASEPSPDVTTRKSRSSASTSPLANESSLMKSGDPSKSLPSVKPSTFPSPSGPTGRHKGSATPSAPPSSAKNSDPMATPQGRRDLVKRFFKDSPTA

SEQ ID NO: 52354 - protein, 349 aa, unidentified
MRFYTKQHQFYCGIDLHARLLAICIVDEAGVVVCRTQIPADKTILLETLAPFRRDVVVAVECLFAWYWVADLCTAEKIPFVLGHALYMKAIHGGKAKNDDIDAEKIGRLLKGGNIPVAYVYPKGLRETRDLLRRRMYLVRQRAALITHVQIVNAQYNLPEFSKKLIYAKNRAELKIAERFDNLQLRKSVAIDLALIDALDVQIADAELHLERTAKVEDPQTFHLLKTIGGVGKILGLILLYEIHDIRRFPDVGEFLSYARLVRCRHESAGKKLGSGGHKIGNAHLKWAFSEAVCLLVRHYPAVKVWQARHEKKHGKKKTLGILAARLGRAVYHMLRKREAFDVKRFLGQ

SEQ ID NO: 52355 - protein, 343 aa, unidentified
MHIATVGIDLGKTTFHLVGLGERGKVIVRKKCSRKQLLAFTTNLQTSLIGMEACSGAHFIGAALRRQGHDVRLIPGQFVKPFVKSNKNDFVDAEAIAEAVGRQNMRFVPIKTDDQLDLQALHRVRDRLVQRRTAVINQIRGFLLERGITFARGPAKLRSQMAAILEDADTNLTPRMRNLLDHLWREWKLLENDVETISKEIDTVATNDPTCQRLRQIPGVGPLISTATVAAIGNGAAFRKGREFAVWLGLVPSQHSTGGKARLLGISKRGNKYLRRLFIHGARSVLLRAPHDTSGLGRWVRQLAARAPSNKVAVALANKLARITWAVLAHGEEYRPTVSLEAA

SEQ ID NO: 52356 - protein, 345 aa, unidentified
MKKVIAGMDLHSNNVVIGVMDMDGKRLASRKVPCELKEVVKFLAPFKRRLERVAVESTYNWYWLVDGLQALNYPVVLANPAGMEQYSGIKHADDTNDAFFVAELLRLKILPTGHIYDAALRPVRDLLRRRLMLVHQRTALMLSFKSLYTRTTGQELTLSALKNLEIKEAQDLYEHPANQLIAGMQIQHIEQLSQSIEKIEKGVLGSARELPYYQKLTTLPGVGKILGMTITMEVGDIKRFAEPGHFASYCRAVEAKRMSNRKQKGANNSKCGNKYLAWSFVEAANFARRSDPQCRAWFDRKAAKTSTVIATKALACKLAKAAWYLMAEATDYDPQRMFGQPATPQ

SEQ ID NO: 52357 - protein, 392 aa, unidentified
MSTDHLFADPTAIHADPAAIFVSLELSRSSWLITSLSPGGGEKMSRHSVPGGDVAGLVARFASLNAKALARTGRCYPVVVVQEAGLDGFWLHRALEAEGIESHVVDAASIAMPRRRRRAKTDRIDGEILLRTLLAYKRGEPRVCSMVRAPRPEAEDRRRVCREYKTLVAERVRHVNRIKGLLFAQGVRDYQPLRRERRERLAALRTGDGRALPQHLRAQIGRELDRLELLLEQLKAVVAERQALLASAQNATGIPAVPALLLGLRGIGPDFAASLWSEGLCRGFANRRQLAAYAGLAPTPWRSGSLVHEQGVSKAGNPRLRTTMIQLAWLWLRHQPQSALSRWFHKRAKRGRQGWRKTAIVALARKLLVALWKYVNDGVVIEGAVMKPLPAA

SEQ ID NO: 52358 - protein, 366 aa, unidentified
MKKIITVAKNRNEIFKQQQLTIGVDLGDRISRYCILDETGNVILEQSVPTTPKGIQQVFSKISRCRIALETGTHSPWVSRLLTQLGHEVIVAHARNVRLIGESTRKDDRLDARTLARLARIDPELLGPVRHRSAKAQIHLTVIRARATLVSARTALVNAARGLTKSYGERLPKCGTEQMNREIAKGLSPELRDVLGPLLGEIESLNERIAEYDQRIEQIAKEVYPEVVLLKQVKGVGTLIALAYVLTLDDAHRFRRSRDAGCFLGLRPGRRNSGMSEPQMHISKEGDAYLRTLMVQGAHYILGPFGQDSDLRRWGLKLAARGGKNAKKRAVVAVARKLAVLLHRLWVSGEVYEPLRNSHKAMRAVA

SEQ ID NO: 52359 - protein, 441 aa, unidentified
MSDITPSVSPEPEWAAFVAIDWADKKHCWKLLAAGSVTPEEGTLANTPEALSMWAANLQERFAGRAIAVCLEQSRGPLVYALCKFPHLVLYPVHSTTAARYRQAFFPSGSKDDPVDTTLLLELLTRHRDRLRRLNPETPETRLLQMLVEQRRKLVDERTRYSNQLTAWLKMYFPQVLIWIDNIDSPLGCDLLERWPSLEQLKCVNPAKLHDFFTTHNSRSEQRIQERINAIYQAVPAVNDPALLQAGPASVQALVRILQVLNSAIADFDQRIESAANNHPEAPLFVGLPGAGPVLRPRLIAAFGTQRERYQDAGELQNYSGIAPVTKRSGGTQSIHFRRACPKFLRQTFHEFAGHSIQKSTWARAYYRSQRELRKDHHAAVRALAFKWMRVLYACWRDRQPYDEATYARSLEKRNSPLAKLTTALQWKDVAGFKKLSPKTT

SEQ ID NO: 52360 - protein, 386 aa, unidentified
MQRNDLSRSLVAFDQNSTLVAVVELSLNRWVVQGLVPGLSKQPLKALGPDASALLALVNRWQLEGTKGGGRIKRIVVAFEAGRDGFWLARWLRTRGIEVYVIHATSIPVSREHRRAKSDRLDTELLMRALLGWLRGERKHCQMVRIPTIEEEDARRPNREHQTLVGERTRNVCRIKSTLVLHGIRDFNPKRLKASERLETLRCPEGGSLPPNTLAELRREMAQLRLISGQLREIEKTREERLKRAPRQGTHPMVLLLAKILGIGIETADMLVHEILSRELRDERAVGRYAGLTGSPYDSGAKRREKGMSRAGNARVRRGMVQLAWRWIRFQKDSQLTQWYNSRTESARGDIRKTMIVALARKLLVSLWRYVTTGEVPVGAKLKAAA

SEQ ID NO: 52361 - protein, 316 aa, unidentified
MSTTAVYVGIDVSKERLDICIQPENVHQAFAFDEDGVQTLVKFLKKRPVTLVVMEATGGLEKQAAAILADHFPVAIVNPRQIRDYARALGILAKTDTLDAFVIARFAQDIKPQPRELPDSQREALRELVARRSQLTHMRVSEINRRKRCGSDSIRDHIDQHLRFLDNQLDDLNQQIGRMVKQSPMWREMDDLLQSVTGVGPRTSQMLIAYLPELGLSNRRQIASLVGVAPFNRDSGKRTGQRAIRGGRQQVRNTLYMAAISAIQHNPDIKAFYTRLKGEGKPSKSAITACARKLLIHLNARAKQNIKNANLCLNAA

SEQ ID NO: 52362 - protein, 349 aa, unidentified
MTMVGGFDVHRKQITFDYVDDDGVVHWGEIRPATRKMLRGWLGKHCPSGDAEFALEGCTGWRYVVEELAMAGVVAHLGDPAEIAGLRGPKKRAKTDRADARLLRTLLVEGRFPELWIPPAQVVEVRTLGRLYCALMEERRAWQQRIHAQLLHQGCPPVTALLSAAGRDALAGAELSGVGRQYVDTALRRTDELGAEIVPLRAQLVNFARHQRGCQALQARHYGIGWLCAAIIWAEIGDARRFSSSDQLVRFAGMDVTVYSSDTKRSPGHLSRQGSPELRWGTFEAAKCAAWPGSPDYGYYHQLATKHDGHNGKNPTLAVERKILRRCSHTLRELGDGALSPPQPVREAA

SEQ ID NO: 52363 - protein, 349 aa, unidentified
MNFYTNTHPYYCGIDLHTRLLYVCIIDNENNILVHEKIDDSPDKLLALLKPYLGNIVVGVECMHCWYWVSDFCEEHNIDFILGHALYMKAIHAGKTKNDKIDALKIAKLMRGGNFPLAHAYSKKHRSIRDALRRRTHIMRMSAQLKAHVASTVGQYNLPALETRLDLRNSPDREKMRHFFPDEAVQKSMDLNLNIIETMVSELYKIEHYVKTQAQTHCATDLHILKSFPGIGKILALTILYEVGDIKRFPSVQKFASYSRLVKCKAESAGKTHGTQGNKIGNAHLKWAFSEAAVLYLKGNDNAKRYLAKLQKRMSKAKALSALAHKIGRCTYFMLKNRQVFDEERFLNG

SEQ ID NO: 52364 - protein, 432 aa, unidentified
MKYKMKLKQNQRITRITKETLVIGADIAKKIHVARAVDFRGIELGKDCVFHNDQEGLTKLVTWMKELQEVHLKTDIVFGIEPTGHYWFPLASFLEARDIKVVIVNPHHVNKSKELEDNSPTKSDYKDAKVITDLIRNGKYSEPKLPAMEYAELRILMNFREKVMVSLNQVKARVHNWFDRYFPEYLSVFKDWEGKASLMTMRQFPTPEEIVSIGARGVLAHWKTEVKRGVGIKRAEKLFATAGTSIGLTEGLRAARLELLSLLEQFELFSKQVEMTMNQVMDILNEIPGTTQMLNIPGVGAVTVAGFLAEVGDLSHYDHGQQIIRLAGLNLKENSSGKRKGKTGITKRGRSRLRALLFRCVMPMVAKNEEFKALHKYFTTRSQNPLKKKQSLIALCGKLIRVLHTLGTKEIEYNANDVLGPVRQAQLQRNAA

SEQ ID NO: 52365 - protein, 331 aa, unidentified
MDNSLYFVGADIALKKFDAAIRLDGNRYKHKVFANTPEGFTAFHAWLQGFGSHFHILMEATNVYHEDLADYLLVQGLTVSVINPRCIPNFAKSTNMRSKTDKVDARLLADYAYCNSARLRKYAPLATNYRTLKRLMRQLTHLKKIIAKEQVRIQMMMDALCVEISQEIIAGTKALAKELEKKIKELVKEDKVLSRNAQLLQSIPAVGWMSAMYLLSHLGDGSRFRNSKAAATYMGLTPIVKQSGDSLHIVSGISKMGPRDIRDVLYAPAMSYAFGPWKERVYAPFVQRLTANGKASKEVIVALMRKLVSIAQAVLQHQRPFDSAILVGKAA

SEQ ID NO: 52366 - protein, 320 aa, unidentified
MAKRTTICAGIDTGKRKLDVALDCSSEQLQVENTAEGYKTLLEWLGRHKVKRVGIEASGGYEQAVVAELRRKRLVVVVFQPAQVRAYAKYRGQRAKNDRIDAALIAACTAAVNELHPAPDARFSALAVHLTLIEQIGEDIARCKNRLESCRDVRIQKLWKEDITHLVKRKRAEFKALVAAIREHRDLAERLDLIYSVGGAGLPTAVAILVRMPEIGQLSREQAAALAGLAPYDDDSGEHTGARHIEGGRKRLRRALYAAALAGSFRWNPQLMALYKRLIAAGKGHKRALVACARKLLIFINAVVTRGTPWQADAPAAQAA

SEQ ID NO: 52367 - protein, 460 aa, unidentified
MLITRGFGQHMIPRINLLLQVPGTHNREGGDIMLKINPLSTLYVGIDVSSKSNYVCALDFYKNKYINSSFANNQPGAEELAQKLLECLKKHPDLNTVVAALESTSVYSIHIANYLSSCEELMPFKPYVFVLNPKCTANYKKSYIGLGKSDPIDAFVIADYARAGNIETEPWRGSQFLALKRLTRHRLHLVECITREKTYLVSNLYLKFSELQMLDKDDQPFCDIYGATSSSVLTEYLSPEEIIEASEEELVSFLANKSRNRIKDISKTAELLKKAARDSYRLDKALYEPLNVSIASSFNCIETFKKEIKAIDAAIEREIKGLNPNAFIILQSINGIGPVFAGGIVAEIGDISAFTSSDALAKYAGLCWRSNQSGDFDGEDTPMIKAGNRYLRYYLGEAANSMRKHNVEYGAYYRKKFNEVPKHQHKRALALTSRKFVRLVYGLLARNQLYSGVSLDTSNE

SEQ ID NO: 52368 - protein, 348 aa, unidentified
MPIVAEHFESVVGVDTHAATHTLAVVTAASGAERARATFPTSAAGLARALAWIQGHAGPTSLVVIEGAGSYGAGLLERVSAAGMPTAEAAAMPTRRGIGKNDDLDAVRIARSVLAVDVERLRRPRSEQGPRVAARVLVVAREQMAAERTRTVNALTALLRSIDLGVDVRRALTASQITAITAWRSREEPDWLAVCRGEAVRLARQIRDLDHALVVNRAQLDQIVAAQAPELTDLPGVGSVVAAAVYVAWSHPGRVRSEAAFASLAGTCPIPASSGNTQRYRLNRGGDRRLNRVLTTIVLVRMRIDPDTKTYVERRRAEGRTTKEIMRSLKRYVTRQLFRTLATAHPAT

SEQ ID NO: 52369 - protein, 392 aa, unidentified
MVVSVGIDVSKDKHDCFIVSSEGEVLADVFTIPNTMDGFNLLLQRVRECTTPQDKIKVGLEATGHYSYNLLGFLLDNGLATYVLNPLRTNLYRKSLSLRKTKTDRVDARTIASMLLSDVGLKPYTDTAYHNEELKSLTRYRFDKVKERAKLKSSIARLICILFPELEKLVPSLHIASVYSLLEEFPGAQQIAATHLTRLKALLETASKGRYKRDMALEIRDAARNSIGSSMPAKSLELQHTIRLIRELDNEITEIEEQIQAIMDELNSPITTIPGLGFRMAAMIFAEVGDFTRFDSPDKLLAYAGMSPSTYQSGQLKNCYPHMEKRGSRYLRYALYNATKYVCHWNPTFADYLAKKRAEGKHYNVALSHATKKLVRLIFALEKSRETYRLAV

SEQ ID NO: 52370 - protein, 396 aa, unidentified
MTAIWAGIDAGKTHHHCVVIDDTGKRLLSRRVANDETELLKLLGDVLDLGDEAVWGIDLADGGAALVIAMLLNHGQQLLYLPGRAVNRASEGYRGDGKTGAKDAAVIADQARIRRDLTPLRPGDELVSELKVLTRHRRDLSDDRTRTINRLRSHLTEIFPGLERELDLGNVGPLVLLTGYQTPAAIRRAGRRRLATWLRNRKVRSADELAAKAVQAAERQHTSVPGEDMTAHVVHSLAREVIALNEKIAETDKLIEGRFRRHRNAEVITSMPGIGVLLGAEFLAATGGDMAAFASADRLAAFAGVSPVPRDSGKVSGNLHRPTRYSRRLQRVFYTSALISVRCCDESRRFYDRKRAEGKRHSQAVMALARRRVNVLWALLRDGRCYDPIPPVTLAA

SEQ ID NO: 52371 - protein, 341 aa, unidentified
MMIIGCDFHPRFQQIAFLDQETGEYGERRLSHPEEAQRFYRSLVGRRVRLGAEATGNFRWFRLLMQELGHEFLLGDATTIRAACPRKQKTDKRDARHILKLLVEDRFPDVWQPPEENENLRQLLMHRCRMVRMRTRIKNQLDSMAKNEGLLSKRVWCPMRRNQIEALPLAGWNVERRRDLIALLEEMNRRIEPLDEAVIKAAEQNPEACLLMTHPGVGPVVSLAYVLTIGNWERFPRGKQVGSYLGLIPVEESSSDKRRLGHISKQGNTTLRWLLVEAAATAQRYDASWHRQYVRLSMTKHHGVAKVAIAHKLAVRLYWMLRSGEDYDKVMERGSHVGQSE

SEQ ID NO: 52372 - protein, 328 aa, unidentified
MTMNPALSAFNHVVAFEVAKDSLVIHVLPAGKQSFSANKPKAIREALIAEMRRNAEASLGPLLVVCEATGGYERHVLEVCQKLGIAAHKAHGSRVRYFARYLGLLAKTDPIDARVLALYGLKTTDLRLYVPPAPEALALRDLRTRRDQLQQMLFAESNRLEHARHLSVSRSLKAHIASLRKALAALEAEIAACLKASETLARKARLMQTLKGVGPATVAAILAYMPEIGAFTKAGAACMAGLAPINDDSGKLKGPRHIEAGRAAVRKALYMPALVAIQHNPVMRLFADKLKRNGKPAKVVIAAVMRKIIVTLNAIVRSGEPWSHAKIA

SEQ ID NO: 52373 - protein, 409 aa, unidentified
MRYYVGVDWADQTHAVWVVDASGTKITARTVPHTAAGFSEWGRELDEWRAQGIERWAAIERPEGRVVDFLLDHGVVVYPVNPKALDRARDRFRQSAAKSDPFDARVLADFLRTDYLHLQALQPSSDVAQELKLLTEDCQRHIRQQTRLVNQLTTTLKAYYPRALEVAELTTALAREFLQAYPTPDALTALTTRQWQRWARGRRLSEARIGALWAVLQQPQLSVPAHVVRAKARLMLSLVEQLTPVVAAVVQYRKAIDDFFASMPAAQWARTLPIGKHGITAPTLWARLGDAPGRWESFRHLQVQAGTVPVTKRSGKQRSVHFRFACDKSLRHVVDQVAFLSLLSSAWARAYYEQQRARGHAHHQALRAVGAKWLKIIFVMWHRQVPYDEQYHLATMARQQLRQRQQQIA

SEQ ID NO: 52374 - protein, 348 aa, unidentified
MQISTIGIDLAKNVFQVHGVDAAEKLVLKKQLRRSQVLEFFSKLSPCLVGLEACATSHQWARELKKLGHDVRLMPASYVKAYVKRGKNDAADAAAICEAVTRPSMHFVPIKSSEQQSALMLHRTRDLLICQRTQLINAMRAHLAELGLVARKGREGLQQLIRTVAEADDERLPSDACFACQAIIAQLQAVQIQITRLDKRIHQAHRVNPASKRLEAIPGFGVIVSTAVVATMTDPKAFKTGREFAAWIGLVPRQNSTGGKDRLGSISKQGDRYLRRLLIVGALSVVKSARARPDKYPWIITLLGRRPAKVVAVALANKMARIAWAVLARGETYRASAHPTSRAVAVST

SEQ ID NO: 52375 - protein, 341 aa, unidentified
MKNLFIGVDFSKEKVDVAIIFADGLTETVARVFNEFKTTMSGYKQLVKWVEQNSYGIDSSLWLFCGENTGDYSKGLCNFLYGKGYDMWLENAKSIKDASGLRRLKSDRTDASMIAEYAMRNYDRAIMYEPLSESLAQLRELFLYRQMVIRHRCSFQVRRGEKKLTMEKSPVKTMISQSGRHIVSELNKEVEKIDKRIAELIKSDEELTEIFTIVTSVPGIGTQNAVCLMVYTDNFSRFNYDSRKIACYYGIAPFGKDSGTSVHSDPRVHYMANRQIKAMLTQAALTAVKFNPVMARYYIRLVERGKKKQVALNNVKNKLVHLVTAMVRNRQLYTPEYKISA

SEQ ID NO: 52376 - protein, 412 aa, unidentified
MSKNTASWTYVGLDVHADTITVAVAEGSSRGRGRGVGTIPNQPDAIRKAMKKLGRAKSLRVCYEAGPTGYALYWQLNKMGLACEVIAPTLVPVRAGDRVKTDKRDALKLAQAYRAGELTPIFVPDTEHQALRDLVRAREAAKKDQLRARHRLSKFLLRLGRRRDTQSQTWGQVHWRWLDSQVFDHAAQQETFVDYKNEVEHATERVARLDKALDRAVEQAPPRMQELVLALQSLRGVAMLTAVTVVSEVGSFERFPSAKKFMAYLGLVPSEHSSGGSRHQGGITKTGNAHLRRVLGESAFCGRLRPRRSPSLMRRQQGQSQAIVDMAWEAQKRLYRKHGRMRLRAKSHQVTVTAMSRELAGFVWAVGRQREAEMNTQGLPVERLKEAGKHPHGKDEPRNIYAIGTAVPNSRH

SEQ ID NO: 52377 - protein, 386 aa, unidentified
MTIVAQTRPFIIGVDCHARTHTYVIIEASTKRQIACEQFPTTSAGISRALAWVARRTDGDMGCLWAVEGIGSYGARLARAVTDAGYDVAEAPRMNARGRRGLGKSDPLDAAAIATAVLGLEESQLRAPRRDEGTRAGLRILSAARDQLTRERTMNVNALVALLRAHDLGIDARKPLVPSQIATITRWRERQEQLELSIAREEAVRLARRVLEVTAQLAANQKRMTELIQQSPAAPLLEMVGAGAVTVSAVLAAWSHPGRVRSEAAFASLAGVSPMPASSGNTVRHRLNRGGDRRLNRALHTIIMTRMTHDPGTRDYVAKRTQEGRSYREIRRSLKRYLARTLYRQLNTLYATAGPTPPHAAAATPTGNWPTSSALRDQQSWLPVVA

SEQ ID NO: 52378 - protein, 387 aa, unidentified
MEVRMVNTPSADSNNEPVACYVAIELSKSGWLVGFLTPLSDKTSRYQVKAGDAQALLDLIERVHTRVARQLNRPVEVMSCYEAGYDGFWLHRVLEAHGIHNHVLDPASLQVNRRARRAKTDRIDVDRMLRALIQYLRGEPEACSVVQVPRVEEEDAKRLHRERKRLVAERVQHVNRIKGLCAAQGIYNYAPLRPDRWSQLDKLRTGDGRSLPARLKSEIVRELKRLELVLEMIETVEVERDAIIKDPRSRHLNADKIKMLARLRAIGPEFATSLTGEVFYRKFANRRKLGRYVGLDGSPFRSGSVERDQGISKAGNPVARSMMVELAWTWLRYQPDSALSIWFRERVGNLKGRPRRIAIVAMARKLLVALWRYLETGVIPTGAVLKA

SEQ ID NO: 52379 - protein, 330 aa, unidentified
MQFVGIDVSAQTLVVHLQLPKGNCQRLTFANTWEGHQKLCRHLAGRPTRVALEATGLYSLDVSLALAQQPQVELMVVNPRSLRDFARADLRRSKTDAVDAQVLLEYSQRMRFQPWQPPAPEALELRAIGRRIADLTDLATQEKNRLHAARFVSSLGTVVCQDLEAHLQQLEDRLVALEREACRLIQRHPHLQQDFRLLVSTPGIATKSAIHLLGELAVLPKDMGPRQWVAHAGIDPRSHDSGSSVHKPAQMSRCGNVHLRRVLYMPALVAVRCDPHVRAFYDQLLARGKKPLQALVAVMRKLLHSLHGMLRHRSPFEGAKFRVLESSLTS

SEQ ID NO: 52380 - protein, 423 aa, unidentified
MMRLVYPICCGLDVHKKVIVATIVTTDNTGISSYKQRSFSTINSDLKLFHDWLLENNCRHVCMESTGKYWIPVYNYLEADIEVCLTHPKYVKAIKGKKTDKKDSKWIADLYKFDLVRCSFIPPKDFRQLREISRYRFKLVCMKTSEKNRVQNCMTVSNIALANYVSDPFSKTATDIMSYLLQHTSDDICEKDIQKMIRKNSKATADELFASIKGYTIEADQAKKLELARNHLEYLDGMIRSTETELYIRIKPYWDYVEFVSTMPGMTQLSSTIVLAETGVNMAIFDDSGHLCSWCGLTPRSNESAGKKYSSKIMKAGAYLKPMMVQCALAAIASKKQPYFAIKYRRIKKRRGHKKAIIAIARMMMVCIYYMVKDKKPFSPCDYEELMDPQKKPQKVVLNDANVFDYLKAQGYDTSSLVKCNDN

SEQ ID NO: 52381 - protein, 347 aa, unidentified
MNYYAGIDVSLECSSVCVVDGTGKIPREAKVASEPEALIAWFGSLGLSLERIGLEAGPLSQWLYAALREAGLAVELLETRHVKAALSAMPVKTDRNDARGIAQLMRLGWFRPVHCKSAEAQEIRALLTARKLVQSRLYDVEMSLRGILRGFGLKVGRTTPKRFAERIRELVVGHATLEAVGAALLSVHAVLLREFNGFEKRVRAIARSDGRVRLLMSTPGVGAIVGLTYISAIDDPARFKSSKSVGAHFGLTPTKYQSGETDVTGRISKLGDSSVRTALYEAANVILTRPIKGGGLKSWAMKLAKRAGMKKAKVALARKLAVILHRMLADASKFIAEKASGCVRVAA

SEQ ID NO: 52382 - protein, 330 aa, unidentified
MFNYIGIDVSKATLQVYIPITDENISIENSKKSLISLYSKLKKYYKKEIKNLVIIFEPTGSYSALLKRFCFEKSIYAFIINPRQSANFAKALDNRSKSDIIDAKMLYKFHVMLSTNEISIPIVNTVQEELSEMLTYFRFIQKERVSFSNHLEALSAKDDSSTIVNKLKKEIKHLKTEEEKMIILMKKIVIHDAKMRQDFENITSIIGIGDRAAIALIHLFITYPEANRQEIVALCGLDAIENSSGTSVHRKSRISKQGSKLYRNMLFMPVLSAIQHNPYMKLFYDRLKDNGKHSTVAQIAVMRKMILIAHSLFKNNVPFNSEIYKKSIGI

SEQ ID NO: 52383 - protein, 342 aa, unidentified
MKNLYLGIDWGKKFSHLFGFDEDGVVVIQGRVETLDVAAWRRVLKSQPAYSIRAVFEIGAHYDWLYDLLKEYCEEVSVIDPAQFAIISRSQRKTDKIDAQKLAEGLRRGDLPLVHVPDKQTRADRRLVAFTHGHSQQSSRVKGKIRSLLLAHQLECPFTNVTGVKSIEWLNEHAVPKLDPQAQMFLRMLLEQVELLQKQRKELDKQVAERAKTYEDAEILDSIPGLGSLGILAVLSCIAGIGRFKRPEQLSSYFGTCGAVFQSGSRLVLGHLTRRGNVHVRWLLSQALQHLHRKDPRARKRYLKLKRKKPRGVARAAQVRWLTQIIWRLLAEKQHYRIKSAA

SEQ ID NO: 52384 - protein, 343 aa, unidentified
MKDIRILGVDLGKNSCSVVGMDAAGQVVLRRRMRRKSIIALAAKLPGCVVAMEACCGAHHLARLLVAQGHEVRLMSPEYVRPYVKAQKNDDRDAEAIAEAATRPTMRFVALKSEAQLDVQVLHRVRDRLVGQRTSLMNQIRSILLERGIVVAQGRRKLRDALEALSSDDDGAVGPRVRLLLNDMLDQWRALDTRITALDDEFADMARNDPAARRLATIPGIGVLNATALVAAIGDGRTFSRGRDLSAWLGLVPRQATTGGKPKLLGITKRGSKYLRKLIIQGARAALPSLARMATPLGAWLRGLLARAHGNTVVVALASKLARIAWALLRNQAAFATSGRAAA

SEQ ID NO: 52385 - protein, 352 aa, unidentified
MKGMALTIVESRTVTGGVDTHLDVHVAAVLDDIGGLLGVESFPTTTAGYRALLDWLAGFGSVGLVGVEGTGSYGAGLARFLHSAGVAVVEVDRSDRQDRRRQGKSDPLDAISAARAAHSGRARGRPKGRDGTVEAIRTLMVAKRSARGDRTATLNQMRALIATAPDDVRARFAHTSVIELVAVTGAMRPRPGDTVGYATRITLRELGQRAAYLEEQIERLNELVVPLVAAHAPALLALHGVGPDTAATLLVAAGDHPERLRSEAAWAHLCGSAPIPASSGKVVRRRLNPAGDRQANHALWRIVLTRMSSEPRTRAYVERRTAEGLSKLEIIRCLKRYVARETYRVLKPAVAD

SEQ ID NO: 52386 - protein, 323 aa, unidentified
MNKYKETFGVDISKDVFDLHGSNSGHDQFKNDEKGFSSFLKMIPKDSIVVMEATGYYHYRLAQFLYKNNVVVSVVNPLSVKRFIQMKLAKVKTDKSDAKAICEYALANEVPHYNALTDVQAECLQLFRLLDSYLKKRTATKNKLHGEEILGIPSKFVYRSLKRDRKHLDGEIDGIEERLLSLVKKEQQQQLTLLTTVPGIGTKTALFLIVVTDGFSKFETAAQLCSYVGITPTIRESGSSVRGRSRISKVGNKKLRNLLFLCAFNACKYNKACREVYERIVNKGKSKKLALIAVANKLLKQCFAIAKSGLPYDDAHVSVLKTN

SEQ ID NO: 52387 - protein, 433 aa, unidentified
MKVLHERVAGIDVHKEMIKVAIRSPGEKPWTRKTEILEYRTFYGVLQEMARELRRRGVTHVVMEASGVYTEPVYYALAERDFTEVAVINPAHAKALKGHKTDAKDCTRLAELFECGLLHGSYIPAPELKEVRDLTRYRMKTVQARTSEIQRLAKALESAGIKLGSVASSITGVSATAMIEALIDGERRGGVLADLAQGRMREAGKLADLSMALSGRFTGHHALLCRLHRDRIKMFEDAVAGLEDRIAGKAAPWRRELDLLMTVPGFGDAVTQAWLGEIGPAPHLHFSSHDKLACWVSLCPGNNISARKRKYGRTGDAGTYIKPMLVQAAWSAIRVRGRLQARYNRLVRRFGGDKNPGAKKKAIVAIAHTLLKIAYQVLKTGTPYQELGADFYARRESPEQKQAWLERQLQKLHPGCAITITISPPQTALPPGA

SEQ ID NO: 52388 - protein, 401 aa, unidentified
MQETTQHDAVDVFVGVDVGKGQHHAVALDRNGKRLYNKALPNDEVKLRALIAELKTHRRLLFVVDQPSTIGALPVAVARAEGVLVAYLPGLAMRRIADLHAGEAKTDARDAAIIAEAARSMPHTLRSLRLADEQLAELTMLRGFDDDLAAQLTQTSNRIRGLLTQIHPALERVLGPRLDHPAVLDLLERYPSPSALAAANEKTLANRLTKLAPRMGKNWAAEIVQALNEQAVIVPGTQAATIVMPRLAQQLAALRKQRDEIAAEVERLVLAHPFWPVLTSMPGVGVRTAARRLTEAAQKAFATAAHLAAYAGLAPVTRRSGSSIRGEHPSRRGNKVLKRALFLSAFAALRDPVSRAYSSRKIQQGKRHNQVLIALARRRCDVLFAMLRDGTIYPPKSAPDA

SEQ ID NO: 52389 - protein, 391 aa, unidentified
MRFVGIDIGAERHLVAWVDEQGTILQRPTAFREDREGYQQLLAQLGSTAETLIVMEATGHYWQNLFAALAAEGFAIALINPLRTRRFAEADLVRTKTDAIDALGLARFGQQKRPPATELPDLATRDLRELVRLRVRFLQDFGDRTRQLHRAVDLSFPEFTRFVVELDSPRATAVLHAFPTAAAVRAASERQLAAVRGGQRTVGRELARALKAAAGTSVGQHHTEVYARQVRFFCEDLDSLRRRLAEIERDIEQLLMRHQVGRLLTTIDGIGPQTAARLVAELGDPAKFRNAGALTAYVGAIPGLRQSGKQSWDRAGLARCGHAKLRAALWMPTLVAVRRNPWLRAYYERLRARGKLPKVALMAAMRKLLIAIYAVAKHRRPFVPIITMTAP

SEQ ID NO: 52390 - protein, 343 aa, unidentified
MDSFAGLDVSVKDTSVCIVDETGKIVREVKVPSEPEALLAVLTNPAYRFKRIGLEAGPLSQWLFSALAEVGLPVICVETRHMRAALKAQINKTDRNDARGIAQMMRAGLYRPVHVKTLRSQKLRMLLTHRKLLQSKAIAIENDLRGTLRNFGLKVGMVGTVRFEARIKELVENLPDLAVLVEPLLVIRRALREQIGVLHRRLLAAVKDDDVCRRLMTIPGVGPVVALTYRTTVDVPARFRRSKSAGAVFGLTPAKYQSGERDRTGAISKCGDEMMRVMLYEAAHIMLVRSTKWSWLKAWAMQIARRRGLKKAIVALARRLAVIMHRIWVDGSEFRWTRETAAA

SEQ ID NO: 52391 - protein, 445 aa, unidentified
MKTLLPTPPAGESSRLPLGEYACLIGLDWGDANHAISLVDPAHGRVERQIIPAQPECIHQWLRSLALRFRGAPVALAIETSKGPMVDLLLAYEWITIYPVHPATSRRYSKAFTPSGAANDQPDADNLLEILRYHRARLRALLPQDEPTKHLAALVSLRRGIVDARTKLGNALTSLLKSYFPQALLLTGEVRHAKVALDFLRRWPDLESLQKAKPQTLRNFYYSHHVRRPELVAARLQIIQKAEPVSTDPVLRKISGLQLRCLVNQLRALEPSFLLVEEEIARAFATHADRAIFQSFPAAGPAMAPRLCALFGSDRERWHCASELQKYYGVAPVIEASGKQRWVHWRWNAPAFQRQTLVEWAGLSVRSCPWAKAYYWQQRDYQKAHPAILRSLAFKWLRILYRCWKDRTLYSDAAYLERIKAQGSPLSNLIAAAKTRPDSLKKNLA

SEQ ID NO: 52392 - protein, 301 aa, unidentified
MQEKLRFLGLDVHAETIAVAIAEPDGEVRSLGTIPNRAESIRKLIKKLGPVEKLRACYEAGPTGYVTYWQLAELGVKCEVVAPTLVPVKAGDRVKTDRRDAEKLARCYRSGDLTAVWVPDEGSEALRDLVRAREAAKQDQLRARHRLSKFLLRSGQRPPSGIRPWTRPYLIWVGQLRFTQVAQEATRLDDLHEVEHMRERVARLEKAIAEAVKLASPVLQQVINDLQALRGIADISAVTIAAELGQVSRFDGARQLMGYCGAVPSEDSSGKRTRRGSITKTGNAHLRRIVVEAAWSYHRPP

SEQ ID NO: 52393 - protein, 312 aa, unidentified
MIAPSVYVGADVSKDTIDLACPGRTLPASIRNTPAGFRPLLKSLASVATTVRVICEATGPYHKAFVATLHEAGISVSVLNPRLARDFARARGRLAKTDAIDARLLADYGQTMQPAPTPRPDPQMTLLDDLVTRRAQLVEDRAKERTRLQQATRSEVRASLRQHIRHLDGQIKGLLARIAELVEASPSLKAKVQRLITVEGVGALTASALLAALPELGTLSKNQVASLAGLAPFNRDSGAFRGTRSIRGGRMDVRCALYMAALTASRFNPILKAFYQRLKAAGKPHKVALTAVMRKLLIYLNALLKKHSMSPT

SEQ ID NO: 52394 - protein, 427 aa, unidentified
MEVLYPHCAGLDVHKDTVVACVRHMANGSVRREVRSFKTTTKELLALSDWLVGEGCTHVAMEATGVYWKPVWHVLSDGDFTLVLANAAHVKNVPGRKTDVNDATWLADLLAHGLIRSSFVPDEQTQEMRTLLRTRKQLVRECSRHVQRLQKTLEDANIKLDSVISDIVGLSGRRMIEALIAGQTEPGALAAMAHRRIKATPDQLEAALRGRVTRHHRFLLQLHLQQIDAVNAAIDQIDQEVDACVEPFRATVRLLTTIPGIDELSACVILAEIGRDMSRFPTAGHLISWAGLCPKNDESAGKRRSTRMRKGAPWLKTTLVQCGAAAARKKASYLQAQFHRLRARRGAKKALGALAASILTSVYHMLISGELYRDLGPHHFDHRAKAVNTRRPDDRAYKSQIWRISPYTWSHVLSWCRYRVSIWRIPT

SEQ ID NO: 52395 - protein, 416 aa, unidentified
MNTWNEIKHYAGLDWAKDHHDVVVVNRDGQIVADFRFAHSLEGWTQFQKAIAPFTPLAVVLETSQGLAVDKLMESGCLVFALHAKSAQRYRDRKIPSGNKTDRTDAWALAEALRTDGQQWKPLQTGDPLAEQIRLLCRDEMSLIQQRTLLVNQLQQALYEYYPVVLEAFEDWTLESTWDLVIEFPTPQVLQKAGRSRWGKFLHAHRLWRQKTAEERLAIFARATEFCGSPATLAAKSLLAVSLAKLLRTLQAQLDQYRHQITQLFEQHPHHDLFDSLPGAGVTLAPRLLGSLGAQPDRFTDPQTLQCLAGTAPVSYQSGQIHKVHIRYQCDKFLRQTVHLWSDCSRKTCAWAQVYYQKKRSEGKSHACALRCLGQRWLKILSKMWKTKTIYNSELHAINQQKHGSWVLTLIAKKPA

SEQ ID NO: 52396 - protein, 404 aa, unidentified
MDLAPLYRCVAALDVHQAKLTVCILHEEADGELAVELREFGGFKRDRREMARWVASFAPESVVMESTGIYWKSPYEALERAGLRALVVNARHVSQVPGRKTDLADAQWLAILARSGLLRGGFVPPANFRHLRLVSRQMQKLTGILASEKNRVHKVLTDGGIRLGVVVSDLHGKSGRAMVKGLVAGEPAQSLLGYADPRLKATEEELLDALDGDLSEEHRLVLTQLLDHVGYLEQHIAALRQALVAGLAPQQGLLQALQTIPGLDETGAAMLVVEIGDDMQAFGSPEKLASWAGVCPGNHESAGKRKTGKQRKGNPYVRRILCEAAHAASRTRCALAQKFKGLLVRRGRKRAIFALAHKLLKTVFVLINRGDYYRDAGVDYEAMSVERNAPRWIKMLRKYRYIPA

SEQ ID NO: 52397 - protein, 340 aa, unidentified
MKGLYAGSDLHGNNNLVGIVDEQGKRIFKKRLPNEPQLILETLKPYKEEMVGVVVESTYNWYWLVDALMDEGYKVHLANPSAIEQYSGLKHADDNHDAFWLAEMLRLGILPEGYIYPKQERPIRDLLRKRRQLVRLRTSLIISLQNILSRNLGRKLNVNDVKALKEDRISPLLEMNEDLALAGRVSKEAIDHLTHQIYQIEWAVQKKIALKPEYRYLTSVFGVGKILSLTIMLETGPISRFPTVGDYVSYCRKVPSQWTSNGKCKGSGNRKNGNRYLAWAYAEASEFARRLYPEARAYYQRKMQKTNAPVAHSALAHKLARAAYYVMRDHVPFEPEKLFG

SEQ ID NO: 52398 - protein, 331 aa, unidentified
MHYSHYVGVDISKNTIDAAIYAAEMKRSDTKRLTNDDAGFKELILWAKSAGAKPKSMLICAEHTGVYGNALQLFCEKKGIALCMESPLQIKRSMGLVRGKDDQIDAIRIAQYAYDHRDKIKLFHRPSSNIVNLSSLLRERRLYVRQKATLTAQQGELSSSDTSQSRSRREILINRIDVTIRAVEKQMKDIIVRDEALKKTYDLISSVVGIGLVTAIETIVYTNNFQNFETPRQYASFIGVAPFDHTSGTSVSGRTRVSQFCRKQQKVSITMAARSAIVNDPWMRNYYHRKMKEKGEQRNQHGVVLNAVKFKLVLRMFSVVKSGVPYKVMKF

SEQ ID NO: 52399 - protein, 406 aa, unidentified
MRFIGLDVHRDFCEVAIVEDTVVRSAPKIPTTPEHLALFAQSLSPTDAVSLENTSNARAIADILRPYVARVAIADPLKVQLISHARVKTDRIDAAVLARLLAAGFLPEVDFGDEATRVLRRQISRRAALVKARTAAKNEVHAVLQRNLKPRPPMSDLFGRRGRAWLARQQLVEDEAQTVRACLRHIDLLDAEIGAIEQVLAIHAIGDASVRRLMTIPGVDVITATTLVAAIGDVTRFPTARHLVSYLGLNPTVHQSGITPARHGKISKAGSSVTRWMLVEAAWVATKTPGPLRAFAERIAARRGRNIATVAVARKLAVLCWHMLTRQSDYAFARPSLVRSKLRRLELRAGAEPKRGARGATGSSRELKTAEEALLRQAETAYRRLVADRIATVKKGAGATTGARIK

SEQ ID NO: 52400 - protein, 484 aa, unidentified
MAARKNTKKNTKKDAASGSLTASPRPGNDGAEVAEEHVEVVTYAAAIDVAKGSGMVCARVPGSRPDRRRQTVWQAGATYASVVALMDHLRCQGIQRLVLESTSDYWRIWYYLAEAAGLEVWLVNARDVKHLPGRGKSDREDCVWLCKLNERGILRRSFVPPQATRDLRSLTRTRSRLAQDQVRHQNRAEKILEDALLKISVVISDLFGASGRRFLDALVAGERSPAALAALGDRRLRATPAELAAALTGRFREVHAFEIATHLRLIDTINDEIARLDARIEQQLTSIPGVAPACTGCGLIGGGHAPGCASDAAPVLGLVARLDEITGVGVRNAQVLIAELGTDMSVFPTPGHAAAWARLTSRTLQSGTTTKNGRTGKGNPYLRAALGQCVTATARTDTRLGEQYRRIARRRGKQKAIIAVSRVICEIACILIADPAARFAELGAGYYSSGNPQRQTRSRIRELERLNPGMKVTLTPIEPATAAA

SEQ ID NO: 52401 - protein, 397 aa, unidentified
MKKRYASVAYGGMDVHRKFSSVTLRDAEGRVVVRERLDHEDRQKMRQHLRRWPAGTPLVMEASFGWPWVSDEVEAAGHRPRLSNCYKVEQMRKARGQVKTNSKDADLLSMLPAEPTRWWEVWRAPPQVRDLREWMRHRADLVILQTEVKNRVHALLARHGVFHPFSDLFGGQGRAFLRRLCEDGGHADGVLPPGALEAIRSDVRVLWTLRAELATITWRLRGRLKRDPLTRRLKTIPGIGLILAHVVASEVGVIERFRSHRALASYACLAPRSDDTGEPDPRRTPLGRHLGDRGNRTLKWAFVQAAHGAVRHGGRWRALFDRSTDGGTKNRGRAYVKVARELVKVLFVVWSKAVDYTETPPPRPGSRPATRRRGVSRPGTGQPRVAMVEAQRPQTSL

SEQ ID NO: 52402 - protein, 340 aa, unidentified
MTITTIGIDLAKNVFAVHGVDQNGKTVLVKSRVTRAALPGLIASLPSCVIGMEACSGAHYWARLFLQYGHEPRLMAAKFVSPYRMAGKSGKNDAADAQAICEAVRRPHMRFVPVKDESQQAMQCLHRTRQGFIEEKTATYNRLRGLISEFGVIAPQSTDALRHMVSAQKSSLPLQVQQCVDDLLEHVDRIEANITEYDRILSRIAKTDHRSQRLMKLKGVGPTTACALVACIGNAHDFKNGRQLAAWLGLTPSQYSSGGKSKLGRITKAGDSYLRTLLVQGARSVLIGAEKRTDSFSRWVCSLVERRGYWRAVVAIAAKNARLCWASLHYGDDFRLYSAS

SEQ ID NO: 52403 - protein, 296 aa, unidentified
MLSTKYIGMDIHKETISIAVMSSVGKSVMECVIETKANTILQFIHGLRGDLHVTFEEGTWAAWLYDLLKPHVTEVLVCDPRKNALLKQGSKSDKIDARKLAELLRLNHLKPVYHGEHGVRTLKELARSYLTITQDLTRVRNRLKAVYRSWAIPCTGTQVYAPRHRSEWLGKISEAGVRRRAEHYYQQLDALRPLRREVRRDLLTESQKHKAWKLLRQIPGIGAIRAALLIALIQTPHRFRTKRQLWTYSGLGLETYDSAQYCVVEGQLQRSKRPVTLRGLNQNHNHDLKASSKVRH

SEQ ID NO: 52404 - protein, 405 aa, unidentified
MQRISVGIDIAKEIHWVTAIDADGVVRIDRKLLNTPTDIASLADQLAALAGPGGEPAGEPGGSTIRVGLDVIGGIAGLVEAMLAAAGFSLLHVPGLAVNRARQGTVGGENKSDPRDARTIAEQVRSRADLRRIEPATEIDLEIRLLVGRRRDLVHAQTQRVARMRDMLVSIFPGLEACLDLTTKGPLHLLTKFVTPAELRNAGKKRLVRHLQAAGGLPNVEALADRALAVAAEQAIAVPAERMTARLIRELAAEALASRARLIELDRELEALLERHPDAALIRSLPGMGVVLCAELIAEAGNLSRFRSADALASAAGMAPILRQSGRTRFLRRPNGGNKGLKRVFYQSAFCSLGHDDSRAFYDRKRREGKRHHQAVIALARRRVNVLWAVVQNRTPFQTGFKLAA

SEQ ID NO: 52405 - protein, 391 aa, unidentified
MTMYFVGIDISKYKHDCCIISAANQKVVSKFTFKNDKSGFEQLNLILNSLSTPEDIKIGFESTAHYALNLELFLENANHSFMEINLVLIKDFKKSQTLRRTKTDSIDCELIARWLMTVEYKPHSKGFYHAYSLKSLTRLRDRLVRQRSFYLVKITNVLDHTFPEFKPFFHERLSKTALYLLENYGSAEKIARMNSASYEKLRSISRGKFSPQQFIRLKELAANTVGVNNSIFDVELNSLLTLYKSLVDEIKTLESEINRLVDEVHPHYMSIPGIGPISAAIIYAEYGDISNFSSPNQMLAFAGIEPSVHESGTEAYNGKMVKHGSSQLRYVLINCCLPLIRFDVTFATYYARKRSENKPHRVAITHVAKKLVRVIYALESQDIDFDPKKLR

SEQ ID NO: 52406 - protein, 318 aa, unidentified
MNTNTLQNINVGVDTGKTQLDIFIRPLDIYFTVTNDEKGIKEAIKTIKIHAPQRIIIEATGRLEMPFVLACAEANLPIARSNPIHIKRFAGAIGRKAKNDRLDAELIAHYGEAIQPQLTQIKSKNIRLISDLVIRRNQLLSMQTMEKNRIQILPKELHSSIKPILTAMKNQITKIEDKLIKLIDECPEYQSKNTILQSVPGIGNIAATSIISNVPELGYITNKQAASLIGVAPITKESGRYKGKRTIQGGRSQVRTVLYMAMMSAMQCNPVFKAHYQHLLDAGKPKKVAIIACVRKMVVILNSMLRDGVMWDENIAKN

SEQ ID NO: 52407 - protein, 342 aa, unidentified
MSTKIIRFGLDLAKSSFSICGVDEHGHIVLRKTLTRGQLLVFFAQQAPAVVAMEAGSGAHHWARALTAQGHDARIIDPRFVAPYRRQGRSGKNDGNDAEAICEAAGRPRMPLVPVKSLDQQALLLVHRVRASVVTDHTRILNQLRGLLAEFGIVVAQGADRFKREWPEIRRHFAEQVPMAAWDLLDGLFAECARLQDRVIELDRRIKDAVRHSDAATRLTQVPGIGPITASALVATLGNGHDFRNGRQFAAWLGLVPRQSSTGGVARLGRITKRGDRYLRTLLVHGARSELMRTASRTDHKSRWAEALKLRKGWNKAAVALANKHARIAWTLLAKQQDFLPA

SEQ ID NO: 52408 - protein, 340 aa, unidentified
MASQYVGLDVHKKTIYGYVMDKEGNKLFEKEFKTDPYDMDLFLLNVVKDDSIVAIESCSCWQYAYDYLHDDGYTVELAHPVGIAALKKLRKHTDRHDAILLADLLRTNMLPKSYAAPNDIRVKRQITRHRSSLTNILNEVQNKIHAILLRHGYDVPFTDAFCKSALKYLHDINLPACDRLEIDQYIEILKLLVVKKNECTESIEEIASDDPAIRIAMTMPGMGYFNATAFVGEVGDIRRFASGDKLTSFTGIVPRVHQSGEKTTFGSITKQGSNNLRHVIIQAANVAVQHDKLLKKVYLKFAHKGHNKAIVAVARKMVTLLYVMLKNNIEYRALQIHKAS

SEQ ID NO: 52409 - protein, 319 aa, unidentified
MAQNGLVVAGIDVAKDKADVSIRALSQRQTFPSTAAGRRQLISWLRKHKVTKAVMEASGGYERQWAKALRDAGIEVRIVDPKRVRSFAQSAGRLAKNDGIDSDTIGWFAEVFVEAPSQAHDAARETLQQMVNARQGLLDIRTMLSNKGEQDVPEPVQKSHARLLKTVAVELAKLEAAITALVKATPHFAKRAEIIESVPGLAATTAAGLIAAMPELGEVSNEAIAALLGVAPYDDDSGKRQGERQIKGGRRKVRNLFYMASLGAATRHNPALNAFYRRLIAKGKKAKVALVACMRKLIVILNTMIARGEKWDANRYLVS

SEQ ID NO: 52410 - protein, 351 aa, unidentified
MDRYIGLDAHASSCTAAVLGPSGRKLQCQVLETNAKALISFLQTIPKNRRLIFEEGTHSNWLYEVLAPHVQEIVVVAVRQSRGPKDDKSDAFGLAESLRIGDIKVRVFKKQGEFATLSHLARAHNTLVTDTVRCQNRIKSLLRSRGITASGKQVYSVKSRDQWLAKLPAQAHGQADLLYLQYDALLELRKQAEKQMLIEARKHPAYQVIKTCPGLGKIRTAQIMPVVVTPYRFANKRQFWAYCGLGIVMRSSSDWVRAQGGEWIKTPIQKTRGLNRNFNRSLKHIFKGAATTVIGCAKKDDPLYRHYQQLLDGGTKPNLAKLTVSRQIASIVLAVWRSQEVYDRKKLSQKT

SEQ ID NO: 52411 - protein, 344 aa, unidentified
MSEVSMIGLDIAKHVFHAHGADERGRAILSKRISRGKLLDFFAAQPRCTVALEACGGAHHWARQLTQLGHEVRLIPPAYVRPFVKRQKSDSIDAEAICEAAQRPSMRFVAVKSEQQQAAGLVFRTRDLLVRQRTQLINAIRGHLTEYGWIAPKGPSHVAMLADLIEEDEMANSLPEAAHVMFRLMLDLLAGLNSKIADLDKEIARRAREDEVSRRLMTIPGLGPISATAIAALAPPIETFARGRDFAAWLGLTPLQRSTGGKQKLGATSKMGERTLRRLLIIGSSAVVQQASKRGAPKGSWLEQMLARKPRMLVTVALANKMARIVWALLIKRENYRAPVAAKA

SEQ ID NO: 52412 - protein, 338 aa, unidentified
MIVIGVDVHKQSVTAVAVDEAGRMLDEQTVPVGSDELVGWASALAAERLWALEDCRQLTRWLERQLLGQGEDLVRVPPKLMAPQRRAGRTRGKSDPIDALAVARAALREPDLSRPRPEERVFRDLKLLVDHRDDVVDERRRTQQRLRWHLHQLDPTFQVPLRRLDRPLHLERVSRWLARRDQELQVRLARELVSRCRALTRTISELDRELEQRTAAVAPALLELPGCGALTAAKLLAEIGPIDRFQTDAQLARHGGVAPLEASSGRVQRHRLDRGGNRQLNSALYRIAITQSRYHPAARAYLERKQAEGKSRREAIRCLKRMLVRVVFNTLKASPTLT

SEQ ID NO: 52413 - protein, 343 aa, unidentified
MQTITTVGLDIAKSVFQVHCVDADGKVVLRRQLKRRYVLAFFQKLPPCLVGIEACASSHHWSRELQALGHTVRLMPPAYVKPYVKRQKNDAADAEAICEAVTRPNMRFVPTKTPEQQSCLTLHRTRHLFIRQQTAVINSIRAYLAEFGIVAPVGRNGVERLLEVVADAKDTRLPEIARACVAALGTQLLALKAQILAFDRRIMAWHRSNETSKRLDEIPGVGPVLATALVASIADPKAFRSGRDFSAWIGLVPKQNSSGGKDKLGSISKQGDRYLRSLFTTGALAVIRYAKIHGTKHRPWLTALLARRPTKVAAIALANKIARMAWAMMARGERYKEPVALAA

SEQ ID NO: 52414 - protein, 350 aa, unidentified
MTTIAEARPLVTGGVDTHLDVHVAAVVTAVGGVLGTEQFSTTTAGYQRLLSWMRTFGQLDRVGVEGTGTYGVSLARHLRAEQVPVVEVMRPNRQVRRRHGKTDVVDAIAAARAVLSGEANATPKTHDGPVEALRTLKVLQRSATKARTQALNQLRALLVTAPDELRGRLRDLSQRELLATCAAFRVSADDDSLAAVTRFALRELAQRVLYLAEQLEQVKLRLKRITEQVAPALTNLKGVGPDVASTLLLAAGDNPERLVNERSFASLCGASPVQASSGKTHRHRLNRGGDRQANAALWRIALVRLNCDQRTKDYLARRVSDGKSKTEAIRCLKRYIAREVFAALPGPATT

SEQ ID NO: 52415 - protein, 316 aa, unidentified
MKIVRPICCGMDVHKNIIVATIGITNKKTRITEYIQETFSTLNPDLLNLKQWLINHKCFDACMESTGKYWIPIFNILEDEINIYLTHPKYVKAIKGKKTDKKDSKWICDLFKHDLIKFSFIPPKEIRALREISRYRYKLVGMRSSERNRYQNCMTVSNIGIGSVFSDPFGKSAQAIMKEVLESDIIEDEKILKCIHGSCKNKDKILDSIKHCNIETDQRFKMNESMTHMEELQVHINNCEIEIMKRAAPMFDRFMHITQLPGISTLSAILIISEIGVDMKQFESDKQLACWAGLAPANNESANKKNQFVFLKQVNI

SEQ ID NO: 52416 - protein, 323 aa, unidentified
MNAPIYCGIDVAKRNFVIGFSHQKKTKTETNNAKGIQHTLDYLSQFNVALITLEATGGLEIPVAKALARAGYRVFIANPLKASEFAKSQTRAKTDAKDAVNLAFYGLTCELKGEVEHQLYVPLSEQEEQLEALVVRRRQLVDMRVAELNRLQQSHETQLDNIQQHIEMLDKLIAELDKDIDDQSKHFSDKADLISDIKGVGKNCVAVMMSSLPELGKLSSKRIASLVGVIPHPQESGQWKGKSFCYGGRAIVRNALYMAALSAIRFEPVFKAFYTRLVAKGKAKKVAIMACVRKLLTIMNALVRRNEKWDATRYLSTESVGQN

SEQ ID NO: 52417 - protein, 355 aa, unidentified
MNDAKYIGLDVHQATISVAVLDSAGKLVMEAILETKAETILQFIHGLRGSLHVTFEEGTCAAWLHDLLKPHVTQVLVCDPRKNALIKAGNKSDRIDARKLADLLYLDKLNPVYHGETGIRALKEVARSYLALTRDTTRVMNRLKALYRSWAIPCAGQRVYAPRYRSEWLAKITEAGVHRRAEIYYQQLDALRSLREQVRRDLLAEGRKHSAMKLLRQIPSIGPIRAVLLIALMQTPHRFRTKRQLWAYIGLALKTSTSGEYQIVKGQLKRSKKFLAIRGLNANHNHDLKNIFKGAATRAAAVPGPFHDFHAALVARGMKPTMARLTLARKIAAITLIVWKKGVAFDAEHLKQQAA

SEQ ID NO: 52418 - protein, 411 aa, unidentified
MKVTYQTCCGVDVHKSFLVATIVKTTGGIEPSYQKKRFSTFNNSILEFKQWLLDNHCHDVCMESTGKYWVPVFNLLEDKINVVIANPKWVKAVKGNKDDTKDSKWIGDLFRLGLVKGSYIPCKKVRILREYTRYRYKLVSCRSSEKNRYQNALTVCNVALDSIVSDIFGKSSTSIIDYLLEQSGTSINHEEIASKLLRSLKSKEDAVIESVEGYQMTDAQKYRMRLVRAHMDYITAEINDVDKMIENMISSNPDFENAVQFLCTIPGVKRDSAITIISEIGTDMFQFSSSKRLCCWAGLTPGSNESAGKKKSVRITRAGVYLKPALVQCAHAAVKSDKSPYYKKKYESLVKRRGKKRAIIAIARMILTAIYQMLSTGEQWNPSDLYKIDMPVALVEKQKAKAIKQAKKLLQ

SEQ ID NO: 52419 - protein, 350 aa, unidentified
MKDTTKYVGLDVSKEKISVAIAEEGREQARYWGEIPHKPEAVRKLVKQLGLPSTLEVCYEAGPTGYDLYRWLTSMGVSCSVIAPSLIPARPGDHIKTDRRDALRLAQLLRAGELTPVFVPSRENEALRDLVRAREAAREDLHRARQRVVHFLLRHQIHHPPTMKTRWTKTYVQWLTRLTFERRAEQVVFQEYYHTIVECEMRLKRLEEAIVMEAAEGANASVIQALQGLRGIGLVNAVTIAAEIGSFERFKSPMQLMAFLGLVPREYSSGESNRKGKMTKAGNASLRRLMVEAAWHYRHRPAVKGKLRARLEELEPGIQEISWKAQNRLHKKYMRLVLQRGKHKNVAIEP

SEQ ID NO: 52420 - protein, 341 aa, unidentified
MEDYIGLDVSMKETSVSIRRSGERIWRGKCASDPRIIAELIRKRAPAVKRVVFETGPLSIWFYHSLRTEGLPAICIDARHAKAALDMAANKTDANDADGLAQLAEVGFFREVRVKGFDSMLTRTLVAARTRLVRITTELSNQIRGVMKTFGLLIPAGRGSTFEKNVRSLLADQDSLASIGLPMLEAWRGIRSRAAELGRQLVRDARQSQACRILMSIPGIGAITATAFTTAIERPDNFKKSRSVGAWIGLTTRRYQSGEVDYDGHISRRGDAHLRGLLYEAAAVILTRSSTDSTLRTWGLKLRERIGFKRAAVAVARKLAVIMHTMLKTGELFNPNAGSAT

SEQ ID NO: 52421 - protein, 370 aa, unidentified
MSESSTIFVGLDQHKESIAVAYVGADRSLEPTYLGPIGTRTSDVDAMVRKLQSKGKKLVFAYEAGPCGYGLHRHLTRKGHDCLVVAPALIPRKAGDRVKNDRRDAVNLCRLLRSGDLKSVYVPQIADEAIRDLCRAREDAVSDLRAAKYRLKSFLLRHDIRFNGKADWKSAHLRWFGEVKCATPVQQVVFQEYVRALAHCFERVERLELALDEHVKSWRLSPVVEALQALRGVRFTVAVTAIAELGDLTRFAKPRQLMSFLGLHPSEYTTGEKRRLGGIAKTGNSHARRALVEGAWAYRFPARVSKQIQARQEKLPEAVRDIAWRAQVRLCKRFQKMIARGKNANVVVTAIARELSAFMWAIAEEVPVAA

SEQ ID NO: 52422 - protein, 382 aa, unidentified
MKTVLGSVSSEEKGKELFFMNYVGIDIHKRYSVLCAQDEAGQKLREARIEGHERGDYVRFFKELEGPSRAVLEACWNWGLTHDLLEEIGAVEEVVLAHPLKTRLIADAQIKTDRLDAFALGTLLRGNLVARAHIPRRATRARKNLLRQRLYWSRLRTMLRNRIHALLDRQHGLELPQCSDIFGVRGLGFLRRLELSEPDHTLLKEALALHDLIVQQMRAQEKRIAAEFKLEPDYERLLSVPGIGVTLGAVLAAEIDQIERFSSVEKLCAYAGVVPTTHSSGGKVYHGRLLPGCNKWLRWALVEASWVAIGCSPYFGALYRQQRARGKKANTAITIVARRMCRILFALLKEKRNFEKCARKAQTRNVPGCSGHRLTAASVMRP

SEQ ID NO: 52423 - protein, 417 aa, unidentified
MLKIVFPICCGIDVHKTFLVATIASTDRSSVTTYQTKRFSTFTKDLENLSKWLLDNQCADVCMESTGKYWIPVYNVLELTCEVILAHPKYVKSLRGKKTDRKDSVWIADLFKHGLVKASFIPEKAIRDLREVMRYRTKLVSMKSSEKNRYQNALTVSNVQLASVVSDTFGKSAQALINQLLQQPKDTSFDVLPFLHGSLKKKAEQISESLNGSIDDIQAQKIRSCTSHMAELDSHIEDLQVAADLIASPFTAALRIIESVPGIGHLSALTILSEIGTDMSKFLSAKHLCSWAGLTPCNDQSAGKKKSTRISRAGCYIKPILVQCALAAIKDKSFPYYGQRYQVLKHRRGHKKAIIAIARMMLSVIYTLLSRGELFSKELYEESLKNPMVILSQEEQFQRLAKKFGYVVVKVHEPVPV

SEQ ID NO: 52424 - protein, 337 aa, unidentified
MNYSGIDLHSNNSVVSVIDETDRVVAEKRLPNDLAKILAFLAPWRAGMAGVVVESTFNWYWLVDGLQTAGYVVHLANTTAIKKYDGLKHSGDETDARYLAHLLRLGILPVGTILPARLREVRDLARKRMQLVRSCTSHILAVENITARQYGTRITSNQVKRLDEHAVDQMGLPDNVALAVRANVAVITTLREQIAIVERRLQKEVARHPDYVLLTTVPGIGQTLATVIMLETGTIDRFANAGNFASYARCVDSQRMSNGKKKGEGNIRNGNPYLCWAFIEAANFAMHFSTEARRFYERKKARTNSVLARKALAHKLVRACFHMLKERKPFDVTRCFA

SEQ ID NO: 52425 - protein, 450 aa, unidentified
MAKKRTYSTHSVESVPVDVLLPALLAGCIVALDVAKQKFVFAVATLAGEVIKLFRFEHPKETGKFFQLVEALKERVEPGKLKVAMEPTGTYGDGIRHQLASRGIPVWMVSPKKTFDSRALFDDVQSLHDPKSAVHVAKLCALNLATEWHAPPELRVRLRALVQLRAHEHDSEERCFGRMEALLARHWPEFGQWLDVRGQKSALVLLAKYPSPESLNAARENAEVLLREVSRSRLSEEKIRGFLAASVTTLGVPALPEETRMLAALAEQAAEAQRRANAVELDMTKLGSGDEVFQRLERWMGTFSAAVIITMCDPRQYEKPRQLEKACGLNLREKSSGNDPRDVGLHITKRGPSLVRKVLFLFALRMIKHSPEARAWYMRRRSFAGGAKMSSVIALMRKLVRAVFYVARGADFDPSKLFDLRRLEVPTLQPEGAVLRRKVNEPKMAAAVSG

SEQ ID NO: 52426 - protein, 327 aa, unidentified
MRNIIIGIDISAKTLDICIKKDKQYEFIKIDNSPVQIKKFLKPYKPLANQVYLGMENTGKYNNNLYQVLSQEAFTVFVVHPYHLKQSIGLARGKNDKVDAERIVSFVQKNYEELEPWEPSSKSLQNLKVLSTERRAMVKTRTRLKQKKKDYKYISDKSLRKKLERINTKSIKEISAHIREIEKIIDQTIKADESLKTNMDLMQSVPGVGKIVATAILVKTDGFRLYKKPRKLACCAGVVPFNYQSGTSINSRSKVSHMADKSLKTLLNMAALRAVRMGNDLQHYYDRKVAEGKNKMSVLNAVRNKIIHIIYAVIKNQKTFKNRLVLS

SEQ ID NO: 52427 - protein, 316 aa, unidentified
MKQGPYIGIDIAKAHLDLAVHLSGEPWRVTNDDAGISATVTHLRELDPTLIVVEPTGGLELPLTAALAAAGLPVAVVNPRQVRDFAKATGRLAKTDRLDAQVLAHFAQAVQPTPRPLPDAQTQELAAFLARRHQLVQMLTAEKNRLGTTRLPVSQRVRAHISWLTQELADIDKQLSDSIRESPIWRAKDDLFQGVKGIGPVVSITLMADLPELGTLDRWGIAALVGLAPFNRDSGLRRGKRRVWGGRARVRAALYMATLVATRYNPVIKAFYHRLLEAGKVKKVALTACMRKLLTILNAMLKHNRPWNPELALRNC

SEQ ID NO: 52428 - protein, 367 aa, unidentified
MKKVSTTASQQSRNISQQRLTIGLDLGDRNSCYCVLDEAGRIQLEQRVRTSAKALQEVFGAMPRSRVALEIGTHSPWISRLLSALGHEVIVANARKVRLIGESRKKDDRLDAQTLARLARIDPQLLCPVKHRSAQAQADLMMIRARASLVRVRTGLVNAARGLAKSYGERLLGCNVRNMNPEKAEGLSPELQRALEPLLSAIEELSERICEYNDRIEAFAQTSYPQVELLKQIKGVGTLIALTFLLTLEDPHRFGKSREVGCYLGLQPGRRQSGKSDPQMHIPKEGDPYLRTLLVQGAQHILGPFGIDCALRRWGLKLAERGGRNGKKRAIVATARKLAVLLHHLWVSGEVYAPLHNSNRTAVAVAA

SEQ ID NO: 52429 - protein, 340 aa, unidentified
MLYAGLDLSRKRLDFHLLDADGATVEVGAAPPDADGLLGLTRRLDRHREPIRAAIESMNGARFVHDRLELQGWQVEIADAQKVKGLAPLACKTDRIDAWVLAELTRRDLVPAIWLPDPMVRAERERARWRLHLVRHRSSLKQRVHAVLLTHGKPCPVSDLFGVRGRQLLARLGLPEPWQATIEASLRLIDELEREITDCERELRRLGADHRYVPLLLTVPGIGWVLAYTIAAEIGDIGRFPSPRKLAGYTGLCPRVYQSGERDLRGPLAKQGPKYLRWALVEAATHACTAAVYRDRYQHTKARIGKQRGAKVAQIDLARRLSEAIWHMLTRDQPFAPKGA

SEQ ID NO: 52430 - protein, 322 aa, unidentified
MVSSANVYVGVDVSKARLDVASRPTGGLFEVADDQAGIDSLVGRLQRSSAPPALVVLEATGGLERPVAATLAAAQIPVAVVNPRQARDFARATGGLAKTDRMDAEILARFGEAVRPEPRPIPDQEAQQFGAILTRRRQIIEMITAENNRLGSTTSRPVKKRIEAHVKWLEKELKRADDDLDETIQKSGTWRENEALLRGVPGVGPVLARTLLAELPELGGGELSPKQLAALVGVAPLNRDSGTLRGRRTTWGGRERVRAVLCMGAPVATRYNPTIKEFYERLCARGKPKMVALVACMRKLLTILNAILKNRTPWRSSHALTP

SEQ ID NO: 52431 - protein, 407 aa, unidentified
MARGKPHSSRSAKSAQALPPQLAAVNLHAAGIDVGANSHYVAVPPSDDSSPVRCFGACTVDLEALADWLATCDITTVALESTGVYGIPLFALLETRGFEVLLVDPQQVQKIKGRPKSEVHDCQWWQRLHTFGLLAGAFRPTDQVCVLRSYVRQRGMLLTYASQHIQHRQKALTQMNRKRQQVVSDITGMTGMAIIRAILGGERDPVPLAKLRHDRCQHDEAAIAKALHGQWRAEPRFALAQAVALYDVYHQQIAACDRQSEAHRRTFAEHREHQPQPAPRPRQPKRKRNQPGFEVRGALHRITGVDLTAIEGIDDTTALILVSAIGFDMSRWPTVKHFASWLGLCPHQRVSGGKVLSRRTKVCANRAATALQLAASCLHHSQSALGAFFRRMKVRLGTPKAITATAH

SEQ ID NO: 52432 - protein, 379 aa, unidentified
MDHAITDTPAETILHGALELSKNSWLLALQFPDRAQPSLYPISGGDTVGLMAKLTAARDRWAKMSGKAPSIVLCYEAGYDAFWLARFLKARGIECLVVDAASMQVNRRARRAKTDRIDVGMLLRALIAWGQGDRHVWSVVRVPNVDEEDLRRSHRERDRLVRERTAHINRIKGLLFGQGIRGINVKSKYKTLQIDKLVTGDGRPLPPRLASEITREIARLALIQEQIATLERERDQAPTPCKTTEKKRLQLVSLNGIGPAIAAVMTREVYYRQFDNRRQVAGFLGLATSPDDSGDVERSQGISRAGRGQVRGTMIQAAWLWLKHQPKSAITRWFVQRTAGQSGRIRRIMIIAVARKLAIALWRFLEQGLVPQGAMLANR

SEQ ID NO: 52433 - protein, 364 aa, unidentified
MKKNITTRQSPRQASKASRGPMTIGMDLGDKSSRYSALNPEGELAGEGSVATTKKGMTEKFGGLVRCRIAMEVGTHSPWVSRLLTRLGHEVIVANARQVRLISHSTRKDDKLDARLLARLARIDPELLRPIRHRSERAQEHLLAIRVRASLVDARTGLVNAARGFAKASGERLPSCDADSLDVETMDALPAGLQQRLRPLLEQIESLTVKIKEADQQLEQIARTEYPETKLLRQISGVGVLIALTFVLTVEDSARFEKSRDVGCYVGLRPKRSESGQSQPQLRITKEGDMYLRKMLVQGAHLILGRRGPDTDLKRWGLKLAARGGKNQKKRAVVAVARKLAILLHRLWVTAEVYQPLRHQPIAA

SEQ ID NO: 52434 - protein, 353 aa, unidentified
MQIVGALDVHRRQITHKTLDLATGDVHRGRLSPANRESVREWLERFAGCEAEFALEGTTGWRFVTEEIARAGHVAHLADPAETAARRGSKRRAKTDRADCDLQLKLLLAGELPESWIPPAHILELRTLVRTRKTLVDQRSAWQLRLTAQLFHQGVPAGINPRTRAGREALARVELSPAGRELVSIALRMIDVLDLEIVPLDRELRVFAARQPGCRALSERLYGVGPVTATAVLAELGDCRRFTSSDDAVRHAGLDVTVYQSDSKRAAGHLSHEGSPVLRWALYEAGQQATRQTSPDHEYFLQVRERTDHKSASLSVARKLCRRAYHILRELGEQALAPVEVDAHVEEAMHAAA

SEQ ID NO: 52435 - protein, 341 aa, unidentified
MSLIKVVGIDLAKLVFSIHGVDEHSKCKLRKTIKRNNLLAEVAKLPPCIIGMEACSGAHYWAREFTKLGHDVRIMACKFVIPYRQNEKNDANDAEAICEAVTRPKTRFVSIKSEEQQAVLCLHRIRQGAIKDRTARINRLRGLLAEFGIIMPKGRYPAQKAIAGILEDGENNLPFIARELLNDLWQSIKGLNDEILKYDRKLHALANQMKDAKRLMSIPGIGEITATAVVATVNDARHFDTSRSFAAWIGLVPRQYSTGGVARLGHISKRGEKHIRTSLIHGARAVIANCKNKTDRTSMWVKDLVERRGFKRATVALAAKNARLIWALLHSEKEYQVDYVK

SEQ ID NO: 52436 - protein, 454 aa, unidentified
MKKAYLGIDVSKGYADFMLIDSERKPLGKDFKLSDTRSGHDQLERFLSSARRDHGLELILCGLESTGGYENNWHYMLSRLMPEGIKVKRINPRGVRHEKEASLVRSENDQVSARAIAVHLVNQETRIMEGSEYDVEFYQARKFYRHIQSVIKDQTRIKNRLEKLIYESFPELLGMVKGGSVSKWIIRLLLKYPGAQKVANAPVKSLSKIQGITKEKAESLKQKAKDTVGVPSSIHMQKTIQSECLEVQRYDAQIALKKKDLEASYVNEQIEILMTIKGIGHYSACGLVMEIEDWKRFEKASSMSAYFGVYPEYKESGDGKLKPRMSKKGRASCRATLYMAARNVVIHNEYFKTYYAKQRAKGMVHTAAIGVVMNKLLRVVWGMLQSNKSFDFKVDLANQQRPVGKANQKRTPNTDITLDAPISARKRRKIKAMQESQDPIKESSTRSSPSLIQT

SEQ ID NO: 52437 - protein, 350 aa, unidentified
MKRYIGLDVHAASTTFGVISEAGKQIGSHVVETNGQALVEQLKTIPGKRHVVLEEGTQSAWLYEILTPHAEEVVVAVVSESRGQKDDKRDAFGLAELLRTGAIKRKVFKEVGAFQTLRELARTHAMVVQDSVRVQNRIKALYRSRGIAVTGKSVYSEKGREEFLKNLPDATRVAARTLYAQYDAVEEIRQQVEKDLVKEAHKHPISRVLETCPGLGPIRVGQMMPIVVSPGRFRTKRQFWSYCGLGIVMRSSSDWVRTEDGGWNRANVQKTRGLNLTHNHTLKNIFKGAALTVVTQLKTEPLHQDYERLIAAGTKPNLAKLTIARKIAAIALSMWKGKERYDPTKHRKQK

SEQ ID NO: 52438 - protein, 343 aa, unidentified
MEYYVGLDVSLKHTSICVVNQTGSIVQEGVVESDPEAIALFVRSRAPGTVRIGIETGPTTTWLWTELNRLGLPVICIDARHAKAVLKMQINKSDRNDAAGIARIMQTGWFKEVRVKDLDSHAVKALLASRALLVKIKRDLENQIRGLLKNFGLVIGRGKFNVFAVRAAELIENRPELIAAVRPLLEARKAIEQQVDDLDRKVHKLARHDVQVRRFMTVPGVGPITALCFKATIDDPMRFKRSRSVGAYIGLTTRRHASGEIDWSGRISKCGDAMLRMYLFEAAGVLLTRVPKWSGLKAWGAKLTKRNGLRKAKVAVARKLAVILHRMWIDGTEFNWSTKKAAA

SEQ ID NO: 52439 - protein, 404 aa, unidentified
MSVQTAPVTSSTIVVAVDVGKTSAMVSVTDDARQRLMSPVEFPMTRSGLGAATERVLAVAPSGSQFKVGVEAAGHYHRPVVDYRWPPDWKVVELNPAHVAEQRRVMGRRRVKTDGIDLEAITELMLAGRGRVIGQREVLIGELAAWAQHRSRRVATRTATKNQLLGQLDRAFPGLTLALPDVLGTKIGRLVANEFADPARLATLGVNRLIRFAAAREVQLRRPVAERLVVAAKEALPTRDAVVARRVLATDMCLMADLDAQVAAAETELARLLPLSPFDTLTSVPGWGVVRVSNYAAALGDPMRWPGSKQIYRASGLSPMQYESAGKRRDGSISREGSVALRRALIDLGMGLWMTDPAAKSYAQGLRDRGKRGGVIACALAHRATRIAHALVRDHTVYDSTRWT

SEQ ID NO: 52440 - protein, 415 aa, unidentified
MKGTEDTRKIDRYIALDIHKEYVLAGGQTAGQEWVLPPRRISMTKFREWATANLHAGDGVVIETTTNVWDIYDIVAPLVTRTAVAHAGAVRQIAEARVKTDKEDVKRLIRLLIADIVPEVWVPPVEVRELRGVISYRNRLVKMGTMVRNRLQSLLHRHNIILPKGRLLDAAWWQEQKMSALEKMQIQQELVMLEELDRHKREVDMELGRQCLREPWGKQAVRLLQLPGFGVVMTMIVLSAIGDIQRFESAKQLVGYAGLGAGVHDSGKEHIEKRITKSGRKELRWALVEAAWQAIRISPYWKEQFETYLRRMRRPNQAIVVIARKLLVAVWHVLTKEETDLHASEEDLAYKMLVLSWDLDESVRMGLTYKQFAKYALMKLGIETDITRFVRKNVPRRIAPREEVLARMQELGLSI

SEQ ID NO: 52441 - protein, 425 aa, unidentified
MTRISAGVDVSKNRSTVCIMDQDGKFIMRPFLVWHSTEELDFLADTLKRLNGEVRVIMESTSVYQYPIALQLKERGLFISIVNAYKVKKFANTDFRGGKTDKKDSRTIASYGISYWDKLVEWQIPKDTYFNLDLLDRTYMNAKKHRQIILQELQHYIDCAMPGMDKELHSLNLNTKKDFMLDFVEKFWHRDKIVNMTEAEFTEVFTAWAKEKGYRPGKGKAAKIYAIAKSCIPYYPANPTVKTILQCIVDKLSGVNRTLVTIVTQMIEEAKKLPEYQIVREMPGVGDPLAARFFGSAGDIRRFKNSKALVAYAGIDSPPDESGDFSSTHRHITKKGSKVFRDTGYEIMMALRAQKRTWEKVRKNPEVYDYMLKKEAEGKPRKVAKIAALNKFLRIVYARIKELCDNMALAERAKTKTRAKTKVTA

SEQ ID NO: 52442 - protein, 359 aa, unidentified
MQRNKISFKGQKIFVGIDVHKTIWEVAVLTESGLLKRHPQEASAKVLFDFLRKHYPDGEYHAVYESGFSGFATYYALKEFGIECTIAHAADVPTTQYENVMKTDKIDAEKLARALKNGEIKRPVYIREKDNIDDRAVIRIRKTIQKQLSGYKARIKHMLHCNGVEIPERFSKPTSHWSRAFISWLMQDVKLLSSTRRSLDLLIRQVEVIRGTLLEATRELRKLSQTERYKHRFELLMTIPGIGQHVSMCILTEVWDVNRFPNERAFAHAMGLVPTCHDSGPHKSNGEQTFRGNRYLGPMIIEACWVAIHKDIGLGACYAYHKQRTNPQKAIVRVARRMSNIIYSVLKNDKAYEPYQWDK

SEQ ID NO: 52443 - protein, 372 aa, unidentified
MSQSSTLYIGMDVHKESIAVAYVAQAHGAEVISLGTIGTRQCDIDKLIRQLRSKSKQLVFVYEAGPCGYWLYRYLMKQGYVCWVVAPSLIPKKPGDRVKTDRRDAMQLARLMRSGDLTPVDVPAVDDEAIRDLSRAREDTLRDLKAAKLRLKAFLLRHDIRYTGRANWSPAHLRWLSEVVCPTPAQQIVFQEYVQTVTEQTERLGRLELELHEQVQTWRLAPVVEALQALRGVQFTVAVTTVAELGDLTRFDNPRQLMNYLGLTPSEYSSGGRRQQGSITKTGNTHARHALVEGAWAYRYPATVSRHLQLRLEKLPTAIQAISWKAQVRLCKRYRQLMAKGKNANQVVVAIARELSAFMWAIAKQVTVPPKA

SEQ ID NO: 52444 - protein, 355 aa, unidentified
MQKYKVSFKGQNIYVGIDVHLKTWHVTTLTETGCKYSFAQHADAKELFDRLNKKFPEAHFLSAYEAGFCGFSAHYALTEQGIENIVVHAADIPTTGKEKAMKTDAVDSEKIAWGLKRNELTGIYIKDKRYMDDTNLMRLRQRFIMDLSRQKNRTKHLLYTQGVTYPERFRNCRTHWSRNFMKWLREEVELLSEQKMSLLLLCEQVENTRKAILKVTREIRRLSTTDRYKENYDLLVTVPGLGLITSMSMLTELDNDIVRFPNERSFVSMLGLIPTCHDSGEKKVSGEKINRGNKHLGPLIVEASWVAIQRDYQLGAYYSSCCQIMKPHKAIIKVARKLACRAYAVLKTKTKYELS

SEQ ID NO: 52445 - protein, 315 aa, unidentified
MMHVTTLGIDVAKQVFHIYGADARGHEVFRKRLARSAFKPFLATLPPCLIGIEAWGGAHYWARELEQCGYTVRLINPRFVKPFVKSNRNDAHEAEAICEAVSRPTRRFVPIKTIAQQDLQALPRVRQRLVRQRTGLVNQMRGLLAEYGIVWPRSIGHVRRELPVLLETAEHGLTPLGYSLFQELHAEFVQLEERIEALEQKLRQLFGQHGVCQRLAQVEGIGRLTATALVAAVGDPALFRNGRELAAWLGLVPKQQSSGGREVLLGISKRGNRYLRTLLIHGARTTVYRAASKTDARSRWITAVKQRRGSHSASP

SEQ ID NO: 52446 - protein, 418 aa, unidentified
MKVVFPTCCGVDVHKSFLVATIIKTPKDSLQPSYQKKRFSAFNSDLNRFADWLRENDCLDVCMESTGKYWVPVFNILEKRGIRAVIANPKWVKAVKGNKDDTKDSKWIGDLFRIGLVKSSFIPDKDIRVLRELTRYRYKLTSMRSSEKNRFQNAFTVCNVALDSVVSDMFGKSATAITDYLTSDEDFDARHCVSLLQRSLKKKADDVLASIEGYEITLEQKTRIGIVRDHLHYIDSLIERVDICIDTMVDRYEGYIALLCTIPGVDRSSAITILSEIGVDMTQFGSSKRLCCWAGLTPGNNESAGKKKSVRISRAGVYLKPALVQVAHAAVKDKLSPYYALKYERITKRRGKKRAIIAIARMILTAIFVMLSNLEEWNPVDLYRVDMPEHLKEKQLAKAVKQAVHFLETQGLTVLNSA

SEQ ID NO: 52447 - protein, 383 aa, unidentified
MGEGSAIAEMPTPCNSHDRDSHKLRVAVTGGCPITPGSLKTVSELGAPPAVPSNPNSRLGRKTRSSIRQGRVAMDIIAVGIDVSKDRLDVALRPSGEIFAVERNASGLDRLIERLRQLAPRIVALEATGGFETVAAAALASASLPVVVVNPAQIRAFAKALGQRAKTDPIDAAVIAHFAEATRPEPRPLPDEATRLLADLVARRRQIIEMIGAERQREKRTSMPRLRKSIGRVVGMLEKELAGLDADIDDAVRGSPAWREKEDLLASVPGIGTTIARTLIADLPELGTLSRKQVAALAGLAPFARQSGQWRGRSFIGGGRASVRTALFMGALVAMRHNPVLKGFFERLRAAGNPKMVALIAVARKLLTILNAMVRDNKRWQNA

SEQ ID NO: 52448 - protein, 387 aa, unidentified
MNVLFDPRKPATAFDHTTTLVAVLELSGKSWEMGASVPGVSRRPLRKLDVKDISGVTKLVEQWTGEACKAGCAVTRVVLGYEAGRDGFWIARALREFGIEVYVMHPSSIAVERRGRRAKTDRIDVDILLGTLLGWLRGEPRRCTMAPIPTEAEEDMREPGRERDALVAIRLKVENQMGSLLIRFGIDDFRPRLKKAAEKLEALRAINGRPLPPKAMEKLRRLMAQHRLLSDQLKEIEEARQKVMEVPDPDRIARMIQMLVRIVGLGVETATVLVHEVFSRKFRDRRTLAAFVGLTGTPFNSGGSTREQGISKNGNPRLRRILTQLMWRWLKFQPGSDLARWFMERTGGAKGRIRKVMAIGLARKLLVALWRYVDAGSLPGGARLAAA

SEQ ID NO: 52449 - protein, 383 aa, unidentified
MIVIGVDTHKGSHALSAVDEGTGRVRGSREIKADEPGHVAAVRWARGLDDERVWAIEDCRHVSRRLEQALLAAGERVVRVPPHRMGASRKGEREPGKSDEIDALAVARAVVNDGVEQFPVAYLDEQAMEIRLLLDHRNDLVADRTRTVNRLRWHLLELCPELERSLKRGALNQARVLDRVDRQLRKLPAGARVRIAREQVAQLRRLNPQVDQLAAQLVELVGAHRPKLLAEQGCGPVTAAILIGHTAGNERFRSDASFALQTGTAPIPCSSGKRTQHRLNRGGDRQLNHALHVIATTRAQRDPATQEYLARKQAEGKTKKGALRSLKRHLARHFHHLLAEEPLAPTDDHSTTDAIPPHPRQPDRDRVDKTIIGTAPMPMVCVS

SEQ ID NO: 52450 - protein, 459 aa, unidentified
MNKRTQSTKNRKKKVSIEDNWPLINPDAAGIDLGSREHWVAVPRSRSQQPVRRFGTFTADLEALADWLKECQIISVAMEATGVYWIPVFQILERRGFKVLLVNARQTKNVSGRKSDVLDCQWIQRLHTYGLIGGSFRPADPYCVVRSYLRYRDELVGARSTQIQHMQKALLQMNIQLAHVLSDLSGVSGLAILEAIIKGERSPLKLAALAHRRLKCSAQNLAKALVGDYRDEHLFVLASAYELYQQYNRKIEDCDQKIALEVSKLPDKVDVQSKPVPPKPNKAGLSAELHENLYRKLGVDITAIESFGPVVALTVLTEVGPDLSRFATEKHFTSWLGLCPDNRISGGKVLSCRTRRVINRLTDILRMAATTLERSQSALGAYFRRMKAKLGAAEGITATAHKLARILYRLLKHGEAYVKEGLADYERKHQTRKLKGLQKAAASLGMQLIALQPTANPVS

SEQ ID NO: 52451 - protein, 368 aa, unidentified
MTYLGIDLHTRNMTICAVSSNGKNIGEWKLANDTTLLDHLIREISDPVKAVVEATSSWYWLADWARSREIELVLAHAKMLKAIAYAKVKTDSVDAHRLAQLLAADLIPKAHMVMGTRRELRELLRARLRFVWRRCKIQDSLYNLFFKYNVPIPKYPFRDLNRLEEHLSSHLPQASALEASLQIEQFRLLESQVYQIEKQIDAYGPEFPAFDRISKVPGIGKVSSWSILAEIGDISRFQSDKNFVSYCRLVPGAADSGGKRRHKSRNKDGNKYLKIAFSQAAIGAITYYPPVRGFYNKIRRRSGKHVARTVVAKELARIVYFMLSRGEEYKGFKGKPTPKDTYLNWPHSVSPHSLRGRDRADPSQPDAI

SEQ ID NO: 52452 - protein, 375 aa, unidentified
MTQESPVSPKASIPSTEVRMITIGVDAHKRVHVAVALDAAGRQLGVWKGPNSSRAWQELNDWAAAFGGQRVWGVEGAWSYGRGLAQHLVMGGEVVYEVNSRWTALGRRSARKRGKTDRLDARSVAAFVRQEAATLPRVGEEDETAVLDLLARERENAMAEVTRLRNQIHALLMQIDSEYEIRLRNRRVRTRMQLLESYEPPVAASTPLQRERVAAVRRLATRARVAFEHAEGLAKRIRALAQEGFAPLTELVGVDLLTAGQLAGILGPGHRFEGEAQLAAYAGAAPLEASSAGLVRHRLNRGGHRQLNWILYRIVLTQSQHSEQARAYLARRRQEGKTTREAFRALKRYIVRAIWRLWQLCPGAVRREVVASAAA

SEQ ID NO: 52453 - protein, 393 aa, unidentified
MTEQRRSYTSEGVYVGVDVHKETYTVTCVCHKQIVKTATVQAEPASLAASLQRWFPEAMLASAYEAGFSAFVLHRALTKVGISNIVVNPASLAVAANDKVKTDRRDSKRLAVDLADGRLRGIYVPTEEEELARLLPRTRAQLVEHRATLARQIKAKLHQFGLITPSSRRLLSHRYLREIESWTLPPELHASLKMLAEQWRFVTRQLIEMRRLLREQAAAQAELEKVYRSVPGIGEVVARTLATALGDMTRFAHERALFSYTGLTPSEYSSGAAVRRGPISRQGSSRVRHLLVETAWRALPYDAGLQTMFERMAATRGKKRAIVAIARRLIGRMRACFRQGTIYAVGTLASVPGRPWPEACLERSYALMAQPHAEQLPTIMNRTEQEEEEEEEE

SEQ ID NO: 52454 - protein, 359 aa, unidentified
MQKQNNTLNFDGQNIFVGFDVHLKSWQVTILTEKMSHKTFVIPPKPEVLSNYLKKNFPNGTYHSAYEAGFSGLWAHYQLKALGINNIVANPADIPTTQKEKVQKEDKRDSRKIARSLRSGELTPIYIPSESTLNDRALVRTRTMLVGDMTRFKQRIKSFLYFYGITFPPEFERRSTHWSGHFMQWLDSIPMKEESGRLALDTLTEEARSQRNLLLETTKKVKKLSEEAKYNEKSLLLRSIPGIGLINSMVILTEVEDIKRFSKDEKFASFVGLIPTSHSSGEKEKIGEITFRSHDFLRKAFIESAWVAVRFDPALLLSYNSLCKRMEPNNAIVRIAKKLLNRVYFVLKNNKEYEYNKTI

SEQ ID NO: 52455 - protein, 315 aa, unidentified
MTNHKKSKTIINVGVDVGKQFLDVCIYEKGLYWQEENTVQGVKSLLRRLAYYQVERLVMEATGRYEFNLAQAAYEKKIPVCIVKPLAVRRYAEAIDQVAKTDKIDAALIAEFAAIVQPRVTPQKSKNLIAIKDLIARRRQLMGLRTQELNRIKIMGKAFEVSCKRIIRTLDAEIDRMEKRLAKHVEEQAEWTDKHTLLKTAPGVGNTLIYTLLADLPELGTLNNKEVAALVGLAPYNRDSGKLRGKRRIRGGRHSVRTVLYMATLSATQCNPVIKDFYSRLVRQGKHKKVAITACMRKFITMLNAMVRDECEWAY

SEQ ID NO: 52456 - protein, 419 aa, unidentified
MQAIIERCCGLDVHQETVVACLLVGAPGAQPTKEVRTFRTVTRDLEALRDWLREAGVTHVGMESTGVYWRPVYAVLEGHFELIVGNARHMRNVPGRKTDVKDSEWIADLVRHGLIEKSYVPPQPLRELRELLRYRRKLVESQAAERNRLLRLLETANIKLASVASDVFGVSGRAMLRALIEGEASPEAMADLARGQLRRKRTDLILALDGRVEEHHRFLLAVQLRRLEAIEADIAALDLRINEKLEPYRMPHALLMQIPGVDWLVAAVLIAEIGVDMSVFLSIYHLSAWAGVCPGSYESAGRQKSGRARKGNIHLRAILVGAAMSAARTKGSYLKDKFHRLKARRGALRAALAIAHKILVCAYHMLAKNLPYRDLGEAYLDQLGRTRTVANLKRRLERLGYRVILEPNAPAQATPAPAR

SEQ ID NO: 52457 - protein, 344 aa, unidentified
MSISHEPEQLSGRWRPYTSPGTPLLYGEEEQMATSSYVGIDVSKDRLDVAVLGERQETQVENSREGIARLVEQMQDLQPELIVVEATGGYQRAVVETLFHAGLCVAVVNPARVRQFARACGLLAKTDKLDAQVLAEFGQKVQPRRYESKSEAGKHLSALLVRRRQLDEMLKAEQNRLRSTSASLKNSVKRMIACLKQEKKLLDEQVQQCVTEQEAWQEQTEILDSAPGVGPVTTATLLAELPELGKMDRKKIAALVGVAPMNYDSGKKRGYRKTKGGRGEVRSVLYMATLVATRRNPLIRAQYQQLLKRGKLKKVALIACMRKFLTILNAMLRDRQPFHCAAST

SEQ ID NO: 52458 - protein, 283 aa, unidentified
MVQSSFEFHGVVAGVDVSDKSSRICVMSAPGEILLEDVVKNNEDAFRAKFTKFAPLRVVLEAGTHTHWIRDVLTSLGHELLIVDPRDPRTQGTKKTDREDARRLAMAGFLPAGYLNTVRYRSRATHLDLTQLRARGALVGARTTLVNSVRGLVKPLGGRIQRCDPKVFPQRAVKDLPRELLRIVLPLLRSIRELSRAIAACDRRLSRITAKRYPIAQTLAEQIPGVGPVTSLAFVLTVEDPRRFKRSRDVGAYIGLAPATCACARSWSSVRTASCTRGAPTGT

SEQ ID NO: 52459 - protein, 321 aa, unidentified
MEQPRKGDPRVQRTIGIDVSKDRLDVHVAPDGLYQQFRAQEVEKLADWIQALSPTLVVMEASGGFERAAWLALAARNVSVAVVNPKRVRDFAKAAGKLAKTDKIDSAVLADFALRFSPAPTPPPTDAHRELEALLLRYRQLIEMSTAEKNRLGMSTSTWVKGQIRSHLRGLETQRRRVTDELLGKLATSMDLREKAERLRTVPGVGPITAASLLVDLPELGRLNRGEIAALAGVAPMAHDSGTHRGIRRITAGRASVRCALYMAALVATRFNPVLRDFYARLLAHGKPKKLALTACMRRLLVQLNAMARDGTTWKPLVAPA

SEQ ID NO: 52460 - protein, 397 aa, unidentified
MIAVGIDISKGKSTVAILNSDGSIRIKPYEMHHTKPDLDALIKYITQTDISPVILMEATGHYHYPVLQALLAAGLSPCLINPYLMKKFGDTELRKAKTDKKDALRIARYALEKAYLLTPYSPVERKYDDLKFLSAQYRQRISMVTKSKNQLVNLLDEAMPGITRILALKSRNPEKCMLLQFIKRFHSFDYINEIGKTRFMNSYATLVKKTNDKFAATKALSIYELSRSSITTHGNSEYMSSALDQCVDLLSEAQNAADATILQMQNIASTIPEYKVLLSMAGVGERLGPIILAEIGDIRRFHSAKALNAYAGNDAPPYQSGQFESQNRHISKRGNPALRKACFEVMQALKLTKPQDDPVYLFVLKKEQEGKPYNVAKMAGVNKFLRIYYARAMELYK

SEQ ID NO: 52461 - protein, 434 aa, unidentified
MEEITDEPLYRDRVCGIDIGKAGLVATIRVPSDANPARRAAETRSFGTTRREVLALADWLRCWQVPAVVMESTGDYWKGPFYRLEAEGLECVLADAKQVKHLPGRPKRDPSDSRWLAACFERGAVTACFVATEEFRVIRLHTRYRRDLTEERTREKQRAEKLLESAAIKLSSVVTDLHGVTGRDIMDHLIAGETSPKVLAQLARARARRKIAELEAALEGAEFFTPAHAALLATMLDRIDHLHAEIARLTEMIEHLLAPYEEQLAQAESMPGWGRRSAQDALAETGPDMSRFPTPAHLASWAGRTPLDNSSGKRKGKAKSKKGNRYLAAVTGETAVAAGKTQTREGARYRRLARRRGKAKAQVALGNTQLKVYHALLSHPGTRYQDLGPDYYERQAGTRRQIAHHVGKLAALGFEVTLARLPEPDPTGPDNQAA

SEQ ID NO: 52462 - protein, 387 aa, unidentified
MAQVNDLSRSLTAFDPISTLVVVVEMSKASWLVSGVVPGIERQPLKKLEPDATALLRLIERWRNEARRAGRPISRIALAYEAGRDGFWLARWLTTRGIEAHVIHSASVAVSRERKRAKTDRLDAAMLMRVFLGWLRGERGHCGMVAIPTMEEEAARRPSRERESLVNERSRITNRMKSALARLGIRGFKPHLRKAPERLAGLRTAEGTGLPTNVIEEFRRDMARLALVREQISSIEKTRAERLDRAPDTGPHAMVRLLARVIGIGIETADMLVREILSRKLRDRRAVARYAGLTGSPDESGLKRREKGLAKAGNARVRRGLIQLAWRFLMFQKDSALARWYRTRTEGPSGARKTTMIVALARKLLIALWRLVTTGEVPDGVELRPAA

SEQ ID NO: 52463 - protein, 340 aa, unidentified
MDSQAELNEVILGVDTHLDAHVGVVLNHVGKVLGTLVTPTNQAGHITLLNWARAFGNVQRAGVEETGTYGAGLTRVLRKQGIEVWEVNRPDRSTRRLQGKSDPTDAESAARAVLSGQANAIPKSQSGVVEATRIVSVARRSAVKARTQTINQLRSLLVSAPDTIREKRWKTKTEQCIQGCAQLRTLGGTPLLQTLAGTLRLLAKRWLHLSSELKELDATLEQLTVQTAKRLRSQFGVGPQTAATLLSVAGNNPERLRNESALVALCGANPLPASSGKTVRHRLNRGGNRAANNALWTIAMVRMRSEPRTRAYVTRRTSEGLSAKEIHRCLNATLFESCIL

SEQ ID NO: 52464 - protein, 423 aa, unidentified
MAGVMIGIDPHKGSHTAFVIDGREKPLGQLRVRASCEQAEALLGWAGRWRQRTWAIEGARGLGHLLAQQLLAAGERVLDVPPKLTARVRLLESGQINKTDENDARAVAIAALRARQLPQLTVEDQTIVMRVWARRYHDLGRLRTQAVCRLHTVLCELVPGGVRKQLRTSQAIAVVDSITAESPVAQAKLELAHDLVADLQRLDAQRREVKRRVSRAVAAAPTSITEVYGVGPIVAACVLGYVRDIRRFPSRDRFASYNGTAPIEVSSGDRKIYRLSRRGNRQLNHAIHIAAVSQISHRGSEGHAYYQRKRAKGMTGKCALRALKRKISDTLYERMLHDIRPRKDPGGHSGNDAASSAAGSHPDGPALRTSHSRATANSKTATTNQRPLTSPPAPDKRRTSRSGTGVKLQPRPRPRRGRGQERA

SEQ ID NO: 52465 - protein, 372 aa, unidentified
MEERSKVHIGMDVHKDSISVGLAAPGREPGRLVGKVPHDVVRLTKVLSKLGSSDQLHLVYEAGPTGFGLQRKLAALGYTCEVIAPSLMPRRPGDRVKTDGRDCIQLAQCSRAGELRAVWVPDPGDEAIRDLSRAREDAVHARTQARHQLKGFLLRHDVRYAGKTSWCLAHLRWLSTLNFGAAAAQTAFTEYVLSVQASDQRVERLDKALEQAIEGWRFEPVVAALQALRGVAMITAIGLVSEIGDLSRFEHPRKLMAYLGLVPSEQSSGDRVRRGSITKTGNSHARRLLTEAAWNYRFGARIGKEAQRRQEPLSEPVRTMAWKAQLRLTRRFSMLNARGVQANKVCVAVARELAGFVWAVGMQALREKPLTN

SEQ ID NO: 52466 - protein, 341 aa, unidentified
MNIKRIGIDLAKQVFQVHGVDGQEKVVLRKQLRRAQMLDYFKTIPPCLIGMEACSSAHYWARELQKLGHTVKLMAPQFVKPYVKSNKNDANDAEGICEAVARPTMRFVAIKSIAQQDIQAVHRVRSELVQQRTAKVNQIRGLLAEYGIVVGRRVDVLHNALPLILEDAENGLTPDFRVLLEGLRQDLATLNGRVDELDKTIKTLASSNTDAKRLQQIPGIGPITATALVCAIGDGKQFKRGRDMAAWLGLTPRQHSSGGKDRLLGISKRGDAYLRTLLIHGARAVLKVAGQKDDPRSRWLQNLCSRRNKNIAAVALANKNARIAWALLSKETDYLPEGEPA

SEQ ID NO: 52467 - protein, 563 aa, unidentified
MNQNLQTHLGVGIDTARYGHHVSFMDEHKRTASKGFHFSENADGYEKLRKTIEQLIAKHPQALLHIHIDAAGQYAENLIQWLHQQSWPVVISVGQPARNKAYRKVHYDKRKADPVESLACARFAVVEKPPAMHRPAVEFSALRDAVAQMESSASARTALVNQLHNMLARAFPELATLVPDIASVSILNLLQKYPTAARIAAAQLESLGKLPHVKPELATKLHQAAKTSTASMQIATSELLIKQKVKAILAERKNHADIGQIVQNAVESLPVGPHRRLKTIPGIGPQTEAALIAKMMSIERFRSADAVIGYFGIFPEQVDVSGVNKDGTPKTGKVSKMSRKGNDLVRRLLYTAAQAAVRFNPPVRALFARLMAAGKDYNTAIGHCMAKLLRQVFAVWTKDCDFDPAYEYRSQAPEQLGEETKLGEEETKDVAGHNQDRSPNRKVVTATSSSVTAKRRPLNFAQLREQVSMSQVLELLDWKPTRNSRGTSRGRCPLNCTAKDDSSFALNEAKKAFCCHRCGAQGNALDLWATTQNLTLLDAAWELIERLGIEPPVLQTEKENCLV

SEQ ID NO: 52468 - protein, 431 aa, unidentified
MKNITKNRRLSEINTTTLIVAIDIGGYEHHARAFDWRGIEQQKKAFKFKNDRYGFESFLSWIERIQWMSGFTEVMVGLEPTGHYWFALFDYLLSRNLRLVITSPISVKQTKEAATTSASKSDPEDPKAIAHVMISGNYQEIYRPQGNYAELRKAYTLRNSVMEQKKATANRIHAWASTYFPEWHKVYSSVQRIGFLTLLRRAPLPSDIVKLGVHGILHHWHECQLLGGISRNRAERLVEEAKCSVGVTEAAEMARVEIQMLLQHYDLQEAQLTRLDKRLEELVEQYPGGKRLMQIPGIDLQIAAGFLAEVGDIRRFPSAAQLQSYAGLDILRNSSGKRRGQSRISKRGRNKLRRIMFVAALCVVNHTSEFRAVHQYYKHRTKNPLKAMQSLIAVACKLLRVFHVMLTKDVDYDPDKVTCGLVVKSSEKQVA

SEQ ID NO: 52469 - protein, 338 aa, unidentified
MKVTTVGVDLAKSVFSIHGVDERGNAVLKKSVRRAKLLELFAQLPPCVVGMESCSGAQHWARELLKLGHDPKIMAAEFVAPYRMSGKNDANDAEAICEAVGRPQMRFVPLKSIEQQAVLAVHRMRQGLVEERTALANRLRGLLAENGIVFAKGIDQLRRAMPVILEDSHNRLPELAREVLADANRHLAELDARIAEYDRRLAALARSSEPAKRLMKIEGVGALTATAILATVGDAKAFKNGRQFAAWLGLTPLQRSTGGRQRLGQITKHGDVYLRTMLIHGSRSVMRLTPQRADAKSRWVESLRARRPDNIAAVALAAKHARIIWALLARPQDYRPAQ

SEQ ID NO: 52470 - protein, 460 aa, unidentified
MAQKRKNAPGKGRKGQPHSLNPIQPNAAGIDLGSREHCVAGPPLSDGSPNVKHFGTTTPELLRLAGWLDQQKIATVAMESTGVYWIPLFEILDSRGFDVQLVNSRQIAHVPGRKTDMIDCQWIQLLHACGLLRGSLRPDDDICCLRALIRERNTIVDQRSDWVRRMQKSLDQMNVCVHHAVSDITGYTGMAIIRAIAGGERNPRALASLRDCRCQKSEAQIAEELTGNWRPEHLFNLGQALKVYDQLCGVIADYDAEILKHVDSLQPPDSKDSPAPPPATRAKANKFSRLGQEPMRQALYRMSGFDLTTIDGVGVDTAVVIMSELGPDLSAFPDEGHFVSYLRLAPNISISAGKKVPGKFRAVSSTRVCNALRMAATSLRNSKTALGAYYRRISRRKGASVAVFATARKLAQLIYRLVRYGQAYVDTGSEVYEARFTQRRLATYTRALKEMGYKIEPLAA

SEQ ID NO: 52471 - protein, 470 aa, unidentified
MSTTPTSSKQRRGVRVVSQPKVPLPPQLKRVNLDAAGIDIGAEEHWAAVPPGRNTEGQDVRRFGAFTGELCALADWLKQCGIQTVAMESTGVYWIALYELLVERGFEVLLVDARQAKNVPGRKTDVLDCQWLQELHTYGLLRGAFRPVDQVCILRSYLRQRSMLVSYASHHIQHMQKALEQMNLKLAHVVSDITGLTGMGIIKAILSGERDPVKLAKLRDPRCKSSEATVARALEGHYREEHLFTLQQAVELVEFYQQQMTACDRQIEACLQQFEEKSSETPVTTRRRKRRRGIAFDARSYLYRMTGIDLTQIDSIEGNTALTVISEIGLDMSRWPTEKHFGSWLGLAPGSKVSGGKRLSGRTKPSANRAAAALRLAAQSLNQSQSALGAYFRRLKARLGAPKALTAAAYKLARIVYRMLKYGAGYVDQGEAVYEERYRDRLLRNLKRRAAELGFQLTAIELNSGQVALT

SEQ ID NO: 52472 - protein, 344 aa, unidentified
MTDGLVAGIDTHKDVHVAAVLDRLGRRLEVRQFPATDAGNTQLAGWLAGLGQVTDAGVEGTGSYGYRLARLLADRGVQVWEVNCPDRSRRRRKGKSDPVDAENAARAVLAGEATAVPKDRRGFVGELRLLVLTRRSAVKARTQASNQIKAFLIEADDELRDRLHGLRKARFGRACAALEPADGLRRVLAALGRRWLALDAEARELETQITALISAYAPGLLARHGVGAVTAAQLLVTAGGNPDRLRGDAALAAICGASPVEASSGKTSRHRLNRGGDRAANNALWVIAHVRTISDPRTRAFVAKRTATGNSRKEIMRMLQRYIARELYPLIIDALRAAATEGLT

SEQ ID NO: 52473 - protein, 342 aa, unidentified
MYYIGLDVHKKTISYCVKDASGQVHREGTIGATRNELDCWVRTLPQPRIMAMEATIFTGWIYDHLLPHAEQVKVAHPLMLRAIAAAKKKNDRIDAGKIADCLRCDFLPECHMASTEIRDRRRTLRYRHLLVRQMVQMKNRISGLLMETGVSHNKQRLHKVGYFRELISNSAEIHESIRPLLRLSRETIVRCQKTEYALVSSLERDPLLAERLKRLRTVPGVGPITALTWALEMGDVSRFRSVKQAISYCGLCGEEKSSADKVLRTPLSKQRNKHIQHVLVEAAKLAPRQNHELAVVHERETQKGNRNRATLAVARKMVAYLLAVDRREREFVPAEGGSTAAA

SEQ ID NO: 52474 - protein, 387 aa, unidentified
MPQPNDLSRSLVALDQNSTIIAVIEMSQSSWLVGGVLPGIERQPCKKLEPSPERLLAVLHRWRDEAVRAGRNITRIALAFEAGRDGFWLARWLEARGVEAHVIHPSSVAVSREHRRAKTDRLDTELLKRGFLGWLRGERGHCSMVRVPTIAEEDAKRPNRERECLVAERTRIVNRMKATLARLGIRSFKPTLRKAADRLATLHTPEGMPLPPNVLAELQRDMARLGFVVSQIREIEEARQKRLEQEPEAGPHAMVRQLARVVGVGIETADMLVHEVLSRPMRDRKAVARYAGLTGSPDESGAKRREQGLARAGNARVRRGMIQLAWRFLLFQKESALALWYRARTADSRLGTRKTMIVALARKLMIALWRFVTTGETLEGVILRPAG

SEQ ID NO: 52475 - protein, 416 aa, unidentified
MEVIVSRCAGLDVHKNTVMACVRVPGPNGGRTSTVRQFRTFTAGLRQLRDWLVAEQVSQVVMEATGVCWKPVWHVLDATPGLELMLVNAHAVKNMPGRKTDVADAVWLAELGECGLLRPSFVPPPVIAQLRDLTRYRKKLIEERARETQRIQKLLEDAGIKLDSVVSDILGVSARQMLEALIAGVRDVAALAELARTRMRPKIPQLRQALEGRFGAHHALMLRMHLEHVDQLSVSIDRLDSEVDRVIRPFSNALQRLITIPGVGRRTAEVIIAETGADMRRFRTAGHLASWAGMCPGNHESGGKRRSGRARKGNAALRAALCEAAWAASHARSGYLPAQYRHLLRTFGKKGQTRAVFAVGHSILVIAWHLMAHDRDYADLGGDHFTRATDAEARERYLVRQLEALGHKVTLEPAAA

SEQ ID NO: 52476 - protein, 411 aa, unidentified
MVVGVDIAKKVHFARSFDWRGIEVAKTFSFKANGTGFARLIEWARENAKKNGKDKIVVGFEPTGHYWFTFAQAVLEEGMMVVQVNPYHVKSSKELDDNSPSKSDRKDPKTIAMLVKDGRYQIPYIPKGKYAELRKANNLREEWLKKIWAIKNKVQRWLDTYFPEFLEVFSSWEGKAAIITLERIGLPNKIAAMTTNDIVTIWREDVKRAVGVKKAQMLIEAASSSVGLREGLEMAVYEIQLLMREYREVRTIMDGLEVKLEEIVLTIPGAEKMLQIKGVGIKTVAGFLAEVGDITRFNHPDQIIKLAGLNLRENSSGKHKGETTITKRGRSRLRAQLFRAILPMVAKNKEFNELHKYYTTRTENPLKKKQSLMVMCRKLIKIAYKLITEDVSYDPEKMMGDIRRNPEPRAA

SEQ ID NO: 52477 - protein, 318 aa, unidentified
MDVHKESITACIMDKEGNVVRQHTFPYNKESIKAFLFGISNAEIEIAIEACGIWRGVYKVLKELGYKVKLANPNKTHDIACRKKTDKVDSRILADLLRANYLPEVYIPDEEMLRLRDITRHKSNLTRLRVEIQVKIKGYLLRKGVKYGKIWNEKALSKLAEDDPDIKNLINVYWSLREEEKEVMRRIRKIAMNMRKANLLMSMPGIGEFSSLMILAEIGDIRRFKSPKQLISYAGLCPGIYQSGSTERNVRNNAVNKWLKWIVYECSGRATMLDSRFQEYYHKIKQRKGFKTARRAVARKMLTIIWYMLTNEEPYRNN

SEQ ID NO: 52478 - protein, 554 aa, unidentified
MAITSRRPARRHRRPLSVAKPSGSIHPRVQKVGPEHFGIVAVDCAKARSKWMLTDFYGTILITPTPVEHTRQGLDDFAVAIRRAIIDHHLGDLVVAIERTGNYHLPVKRAAVAAGFDARVVHPLASKQFRLPADPGNKTDDTDLLAICRAAVNGFGLVEPVLDEVHVQLRLLARLRRDLVRKNADTRNQIHAELDARLPGLAAAVGDLFDHEPALVIARHLSSPAEILARGLGGLAALLHAERIRHHRRSLAKILAWAERAPEPSECPEIHRRIFTCLDDERRARLRTIRELGADLAGSLVKTPYVLLLSFPGINVVSAAEFAAEMGPIAHSPGDGAITGRAGLYPSRYQSDAVDQTGPLVRRGNRAPRYVILLIAENLLRCNDHFRRLGEAWRAAGANRRAAVVRAAKRFCRIAYRMVAGRQVYRHPSCRERHYILAKLSMFYIGHETSLDRVSRDLRAAADWIPRSEYAAEARPLASGSSTAAPAAAPPARAARPTNSNGRRTGPRPLSAILPEVLLRLGARMVESSASGETDPTGPHRPVARTTPLVPVAL

SEQ ID NO: 52479 - protein, 355 aa, unidentified
MNSLRYVGLDVHRDTISVAVLDENGRLIMQSVVATRAAAILDFIGGIRGAVWVTFEEGTHSAWLYDLLWRRVEKLVVCNPRKNALLKSGSKSDAIDARKLAELLRAGMLSPVYHGESSGLEVQHLVRSYTMLTEDTTRVMGRLKAVFRSQAVACAGKKLYAQRHRESYLLRLGSGALRRRAECLYQELDALQGLRRQAKRELIVECRKHAAAKWLQSVPFLGPLRAAVLIGRVQTPHRFRSKRQFWSYCGLALETRDSGEYRVVNGQIERRKKPVLIRGLNWNHNPELKNLFKAAATTASAGHGVFREFYLGLLDKGMQPEMARLTLARKIAAIALKIWKKGEAFDQQQVKSQAA

SEQ ID NO: 52480 - protein, 393 aa, unidentified
MICVGIDVAKDKHDCFILSSEGEVLADVFTIQNNAEGFDTLLQTIRRCVCPGDKIKVGLEATGHYSYNILGFLLDKGLDTYVINPLHTNLYRKSLSLRKTKTDRVDARTIAAMLMSDVDLKSYTDTVYHNEELKSLTRYRFDKVRERAKLKQSVSRLVTILFPELEKLVSSLHSASVYALLSEFPGAKQISSTHMTHLKAVLKNASQGRYGQEMAETIRNAARSSVGSVMPAKSLELQHTIRLIRELDAEIEDIETAIQAIVDEMQSPITTIPGMGVRMGAVILAEIGDFSRFDSPDKILAYAGMSPSTYQSGQLSLSGAYSHMEKRGSRYLRYALYNATKHVCHWDPTFAAYLAKKRAEGKHYNVALSHAAKKLVRLIFAMEKSQRPYCAAA

SEQ ID NO: 52481 - protein, 339 aa, unidentified
MTEIIRVGIDLAKNVFEVHAVNAAEQVVVRRSLRRNQVLTWFAKLPACLIGMEACGTANHWARELTALGHTVRLIPPAYAKPYVRRNKNDAADAAAICEAVGRPSMRFVPVKTVQQQSEALTHKARELLMKQRTMAMNSLRSLMAEFGIVVPQGPQHIGKLRLILADPEDARIPDLARAALNTLADTLAALDRQIEALDKAVKAQVRANATARRLDTIPGFGPILSGAIAAIVTDPRHFDSGRDFAASLGLVPRQDGTGGKVKLGPISKRGNGYLRRLLVNGATAVLNGKNARNDPWRAKLLDLKPKKLAAVALANKMARIAWAVMTREEDFRPRSVPV

SEQ ID NO: 52482 - protein, 440 aa, unidentified
MKYQALQSKREAIAGKVIIGIDPAKHKHHAAILDPQGVQLGHSFAFDVSCEGYTESLWKKVINILPTCNPESVLFAVETSCNLWRTIAFYLHEQGYTVLLVSPLTTYHTRPMISHDFSRTDPKDALLVASNAQHGYYDQYVQFSPHCNAMHRLSITYTKLRNELAQNRSRLRALVEQVFPELFNVLVPSTLTALYLLRKYLFPDEFLAMNIQKEARVIGKLSRRQLGLETLKELQRFAQHSIGVHYTAEERLAERLSLDTWIALIETLSAQMKDVLDSLLQLADQLPEFEYLQSLTGVSTITSRLFLAEVRELHRYTHYKQIEKYAGLNLRQCQSGQYVGARRISHLGNCRLRWILYTMTEETAKWIPEVRIKYLTRQIKRRNHRKNIVASIPQLLKLITTLGKEQRPYEHRPEKENMMKHLEKQYNDLTKKNATSQQAT

SEQ ID NO: 52483 - protein, 354 aa, unidentified
MKNGSSLEETIGLDLSDKAGLYVVVSAQGEVIREGKVILSRLGIERVFSARQPCRIALEVGTHSPWVSRVLAELGYEVLVANARQVGLIARGQKKTDRVDAETLARAARFDPALLKPIRHRGEQAQADLAMLRARKALLESRTRLIISARGMVKAVGGRLPTCSADYFATKVKDHLPQMLKPALEPMLTAIAQLTEQVRGMTRDLKKLAEERYSETALLSQVHGVGLICSLTYVLTLEEPSRFKRSRDVGAYLGLTARQHESGEQKPQLHITKAGDIYLRSVLVQSAQHILGPFGSDSDLRRWGLRLAGTGSKMRKNKAIIAVARKLCVLLHRLWLTGEVYEPLRQERLLTAAA

SEQ ID NO: 52484 - protein, 344 aa, unidentified
MEQYVGLDVSLEETSICILDESGAVVFEGNVASNPQTIAKLLRRRAPQAIRIAFETGSLSNWLWHELKALEFPVLCLDARHPKAVLSMRMNKSDRNDARGLAEMARMGWYREAKVKSIESRHVRATLAARAKLVDLRRDLENQMRGLLKSLGIILGKAGSKALPRKILDALREAPHLRPLIEPLMLAHSALISQVIKYDDQLKAMARSNQTVRRLMTVPGVGPVTALAFASTVDDPQRFRRASDVGAYLGLTPRRYQSGELDRTGRISKRGDRLTRYYLFEAAKRAVEGSAPGLAAKELGPQAHQADRAKKGEGRRRSQARHHPALPLDRRHAVRLGKGHSMTH

SEQ ID NO: 52485 - protein, 308 aa, unidentified
MPQPAAVLPHASPDYDRTLVLAIELSSKSWVLAAQVPGLAQVKAKRTIEPTKEALLEALASYRARAAAAGHQIERVVSIYEAGWSGFWLARWLITQGVQVHVVQPSSVLTDRRMRRAKSDGIDAELLLRTLLAWLRGEPRVCSMVPIPDQTDEDARRAVRERGELIAERVGLINRIGAVLATLGAGDYNPLLQSRRRRLNELRTGLGEPLPPHARAKIERLLARLELVLAHITELERERDAVAETAAPDHAARMIQQLAGLRGIGVQSATVLVREAFVRRFANGKALGAYAGLTATPYSSGGLERHRA

SEQ ID NO: 52486 - protein, 319 aa, unidentified
MNTTTAAHIDRSERNVGIDIGKSTLDACIFELDVYLQYPNTTEGIRELIKKLSRYNLTRILVEATGGYERRFVEACAEKELPLIIVRPAQVRQFANALGINAKTDKIDSRAIAQFGAVIKPEARTLNNKKVRHIRDLLSRKRQLNEMRTQELNRQHKAPAILAATHKRLLKVLDKEIESINKLLAKAVSEVTEWQRTYEILSSVPGVGDGVTFTLLGELPELGQLSPRKIAALCGLAPYNRDSGIMKGRRRIKGGRAPIRTVLYMAMLSAIQCNPIMKKFYKKLVEQGKHKKVALTACMRKMVTILNAMVRDNCEWQAS

SEQ ID NO: 52487 - protein, 353 aa, unidentified
MSQKPNTAVAVVGIDIGKNSFHIIGHDQRGAIVLRQKWSRGQVEARLANMPPCLIGMEACVGAHHLSRKLKALGHDARLMPAKYVRPYSKGQKNDFRDAETIAEAVQRPTMKFVATKTADQLDLQALHRVRERLVSQRTGIINQIRAFLLERGIAVRQGQRFLRIELPRILATPPDVLSPRMVRVIEDLAGDWRRLDERIEELSGEIEAIACQDAGCERLMSVPGIGPIISSAMVAAIGSGEVFTKGRDFAAWLGLVPRQMSTGGRTILGKISKRGNRYLRVLFVQAAWVVLIRPKSWERYGLKSWIEAAKKRLHPNVLAIALANKLARIAWGVLAHGRDFEVRRINETAQSA

SEQ ID NO: 52488 - protein, 343 aa, unidentified
MQAITTLGLDIAKSVFQVHGIDAEGNVVVRRQLKRRYVLAFFQQLPPCLIGIEACASSHHWSRELQALGHTVRLMPPAYVKPYVKRHKNDATDAEAICEAVTRPNMRFVATKTPEQQSCLTLHRTRHLFIRQQTSVINAIRAHLAEFGIVAPVGRHGVEQLLGVVSDAGDKRLPDVARACIAALGAQLQRLKVQILEFDRMIRAWHRSSEASRRLDDIPGVGPALATALVASVADPKMFRSGRDFSAWIGLVPKQNSSGGKDRLGNISKRGDRYLRSLFTTGALAVIRYAKIHGTKHRPWLTALLTRRPTKVAAIALANKIARMAWAMMARGERYKEPAALAA

SEQ ID NO: 52489 - protein, 322 aa, unidentified
MFLGIDVSKNTLDVALLGESAKPRHKVFANDVVGHAELLRWLEQQSVDAVHACLEATGTWADAVSAALHQAGHKVSLVNPAQIHAFGRSGLKRTKTDKADAVLIARFCQMHQPPAWTPLSPSVQQLQGLVRRLEHLEEMCLMEENRLASGRICARVQDDLEEHVADLKERIEKTRRQIKDHIDQNPDLKSQSQLLESIPGIGATTAALLLAELGDISHFSNARQVAAFAGLVPRIRESGTSVRGRSRLSKVGSSRLRKSLYFPAITALRFNPLIKAFGLRLSVQGKSKMLIIGAAMRKLLHLAYGVLKSKQPFDPAFCHQNT

SEQ ID NO: 52490 - protein, 419 aa, unidentified
MHKLDDFVPKSHRLRSIRVMANEALANSLRETRELVRTSPIARAAPIDVIMAVATQPSAKGEVMEQITRVGVDLAKNVMQVHAVDRAERVVVRKAISRERFVNWFANLEPSLVAMEACGGAHYWARKLRSLGHDVRLIPPQFAAPYRKGGPHVKNDAQDAEAICEAASRPQMRFVPIKSPAQQSGLVLHRIRTGFVEERTALVNRLRGLLAEFGVSLPQGIRSLQKHFVDRLEDGSNELAGAARQALIRGWTQCQVLDQEIAWLDKQIAEHAVHDEQAQRCMKVCGVGPLTASAAVATVVDARQFKNGRQMAAWIGTVPRQNSSGGKQRLGRITRQGNDYLRTLLYQGARSAIRTAPRRVDRLSRWIVQLQARVGYYKTLVAVANKHARILWAVLAKGEKFDPSHVVDTPSAVIPATYM

SEQ ID NO: 52491 - protein, 340 aa, unidentified
MKNTKYFIGLDVHKEKTTYVVRDKIGNIILEDTTSTLYSDLYKRLETYLKSSIIGLESSTSYYTLYKGFLKNGYNIKVANTIQLRQLITKNDKLDAKRLSEMLRLGTFPCSYIPDEKIQHLRSLLQVRHSLIEEKTRCNNRIQAFLDRNGIIMPNQEAFGKKWRQKLLQYIGSGEVSLELRYEYDHFKYLEEKSEHLGLEISGYTQKHWKKEYKLLQSITGLGPILSCYIIAHIHPISRFTSKRKLRRYAGVIPTCHESGDKKSKGHIPKTSSRKHLRWALIQAANSAGRTNTKLGYYYRKKKKQKKNAGIAHVAVASSMIDIIYKVLTTNKPYNTKNIC

SEQ ID NO: 52492 - protein, 356 aa, unidentified
MTSNIKYVGMDVHKQSISIAIRNAAGKIVMECVIETKASTILQFFDGLRGDVQVTFEEGTSAAWLYDLLKPHVSKLVVCDPRKNKSMREGNQNDKIDARRLAELLRLDHLTPVYHGEHGLRTLKELVRSYLTVTKDLARVMTRVKAIYRSWAIPCTGKQVYARCHRAEWLGKITEPGVRRRAEFYYQQLDGLRVLRQEVRRDLLAESKKYKAWKRLCEISAIGPIRAAVLLGILQTPHRFRTKRQLWNYGGLAIEMHSSADHRCVDGQLERSRKNVLVRGLNRNCNHDLKNLFKGAAVMASSKPGPFADFYAALVAKGMRPEMARLTLARKIATIVLIVWKKGASFDTQYLKPQTA

SEQ ID NO: 52493 - protein, 465 aa, unidentified
MSKLSQRHRARSSQGETRPCEGMRQVHPHAAGVDIGAHEIVACVPDGDDQQIVRTFGTSTVDLQTLADWFVDRGIQTVAMASTGVYWIPLCEALEARGLPCCLIRAQSITRVPGRQSDVLDCQWIQTLHSYGLLAASFRPAADLVALRTLLRHRAQLLEHRAPHVLHMQQALLQMNIQVSQALRDITGDTGQRIIRAIVAGERDPQHLAALRNELCKKDAHEIAMALTGTWREEHLFVLTQALALFDFYTTQLSACDAQVEHAFAVIKPHFESTAEASVPASAAVPPRRKPHSHSTNAPEGNTRAHILRITGVDLVAVHGMSDSLAQTILAEIGTDMSKGPDDKHFCSWLGLAPKNDLSGGKVLKSRTMKNRNRAAQAFRMAAQSVIRSHCAFGAFYRRLKGRLGPAQALVATAHKIARTVYHMLKHRVPYYDIGAAEYNKRFREREMHYLQKKAAKLGYKLSPV

SEQ ID NO: 52494 - protein, 401 aa, unidentified
MTFVIGLDWGGAAHAVCVLDRGSGAVIDRFEARHDEKGLRDMERRLARHGAPGDLPVAVERPSGLIVDALAAAGHPVVPIHPNAVKASRPRYRANGAKDDRGDAYLLADLLRTDGHRFRPLTPPSDAIRALRALVRGRDDLVATRLQLANQLRALLESFWPGAAAIFADIDSPIALAFLERYPTPDSATRLGVKRLASFLAQHRYSGRRSPDELLARLRAAPQGLAGPAEAEAKGEMVRALVAGLGPLVTRIIDLTARIRHETAASEDGQIIMSFPRAGQLCAGQILAELGEDRARYLTPDQLAADAGLAPVTRQSGKSRGVSFRWACNRRLRTALTCFADNSRHACAWAARIYSSARGRGCRHPHAIRILGRAWLRILWRAWQDRKPYDPVLHGAAKAIG

SEQ ID NO: 52495 - protein, 350 aa, unidentified
MKKVVKQVAGIDVAQKELVITLGRMFDDFTIELFSYKVFKNNDSGIKLLVDWVNKLTDNQVPVRYVMEATGVYHQKFAYYLNDNNYDVSIVLPNKISNYIRTLELKTVTDKSCSQAITQFGLERKLDNWTKPKSIYKELQQLTRERDQIVQERSVIKNQIHAENVEAIPNQRSLDRMQSRIEFLNSQEKEIKKDIAELIKLYPEVESTIEKIKSIPGVGELTAVIVLAETNGFELIKNKRQLSSYAGLDVKEKQSGTSVKGKPKISKKGNRNLRRAVHLPALSAVKWDDNFRNIYTRLVAKHGIKMKALVAIQRKILELIYVLYKNNTVFEKDYETKKRALLDKENALTS

SEQ ID NO: 52496 - protein, 357 aa, unidentified
MRTITIGVDLAKQVFSLCSVDVAGHVQERRELRRDAFIQWLPSVAAGTTVAMEACSGAHHWARRCQDYGLQPRLMAAQFVAPFRKSRTAKNDRNDAEAIATAARQGNMRFVPIKTVDQQARLSWHRVREGYKAEALATSNRLRGLLAEFGVTMAQSDAALRRTLADLDALSLPTSLVELLRDVDAHWQQLQVRIAQADRRIQAHAKTDEACTRLRAIIGVGPITADAVVATIGSAQSFANGRQFAAWLGLVPMQHSSGGRSRLGRISCRGDGYLRTLLIQGARSSLQRAKAVAWEKATPEQRWIQDLERRLPFGKVLVAIANKHARQLWAMLARGEHYDAQAWLKHPMVQRPTSRCA

SEQ ID NO: 52497 - protein, 315 aa, unidentified
MTESFVGIDVSQEQLDLHERPGERLQRYPNNADGIQAIVARMAELQPTRIVVEATGGLELPLVLALAERQLPVVQINPRQARDFAKACGRLAKTDVIDAATLAHFADAIRPPVRPFPSQEMQALREFLDRRQQLIGNRVMEQNRLSSTTLPAVRRDIETHIRFLNRKIVDVEKQMKKLIDASDALRHKDDILQSVPGIGAQVSRTLLVRLPELGTLDRRRLSCLVGLAPVNWDSGAMKGSRHIRGGRATVRVALYQAAICAVRVNSSMKAFYARLRASGKKAKVALIAVARKLLVLVNALVAKDEKWRANSILPA

SEQ ID NO: 52498 - protein, 369 aa, unidentified
MLYLGIDQHARQLTISLRDESGDVLQARQVSTQPEKVQAFFQQLTRERLHKGESFVAVLEVCGFNDWLIRMLRDYRCHKVILIQPNDRKKCKTDRRDAAGLSELLWANRERLLLGKPVRGLRQVDIASGTDQENRRLTTLRKEAGQGRTRLINQVRHILRRHNLQWQLPTKRLPTKAAITWLKQIALPEIDRLEMTHLLADLEQLQQRLKELEQVLARRCGVSDEAQLLASMPGVSYFTATALACRVGRVERFPRAHSLANYWGLTPGCRNSGENNQRLGSITKAGSAMARWLLAQVTHKVLRRDVRLREWFKRIKRRRGSTIARVAVMRKLATIIWHMLSKRLTYAECRALAATGEKEMEPQTCGAGG

SEQ ID NO: 52499 - protein, 330 aa, unidentified
MNEAGAPVAVTTAAPDAGGLASLAYRLGEFGQPVTAVIESMTGARFVHDQLELRGWTVEIADAVKVKGFAPLACKTDKIDAWVLAELSRRDLVPAIWLPTPGVRGERERARWRLHLVGHRTALKNRIHATLMAFGHPCPVSDLFGAAGRRLLEGLELPEPWAGDVTAALRLIEVLDEEIDDCEAALRRLGAHHPYVPLLMSAPGIGWVLGYTIAAEIGDITRFATPKKLVGYTGLCPTVDQSGGHDRRGELAKNGPKYLRWALIEAATHAARHPVYRNRYQATKTRLGRQRGASIARVDIARKLTEAIWHMLTTHKPFAPAGAIPPTLAA

SEQ ID NO: 52500 - protein, 371 aa, unidentified
MKSDSTIKFIGLDVHSKTISVAIADEGRKGEVRHYGTIENTFEAIDKVIKSLTATGIELRFIYEAGPCGFALYRYLSGNGFTCIVTSPAMIPRPKNVRIKNDRRDALTLARLYRAGELTGIYVPEPEDEAIRDLGRARDDARMAERKAKQRLNSFLIRNNLIYPGKTKWNRTYFNWLGSVGMKYPAQKVALQEYIEAVNECTGRVARLREQIGLAVEEWRMAPMVKALQALRGVSLICATITVAELGDLSRFQNPKELMAYLGLVPSEHSSGESIRRGSITKTGNGHARRVLVEGAWTYKHHARITYPLIKRQRELPKSICQISWKAQLRLCARYRKMVARKKPNNVVVIAIARELAAFMWAIAQEVRAAA

SEQ ID NO: 52501 - protein, 314 aa, unidentified
MDREGNVIQNATRPNDWQSVVDVVPEGGVVFAAIEACCGAADFAEELINKAGWSVNLAHPGYVARIKQSPDKTDWADAKLLADLERVGYLPKVWLAPENIRELRRLVRYRQQQVNRRRDVKLRIRALLRDQRAKAPSEINPWTKAWQRWAEESSEIGETSRWILGEHFSEIETLTQRIRTVEKRLSSLLAEDPVAQKLLEQSGIGLVTAATLRAEIGRFDRFRSGKQLARFCAVTPRNASSGQRQADAGLIKAGNRELRRVLVAAAQRLRRLDDYWVKFSDRMQERGKPSNVITAAVANRWIRGLYYEMNNLAA

SEQ ID NO: 52502 - protein, 335 aa, unidentified
MKEITTVGVDLAKTVFTVHGVDAMGRVLLRKTVRREQLVELIAGLPPCLIGMEACGGAHEWGRKFQTYGHRVGIMMARFVAPYRKSSKNDGNDAEAICEAVARPNMRFVPVKSAEQQAILSLHRVRQGFIEQRTATINRIRGLLAEFGVVLPQRAEQVRRAAVVMAEEFPVLAREAIADLRAHLTYLDERISRYERQLVSLARQREAAVRIQRLPGVGPLTASAITASISDGHEFANGRQFAAWLGLVPRQYSTGGKARLGRITKRGDPYLRTLLMLGARAVLQSAAPKTDRLSRWAMALRARRGYHRAIIAVAAKNARIIWALLAKNREFVLPV

SEQ ID NO: 52503 - protein, 342 aa, unidentified
MTLVGCDLHTRMQQVAVLDTGTGEVSERQLAHDGSAIEEFYAALPGPVTIGIESTGYAVWFHILMQRLGHTVLVGDAAKIRAMVVRKTKTDRRDALHLLDLLRHDRFPTIWIPDPATRDLRALLTHRMRLVRIRTMVKNGLHAIALNYRLARGSKLLRQAGLAQLHALALPPYTAQRRDQSLELLAGLTTQIRELDDAITTAALAHPDAPRLITHPGVGALTALATVVVLGPVARFHDSKHVVSYVGLAPALNASADKYHLGHITKQGSTLLRFALGQAASHAARMDADLKRTYCTLVHRRGRPKAKVAVARKLLVRLFIMLRDQIDYDEFQRRGRPAPVSA

SEQ ID NO: 52504 - protein, 361 aa, unidentified
MEYYIGLDVSQRQTAICIVDGKGSLVKEGKTVTTPSDIYAWITKHIDPKLIKTVGLEAGAMSAWLYTELSKVGLPMLCMESFQAAEFLKAQRNKTDKNDARGLAQLVRMGGEFIKPVLIRNQSNQEARTLLTMRHFLVGQKVDLENNITGTLKPFGLITPRGNTSAKTFRERVLAILDRADERDILIRGSVMPSLDIYDTLCKQVAVLSKKVEIMAKADPICRLLMTAPGVGPIVALSFVTAIENPKRFKDPDDIGAYFGLTPKQYQSGETDKQTGISKRGDIMTRTHLVQAATVLLTSCKKWSVLKAWGMKIAKRHGFFKARIAVARKLATILCKMWLKGQEFCWTKTPANTVLAVATPA

SEQ ID NO: 52505 - protein, 403 aa, unidentified
MVFLGIDWAEAHHDVCLLDEQGKVLGKRRVVDGLEGVRRLHELVAEHAEEPEQVVVGIEIDRGLLVHALVAVGYQLYAINPLAVSRYRERHGTSGAKSDPADAKLLADLVRTDRHNHRPLAGDSELAEAIKVLARTHQNLVWSRQRQVNQLRSLLREFYPAALEAFGTDLAAADAIAILERAPTPYQGRSISQAKITSALRKAGRERNLESKAAEIQTGLRAPQLEAPALLAQAYGRSVASTIRLLRQMNQELAALEQELAASFELHPDTEIYLSLPGLGKVLGARVMAEFGDDRTRFKNPKARKSFAGTAPITKSSGRRKTVLRRLACNHRLLDACYLWAFASLRRSPGAKHYYQQRRNRGQSHPQALRALANRFVGILHGCLDHRELYREELAWPLLRAAA

SEQ ID NO: 52506 - protein, 325 aa, unidentified
MAAALDPIGGVLGVESFAATPRGYKAMLEWMSAFGPVSKVGVEGTGAYGAGLGRFLGQAGIEVIEVDRPNRQVRRTQGKSDPADAVEAARAVLSGRCTGAPKSRDGNVEAIRALLVAKRSAREGRLRAVHQMRQLSYTGPDQLRCRLKGLSTKDLVDEAAAMRRRVGGDPVLLATKTALASLGRRVHALDEEASHLDDSLAELVTATAPGMLELFGVGIDTAAVLLVAAGDNPEHLRSEAAWAHMCGVAPIEASSGKITRHRLDRGGDRNANQALWRIVMTRLATDSRTREYMERRTKEGRSKREVIRVLKRYVAREVFKHLPRG

SEQ ID NO: 52507 - protein, 357 aa, unidentified
MTAPEIAVIGGIDTHTDVHQAAVIDSVGRHLDTQSFATNSAGYEQLLAWLHSQGEVIAVGMEGTGAYGAELARFLTASGITVVEVDRPDRRARRAHGKSDPIDAYAAATAVLSGRASGTPKSRDGIVEAIRALRVVRKSAIKARTQTINQIRALMVTAPSALRDKLRGLPTGLLIDTLARTRPAGDLADPACAAKTALRRLARRYQALQQEIKEADADLAPLVTRAAPSLVALPGVGTETAGQLLITAGDNPDRLRSEASFAHLCAAAPVPASSGRTNRHRINRGGDRHANSALYTIVLVRMRHDQRTRDYVTRRTAEGMSTKDIMRCLKRFVAREIYRHLMSTNTLNTTGPARARS

SEQ ID NO: 52508 - protein, 320 aa, unidentified
MAILDAAAIVGVDVAMAELVTAQRGVDKTHCLVNARTSIHHWLKTLPQGSAIALEATNTYHLDLVEMAHDMGHLVFVVDAARVSKYRESLGKRAKTDACDAHLLARYLEKEGDELRQWSPPPELHTQLKHLLHRRASLVNSQTALRQGWKDEKDLRMGFEKLMRRFSHLIKDIEKQLKDVLIKSGEIDQVKRCQGIEGVGFLTATALFAAFLRGEFKNVDSYIAYLGLDLRVSDSGNKSGRRRLSKKGDPEVRRLGFNASMAACRSATWKPYYEKKIGEGKARTEALTILSRKLAGVAFSLMKKREEYDPTKRLGVAPQT

SEQ ID NO: 52509 - protein, 350 aa, unidentified
MASTKISYFEKKVYIGTDVHKETYSVTCICEGVVTKKVASVPANPAEFAQSLCHWFKGAEIYSAYEAGFSGFNLHRELEKVGIKNIVVNAASIAVAANDKVKTDLRDSKKIAEQLSASRLKAIYVPSKDEEARRTLSRTRDQVVEARATASRQIKSKLHYHGLMAKDDTRAISNRYLKGIEKLELPDEVHYSFKIFIEQWRFLTSQLLGLRKALQKQADSDEKLESVYRSVPGIGLVTSRTLANELGDLSRFKNEKALYSYTGLTPSEYSSGEKIRRGHISRQGSARIRGLLVEAAWRAIGKDVALNEAFERIAKTSGKKRAIVAIARKLIGRIRACFRTGKTYAVGTYA

SEQ ID NO: 52510 - protein, 311 aa, unidentified
MNSTVLYVGIDVSKDKLDVGLWPSSELWSLDNDQQGIKELVKRLIPLKPVLVALEATGGQENLALAALGAAELPVARINPRQVRDFARSLGQLAKTDSLDALVLARFAQAVELEPRPLPDQATQELAGLIARRQQLVEMITAERARRNTSSGPVHKQITQHVTWMEKALKRLDDEIDRAVKSNPAWREMDQLLRSVKGVGPTLIALLPELGHLSGKEISALVGVAPYCRDSGKWHGQRSIWGGRAPVRRVLYMGILSACQHNLKIRPFYERLLAAGKLKKVAMVACRHKLLIIINAIVKEHLAQPCQVAIK

SEQ ID NO: 52511 - protein, 344 aa, unidentified
MENYAGIDVSLELSSVCVVDAHGKILKEAKVASEPEALVAFFRTLGFAVKRIGLEAGPLSQWLHAGLKRAGFETVLLETRHVKAALSAMTVKTDRKDARGIAQLIRMGWFRPVHAKSIGAQEIRALLVARKQLLGRLIDVELSIRGILRGFGLKVGPVTRKNFEARIRELVAGQATLERIAIAMLSARLALKAEYGRLHKAVLAIVRDDAVCRRLMTVPGVGPLVAITYKSAIDDPHRILKSKAAGALFGLTPKKYQSGEKDVTGGITLAGDEIVRTALYEAANVLLSRITRFSKLKRWGMDVAKRRGSKRAKVALARKLAVILHRIWVDGTTYRWAEAGSIAA

SEQ ID NO: 52512 - protein, 409 aa, unidentified
MLFAGIDWASEEHAVAVHDDAGKSVAAFMVEHSAEGLDKLVARLRGMAEPAELTVAIERPDGRLVDRLLEAGHPVVAVSPNAIKVWREGEVASGAKSDPGDAAVIAEYLRLRFRKLQALRPFSDETRALRAAVRARGELVDQRTVVHNQLAAILDAFWPGAREVFADIASPIALAFLRRYPTPASAGTLGEKQMAAFCKKQGYSGRRSPAELIERLRKPPAGIVAGAEMGARKAAVLAYVKVIASLNAAIKDLDKEVFTRLGEHPDGEIFTSLPRSGLINAAQMLAEWGDCRQAYDGPDAVGALAGMSPVTKKSGKHKSVHFRWACNKRFRNALHTFAGQSRHGSDWAAGIYDRARKRGADHPHAIRILARAWIRVIFACWRDGVAYDPAKHNAAAALAASSDSAPQAA

SEQ ID NO: 52513 - protein, 443 aa, unidentified
MKYVGLDWASQAHDVTVLDEAGQVLDRWAFPHSEAGWLMTVERLRRQGLPDDLPVIVERTSGLVVDRLLSAGHPVVPVHPTAFFAARPRWGASGAKSDPGDSYKLADYLRTDGHRLRRLSPLDTGLQELRALVRLRDDHVRARTAASNQLAALLDAHWPGPRQLFASLMSPIALSFLTDYPTPIAAAHLGEARMASFLRRHHYRGGKKAADLVARLRAAPVAPAGLPTATLAAMITAQVQLLRTLQQLISDTERLIAARVVAHPRTGLLAGLPGVGVINLAQLLAEVGPILDRVDSAEQAATECGAAPVTRASGKTTGTYFRWAVNTRARKAITSFAHNARLRDPWAAKLYADARARGKRHPHATRILARAWLRVIWACWASQQPYDPARHRHARSSHPPVPPPPANPAGAQARSRWSTPRLNDLDRAEHRHTIEGGGTLPQT

SEQ ID NO: 52514 - protein, 450 aa, unidentified
MKNKKKIRKRARQHLEHINLFAAGIDIGSQEHYVAVPESLDKDSVRSYGCFTVDLNEMADWLVKIGITTVAMESTGVYWIPAFEILEERGLEVILVNAHHVKNVTGRKTDVKDCQWLQQLHTYGLLAGAFRPEENYCELRAYMRQREMLVSSRATHIQHMQKSLRLMNLLLDNVVSDITGKTGLKIIREILLGERDSRKLASYRDKRCKNSIETIAKSLKGNYRNEHLFTLKQAVELYDIYDVKLKDCDITIEKCLSQLDKQADQAQVSKNKVSQKKASDLNFDLCPYLYDICGTDLTEIDGLNGHSVLKVLAETGVNMNKWKTAKHFVSWMGLSPNNKISGGKILSSKTIKTKNRAKHVFKLAAFALANSKSGIGAFYRRLRARLGAPKAINATARKIAVIFYNMLKHKTAYKTQTQGEYEQATNQRLLKNLNNRAKQLGMVMVPIEVT

SEQ ID NO: 52515 - protein, 342 aa, unidentified
MEHFAGIDVSLEASSVCVVDATGQILREGKVATTPEALAQFLLSCGVTFARIGFEAGPLAPWLFEGLVAAGLPVSCIETRRMKVFASASPVKTDRKDAQAIAQAMRMGFFRAVHMKTRASLEARVMLTNRSLLLRQRLQMQNTIRGTLKGFGLKLGAASQGRFLAKVRLLIADRPVLQAAIEPLLAAWQALRLAFLRLDRLVRRAAAADPVCRLLMTAPGVGPVVALAFRTGVDDVNRFRRSRLVGVHFGLTPRKYASGRIDRNGRITKCGDAMVRGYLFEAANSILSRLRRPCALRDWVLELAARTSPKHAKVALARRLAIVLHRMWLTGEAFHWPPAVAA

SEQ ID NO: 52516 - protein, 345 aa, unidentified
MQSMYYIGLDVHKKTISYCVKEGSGRIHAEGTIPATRCDLDLWMKTLPKPWTAAMEATIFTGWIYDHLLPHAAALKVAHPLMLRAIAAAKKKNDRIDANKIADCLRCDFLPECYMASTQIRERRRTLRYRSLLVRQLIQMKNKIAVLLMEAGVTYNKQKLHKVGYFRELLATNRDMDEGLRSLLGLCREMVVRLGKTESALVRSLERDPLLRERIERLMTIPAVGPITALTWALEVGEVGRFSSIKKAISYCGLCSAEKSSGDTVQRTPLSKQRNKHLQTMLIEAAKLAPRNSPALAMLYDREKQKSNANRATLAVARKIVTYLVAVDRRQKDFLVVENENRSAA

SEQ ID NO: 52517 - protein, 399 aa, unidentified
MAQPVWAGVDAGKADHYCMVINDDAQRLLSQRVANDEAALLELIAAVTTLADGGEVTWAIDLNAGGAALLIALLIAAGQRLLYIPGRTVHHAAGSYRGEGKTDAKDAAIIADQARMRHDLQPLRAGDDIAVELRILTSRRSDLVADRTRAINRMRAQLLEYFPALERAFDYNKSRAALILLTGYQTPDALRSAGGARVAAFLRKRKARNADTVAATALQAANAQHSIVPGQQLAATVVARLAKEVMALDTEIGDTDAMIEERFRRHRHAEIILSMPGFGVILGAEFLAATGGDMAAFASADRLAGVAGLAPVPRDSGRISGNLKRPRRYDRRLLRACYLSALVSIRTDPSSRTYYDRKRTEGKRHTQAVLALARRRLNVLWAMLRDHAVYHSATTTAAA

SEQ ID NO: 52518 - protein, 358 aa, unidentified
MIVIGTDVHKHTHCCAAVETMTSRLLEGHQALARMPGFRALLEWARGIGDERVWAIEDCRHVSGGLERFLIAAGERIVRLAPKLSVGTRRLERGRGQSDPIDALAIARAAIREGIDALPVAFLDDQARELKLLCDHRDALVGTRTREQNRLRWLLHDRWPELEIPSGALDRERVLDRLGRRLAQAAQTTDIRIARELVREIRAVTRRICEIERELAVLVAAKCPGLLEIPGCGVLTAARIIAETAGQGRFSSDAKLARVAGVAPIPASSGRTTRYRLDRGGNRKLNAALHRIAIVQGRVDPAAKEYLARKQAEGKSRREAVRCLKRFIARRVWHLLPKTPNGSDEGASRITSEVLALT

SEQ ID NO: 52519 - protein, 361 aa, unidentified
MNTIARVGIDLAKNLIQIHAVDAAGKVVTCRTLKREKFLLWCANLPAGCLIAMEACSGAHHWSRKLIERGFDARIIPGASVAPYRIQGRSGKNDANDAAAVCEAASRPHMNFVPPKTLAQQGMLCVHRLREGLKEERTACINRIRGLLAEFGVVLPQGPEILRLHLSAIVEDASNDIAGVARLVLQRAQEHWRELDAHIKWCDQRIADHQRIDEQVQRASELMGIGSITASALVATVGSFRQFRNGAQFAAWLGLTPKQHSSGGKTNLGSITKRGSTYLRTLLIQGAKAIVLTRHYDNPIFSWVQKLRDRIGWQKAVVALANKNARILWAVMVREKRYDPHHISSFPITAAVTASATLSPV

SEQ ID NO: 52520 - protein, 380 aa, unidentified
MKKNTIAKRSPLSRGKRKQIREVAAKQKLTVGLDVGDRNSRYCILDEAGVMVSEGQLPTTKAGLNSLLEKMPSSRVALEVGTHSPWVSRQLASLGHEVIVANPHKVKLITQSVRKNDRIDARQLARLARVDPQLLSPIRHRGQEAQADLAVIRARAELVEARTGLINCARGLAKPMGERLKQCDADQVKEALADGLSEAVQTAIGPLLKSVEAIHEQIAEYDRKIEEIAKRYREMELLTQVYGVGTLIGLTFLLTIEDAERFQHSRDVGPFLGMQPKQRDSGNSQPQLGISKTGDRLLRSLLVQGAHCILRKGAPDSDLRAWGRARLESGGKNAKRRTVVAVARKLGVLLHRLWVTGEVYDPQYNRKAAQAGKAKTKVAA

SEQ ID NO: 52521 - protein, 465 aa, unidentified
MRDKTKPNREGASFSMTMIHPNAAAIDIGATMHMAAVSPDRSSEPVRSFGAFTADLHRLADWFAECGVKTVAMESTSVYWIPIFELLEERGVEVFLVNARDAKHVPGRKTDVSDAQWLQRLHACGLLRASFRPSGDIVELRAYLRQRERLLDTAASHIQHMQKAMTEMNLQLHHVVSDITGATGMRIIRSIIAGERDPAVLASMRDTRCHSSAEVIEKALTGHYRAEHLFVLEQALALYDVYQHKVAACDVRIEAVLKQLGSVRAHEGDPRREASGPPPKRQSRQSNGLAFDVGAALHSLLGKDLTKIHGIGPYLALKLVSECGDDLSAWPSAKHFTSWLCLAPGNKISGGKVLSSRTRRSGNRAASLLRVAAVTIGRTDTALGAFYRRLSARVGKAKAVTATARKIAVLFYNALRHGMDYVDPGASYYETRYRERVIGNLQRRAKAFGFVLQAAVAPVAEPAVS

SEQ ID NO: 52522 - protein, 400 aa, unidentified
MLSIGIDVSKGKSTVCGMKPGGEIVYTPFEVQHTRKGMSELVSLLHNSGEEVRAVLESTGSYHCPVVTALLENGIFVSVVNSLRMKRFCSQSIRKVKADRIDAMQIALYGLAYWQELQPTRLPEDTYRELQLLARQYYQMTSLLIKAKVDFNAICDQVLPGMQELMNDHAGRHKLSDFVLRYRHTTHILEMGETRFRKDYCKWAEKKGYRNCERMAALIFATAQNGIPVLPNAPSTQIVITEAIRVLHTVEASRDAILTQMQALAKTLPEYSLVREMPCIGDTLAPRLIAEIGDVRRFHSKRALIAYAGIDAPPYQSGKFCANNRHISKRGNRYLRKTGYEVMQSYVMHKPANDPIFTFIEKKRGEGKSGKLAMVAGLNKFLRVYYGKVTELYRSLPAIE

SEQ ID NO: 52523 - protein, 400 aa, unidentified
MISVGIDVSKEKSTVCILKPYGEVVSRPFEVCHVEKELSELTSMLLRLNDDVRVVMEATGIYHLPVLSYLKEKGLFVAVINPFEMKEYRCQGLRRVKTDKQDAITISNYGIDHWYRLKNYEAEESVYAELKLLGRQYRHYMRMRVESVLELTHLLDYTMPGIKTLLKGWNETNGKDKLGDFAEKYWHYDNITKKSEEQFIKSYLKWAKEKGYHQSQDKAVRIYALAKEGIPTVSSDTPSTKMLVQEAVRVLREVDNTLMTILTQMQALAKSLPEYPVVRAMGGVGNVLAPKLIAEIGDVRRFHSGKALIAHAGIDAPPYQSGQFIGTERKISKRGSSSLRKIGYEVMRCLKTHKEPEDAAVYRFILKKEKEGKSKRAAKIAGLNKFLRIYYARVMEVYQK

SEQ ID NO: 52524 - protein, 343 aa, unidentified
MTISTIGLDLAKHWFQVHGVDAGGTVRVRRKLRRSEVLAFFQSLPPCLVGMEACATAHHWARELTALGHTVKLMPPAYVKAYVKRNKNDAADAEAICEAVARPSMRFVPMKDAGQQSVLMLHRTRNLLVRQRTMLVNALRAHMAEFGIIAPQGLRNVELLTKEVAREQERLPELARSTLQLIVDQLTDTIIRVRAIEVRLTRWHRQSRVSQSLATVPGVGIMGASAIAATVADPSLFRSGREFAAWLGMTPRQNSSGGKERMGRTSKRGDKYIRSLLIAGAVAVLRHARNRPTRDGAWVRALMERKPTKVAAVALANKTARIVWAVMTRGDGYRAKQVLGQPA

SEQ ID NO: 52525 - protein, 376 aa, unidentified
MTRVIYTGMDVHKDTYSLCSYDAQDNVMFSETTVKAETASVLSYIKSIDKRYSDDDVMIVCGYEAGPTGFSLCRQLQKKNISCVVMAPTSLPKAPDEKKRKTDKGDARSLALHLAHKTYKAVHVLSPEIETIKELTRTRATALKAQKRAKQNLLSFLLRKGMVYPYGGRAKYWTQKFYAWLKTLEFANDIERYSFEEYLSEVNHQMSRVSRLDEKIGEIAEDPLIRDDVKKLCCFSGISTLTAVSLVSEIGDFNRFEKARYFASYLGLCPGIHSSGLSSQTLGITKAGNKHLRCLLIEAAQAMSRSQICGKKSLRLLARQKDMNPLVVAYADRATERIKRRRSSMIFRGVNCNKATTAAAREMACFIWGLMTNNIA

SEQ ID NO: 52526 - protein, 347 aa, unidentified
MLHAGLELSRRKLDVCVLSDEGEVVDEFAVPPDADGLRGLARGLGPSEVRGVIESMTGSRFVHDTLEQLGWDVLIADALKVKGLAPLACKTDKIDARVLAVLSFRDLVPEIWLPDPRVRKERELARFRMHLVKHKSMLKHRVHSTLISFGKPCPVTDLFGVAGRNLLADLQIPEPWRSTLTASLSVIDDLDQQIDQVNRKLRATAPDHPYVPLLMTAPGIGWVLAFTIAAEIGEIERFNSPKKLVGYSGLCPKVIQSGEKDRRGPLTKSGPKYLRWAMPEATMHALRHPAYAERYQHTKRRLGKQRGAKVAQIDIARRLTEAVWHMLTTNKPFSPTAARGAALRLAA

SEQ ID NO: 52527 - protein, 447 aa, unidentified
MAQRKRPTTQAAISLTHPNAAGIDIGSAAHFVAVPPDRDDQPVREFASFTADLHRLADWLDACGVDTVAMESTGVYWIPLYELLESRGFTVLLVNARHVKNVSGRKSDVLDCQWLQQLMSFGLLHGAFRPADQVCVLRCLSRQRTMLLRSQGRFVQHMQKALTQMNIQLANVISDVAGETGQKILRAIVAGERDGLALARLKNSRIRASEDEIAKSLQGSWRAEHLFALKQALDAFDFCGTQLAECDAQIQGQLQALHVREDEPAKGKKRGRARNAPKFDLRTQLFQMCGVDLTRIDGIDVTTALVVVSEVGADLGKFPSDKHFTSWLGLCPGTKITGGKVMSGKTKRCANRAAQALRLAAAALRSSQSALGAYYRRMCARMDKPKAVTAAAHKLARLIYAMLTHGQEYTDRGQDYFEERYRQRVLHNLAQKAKAMGMQLVPSDNTA

SEQ ID NO: 52528 - protein, 356 aa, unidentified
MRVQKQSIGIDISKDSFTACFCLLQQDGHIQLSDVKKFKNDKTGFNQLVRWTRKVKDPVLPINFLMEATGVYYENLAYHLYDIKQVVHVVLPNTSKHYFSSLNIKTKTDELDAKVLSQFGVERMHKKWIKPNETYLHLRNLCRYYVQLQEQKTALGNIKHSKESAHEVQKLILRSNIKLIKEIDKQIAQVKKEIEKLIRQDEQLSARVDKLLTIKGVGILTIATIIAETLGFQFVKNIKQLASYAGYDVIQRESGTSIKGKTRISKKGNRYIRNALYFPAMVACRYNENLKKTYLRIIEKKPSKMIGQIAIQRKLLLLIYTLWRKDENYDSNFAIKSSSTEGCEATQDRMIETVLP

SEQ ID NO: 52529 - protein, 330 aa, unidentified
MAYAGVDIHKSYCQAIVCTREGDVIKEGRTTTDKEDIEEFFSGLERLEVAIEATTNHEYFYDLLVGLGHHVVVAHPLKTRMIAEAKIVTDKISARTLVDLLRGDLLPTSYVPPKEQRELRHLVRHRIALGRLRGRLKTQIKTELRRKNIKYREGANCFTEKGKAELRRLHNPVIASYLTIYEVVEDELKKMDRVIAEAGTQYAEVGVLTSLKGIGVYSTLVIYSEIGDGSSFPTEDHVFSYAGFVPRVHQSGHEQYYGRITKEGSKYLRWILVEAARVHVQWCPESKITKHYEKIKRKRGEKIAIIAAARKLLQVIYHMLKNREPFRIEG

SEQ ID NO: 52530 - protein, 339 aa, unidentified
MELYAAFDLHANNNFFALIDQDGSRVFKKKLYNDRGLILEVLRPYREEIVSIVVESTYNWYWMVDALMDEGYEVHLANPSAIQKYTGLKHSDDKDDAFWLAELLRLGILPEGYIYPKQERPVRDLLRKRGHLVKLRTSLILSLQTIINRNCGIRLKVNDVKRLRENRVTPFLEANDDLAMAGMVSKESIDFLTHQIRRIERAVKGRVELKEPYRYLFTLPGVGTILALTIMLETGPMSRFARVGNYVSYCRKVSSQWISSGKRKGKGNKKSGNKYLAWAFSEAAELARRYNPQARAYYNRKMQKTNFMVAHSALSHKLARAAYYIMRDQVPFKPEKLFS

SEQ ID NO: 52531 - protein, 338 aa, unidentified
MQTYAGIDLHSSNNYIGVINSKDKRLYGKRHDNNIKQVVKALAPFRKTLQGIVVESTYNWYWLVDGLQDAGHTVHLANPSAIQPYTGLKYTDDQWDAYWLAHLLRLGLLPKGYIYPKEERPVRDLLRRRLMFVRQRTTQILSLQSMITRQRGLNFPGSSIKRFDDPFIERLFDDPYLVLLAKNEMATIRHLGSVIKKIESAVTAKVSLNNAFKMLLTTPGIGQILGLTIMLEVGDIRRFKKAGNYSSYCRCVESKRISNGKKKGVNNKKNGNRYLAWAYVEAAYHAARSNSQAQRFHQRKMSKSNRTLATKALANKLTKATYYMMRDQVPFDLGRLFQ

SEQ ID NO: 52532 - protein, 451 aa, unidentified
MLIQGSSDPPRLVRVGIDAAIVAQHEVCIRATEADGRVRTDRFRVQPTLAGLRSLSNRLAEMPGVVAVAEPTSMTWLALSVALRDAGCDLSLLGARHAARLRGAITGKHKSDVIDADVLARAGEVFDLHPLQPVEPAQLALRRACVRRGGSVIDGNRHLRRLISLARWAFPDVWNGFRGSLPTAMAVLDRWPHLAQLAAARRSTLTAVVALHTRGVADVPDRVEAIRSAAAAWAAFWEGHLDLDALAFDVTEHLTDIADAKARTERATGQAQRYWRQLYGDDDLLLSLPGMGPVTASVIRGFLADGTAFASGKAAASYVGLNPSTWSSGTVSQPSRAITKEGPAVLRLAFFQAANAARRQDPQLAGFYHQLMTEHGHCHTQACVAVARKLAERTWTVLTRGTPYQIRDLDGQPISRLEAKKMIKQVCTVPDQVRAKARAHSAATNRAKLTR

SEQ ID NO: 52533 - protein, 343 aa, unidentified
MQINVLGIDLAKSVFQLHGVDVNHRAVLKKQLSRAKLPEFIAKLPPCLILMESCVGAHAWGRKFKSFGHAVKLIAPEFVRPFVKSNKNDAIDAEAIVEAGIRPNMRFVAINTIDQQDLQVIHRVRERLVRQKVSTMNQIRGLVLEYGIVFPKGKNSIGKYLPELLSSPGNASLMTDLTRTLFTELLEELRVIMERVMEYDRKIEAIHKAHPVCQRLATIPGVGPLTATAIIASVGDPKMFENGRQLSAYLGLVPRQFSTGGKDRLLGISKRGDPYIRKLLIHGARTVVQWVDKKENPKSQWLKKLIARRGINKATVALANKNARVIWVLMAREENYRESAKAA

SEQ ID NO: 52534 - protein, 395 aa, unidentified
MFIVGIDIAKRSHEAIIITEDGQVVRKAFSFRNNCTGYNLLLEQVRRLTLVKSQIVFAMESTAHYWLALYARLLKDGYTVMVLNPIQSHSLRELYIRKAKTDARDSLIIADLVRFGRCKASNVPQDKILALRELCRSRAYLVDMAADLKRKLIALLDRIFPEYESLFDSVFSKASIAVLSKYSTPQKVKNANLRKLTDILMESSNGHFGEWKAHQLKEAACSSFGIDDSDGVYSMLLGMFLEQILSLTAQADSLEKQISVFFQEFNNPLTSIPGVGTVLAATILSEIGDITRFSSAAKLLAYAGLDPSVKQSGEFKSNQNRMSKRGSPYLRRAIWLASTVAVHRDPMFQTYYEKKISEGLHYMNVIGHVSRKMTAVIFAVLRDGQPYQPILQSAG

SEQ ID NO: 52535 - protein, 420 aa, unidentified
MKEPNIGDFACLIGIDWADRKHDFCETDDQGKTYAYGVISSKPEAIHDWVMTLKERYPNQRIGISCELKKGPLVHALLKYDHLTIFSINPSTVAKYRKAFVHSGAKDDPSDAKFQVDILRLHMDKLRVIEPDSADIRALGQLVEYRRKLVQDRVDLSNRIAGILKSYYPQPLEWFKEKDTIIFCEFISRWPDLASAKRARKSTLINFFNQHNSRYSAVNENRIASIKSAFALTHDEGIIDPNRLMISLLVPQLKLLIEAIDVMDKDIKTRYKAQKDKAIFDSLPGAGPQLAPRLLVAFGSNRARYETAADMQKYAGIAPVIERSGKKSWTHWRYSCPKFLRQTFVEWAGQSVRFSFWAKAYYQQQIEKGKPHNTVIRALAFKWVRIAFSCWKTRTVYDESKYLEALKKRGSPLLQYAANS

SEQ ID NO: 52536 - protein, 373 aa, unidentified
MEETTKVYAGLDVHKDSIAIGVAERGRAPGRAVGQTAHDVPKLLKQLSKLGNPAEVHVVYEAGPTGYGLQRALEAKGYECEVIAPSKMPRRPGDRIKTDRRDCVQLAECSRAGQLRAVWVPRPEDESMRDLTRAREDAVNSRRQVRQQLQGFLLRHAVRYTGKTSWSKTYYRWLGKLNLGDGAAQTAFTEYWRAVQAGDERVQRLDQALLDAVKGWRLEPVVLALQALRGIDVTSAIGLVAEIGDLSRFEHPRQLMGYLGLVPSEHSSGDRVSRGSITKTGNAHARRLLTEAAWSYRFNARISYAAQRRQEGLSEHVRTVAWKAQLRLCKRFTMLDRRGVQRNKVCVAVARELAGFVWAVAAAANSSATNTQH

SEQ ID NO: 52537 - protein, 342 aa, unidentified
MEERYYVGLDVSKDATAICVRRTDGGVDRACEVATEPDVICAALEDFRGSLARVVLETGRMSNWLHGELTLRGLPAICVDARQAHAVLSQMHNKTDANDAAMLADLARTGFYRKVEVKSRHAQERRALLLARDAAIGARRNAENTIRGLLASFGLRVPAQPRTYEGRIRAVLEDQDGLTPIILPLLAVRTEALRQAAALTKELVRQVKASDACRRLMTVPGVGTVAAATFVATIDAPGRFAKSRSVGAYAGLTSRRHQSGAVDYGGRISKRGDRLLRTMLYEAANALLCRVKPGRGQALRGWAMAVKQRTSHKKAVVALARKLAVIMHAIWISGDVYQEREA

SEQ ID NO: 52538 - protein, 377 aa, unidentified
MKKVRFLGLDVHAETITVAIAEPDGEVRSLGTIPNGEESVRKLVKKLGPAEQLQACYEAGPTGYVLYWQLTGLGMKCEVVAPTLVPVKVGDRVKTDRRDAMKLARSYRAGDLTAVWVPDAAHEALRDLVRARESAKQDQLRARHRLSKFLLRQGRRAPLGVRPWTLRYMQWVREQVQFEQPAQDYTRLDYLHEVEHANDRVRRLEEAIGEAVKLVPVTMREVIQALQALRGIAQISAVTIVSELGPISRFAGARQLMAYSGAVPSEESTGQRIRRGAITKTGNAHLRRVVIEAAWAYRHRPAIGATLHQRQQGVCEEVKEIAWKAQHRLHKRYRSLAAAGKNQPKVVTALGRELLGFIWAIGVHVERDASPQHQWAA

SEQ ID NO: 52539 - protein, 344 aa, unidentified
MHIASIGIDLGKTTFHLVALGERSKVLVRKKFSRTQLLAHTANLQPSLIGLEACSGAHFLGAALREQGHEVRLIPAQFVKPYRKSNKNDFIDAEAIAEAVTKQNMRFVPIKSQEQLDVQAMHRVRDRLVQRRTALINEIRGFLLERGITFPAQPIHLRQNLPTVVEDCEQNLTPRLRWLLDRLWQEWKQTEIDIETVTDEIERIGSEDERCRRLRQIPGFGPLVSTAMVAAIGNGAAFRRGRDFAAWIGVVPRQYSTGGKQKLFGMSKRGNIYLRRMLIHGARAVLFRVKYDTGGLGQWVHRLSQRAPRNKVVVAIANKLARIAWAVLSSGKDYRHQPLQRAAA

SEQ ID NO: 52540 - protein, 318 aa, unidentified
MKMVKRSIVSAGIDTSKAKLDICVHGGTAFTVANNETGWKQAAAQLGEAGVVRIGIEATGGYERGVTWSLRQSGFIVVVMQPLQIKAFAQLLLKRAKNDRIDAVLIAACTHVLDAVNKFPPDARFEALGDHLTSIEQWEEDIVRLKTRLEHIHDSRLRRIVEGDITRLSKRRDAELLRLQSALSQYEDLTRRFDLVETVVGIGARTALSIVIRMPELGQVSREQIAALAGLAPFVHQSGKRKGEAHIGGGRERVRRAVYAASLAGAFHWNPQLKATYQRLRARGKCHKQALVACARKMLIFANTVVARDTAWEAKLAA

SEQ ID NO: 52541 - protein, 312 aa, unidentified
MTSQIFAGIDVGKDALYVNCFGSTEVRRYANNQKGIEQLSGWLIKREAQLLVMEATGGYERLAATLLRQSGHAVSVVNPTYIRRFAQGMGSLAKTDAIDARTIAHFASVKRPQAQPGKTAAEERLSDLMERREQLIGMLTMEKNRFSNAPVVNQPFLRSSIAFLEQQIKELDQLVDDLVNQSPQWQEKLACLSSFKGVGKVVAVTLLADMPELGSESRQSIASLAGVAPINHDSGRMKGRRSTFGGRSRVRRVLFMAALSAIRSNQRIKLFYEQLVAIGKEKMVALVACMHKILTILNAMIRKGEFWNPLIA

SEQ ID NO: 52542 - protein, 415 aa, unidentified
MEVLYTRCCGLDVHKSTITACVRIQDRSGKPCKIVRRFGAMTNDLLAMASWLMEQGVAHVAMESTGVYWKPVWNILEGQFTLVLANAQHVKNVPGRKTDTKDSEWLAELLQHGLLAGSFVPPRLIRDLRDLTRTRASLTQESSRIASRIQKVLEDANIKLASVASDTLGKSGQAMLAAMIAGQDDPEQLADLALGTLRGKISQLRRALEGLIRDHHRFLLERHLVQWRFVERETELIDQRLEQIGIEETEIAEAVARWDTVPGVDRIAAWGLVAEMGMDMEQFPSARHAASWGGVCPGNHESAGKRLGGRTRKGNPWLRRILGQSAWAAARTKNSYVAVQFRRLAAKRGRKRAIVAVGHSLLVTGYYVLRKRCLYQDLGADYFDRINGEGLKRYLVKRLESLGQKVTLEPRASVA

SEQ ID NO: 52543 - protein, 402 aa, unidentified
MNCVGIDVSKGKSMIAVMRPFGEVVVSPFEVYHTASELSELARLLKSLDGETRVVMESTGNYHAPVAWLLHGAGFYVSVVNAMLVHDYGNNSLRRGKTDKKDAVKLANYGLDHWLTLPRYVPEEDTRLMLKTCYRQYQQYSKVQTMLKNNLISLLDTAFPDANRLFTSPPRADGSEKWVDFVATFWHCECVCGLSKKAFTAKYQKWCRKHGYNFSQDKALDIYASACGRFGVMPKTNTAKLLVEQAISQLRATSSALAALKQEMQSLAASLPEYPVVMEMFGVGPTLGPQLMAEIGDVRRFHSKKALVAFAGIDAPPYQSGQMDVRSRSISKRGSASLRRTLFLVMSVILQHAPMNEPVYQFMNKKRSEGKPYRVYMMASANKFLRIYYASVKSYLDSLEHD

SEQ ID NO: 52544 - protein, 338 aa, unidentified
MTIAQAPRTYELFVGVDIAATMAEVSTQRTGAKASRSFTIDQTPEGYHRLVRKLQTFGYAPSRILVVMEATGSYWISLATHLVHEGFRVSVINASQAHHFAKALLKRAKTDAIDAQTLAQLAMVLQPETWMPPPQIYYELQQRMAQRDDLLNLRQQVRNQLHALEQHPKVIQAVRNRIESLLSTFQSQIDEVEVEIAAALNQDSAWATAAERLQSIKGVGWVTATWTLVTTLNFTTCDTVDSLTAYAGLAPMPRQSGASVWHRPSIGHSGNSRLRTAYYMASLTAARFNPVIQVFYSRLIEAGKPEKVARCAAARKLLHIAWAVVKKDQPFDPNYARG

SEQ ID NO: 52545 - protein, 316 aa, unidentified
MIEALARRSAGLDVHKRTVVCTVLIENAHGHIEKQTREFGTFRKELNKLAEWLSESEVEIAVMESTGIYWKSVYEALERKEVKAFVVNARHVKNVPGRKTDVQDSEWLAELARCGLLRASFIPPRDLRELRLLTRYRGKLVGTLKAEKNRLHKILDGCGIRLGSVVSDIDGVSAREMIDALIEGKKEPYEIVLLARGRLNKKMPELIEALDGELSDRHRFLLKQIHSHIKWLEGQVGEINRQVVAAMKPYREEWHLLQTIPGIDELCAAMLLAEIGPDMSCFGSKDHLSSWAGMCPGNNESAGKKKVVKPDRGMST

SEQ ID NO: 52546 - protein, 460 aa, unidentified
MFEETKKMVKLFKEVGFEKVLIAGIDVSKNKFTIAAVNGMYESKVKVKDIKLDKDSLNDLYREIDLIIKKEGIKQLIFGCEPSGIYYKPIVKDLMRKYPDAMFKLINPSSTKSNREQRMEREKTDPIDTYAITDLLIRGECYDLEIEDNTFNIIKEYVRELDHIVKERVRYKNKIHALTDEIYPGLESSSTSFLDSIYGKRFLKVLPKPETINNLSAEDWIRILSTSDYRLPLHQAKKLKNRSLSIVSNRHNNFKTTKEYIVFLVEGYEHLEERKEKIENKLDKLIDSLEFGKNLKEIDGIQTLTVARIIAYMGNPYRFKSGKEVASFAGLTPKSNQSGKKDKRKKLSKKGHSKLRATLVQAAQQVITSTAYFTAYYNRLVIENRKDPMVAIVATANKLTRVIMKMIHSGEKFNPPTARDKDKAKGKIKRLTSKELKIINKNKRSDSLTQDIKKLYLVRV

SEQ ID NO: 52547 - protein, 315 aa, unidentified
MTSLICAGIDVGQRSLDIGLAPSGQTFRLPNTAEALGPLVEQLRHQAVQRVVLEAAGSYAQPVVQALDAAGFAVAVVNPRRIKAFREAQGKRAKTDRLDAGLIARFALLMTDAIRPLPSAAQRALKALATRRRQLTEMIAMEKTRLKQTLEPAVVESHRAAIADLSRACATIEALIEDALAQDPRQAQDRRILTSIPGIGPRVAQVLLTEMPELGRCDRKAIASLAGLAPHVSQSGHAPPRAAIAGGRPCIRAALYMSALVAVRHDPKMKRAYQALRDSGKPAKVALVAIARRILITANAMIKAQALYNPDNQHT

SEQ ID NO: 52548 - protein, 415 aa, unidentified
MDVVHPRCAGVDISKRDAKVCVRIQGAGRARARSTVTTWEAVTNRILALRDHLIAEEVTLVVMEATSDYWKPFYYLLEDAPFEVMLVNARHTKGIPGRKTDVSDAAWLAELGAHGLVRGSFVPPEPIRQLRDLTRTRTAITRERGREVQRLEKLLEDAGIKLSSVASDITGVSGRAMLEALIAGDRDPARLADLAKRRMRSKIPELTEALTGRFGEHHSFLARLHLDLIDGHSRAIEELDERIEEAMQPFRATRDLIVTIPGISTVVADVIIAETGGDMSRFPSAGHLASWAGTCPGSNESAGRVKSTHTRPGNPYLKGALGAAAMSVARSKNTYLAAKFRRIASRRGPVKALVALEHAMLVAIWNMCSTGTYYADPGEDFFTRLHPDRARDRALEQLHRMGYAVTLEPLPAQAG

SEQ ID NO: 52549 - protein, 323 aa, unidentified
MQARQVGIDVSKLTLNTAFRDASGCWQDGKFSNDEDGFQRLSAWAGSDSIFTMEATGRYHVNLASFLYRDKHRVNVSNPLQVKRFCQMQFRRTKTDRADARMIAEFAVFNGSVLTAWQPSDAGLAEAQSLQTAVRLLIVHCTAMNNCIQALRLTDAGRKAALALAKILRSERKLIKVMEAEIAKLVSVSYKEEYQCAMSIPSVGTKTAAAVILATGGLALFDSSKQLSAYFGMSPRQFQSGTSINGKGHICKMGNPHVRALLYMCSVSSLRHNKVCKDFYDSLVAKGKPKKVAMMAVANKLLRIIFAVMKSKTPWNPEVAAAH

SEQ ID NO: 52550 - protein, 359 aa, unidentified
MNEITTVGVDLAKEVIAVCAADRSGKSVFTRVFCRDAFAAWAVQLPPCVFGLEACGAAHHWARWLASHGHTPHLMAAEFVKPFRKSRATKNDRNDAEAVLTAVRQPNMRFVTVKSVEQQACLAWHRMRQGFSEERTALINRLRGLLGEFGIWRSRSAEVLTRALPALERDEALPLLVRRLLGEARPHLVRLDEAIIACEVEIKSHIKTNAAARRISAITGVGPLTAAAVLATVTDARDFKNGRQFAAWQGLVPCQDSSGGKTRLGHITKRGDTYLRGLLTQGARSALQAALTKEPLRRSHLQAWIVQLHARVGYHKTLVAIANKHARMIWAILAKGEDYDPDAWRRWSRPTPATSGVTP

SEQ ID NO: 52551 - protein, 429 aa, unidentified
MSYRIAGIDVHKKMLAVVVSNVEVESEFRFERRMFGSNPEQLRTLAAWLLEQEVEEVVMESTAQYWKPVWETLERYWKPIREKREGASRKSGTLHLALAQSNRGRRGRKRDFPDAERLVKRLVARELTLSFVPDAEQRLWRTVTRRKYQLTRDRVRLQNQLESLLEEAHIKLSSLVSDMLGASAQRMLKALADGETNPAALAALADRKLRATPEQLCDALGACTDLKPVYRRLLKMALEQLQFLEQQIGQLDQEMASLLSPHQDAVKRLAEVPGLGVDSAQQIIAEVGPTAATFPSEKCLSSWVGACPGDDESAGVNYSHRSPKGNRHMRRVLNQCANAAARTKGSIFEIVYRRSVSRLGHNQAIGAIAHRQCRLIWLILHQGVRYEERGPAVTKQSKQNRTARMIRQLRSLGYRIEQTNPQPSQAQAQ

SEQ ID NO: 52552 - protein, 347 aa, unidentified
MSHISRIGIDTSKSVFTLHCVDETGRQVLQTNLRRAQLLTFFKKLPPTEVALEACGSSHHWARELVALGHDVRLIPPQYVKPYVKRAKNDRNDAEAICEAAGRPGMRFVPVKSADQQAQGMILKVRETLVHQRTQLVNALRGHAAEFGVIAAKGISQITALLEAIEATATVPPEARAMLALLGEEIKHLDARLEEMATKLAAAHKANPVNQLLATIPGVGPIIALSFAVEIDPAAFQSGRHLAAWIGLTPKEHSTGGKQRMGGISRAGNERLRRLLVTGATSVIRFATRPGHKVASAWLLNLLQRKPRKLVAVAPANKIARTAWAMMVSGEVWRRPSAAAQAAAAAA

SEQ ID NO: 52553 - protein, 306 aa, unidentified
MVEERFSADRESLARWAEPWRGRVVAVAIEATTGRRWVWRELATRAFEAEPLQARALLGRRRSAKTDRLDARWLARLLAKEMLPESWIPPAEIQQLRDRTRLRKALAEDRRRWGQRLHACLLHEGWPCSRSNLLRPPGLRWAASLKLPRHARLQVDSLLAVMAALEAQLDVVDTELRCFARTDARCQALQTIYGIGPILACHLLAEIGEARRFHRADQITRLAGLDPVVDESGDSRRRGKLAKAGSPHLRWALNEAAVHAHRPTAPDLALYRATCERRDTTVARLTIARKIGKRAFHALRELELAA

SEQ ID NO: 52554 - protein, 334 aa, unidentified
MENIALIGIDLGKNSFHIHCQDHRGKAVYRKKFTRPKLIEFLATCPATTIAMEACGGSHFMARKLAELGHFPKLISPQFVRPFVKSNKNDFVDTEAICEAASRPSMRFVQPRTESQQAMRALHRVRESLVQDKVKTTNQMHAFMLEFGISVPRGAAVISRLSTLLEDSSLPLYLSQLLLKLQQHYHYLVEQIKDLESQLKRKLDEDEVGQRLLSIPCVGTLTASTISTEIGDGKQYASSRDFAAATGLVPRQYSTGGRTTLLGISKRGNKKIRTLLVQCARVFIQKLEHQSGKLADWVRELLCRKSNFVVTCALANKLARIAWALTARQQTYEA

SEQ ID NO: 52555 - protein, 353 aa, unidentified
MDKYIGIDVHAASCTIAVVDARGKQTGSHVVATNGQEIVECLRAIPGQRHVCFEEGTQSGWLYEILEPHAVEVVVAGVGAGSRGPKDDKRDAFGLAEDLRQGAIKTRVFKNGGPYKALRELARTHRMVVRDVVRTKNRIKSMYRSRGVAVAGKSVYSSAGREPWQEQLPEACRGPVRTLYAELDALEEVRNDAEKALVQEARKFPITKLLSTCPGLGPIRAAQLVPIVVSPHRFRTKRQFWSYCGLGIVMHSSSDWVRDKNGQWQRAQVQQTRGLNLTHNHHLKAIFKGAATTVIAQHPDEPLNLAYQRWLAAGTKPNLAKVSLARKIATIVLVMWKTEEEYDSSKHNKTVSP

SEQ ID NO: 52556 - protein, 337 aa, unidentified
MQLYCGIDLHSNNSVISLVNEDDKVIKEKRLSNDLPTIEHYLKPFQDSITGIVVESTYNWYWLVDGLVDLGYQVHLANTLAIQQYNGIKHTNDETDARFLAHLLRLDILPTGFIYPKAMRYVRDVLRRRLLMVKQSTAQLLSLQSLISRHTGKTLASQKIKQLALDDLKKYLSDAAVVFSATQSLQLWQQLQKQISEIESFVLSQCNQSDFSIITSTPGIGKILGMTILMETGPIQRFPQVGNYSSYARCVPSSKISNGKVKGHGNTKNGNRYLAMAFVEAAHYATIWNPTIKRYYQKKCSKRPVMVAKKAVANKLTRACYHMLKENELFDIKRAFG

SEQ ID NO: 52557 - protein, 347 aa, unidentified
MRFFTDRHQNYCGIDLHARSMYLCVQNLEGKVVLHRNMQAGPEQFLKAIEPFREDVVVGVECIFTWYWLADLCAEHNIPFILGHALYMKAIHGGKAKNDRIDSRKIAALMRGGTFPVAYVYPAKMRATRDLLRRRNHLTRKRAELLSHIQNTNSQYNMEPFEANISYKKNRIGVAEQFTDPDVRLSMEADFELIALLDELKNRLELHITRNAKDHDPQALYRLRTVPGIGSIISLGILYEIGDINRFARVQDFASYARLVKCARESAGKRYGAGGGKIGNAHLKWAFSEAAVLFLRGNPEGMKFKKRLEKKHGKGKALSILAHKLGRAAYYILKRDQAFDMSKFLKS

SEQ ID NO: 52558 - protein, 394 aa, unidentified
MSNVIMIGCDLHDRNMLLRYALGTSEPQQLAYDNDACGRQRMIARLKSLAQKNNAERIVFAYEASGLGHGLSDQLHDEGIECYVLSPTHLPKTPKSARLKTDAKDAQMLLEQLRGFVLAGNQLPVVWTPPQRLRDDRELVRARVDVADELTRVKLKVTTLFKAREIKITSPTKCRWTKAFIAWIRDDVIPSLDLAVGVKLKLLLDRFEMYRKEQAELDRALSKLSKEPRYKVPNAELRKLPGVGQLVAMTFLTEMGDLNRFDNRRQVAAYLGLCPSSNESGQKNDRKGRITRQGPARLRKMLCQAAWVSVIRCEDAAAEYHRIKQNQRSRSKKALVAMMRKLGIKMWHRALACGVSSELEGRDRPGGKNFAPARQRDMSPPSLSPSLQPIGHAG

SEQ ID NO: 52559 - protein, 370 aa, unidentified
MLNTTTFVGLDVHARSIKAVALDAMTGEVRSATFGYDAAEVAGWVSSVDPSAKCVYESGVTGFDLQKRLSSMGIDCVVGAVSKMIKPPADRKRKNDRNDAEFLARMLSVGNVVEVWVPDDGCEAARDLSRALDDAREDLKRCKQRLSKFLLRHGYVFSETTPTGRRKGNWTAAHWAWIKSISFPEKADNDVLAYYVDAVRQAMEDKARLERLVEAEASKPRWKRRIDSIRCLKGIDVTSAADLVFEAGEFSRFKSARSFAAWLGLTPSEHSSGESVRQGGITKAGNKHLRRVLVEAAWHYLGCSPHSKDLAKGQAPDPGARRHAAKGVRRLVGRRAAMLERGVHKNKANVATARELACWCWAVGRMIENG

SEQ ID NO: 52560 - protein, 399 aa, unidentified
MRDQKVSHMGMDCHKNFSRVTARDASGQVLWRGRLEHRDRAALRAELSQWPKVPVVLEGTFGWGWISDELSRAGQEPHLASGRKVAGWREVRGIAKSNKLDADLLSELWTQPQRWWEVWLAPPTVRDGREWLRYRMGLVGMQTAIKNRIHATLHRHGIFCDESDLFGKAGWRFLQQLAHADGATLRDSTRRTLGGYLQLLKSIRQMIAQVTRELRRQVRQSTQAQLWRSLPGINWVLAYTIAAEIGPIERFANHKHLASYGLVAAMADDSGEEDVTTPVGRHVGQIGRRTLKWALIAAARNAVRKDQHFRDIFNRRSDEGKRDKGRSYIAVARALCRVGFSCVKNQRPYSPTPPPRPGTKAKTDSAKENNDALANKVLNGSTSRPGMGQSERGLVAAGR

SEQ ID NO: 52561 - protein, 376 aa, unidentified
MTKIIRIGVDTSKSVFVLHGVDAAERPVLRKQLRRKQVLEFFAGLEPTKVGLEACGAAHYWARELRALGHEVVLLPPQYVKPYVKRNKNDAADAEAICEAMSRPTMRFVPVKTAEQQAALMLAGTRDALIRRRTQLTNAIRGYAAEFGLIAARGLDKIEPLLARIAAHGSLPRLAQELFETHAREYARLKAEIRTIEAELTGWHKRNELSRRLAEVPGIGPIGATLAVMKVPNPEAFRCGRDFSAWIGLTPKDHSTAGKMRLGVITRAGDEALRSALVAGATAVIRHVKQGKGHPSPWLIELVRRKPAKLAAVALASKNARVAWKLMVSGERYNPTRSLAVPASGGRGAALRGAPRRAPRSHPHDKPCETTAMILP

SEQ ID NO: 52562 - protein, 414 aa, unidentified
MDVLVERCAGLDVHRDSVVATVRVPGKRRGTRRGETRTFATTIAGLERMADWLVGEHAVTLVGMEATGVYWKPVFAVLEPRVECWLLNAQHLHNVPGRKTDVADSVWIAQLVEHGLVRPSFVPPAPVRDLRDVTRLRTAITQERTRAIQRLEKVMQDAGIKLTSVASQAYSKSARAILSALLAGVSDPVELAALAKGRLRSKTDRLVEALANRFRITHHGVMVRRLLAHIDSLDDQLAALDEKVTAMVAPIAELVDLLCTIPGVAPNTAHVLLAECGWDMSVFPSAGHLASWAGICPGNNASGGKRFSGATRPGSKWLRKALTQAAQAAARGKGTYLAAHHAQIRGRRGSAKAIGATRHDILVAFWHIVRDKVPFRELGPDWAARRFSIEHRTDRLVKQLEALGVKVTIEPDAA

SEQ ID NO: 52563 - protein, 388 aa, unidentified
MTCLFCGIDVAKFEHVASIYDPSTGEFLLDSLHFTNNDEGFKSLLAHLNTYKNYEILIGFESTSHYHQTLFHFLTTHHFKCYLINPFITSKFRSFSLRDSKNDNIDSRAIAHFLSFDYQNLIDEKYQINELKELSKSRDSLMTESARMKIKLKSYLDRVFPELEGIVDINRKAIRAILKEYPTAEDIAGVRIDRLKNIASDASQGKFNPSKIERLKEAAKSSVGFYSCAIGLNIQICIETLEQKERQIDVIEKAICSHPTIKDSPLHQLPGINDIEISYIMSAITSITQFSSPKKLVAYAGLDPKVRQSGTWSAKTTRMSKRGNKLLRYALIWGSYNMTRKGGPMKSYYDQKRSQGKSHYNALGHCAAKLCRYIFWILNHPKEEFKYQ

SEQ ID NO: 52564 - protein, 328 aa, unidentified
MKLQHIIGADLSKESIDLVSHQLQTHLKIENSINGFPKMLKWFKQQKIKCSNVMIVMEHIGLYSYLMEKFLHQHRIGFVKVSALAIKRSLGLARGKNDKVDAQRIARYGFEKKDVLVPTTKPNDAIKRLQMLHSTRGCLVKHRASLKCAIKEYQNMVKQSDLIIQSQLTLIKRFTQQIKKIEAEIAELIRKEQAVNQNFQLLKTIKGVGDVVAATAIIKTGNFTKFANARKFACYCGTAPFEHSSGKSIRRKTRVSHLADKEMKTLLDQSAKSAIQYDKELNSFYHRRIAIGKSKKSTINIVRNKILYRMFAVIKRQTPFSENYLQAA

SEQ ID NO: 52565 - protein, 371 aa, unidentified
MKEIKRYVGLDVHKDTITIAVAEGRRDGEMRVYGQISSDLRSLEKALRKIRGEDGELHVVYEAGPTGFVIQRRLTALKMECIVVAPSRLPTQKGQRQKTDRRDAEQLARLHRAGELTAIYIPDATDEAIRDLTRARSDAVHDLTRARLRLKSFLLRHGYHYTGKANWSEAHRRYLRELELPVVALKSVLEEYLLAVTQAEGRIARLDELIAVQVLSWRRYPAVEALMCFRGIKLTAAAVLVSEIGDIHRFRHPRHLMGFLGLVPQEASSGQTRRLGGITKSGNAHARWMMTEVVQHALLPPKVSAQLSERQSGQPDRYKELSWQVQTRLHKRGWHLLQRGVMKAKVTMALAREMTGFVWAMLKQVPATEPR

SEQ ID NO: 52566 - protein, 345 aa, unidentified
MNIAVIGIDLGKNTFHLVALDTAGCVALRRKVTKRKLIDLTAALPPTLIGMEACGGAHQLGRLLRAQGHDARLIPAQFVKPFVKSQKNDFLDAEAIAEAVQRPNMRFVPIKTEEQLDMQTFHRVRDRLVGRRTALVNQIRAILLERSLTFPKGRSGMARLLAELLAADTAEISSGMREWLSLLWEEWQDLEQRINTLTDRIEAAAKQNEVCRKLAAVPGIGPLTATALVAAVADGSMFRRARDLSAWLGLVPQQRSTGGKPKLLGISKRGNSYLRRLLVVGAQSARLNLDRERHPRLGEWLTRLEQRVHRNTAVVALANKLARTAWVILRQGRNYDPTFGLPAVP

SEQ ID NO: 52567 - protein, 470 aa, unidentified
MAVVMIGVDPHKASHTAVAISAAEEPLGELRVRACAAQAERLLAWAAAWPERTWAVEGAGGLGHLLAQQLLAAGDRVVDVPPKLGARVRLLAAGDTNKNDPNDARSVAVAALRSAGVREVRSDDHAVVLKVWSKRYRDLGRTRTQVVCRLHAVLCDLVPGGVSRPIYASHAARILQQITPPDAVAAARCELAAAFLEDLRRIDAQLRETRKKLAVAVQAAGTSLTGLFGVGPVIAAAVIGDVRDVSRFGSRDHFAACNGTAPIEVSSGPRKIYRLSRRGNRRLNHAIHMAAVTQVRHRHSQGRAYYDKKLAEGKTPKEALRSLKRQVSNAIFACLQADARRAAAHAEGPGGQQGNGSAACAAGLHPRHRLFGQATPGPGHHTTTAAASPAPGPAHARGGAGHSPVAASVPPATPQGQAERLQPSEDERPGGAARRRPHPAARKGRGQRSPAKTQRPKGTSHAAKRTDGTP

SEQ ID NO: 52568 - protein, 410 aa, unidentified
MSKFFGLPVVGIDVSADFSMVAILAPNGDVYRMAFKITNDIKGFSYLLEEMRKVEEEFSLKPVLFMESTGIYHLTLFHFLKNNEFETFVINPLVTNSNKNFGIRKVKNDKKDALSIANIGKYQNIKMSDYLDVNIFAIKSLCRDYYGFVDNRSDYKKKLSADLRIIFPGYNTVFSDTAGVSSLAVISKYPTPRDIIDSPKDEVIDIIKKASRKGITWSENTYTKLLSVSQDASQISFCSNTLKTTITINIKLINTLDEQIAALLDEIEATIKSDDTPKEFRKNIELLLSMPGLGFISAVTIMSEIGNFTRFNKPKQLVAFFGIDPSVNESGQFKGNKNKMSKRGTRFGRRALYAAALACIRKTKKGIPINSVLYAYKNNNLNGKKKSDPWSNNAQNTKIHIFNTKRSKAL

SEQ ID NO: 52569 - protein, 338 aa, unidentified
MVLIGVDPHKGSHTAVVVDAEEREVARLKVRADRQQLEQLLSFAADYQPRTWAIEAAGGLGYLIAQQLVAAGEDVVDVPPTLSARVRLLGSGRGSKNDPNDALSTAIAALRDRQLRTVAPENHTMVLRLLADRHQDLTRLRTQAVCRLHALLAALTPGGVQKRLSANDAAVFLRRVHPTNAVETERKSLALELVADVRRLDRAILAVKARTKTAVAASGTTVTDITGVGPIVAALLVGHVGDVTRFPDAGHFASYNGTAPIEASSGPKVRHRLNPRGNRQLNHALHIAAVVQIRHDSPGRDYHQRKLEEGKTPKEALRALKRRISDAVYKKLIADTRS

SEQ ID NO: 52570 - protein, 400 aa, unidentified
MIYVGVDVGKSKHAAAAVNEAGACVLQPRFFTQDAGGFASLFGAFKECGGPESVVVGMEATGHYWKVLRHALVARQYRVDVINPLITSREASADVRGRKSDKLDALAIANVLRKGGYSPAPAALAAMDTLKALARHRKALVERSSDAKRRLIAGLDVAFPEAAKTLGDLFGAASQAVIKAFPSARLAAAADIRRLTSLFDKASGGQLGREAAEAYREAAKRSLSLNMHTEGEEFVIAQIVDELRAAAVQIAEVERRMQAEPQPQLASLLGSIKGAGKIQPMAVAAEIGDPSRFAGADMAKKVLAYAGCDPRVRESGKWKGRTKMSKRGSPSLRHALYLLAGTIRLHTPAFNAVYKRQIAMGKHHNVALSHVVRKIVEVMCGMYKTNTLFVPPQTEATPCQ

SEQ ID NO: 52571 - protein, 348 aa, unidentified
MAYFVGLDVSVKETSVCVVDDSGKVISEQKVLTEPDNIITLLTSIGETYARIGIEAGPLSQWLVNALIAADLPVICVETRHMKALLTAQQINKTDRNDARGIAQMMRVGLFKPVHVKTLVAQEQRMLLTSRKLLQRKLLDVESDLRGTLRNFGLKVGAVSGGRYDARVRELVEGFPGLAAIVEPLLTVRRVMRQQFAVLHKMLLDTVRDDPVSRRLMTAPGVGAVVALTYRATIDQPQRFVHSRAVGAHVGLTPKRYQSGEIDYDGGVSKCGDALLRTMLYEAAQTMLTRAKKWSWLKAWGMRVAQRRGIRRAIVAVARRLAVVLHRIWVDGTEFRWSKDSATVLNAA

SEQ ID NO: 52572 - protein, 350 aa, unidentified
MVMIGTDSHKRTHTVVAVDDVGRRLGVKTVGTNSEGHLELVRWSAQFDEITFALEDCRHLTRRLEADLLAAGRRVVRVPTKLMAGARRAAREPGKSDPIDAEAVALAALRHPDLPVAELDGPTREVKLLSDHRHDLVVQRTRIASQIRWYLHELDPDLEVPSRGLRRHCVVAELAVELDRFDGLVARLTRNLLARCDELNHQINALETELRGLVRAIAPTLLAIPGCGVLTAAVIIGETAGVHRFRGKDAYARFTGTAPVPVWSGASAGKVRLNRGGNRAVNCALHMIAVTQARGIGPGQAYLAKQQARGKDKTAALRLLRRRLSDTVFTALRADQQHQTQATPPVAIAA

SEQ ID NO: 52573 - protein, 371 aa, unidentified
MKQSTMTYVAMDTHKNTISVAIAERGRGGEVRFIGEIPSRPESVAKMVDRLAAKHDKLSFCYEAGPCGYGLYRQITMLGHECVVVAPSLVPTRPGDHVKTDRRDAVTQASLFRSGELTPVWVPDDAHEAMRDLCRARQAAMEALRRARQQVLSFLLRHGRVYSDSGHWTRKHRLWLSVQRFDHPARQIAFEELVQAVEEAQGRRDRLAKQMQELTPSWSLAKVVTAIQALRGVALIAAITLVAEIGDFHRFANPRQLMAYLGLTPSERSSGAKTLRGAITKAGNTRARRMLVESAWTYRLPARIGAQILERNEKLPQPIKDIAWKAQVRLCARHRRLARGGKPANVVNVAIARELAAFVWAIATNEHVGLA

SEQ ID NO: 52574 - protein, 412 aa, unidentified
METIVERPAGLDVHKAQVTACVRTPAADGGREEHFAEFSTTVSGLLVLRDWLAAHRVTQVTMEATGVYWKPVWAILEDEFELVLVNARHVKQVPGRKTDVSDAAWICRLAEAGLLRASFVPPKPIRSLRNLTRYRKTQIQERSREANRLHKALEDTGIKLDCVATDILGVSGRAMLAALIEGTTDPEVLADLAKRRLRSKIPALREALEGRFDHLHSVWIGAILAHVDFLDEQIASLTETIGEQIAPFESAVELLGSIPGVQRRTAEVLIAEIGTDMSVFPTAKHLASWAGQCPGNDQSAGKRRSGKTRKGSKWLDWALEESALAAVRSKDVYLAAQYQRLRPRRGHKKALGAVKHSILVACWHMLSTGELYRELGGDFYRKRDPERVTKRLVAQLEALGHRVTLEEEPVAA

SEQ ID NO: 52575 - protein, 360 aa, unidentified
MRTVVRRPAVGQDVWIAMDVARSKWAFNVRWDGVEQRRLSTPGSIEHLQALVEPYAECRVHVAYEACGFGYEIAWWCQMRGITVTVIPPSTLERAPGAQVKTDRVDAARMNVKHEKGLLKCVHIPSRTEHEQRQLSRTYGQVLKDRKRAQMRLRSLLQEHGRLGPAPNAGWASYERWLRGQEMPAPVALCIAPLLAARAQAAQATLGLRAALRQLARQPEYKPIVQRLSQQAGVGWFTAIRLMLEIGDIGRFTTADSFVHYLGLTPSEYSSGDMVHRGHLLKCGPGFVRGWLLQCAWAAATGKSPDPQLAAYYQRLVGRVGKKRAIVAVARRLALRLRARWLEELAKADRSKEAGQQSAA

SEQ ID NO: 52576 - protein, 308 aa, unidentified
MTSINYIAVDIAKDSFEVFSEFFKGSYLYTSESLKILVKQIRSVPSPLVVCEATGGYERELMFTLFKQKIPVARVNPFRVRAFAKSDGIKAKTDPIDASVLLRFSKEKNIKPTPPPSPKQQALSELMDRRSQLSGNLASEKNRLKMCTKRIQRSIEKMIRFTGKEIKLIEKQIKEIIKDDEIMCSQRKIMLQVKGVGETTVWSVLAYLSEITSLGRNQLVALAGVAPYNRDSGKWKGKRRIEGGRAKLRKCLYMAATSAAVHNPHIKAYVDGLRARGKPYKCAIVAAMRKLLVYMQSLLKSSQKELVS

SEQ ID NO: 52577 - protein, 338 aa, unidentified
MEIFYLGVDVSKKKLDLCLRKDGKEKLYDVIPNDIRSISRWLKGQQCLNGVPFSSFVVCAEYTGMYTYPLVMASSSLGVRLCLEDGARIKYSDGIRRGKSDSTDARLIASYAERYSDVLKPCRQEGEEVSELKRLYSDRSMLITDRSKYAAQLKDQKNFTDKRIYREKFSMFRRLIAELDRCIADVESKIRAIVCGSPLLCRCSILLKSIDGIGEWMSVKMIIETDAFRSFDFNPRKFCCHAGVAPFCYTSGSSQRSRSKVSNRADKSIKWMLHMCALSCIRMNGSPLREYYERKVAEGKNKMAVINALRAKLVFIMFAVVKNDTPFDRFFQNNLCKP

SEQ ID NO: 52578 - protein, 324 aa, unidentified
MQGKDTPEAKAEVQVYVGLDVSKAAIDVYLHPLGHVFRVSNTNQGLRQLKSRLAGLAVVLVTIEATGKFHRQAHRTLHAAGYPVAVVNPLRSRLFAEAIGKLAKTDPIDARTLAIMGESLKLAATPPPAALIAELQELVLARRAAVTERTVLENRLGAAQSKFLVTDIKQLLKAVERHVAHLDTEIDRLIAGDPALARRQAILTSIPGIGRVVASTLVACLAELGMLSSKAIAMLVGLAPVACDSGESKGRRRIRGGREHVRSPLYLAAVSAVRCNPDLKAFYRRLRDEKAKPAKQALTAVARKLVTLANTLVHDDRLWVEKRA

SEQ ID NO: 52579 - protein, 413 aa, unidentified
MTLGIDIGKYNHNATLLDDQGRKVFHNLTFDNNQQGVDALFNSIEKANLSTKGILVGMEATGHYWMNLFAKLHAYDFAAVELINPIILHARRNETVRGAKTDRLDAYRIAKYLRETDHRVCALAEDEVAELRQLTRLRYDLMQNATSEKLRIIGLLDQVFPEYSDQFQNIFGVASLKVLEDFPTAEAIAKVDLRRLSGILRKSSRGRLGRDKAQQLKKAARNSFAACNSSKALEIAVKYSIQQLNMLLDQIAQLDKLIQSPLKDLQTILKSIPGIGDVWAPTILAEIIPVFHPEHRDGARKLVAHAGLDAMPRLSGKNNNRQGGSFRMSKRGSKYLRTAVMQSACCAAILKRDPMFAEIYNRQRTRGKKHMVAVSHVAHKMLHVIFALLRDKKTYLPTLKDQSSAINKENKAV

SEQ ID NO: 52580 - protein, 470 aa, unidentified
MFSWLGHLRVLPVSNASLLDVLHTVEALIHSVRKVVLVLSRFIDDFVVGFDVSSEFSFVAMLEPSGALIRKPFRIDHNPSGFQKLLEILKNEEERLQRKPIYFVESTGIFHLPLFFFLRSNDLKGFVLNPLSVHSIKNLDIRKVKNDSKDAEKIAKLAKYQNVKFSIIPEPQVLALRMMVREYYSLSDTITEMKNRLSTDLYLLFPGYRKVFSEPYGKASLALLKDFSTPMDILSAERSILIELIAKHGRKGASWASKKVDGLLEYASNAASMPMEFSMLGIKIKICVDNIISLQKNLESIVNKIREIVNSMDFPATVKRQIELIDQLPGIGYISAVTLIAEIGDFRMFKSPKAFVAYFGIDPSVNESGKFKGDQNKISKRGTRIGRRVLFTVALTAISTKSNGEEVNPILRDYYQKKCGSKKKKVALVAVMHKLLHYIFAVLRDDKPFEVRQPEEHQSWRAAKLQLIAA

SEQ ID NO: 52581 - protein, 380 aa, unidentified
MDKVCGLDVHKDSVFACILDEQGKKIFEKRYGTLTPDLTKLRDTLVEKGCGRVAMESTSIYWMPIWHVLESDFELTLANPYFIKQLPGRKSDVKDAQWIAECLQKGLIKSSFVVDGVLRQMRQYARQHRRLTKHRVRLEQQIDNQLQRCNIRFSNYVSNQGSNVSMRKVIKALIKGERAPASLCRLVHGRTQNKHGKQVITDSLDGVIQQVDIQMLIQCMDQIDLIEKQQATCLNHLEELANEHFAKEISLLCTIPGIKTLSALFILAEIGNDMSAFSNANSLVGWAGLRPRNDESAGKIHSRKTLHGNKYLRQILVEISWSAARSQKSFLGKKYTALAKRMKSQKALIAITRKILVIIYNVLKTKQPFDHKKNMQAVIA

SEQ ID NO: 52582 - protein, 351 aa, unidentified
MYTLGIDLHKKSSVWVLIDEQRTELWKDNVLCHPKYINIAVEKIPVPPTEIQVAIEPVAGWRWVSQLLEEAGMNVHIAHPRKIQLIAKSTKKTDAEDSRTLANLLHSGFFPEAHKSREEIYQLRLLLRERTFIVRQRTSVKNQIHGIATTQGLHHIVGGNPLFKRGKVGIMNGENFVLKELHYLEEDLEKRIKPFDEKLQLEINKYPEAKILQTIPGVGVVTALTIISEVDDFKRFKTGKRLTSFAGLVPRQRSSGETIRYGSITHAGSAPLRTALVETAMRIREGNAPELFAFVKRLTPICGAKKARVALARKLLIIMWKMIVSNTSYNPKVLFSSCTTNVSDLDTGSGN

SEQ ID NO: 52583 - protein, 329 aa, unidentified
MVYVGIDVHRKRSQVAVLDEAGNQLSNRNYENSSEDLRDDLDELDPGTKVAFEAAYGWGWLADLLGECELEAHLAHPSACKAIAHARLKNDKVDARILAQLLRTDFLPEAWIAPKEIRDLRSLLRHRASLVRVRTSLKNRIHAVVADEGLKVQAESLWTQEGEAWLAHVALRPMHREIVDDCCGLLDALAIPIRRLEAEIRREASSDPRVEALRSIYGVGLITSMTLVAEIGDISRFPTARKLCAWAGLTPSVHNSDVKVRHGHITKAGPAAVRAVLTEASYQARHVAPFARYFEEVAKRRGKRIATVALSRKILARCFHVLKELETPA

SEQ ID NO: 52584 - protein, 454 aa, unidentified
MAKRQEKRECRAVVLEPDAAGIDIGAEEIYVAVPPDRDEESVRLFSTFTCDLHALADWLVQCRIRTVAMESTGVYWIPLFQILEARGLEVYLVNARYLKSVPGRKSDVSDCQWIQYLHSVGLLRASFRPSMDICAVRSLWRHRASLLQMASEHILHMQKSLSQMNLQIHHVLSDLTGASGQAILDAILAGERNPVQLAQLCNCRVKSPREKVAKALEGDYRPEHVFTLKQSLDGYRYYQKLIAELDREIQRLMQTLPSAVDAGQEIPRRTKHSAFQRQGNDPSFDLRGQLYRIAGVDLTDIPGVSVVTAQVILTEVGPDLHRFRNASAFASWLGLCPENRVSGGKVLSCKTRKVKSRAALALRLGANSLCRAKGYFGEFFRRMRAKLGTAQAITATAHKIARVLYHVLLTKEPYAETVFHRSDEHARRRAEMRLRKQAALLGLQIIPVPADSAT

SEQ ID NO: 52585 - protein, 369 aa, unidentified
MTDLTLFVGLDVHKKTISVAMVEATAGAEVRFYGTIANTPDAIRGLCKKLTKDGQQLHFCYEAGPCGYGVQRQLSRLGHRCDVVAPALIPRKVGDKVKTDRRDAMMLAQTLRAGQLTAVWVPDEAHEAMRDLVRLRAQAMRDLRKTRQQLLSFLLRHSLVSPYGHWTKMHRRWLGELIFAHPAQHLAHEEMLQRIERAEALCDRLKRAILELVPQWSLAPVVQAIQALRGVSLIVASVIVAEVGCFSRFDSPRQLMAYLGLNPSEHSSGAIIRRGAITKTGNALARTCLVEAAWTYRFPARVSQIIRDRLNGLPEPIRNVAWKAQVRLSARYRKLIAAGKPAPKVVVAIARELVGFIWAIARMVEPKFA

SEQ ID NO: 52586 - protein, 312 aa, unidentified
MEKIICGVDVSSETLDGRIGQSGPFIKVARTPEGISDLKAFCAGHGVELVVMEATGGYEKLPFGLLWSQGLACAIVNPRSVRRFAEAMGFLEKTDRIDAGIIAHYAQVKRLVGQAPASAAQERLRALVTRMRQLTQMKVVQINQRRLIGDPTVLASIDEVTAVIRRQIKAFEADIAELLGADPLWRALDEAFREVKGVAGRTVARLAAEMPEIGTLTGKASAKLVGLAPLAKDSGKRHGKRSVRGGRAHLRSILFVVAAVVCKHEPEFAAFRERLLAKGKTKMAVRIAVARKLLVRLNAKARDARTALAMAA

SEQ ID NO: 52587 - protein, 339 aa, unidentified
MDRQYVGIDFHRRRSVIVRLSADGERLGVHRIVNDPFELAAVVALCGESPRVVIEATYGWYWAVDLLQDLGAIVYLANPNALSWGDRRVKNDEIDATDLADMLRLGRLPQAWIAPPAIRELRELVRYRAKLVKLRSGLKAQVHAVMAKEGVLPRVSDMFGPAGNRQLDGLELGRPFAMRVASLRGLIAAYDREITTLERDVHQHLKGHRGYHAVQAINGIGPVSAAVLVAEIGDVSRFPTPAHLCSWCGLTPKHRESDTKTRRGRISKQGSRLVRATLIEGISRYHGGSVLNAQYQKIAKRRGRNKARVALARKVLTLVYYGLRDGEIRCLAPIEETAA

SEQ ID NO: 52588 - protein, 353 aa, unidentified
MMNITTVGVDLAKEVITVCSMDTHGHVLKTRDLRAAEFSTWLVQLPAATVLGMEACSSAHHWARKMQSLGLIPKLMAAEFVQPFRKSRSSKNDHNDAEAIAIAVKQPQMRFVAIKTEAQQARLAWHRCREGWKEERTALINRTRGLLLEFGHPLARSSKAFTVGLQAALHHDALPAQFRTLLTQVQQQLQQLDQQLAQCDRSIALSAKQDESSQRLQAQPGIGPISADAFTATVGNARDFKNGRQFAAWLGLTPRQYSSGGKTKLGRISRRGDAYLRTLLVQGAKSTLQSVLKKAPDLLSHMQQWILRLYGRVGYHKTLVAIANKHARQVWAMLAKAEAYDQEAWKRMGMANT

SEQ ID NO: 52589 - protein, 336 aa, unidentified
MEWSVAIGVDTHKDTHAAVACDRLGRQLDSLQIPACLAGYRQLLAWAEALGQPAFSVEGSGSYGVGLARFLVEAGISVVECERPHRRDRRRGKSDLIDAALAARKLVLGDGLSGLRGGGVREDLRLLLLERRSAATARTAALNQLHAVLVTAPERLRRRLDRLGSGALGHACARLRPSAESRHAAVLARLGRRVLALDRELESIDGEINERVQTLVPELLDECGVGALSAAQLLVSSGDPTRMRNEAAFAALAGTSPVDASSGKQQRHRLNRGGDRQLNRALHVITLARVRHHPPTAAYYQRLLDTGKTPREARRCVKRTLARHFYRKLREAQISP

SEQ ID NO: 52590 - protein, 408 aa, unidentified
MNPLYVGIDVSSKSNVVYFMLPDGSKHCNFSVANSHTGSSQLVKRILSAMTSCSLDTVLIGLEATSVYGDNLVYFLREDAALARFNSKIHVLNPKQVSKFKEAYNDLPKNDLIDSFVIADCLRFGRINKEVYIGDYRYKALQNLTRARYFAVSNLIKEKQRFMNILFKKYSTMTQEKVFSDTFSTTALAVYDEFESAEALADMDLHELTAFIMEKGKNRFPNPNAVAKAIQKAARSSYRLPKTVNDSVNQVLSISITSIKALEAQIKEFDKAIATQMELLPNVLISIPGIGPVFSAGIMAEIGDINRFHNQAQLAKYAGLAWKQHQSGDFEAQTTRLINSGNRFLKYYLCEAAFSLVRCYKEYSDFYHLKYKEVNRYQHKRVFALTARKFVRLVFRLLKDNRLYTSAE

SEQ ID NO: 52591 - protein, 444 aa, unidentified
MEQSTRFVGMDVHKETIVVAVTATGEVGKATAYGTFPNTGAGLEKLVKRLRQAGSGPIKFCYEAGPCGYGVHRTLTRTGEDCMVVAPSMIPRKSGERQKNDERDAASLAVLHRGGLLTAVWVPDAAHEAMRDLIRARLAAVRAVRAARQQLSAFLLRHERVYPGNRTCWTKTHRGWLADQAFAQPAQQIVLEESVEAVRLSEQRRHRVDGHLRAQIPTWSLFPLVQNLCALRGLDMIAAAGLAAAIGDPSRFATAPHFMAYLGLVPSEHTSGPKRRIGAITKAGDVHARTLLIEAAHSYRYPARIGRHKLTAVDAVPEAVRAIAWKAQTRLCQRYRQMTAKGKPNQVVVTAIARELAGFVWSIACITSDPVVSGNVVTEAYDEGTILWNEVTIASEEVARQIQQITPDTGRPRAPRHQSLKGTARRASKTGQTRAGSVDRSRTG

SEQ ID NO: 52592 - protein, 322 aa, unidentified
MIFVGIDISKLTFDVAVLIDGKYMSRQFENKQSGFLKLSQWIKSFKHPAYFCSEATGIYGLALAKHLYQTNQKVIVANPLQTHAFAKMEMARNKTDKADAMSIARYCQYLFNRGEIDKGLFIPRSAAFERVQFLVTRLDQLSKMKSQENNRSGVSLDKAAARSIQSVLTFIDKQIVVIKKEITMIIKQDEQLTVQLKLLVSINGIGDKTAWALLAYIGDISLFENSKQINSYAGLNSSIEQSGTSLNRSSLSKTGSTRLRKSLYMPTMVAVRYNPLMLAFYNKLLTKGKPKKVALIAVMRKLLVLAFGVLKSRKPFDVNYQH

SEQ ID NO: 52593 - protein, 344 aa, unidentified
MIEVYAGLDISDKQTHLCLVEPGGSVVWRGRCATDPDVIARTLSKRVNALSARLARAVLETGPLSAFLFHGLRARAVPAVCICARHAKGVLSTRVNKTDPNDAEGLAQLARTGWYKAVHVKDPESHLDRAQLRVREQLVKSHRDMANQLRGLLKLFGLRLGQVTTPAKRRARVALLLARMPALRPVLAPLLETLTALEGELAKVNKSLKTRAARDPVTRRLMTAPGVGPITALVYKSAIEDPERFARAADVGAYAGLTPRRYQSGEVDLAGRISKGGDNLLRHALYEAANALLARLKRDCALKAWGLRLQERKGAKRARVAVARKLAVLLHRLWHGACDFRWAV

SEQ ID NO: 52594 - protein, 355 aa, unidentified
MHHTQYDPARVCVVGIDLAKDHCDAVGFNERRAPVFEWPRISYPELMNRLAQLPPAAVLMEACNGAHDKARRIADLGHDARLVNATDVKAVRNTRHKNDRRDARYIATLFFLPDIKYVQVKTSAQQDRQLLIREYKGYQRIRIELGNRIHSVLEQYGIPTRQGMQRLACHLTEYLDERAEKITPILRETVLRLFESWKRALADEEAAMRRLEAQAARDADAKRLMTIPGIGAIIALYMQAHIGNPHRFKNSRQAAASIGLVPRQYSTGGRDTLLHISKRGPTALRSALIQGAGSVYIWSEKLKGALGAWVCKLKASGKKYGVIICAIASKLARICWRILRDRTVYQPNWQAAHSV

SEQ ID NO: 52595 - protein, 354 aa, unidentified
MESTADTYVGLDVHRKIVVATALDGTGHELAQEKFGPEPSELTDFLSRLPGRKHVALEACSMWAPYYDTAASTGAEVTLTNPYKTRLIAEASLKSDKVDSEALARLLRVDSLPTSFAPSPEVRALRTLVQDRVFYRRYWTAVANHTYHFLISRGIPYEDRLLKFRRKREVLRKLHLPEIDRGLATLLALEERCKELEREIHSAWVESEDGQLLTTIPGIGELTAMALVAYLCPIERFPTSRHAASYVGLVPRSYQSADRQYHGKLKRDSNGFVRWLLVEASWTHRHRERKGDVARTARRITRHRGSGKGTVAGAHKLLRIVFAILKERRPYLPHAPEPTAPTQALRRLRTTASQ

SEQ ID NO: 52596 - protein, 346 aa, unidentified
MTIVEDRRAVTGGVDTHAEVHVAAALDPIGGLLGVQEFPATAAGYAGLLGWLGGFGAVALAGIEGTGSYGAGLARHMAAAGVRVVEVDRADRQDRRRKGKSDPLDAVSAARAAQSGRAAGAPKGRDGAVEAIRALMVAKRSARNERTQAINQARSLIVTGPDDLRARFAKHTTAALVAETAALRPRPGDVPGYATRIALRELGRRAQFLDAQIGHLDELIVPLVTARAPSLLALHGVGPDTAALLLIAAGDHPERLRSEAAWAHMCAVAPIPASSGKVRRHRLNPGGNREASHALWRIVITRMSNHPATRAYAGRRTTEGLSKKEIIRCLKRYVAREVYPHLRPAG

SEQ ID NO: 52597 - protein, 376 aa, unidentified
MNQHITVVGLDVHKATVVAATLPPTADRPTQTVTIENSPKAIERLVQRAPADGRVIFVYEAGPCGYQVHRQITELGRKCVVVAPGLTPVRPGDRVKTDRRDAAKLARLYRAGELAEIRVPTCAEEAARDLVRVREDALEDRLRARHRLSKFLLRQGRVYHETKAWGVAHRAWLRGQRFEWSSLQQTFEGNLRAVEEAEARLESLDQQVLDFAKSGPYRTAVHYLRSLKGLETLGAVTLAVEPAPRPLAETLDFGRFERAPVYMSLTGLVSSERSSGGKEHRGSITKAGNAHLRRILVEAAWSYRLGNTVSPELAARRRACPPEVVRIARKAQDRLHRKFWRLVSRGKPSQVAAVAVARELAGFVWAIAQQVPAAAS

SEQ ID NO: 52598 - protein, 396 aa, unidentified
MEKIITNRERDVERHGGLQIDHQTDVYDLYVGMDVHKATIAVATALPGRESAQFRSQISNTPKSVEKLIYKLRQDTGSNRILFCYEAGPCGYVLYHQLQSLEHDCMVIAPSLIPRKPGDRIKTDRRDAIKLATSLRSGDLTAIWVPDDDQESMRDLTRARDDMKCQERKARQQLNAFVLRHGYHWPGNRTRWTKTHFNWLETITFEHPWQQIVLQEYVDAVKAATQRVSGITEQMMKALSEWSLLPVVNSLVALRGINKITAMVILAELGDLRRFDSPKQLMAYLGLVPGEHSSGSSRRQRGITRTGNTHARRILIESAWCYRFPARQTMYMKRKSIGASNQAKQIAWKAQKRLCGRYRDLSRSGKDMRVVCVAVARELLGFIWDITRIEMPKAVV

SEQ ID NO: 52599 - protein, 478 aa, unidentified
MKENHRRCCGIDVHKNSVTVCVLAPVGQRHIETKKRKFPTFTRDLKQLRAWLKNCQVTEIAMESTGQYWRPLWNLLEGEFSKLVLVNPQHIKGLNGYKTDPKDAQWIADLLEGGKLKGSWVPERPIRELRDLTRQRVNILEDLNRAKNRIEQLCQAGNVKVSSVATDLFGVSGRRMLEALVEGKRDAGWMADYARGSLRGKRHELELALDGTFTEEQRWLLEKELRQIEFLEGQAGTLEQEIERRVTRFAEPMRRLLTIPGIDRKTAWTIVAEIGVDLSAFADAKHLASWAGLCPGNRESAGKRMSGRTRKANRYVKRAMCQAAWAASHTKNTYLSAFYRRMAIRKGAPKAVMALAHHMIVVVHQVLSRKEEYVEFGGDYYDRRNKPKTVARLVARLAKLGYEVDLKPQQAAVAEPIVEAVRAEGPSVGEVPRLEPQSSRPRRGRPCKCIERGIICKHHTAREANSLIQELASPGRFS

SEQ ID NO: 52600 - protein, 336 aa, unidentified
MIHIGVDLHQRFCYVTAMDASGKVIAHQSIINESESLRRWLRTMPRPAQVVVEACGFWPAFRRAVESEVARVVMVHPARVKAIASARLKNDRVDSTTLAHLSRCDLLPEAWMCDEATRQLRLQVRLRVTLGRQRTRLKNLLQGILHQEGFCKPVSDLFGKRGRRWLAELPLSAAGRVAVDTYLQLIDQLSQQIVQQEQQLAKLAAADERARWLQTIPGIGAYSAMVILAEIGHIARFPSKHSLASYAGLVPRVRESAGKRSYGGITRAGSETLRWIMLQVAQVAARYSPAACGYYQRLKRKKPAQVARVALARKLLIAVWALLRHGVCYDDQVFAG

SEQ ID NO: 52601 - protein, 358 aa, unidentified
MIEEDGIRHVVGGVDTHKDLHVAVVVDERDLVLGTRCFATTRQGYRQMLGWMRSFGELRRVGIESTGSYGAGLLRFAQQAGIEVLEVTTPDNQDRRRRGKNDDLDAQNAAHAAFAGKRTVTPRSRDGMVESLRVLAACRKTAVAARRVALQMIQNTIVCAPDGLRDTLRAMTRMQLIRTLAAWRPDLSAYRDVEAAYRISLRSLARRYLELHDEIADLDAMIGAIVDELAPDLIARNSIGHTGAAQLLLTAGDNPERLRSEASFAALCGVSPIPASSGKTVRHRLNRGGDRHANSALHIIAIGRLRTDPKTKAYVAKRVAEGHSKLDAIRALKRYIAREVFGLIARRQKEINQTRIAA

SEQ ID NO: 52602 - protein, 365 aa, unidentified
MREQDERDKITIGLDLGDRRHRFCALDKEGQVMGEGTLGNTRECLGELSSRYAGALIVMEAGCHSPWISRYLEGMGCEVVVSNPRKTRAIYQHERKSDRRDALMLARIARMDQALLYPVRHGSEQAQQDLLRIKLRDSLVRARVGVINSLRFMLKSLGYTIANPSTERFHKVIEDQIPDSMSPVIAPSVRALEELSLRIKLLDREIIALARTEYPETAWLEQIPGVGSITALYFVLKLGDPDRFERLRDVGAFIGLCPRRDQSGENDPQLRISKRGDVYLRRLLVSAAQYILGPFGPPSALRQYGLRLAAGGTSRAKKRAVVAVARKLAVLLLTLWKNKSAYQAFPGHDEEKMRTSDRERLRCIA

SEQ ID NO: 52603 - protein, 372 aa, unidentified
MNYNTVYVGMDVHKESFTLCAYTIDAEKGSHFQRIEADYKNVLKYLEFLRTVYGNDANFICGYEAGCLGYTLYHQLTEHDVNCVILAPTTMLEQRSKRRIKTDRRDAEIIGKCLAQHNYSPVHIPTATDEETKEFLRMRDDHKLALKKVKQQILAFCLRHNYRYDGNSHWTAAHIKWLKSLNPEALYKEILDEYLLTYTTLSDKVERLDKRIEELASKDEYRESVKKLCCFIGIKTHTALSVLVEVGDFQRFASAQNFASYLGLVPGEDSSGDGQTRLGITKAGNRHVRMLLTEASQCYARGQIGFKSKELKSRQAGNSPQVIAYADKANERLRRRYYKMVLGKSKKHNVAKTAIARELACFMWGMMTEHIA

SEQ ID NO: 52604 - protein, 408 aa, unidentified
MKTLHRRCAGLDVHSDTVVACTRLTARTKASHQVRHFSTATHDLLQLADWLAGQGITHVAMEATGIYWKPIWHVLEGRFELVLANATHIRNVPGRKSDVNDAVWTSDLLAHGLIQASFVPPTPIQELRDLTRTRTQLTRALAQHIQRIQKTLEDANIKLVSVISDIVGMSGRRILKAIIAGETNVIRLSELGSARLKCSRSDLAAALDGRVTAHHRFLIDHHLGLIEELERRIAAFDTRIDEVLAPFRDAVERLITTPGVGRVAAEVILAEIGPDMSPFPTAGHLLSWAGVVPRLDESAGKRRSTRVRHGGPWLKPVLVQCAWGAARAKGTYLQAQFFRLKARRGPKKAAIAVAASILTAVYHMLKDGTFYQDLGADYLVKRDAARTVAKLARRIKDLGFDVQYRATA

SEQ ID NO: 52605 - protein, 365 aa, unidentified
MKKSSTVKAAINKDFQQKLTIGLDLGDRSSWYCVLDEAGEVIGEKKLGTTPKAMKEVFAAMPRSRVALETGMHSPWVSRLVSELGHEVIVAHARNVRLIGESRRKDDRLDARMLARLARIDPQLLSPVKHRSAQAQADLTVIRARASLVRARTALVNTARGLTKSYGERIRGCNPRNMDAEKAQTLSPELQASLGPLLQALESLSERIGEYNQRIEAIAQQSYPQTALLKQIKGVGTLIALTYMLTLEDPHRFRKSRDAGCYLGLQPGRRNSGQSEPQMHISKEGDPYLRTLLVQGAHHILGPFGADSDLRRWGLKLAERGGKNGKKRAIIATARKLAVLLHRLWVSGEVYEPLHNTKRTRLVAA

SEQ ID NO: 52606 - protein, 420 aa, unidentified
MKIFVPVAGVDVSKRFSGLCVLSPDNNVLLRQKIYHDMVSMKLAEKKLHEIELECGARPVVVMESTSHYHLILFQFFTDAGFEVVVVNPIQSGALKNINVRKVKNDRVDAYRIAMLYRLKVLRPSQIPTSSLRGLRLLTRQRSELKGDVARFKNRMTAYLDQIFPGYGEVFSDVGGSASRAVLHMCPTPEKLLNADGSLLAKAICEAGNKGPKFGAEKAAKLREAAGSAQVIGVRSASNASLIKNVLDIIEGLLAAIQRIEREIKELVTQDTRLDEDVKLLCSIPGIGFSSAVVIAAEMGNISLFRKPKQLAAYLGLDPGERQSGTFKGRKNKLSKRGSPQVRAALHMAAVSSVSRKRDGTYRNPVLAEYYERKCAEKPCKVARVAVMRKLSNIIYAVLRDRKPFELRTPQEHMALLAAA

SEQ ID NO: 52607 - protein, 416 aa, unidentified
MNAAGIDVSSRKSTVAVLRPFGKVVRLPFDVANDTVGLASLVEQLKALDGETRVVLEHTGRYYEPVAKALHEAGLYVSAVNPLLIKEYGANSLRRVKTDKADAVKIARYALDNWADLRDYTPMDTIRYDLKTLNRQFQLASKQRTASANNLIALLEQSFPGIRKCFDSPVRSDGTQKWVDFSHTFWHVDCVRKQSLNAFAERYRKWCKRHGYIFKQSNAEEVYSLAKNAVVLVPKSEVTKILVQEAASQLTSISRSVETYRAEMERLASTLPEYPAVMEMYGVGKSFGPQLMAEIGDVRRFERKQSLVAFAGIDPMPNQSGDKNVRSNKSSKRGSPYLRKTLFNIMGIYLKCSPQDEPVYQFLDRKRSEGKPFYVYMTAASNKFLRRYYAKVRDYLATLEDLPPVDMDSTGLQTHN

SEQ ID NO: 52608 - protein, 325 aa, unidentified
MHILGIDIAKGTFDTALTQDNQAYAQASFSNDSQGFKRVVKWLATHQVEALHVCLEATGRYGDALADYLHTQGHQVSLVNPAQIHAYGRSKLRRNKNDRLDAQLIADFCFTQQPLAWKPPLRIERESQELSRHIATLKEDRQRKRNQLAAGLTSPPLRRSIQKTLDFLNQEIELLEKELHELLSQDPDKAQQIELLCSIPGIGRLTACRFLAEVDVTRFRQASHLAAYAGLVPTEHTSGASVRKKPRLSKVGNRHLRTLFFMPALSAHRFNPIIADLHARLTERGEPKMAVVGAVMRKLLHLAYGVLKTRKPFDPQHLHSIPVGG

SEQ ID NO: 52609 - protein, 416 aa, unidentified
MKLFVGIDVSSEKLDTCFLTDELTVLIEDTYANDSYGATALKNQLLKLQKQFHFDQLVIGMESTSMYSFHPALFFQEDEDLQALQTIVTIEDPHRIKQYTKMFDTDKTDTIDAFMIADYLRIQRFTNSPIKQEKYMALQRLTRARYQMVRQLVETKQHFIENLSYKCNTLKKELRDSEGSTTVFSATIMDLLIEDLSLDDLAMMPLEQLSSFLQEKGHGRFKDPDALAKTIQKAIRGSYRLGKLMDESIDIVLGILVREIRSLEKAIKEYDKAIQELVQAIPEYQCLTSIPGVGPVYAAGILAEIGQIERFDDQAKLAKYIGLAWKRNQSGRRESEATPLTKKGDRYLRYYMIEAANSVRRYLPEYREFYQKKFQETPKHQHKRAIVLTARKFVRLVDYLLRNHQLYTPPRSVREK

SEQ ID NO: 52610 - protein, 461 aa, unidentified
MKSDRKKGGKKNGVLPTTLPAIQPKVAGIDVGSMQHWVCGPAREDGKPNVKVFTTTTDQLNQLADWLIEQGVESAAMESTYVYWIPIYELLELRGIRVLLVNARQLQNVPGRKTDVSDCQWLQLLHSCGLLRGSFRPVGSIARLRALQRQLANLVEERTRCVQWMQKALDQMNVQVHRALADITGVTGMAIVRDIVKGERDPAKLAMHRHPRCHKPVEEIAKYLTGTWREEHLFNLASAVRLFDAIEAEIVSYDARLMKELEVLQPAERQQQQTPSHPNPAKEKAIKNRGEQASRTALWRFSGVDLTRIDGISAGAAQVILTEVGFDLNAFPSEHHFISWLRLCPRTPVSGGKPLKKRRNGQGANRIAGVLRMAATALQRSKSALGASFRRIARYKGGAVAVFATARQLARLVFRTLRFGHAYVDIGESAYEQQFHLRRLAALTENAKQLGFSLVSNVAKT

SEQ ID NO: 52611 - protein, 466 aa, unidentified
MRKPQVVPDEDHEVVYERVAAVDVAKASGVVCVRTPDPARPGRFVNRIWEDVPATRARIAELGRELLGCRVQVVTLESTSDYWRIWFYVLEGIGLAVQLVSASQAKNLKGRPKTDRLDAMWLARLTQWGMLRPSFVPPAAIRAVRDFTRARTDLVRERTRVLQRLEKLLEDAMVKITSVAREGMKAKSVVAMVAALIAGERDPRALADLAKGPLRAKRDALAEALDGMFDSHHGVIAQMLLDQAAFLDQRITAMEDQAIAALAQVEESWGVDATGETGPGRGTGPDALVLAAAHRLAEIPGISLMLAIVIIAEIGLNMAAFPTPAHLVSWIGLCRSASQSGTRHGKGKQKKGNSYARAAAGQAAIGAAGTHTFLGERYARIARRRGKAVAQVAVARSIMIIVWHLLSDPAARYHDLGPDFYASRISRDKKIRNHIRGLTALDVSAEDIRAALGITMEHIPPGGHAA

SEQ ID NO: 52612 - protein, 339 aa, unidentified
MGLYVGIDLHSSSSYIGILNEEAKRIMGRRVCNERESILMTLSPYKTEVAGVVVESTYNWYWLVDALMEEGYRVHLANPAAIQQYQGIKYLNDRHDAFWLAEMLRLAILPEGYIYPRESRGVRDLLRQRGRLVSKKTSLKLMLQNITSNQNGRMLSNNRIDQMTGEEMEKVFQEEEWRMNGMSLFSTIEFISKEIEKIESYVLKRMKEEWAYQGLQTVPGIGKILGLTIALETGPIERFPSAGQYASYSRCVPSAYWSNEKKKGSGNQKNGNKYLSWAFAEAGHFCIRYCEEAKRYYQRKTAQTNIPSAYRAISNKLSKACYHIMKDGREFDVRRLFMN

SEQ ID NO: 52613 - protein, 423 aa, unidentified
MYVAVPPDRDPEPVRVFGTFTSDLRKLVEWLQQCGITTVAMESTGVYWIPLYQMLEAAGIRACLVNARGLKNVPGRRTDWHDCQWLQYLHSVGLLRAAFRPEPQVCAVRSVWRQRSELVAMAAQHVQHMHKALTQMNLQIHHVINDITGVTGLSILDAILAGERDPDKLAELREPTIRASPETIRESLRGDWRREHLFVLRQSRRMYQSYREQIIACDREIEALLGDLPPRADPDHLPPPNKPIRKTKRTAGAITFDYRSEAYRLFGVDLTRIPGMDGNVLALFGEIGRDLSRFPTAAHFVSWLGLCPDNDKSGGQVLWRGARKIAQRAGQLFRLSAHSLSRNQSRLGQFLRRMKAKLGPKAAITATAHKLAVIFYTLVTRQIEYDESIWAAHDEENRKRLKNKLTRQASSLGLRLVPIEVPQ

SEQ ID NO: 52614 - protein, 342 aa, unidentified
MEITTVGIDLAKSIFQVHAVDAVGHVVVRKALRRAQVVPFFAKLPRCLVGMEACGTAHHWARELMSLGHDVRLMPPAYVKPYVKRGKTDANDAAAICEAVTRPSMRFVPVKSTEQQAALALHRTRDLLVKQRTQLVNMIRGLLAEFGIEMARGLRHALELAARLSAGDAAEVPPLAQRVVTGLADQIGALQIQLTRLEKELLAWHRDSDLSQRLATIPGVGIVSATALAASVSEPERFRSGRQFAASLGLTPLQNCSGGKERLGRISRMGDRYLRRLLVVGMTSLIRRAKTTPTSVDPRLPALLQRKPVRVVTVAAANRTARVAWAIMTRGGTYRAPAATAA

SEQ ID NO: 52615 - protein, 387 aa, unidentified
MAQVNDLSRSVSAFDPISTLVVVVEMSKASWLVSSVVPGVERQPLKKLEPDATALLRLIERWRNEAVRAGRPISRITLAYEAGRDGFWLARWLIARGIEAHVIHSASVAVSRERKRAKTDRLDAAMLMRVFLGWLRGERGHCGMVAIPTMEEEDARRPSRERESLVDERSRITNRMKSALARLGIRGFKPHLRKAPERLAGLRTAEGTGLPANIIEEFRRDMARLALVREQISSIEKTRAERLERAPDTGPHAMVRLLARVIGIGIETADMLVREILSRKLRDRRAVARYAGLTGSPDESGLKRREKGLAKAGNARVRRGLIQLAWRFLMFQKDSALAQWYRTRTEGPSGARKTTMIVALARKLLIALWRLVTTGEVPDGVELRPAA

SEQ ID NO: 52616 - protein, 345 aa, unidentified
MQPMYYIGLDVHKRSISYCVKDSSGTIRSEGSIPATRCDLDRWLKTLPQPWTAAMEATMFTGWIYDHLLPHAGALKVAHPLMLRAIAAAKKKNDRIDASKICDCLRCDFLPECYMASTAIRERRRTLRYRNLLVRQMVQMKNKIGMLLMEAGVSYNKQRLHKAGYFRELLATNPDINEGLRALLRLCRETVVRLQRTESTLVRSLECDPLLMDRVERLMTIPAVGLITALTWALEVGDVQRFSSIKKAISYCGLCGAEKSSANTVQRTPLSKQRNKHLQTTLIEAAKMAPRYSPALALLYDKEKQKGNANRATLAVARKLVAYLMAVDRGQRNFQVLETSTCIAA

SEQ ID NO: 52617 - protein, 340 aa, unidentified
MTSITTGKVFAGIDVGAKELVLEMRTGGKVMATQSFLNTRADRNRLVRKFAKIQNCTVCLEATGVYSTALSVALCDAAIPVMVLNPQASHNFAKVLGKHSKTDSVDANTLAQYAERMPFQQWVRPSDAEMTLRAFSRRIHTLTKQKSAAKNQAHALSFIATTPKGILHDLKLAVSQLEKRIATLTREAIAFIKANPALNEPFELLLGVKGIAETSAIALLGELLLLPKGLSHAQWVKFAGLDPKHFRSGSSVDKKARISGAGNHYIRAALYMPALSAKAHDPHVKAFFEHLIVMGKTPLQAVCAVMRKLLHALHGMISNNQPFDNTRFYAIPNKIALATA

SEQ ID NO: 52618 - protein, 366 aa, unidentified
MARYVGLDAHSKSSVYVIQDENGKHVGEGSVPTTLEGLQRMGARYELADGTRVALESGTMAFFVARRLKQLGLDPVVIDAHEVRAKALRPNQKSDRRDALELCEGLRRGTYRSVVHVPPESIERLRETLGRRRHFVRVKTMQVNAVKRLLRGAGLQTFSRSLQAESGWDKLLSAVAVDPSLSAFCAAHRAVWRCAQAQIAALEDSLQEQQRQFQPAVDRLQTVPGVGPIVALTALAVFSDVRRFPTAKHAASYTGLVASTFDSGERIQHGHITRRGSRELRSMLCEAAHHAWRRTNPLHPYFSSLCVRRGYKVAVVAVAHRLCRIMYSMLQHGTDFNLARLGIEEGHFERTTVHHYRRKNSTAVSV

SEQ ID NO: 52619 - protein, 410 aa, unidentified
MLLIGDDWAEAHHDIEIEDEAGRVLARRRLPEGLTGITLLHELVAEHLDPAAEPDQVLIGIETERGPWVQALLAAGYVVFAINPLQVARYRERHSPSGAKSDAADAHLLAEIVRLDRAHHRRIAGDSEIAEHVKIAARAHQSMIWSRVRQVNTLRSLLREYYPAALAAFGTDLAGRDALAVLTVAPSPDLGRRLSQSRIETLLRRAGRQRNISSTAAKIRAALTSEQLTARPGVIPAYTASASALLAVLSTMAAQTEVLAGQVEQGFGQHPDAEIYRSQPGLGVILGARVLAEFGDDPSRYADAKARKNYSGMSPITKASGTKRVVLARFARNRRLGDALFLQAFAALNNSPGARAFYDRQRTRGATHYQALRALANRLVGILHGCLLTHTLYDEHHAWHREPDKLSSAA

SEQ ID NO: 52620 - protein, 270 aa, unidentified
MKYIGCDFHPSFQVIAMVDKGTGELVERRLLHTEEARAFYEGLQGPGLVGIEASGNTHWFESLLTRCGHDLWIGDAAAIARQEGRKQKHDRRAAALILKLMLENRFPKIWVPTVAERDLRQLLIHRQHLVRMRTRIKNQLQPIALNQGWQKKRKLWSEAGLKLLRSLPLEPWTEQRRDTLLEMLKELDEKIRPLGQAVEKEAQACEAARRWATHPGVGPVISLAAALTMGDVGRFADSRSWVSYLGLNPSEESSGQRRRLGAISKQGSPF

SEQ ID NO: 52621 - protein, 385 aa, unidentified
MWTFDQTDTPAASEYATVHMAFELSKANWKIGVLLPGSPKLSRFTVKGGDVTTLSGRLASLRAKAERCGKPVRILSCYEAGLDGHWLHRWLTDQGVTSYIVDPSSIEVSRRGRRAKTDRIDLEKLMRAFLAYLRGEPRVCSMLHVPSAQDEDRKRSSRERDRLLKEQTAHTNRIKALLFGQGIRDVMPLKPGFIASLEAMRTGDGRALPARLKEELVREHERLCLAHKQVAALEAQGKAELRVAAPGSVAAKIMQLIDLKSIGVISGQKLVNEVFYRSFDNRRQVGSYFGLTGTPYDSGESRREQGISKAGNSRARTLAIELGWLWVRHQPGSELTRWFRERVGDLKGRIRRIAIVALARKLMVALWRYLTTGLVPTGAVLHPSF

SEQ ID NO: 52622 - protein, 347 aa, unidentified
MSNTNVTTIGIDLGKNTFHVVGLDATGAIALRKKRSRNQLEQSLANISPCLIGMEACAGAHHLGRKLEKLGHKVRLLPAQYVKPYLKGHKNDFRDAEAIAEAVQRPTMRFVPLKSAEQLDLQALHRARSRLVTQRTAVINQIRGFLLERGLPVRQGAAALRLALPRLLSMLTDDLSPRIVRLIHDLAEDWRHFDWRIASITKEIDELADQDAHCRRLMSAPGVGPIISSAMVAAIGTGDAFARGRDFAAWLGLVPKQISTGDRTILGRISRRGNRYLRTLFIQGARSVLLRRQSWPKHGFGAWLEAASKRLHSNVMVVALAAKLARMAWSMLAKGRDYDANFLGHAA

SEQ ID NO: 52623 - protein, 369 aa, unidentified
MEDYNAFVGLDVHKDSISVAIADAGRDGEIRMYGTITNTPDAVSRLMRKLVQRHGKIEVTYEAGPCGYGIYRQLAEMGIVCRIVAPSHTPKRPGERVKNDTRDALMLARLLRAGELTFVWVPDATHEAMRDLVRARQVASQDVRAARALIQMFLLKHGLRCKSKAWCLRYRKWLTSLPLEHAAQKFALQSYINRLDQAEARKAEIEGQMVDLIPGWTLAPVVHALQVFKGIGMVIAATLAAEIGDFSRFASPRQLMAYLGLVPGEYSSGSKQRPGGITKAGNKIARVMLVEAAWSYKWPPKVGVLLMLKRDNYSQALKDIGWKAQVRLNQRFRRLESRGKRSTVAAAAVARELVGFIWATAISAMPKAA

SEQ ID NO: 52624 - protein, 326 aa, unidentified
MGAVVNQIPSSFASPLFVGIDVSGPFLDVAYHESSETFRLPNAPEGFAELIHRLLPLTPQLIVLEATGKLERAVLQALCQAGLPAVAVNSKWVRDFARSTGQLAKTDRLDARVIAHFGATIKPEIRPLTDEQTQQLQALILRRAQLIEMLTAEQNRRKRAHKSALPSIDEFIRFITQRIKDADRDIDAFLHANELWRKTEALLRSTPGIGKTTAAALIALLPELGSLNARQIASLVGLAPFNSDSGAHRGERHIKGGRHIVRRALYMACVAAQRANPNIKAFCDRLRAKGKKTKVAFVAGMRKLLTQLNAMMRDRTPWNPPHHDHL

SEQ ID NO: 52625 - protein, 408 aa, unidentified
MNPLFVGIDVSSRNNVAYLMNPDGSKYSSFSVQNNLGGAKLLSERIVSALQSMQLSNVVIGLEATSIYGNSLVYALREDGSLGRFQRKIHVLNPKQVKKFKEAYPDLPKNDFVDAFVIADHLRFGRIAKEVYMDDYRYQALRTLTRARFDVIQNLTREKQRFANYLFLKCSGMAQDKDIQNTSATTIALMEHFETVDDLANADLDELTAFIAETGRGRFSDPNTVAKVIQTAARGSYRLPKTVNDTVNQAMSVSIASIRALKEQIKVLDKAIEQQFEIIPNTLTSIPGIGKVYSAGIIAEIGDIHRFDSQASVAKFAGLVWTQHQSGEFEAEHSRMIKSGNRYLRYYLLEAANSVRRCDSEFRRYYDLKFKEVNKYQHKRALALTARKLVRLVFRLLKDNRLYTPPEG

SEQ ID NO: 52626 - protein, 242 aa, unidentified
MADIFALDVSMGKSYCVWYRGKHCLKEFSLVHTRAGFNALRDMIKKAQKPIIYFEATGIYSRVIEHFCETNGLRFCRLNPLELHLKSESLRRVKTDQKDAHRIALTVQENAFRLTVPWKKDYLQLHELSRFYNQLNAFVGIDIRRYQSGTYLGQDHINKRGNPIARKLLYFTVGNMIRQQHANSNHIVDYYYRLKEKRPHPKLNKVAMVACMNKTLKCLLSMIKHHKKYHYRYTDSIVPVKA

SEQ ID NO: 52627 - protein, 380 aa, unidentified
MEYCTTIGADVSDRTTKICVMTKAEGGERRIVVETTCATTKAGFEEALSKFDRSWPVVFETGTHCRWMDRLFKEMGFKTIVGNPGKIPSITKSNTKNDRNDARELARLAIADPAMLHPVFLRDEVYQQMLRFHHARNVLLSQRTQTINQVRGFAKSMGYRIECSSTEKFHELGKADWPRELEECAWPLMGVLKTVNLKIKAYDRLIERLAERPEFKPMVERVRVVYGVGVIGSTVFVAAIGGRPDRFDHTRDIGAYLGMIPKQDQSGDDDKQLHITHAGADIVRTALVECAGVAMMSNAKDTDLKLKGLRIAMRGGRIARKKAKVAVARGLAVTMLALLQHPEREYVPLSEDGKKGFERYRAELEYLTMQKASRKEKKVA

SEQ ID NO: 52628 - protein, 343 aa, unidentified
MQTITTIGLDIAKSVFQVHGVDAAGQVVIRRQLKRRYVLAFFQKLPACLVGIEACASSHHWSRELKALGHTVRLMPPAYVKPYVKRQKNDATDAEAICEAVTRANMRFVETKTPEQQSGMVLHRTRHLFIRQQTSVINAIRAHLAEFGIVAPVGRKGVEELLDVVADPRDKRVPEIARACLAVLGIQLRRLKEQILEFDRQIVAWHRSNETSRRLDDIPGVGPALATALVGSIADPKVFRSGRNFSAWIGLVPKQHSSGGKDRLGSISKQGDRYLRGLFVAGALAVIRYAKIHGTTHRPWLTALLARRPTKVAAIALANKIARMVWAMMARGERYKEPVALAA

SEQ ID NO: 52629 - protein, 342 aa, unidentified
MEHYAGIDVSLERSSVCVVDATGKIVREAKVASEPEALVAFLGRLGLPLTRVGLEAGPLSQWLHAGLTAAGFEAVLLETRHVKAALSAMVVKTDRKDARGIAQLLRMGWYRPVHRKSPDAQEVRALLVGRKLLQAKLRDVELSIRGILRGFGLKVGEVSKGRFAARIGELIAGHEMLEEVIGAMLRAREGLRAEFARLHRRMLTIVRGDTVCRRLMTAPGVGALVAVTFKTAVDDPGRFRAAKAVGAHFGLTPKRYQSGETDVSGGISKVGDAMVRTALYEAANAMLSRTSRVSALKRWALEVARRRGMKRGKVALARKLAGVLHRMWANATDFRWGGEAAA

SEQ ID NO: 52630 - protein, 326 aa, unidentified
MDVLGIDLAKLSFDATLLPPTGSRHYASFPNTPAGFLQLATWLKEHTGSSLHACMEATNIYWQALASWLHAQGYRVRVVNPARIKGYAMATMQRNKTDKRDSAIIASFCAKHQPSLWQPASQEQQRLRALVRHRDDLLQTQLQQQNRLRDTTDELVRSSLESLLKAIASQLETVQEQITQQLRGQESFQTNLALLTSIVGIGAVTAAKLLAEFADLDQYASAKAAAADAGLTPSHDESGTSVRRRSKLSKMGKVGRRAALYWPAITAMRCSPAIKAFAHRLAARGKPKMVIICAVMRKMVHICYGVLKHQTPYDPAKAFGHTTPAT

SEQ ID NO: 52631 - protein, 351 aa, unidentified
MAMLADLADAVIGVDTHTDTHTACLLDRLGRQLAVITIAADPAGCRALMAWADENAPGTRLAWAIEGARSHGLGLTRHLLQHGQMVIEAGRPARASKRPGGKSDPADAARAARDALAASRLAQPRCDGPREALRILLTARAQATTARTAAVNTFKALILGAPDHLRQQLRGLSTPRQASRCRTLRACGSQPVAEQVLRAELRRLAAHIKGWDRELRANKRQLRQLIEQMMPALLDQPGVGPMSAAQLLVSWSHPGRCRSEAAFAALAGVSPLQASSGRITRHRLNHFGDRQLNRALHVIVNWRMLHDQRTHAYLTRRAAEKTGPELRRCLKRYAARQLFRLMEAQPPLDNS

SEQ ID NO: 52632 - protein, 347 aa, unidentified
MTKLMAGMDLHSNNVMIGIVDLEGQRVVHRKVECDLAKVAAFLKPYKARLEKVAVESTYNWYWLVDGLGGLGYAMVLANPAKIQQYSGLKHGDDKGDAYHLADLLRLGILPEAYIYDKELRPVRDLLRRRMGLVQQRTSLMLSFKSLYTRTTGQAMTLSELKGMAVKKAAELYHHPANRLIAQVQKQHIEQLTESIEKLEKVILKSAKELPYYEKLKTLTGVGVILGQTITLEVGDIGRFAEAGHFASYCRTVDARHLSNGKKKAENNQKCGNKYLAWAFVEAANFARRSDEKCRRWFDRKAAKTSNVIATKALACKLAKAAWHVMAKEVSYDETRVFPELAGKKTS

SEQ ID NO: 52633 - protein, 407 aa, unidentified
MEVLHPRCAGLDVHKQTVVACVRIVGNAPPRQEVRTFATTTSGLLALADWLDSLGITVVAMEATGVYWKPVWHVLEGHFELVLANAGHVKNVPGRKTDVNDAMWLADLLAHGLIRASFVPPAAVQELRTLTRTRKQFVRERTAHVQRMDKLLEDANLKLSVVLSDVLGKSGRAMLQAIIDGHTDPERLASCVTTRVKASRAQLLEALHGHVSAHHRFMLKLHLGHIDALDQAIAAIEKEVGLGLDPFRQAAKLLSTMPGLSAVGSNVVIAEIGIDMSRFTTPGHLLSWACMCPRNDESAGKRRSTRLRRGGKWLKTTMVQAAWAAVKVKGSYLQAQFHRLRARRGTKKAIIAVAASMLTAAWHMLRNGSEWRELGAAHFDRADAHKTAVRLVHRLQQIGYAVQLTPA

SEQ ID NO: 52634 - protein, 325 aa, unidentified
MGERRAGGIDVSKRWLDLAVRPAAKPERFANTASGQAALVAHVQGLSTAQRPELLVVEATGGLEHGVVAALVGTQVPVAVVNPRQVRDFARCLGRLAKTDRLDAQVLARYGEQIGPEPRPQPDAARQEAQGLAARRRQLVEMLTMEKNRLQQAPARTRAGIRRHLEFLRGELADVERQLAELIAAAPAWQATYDRLLTVTGIGTVTATLLVVELPELGRLDRKQIAALVGVAPFNRDSGALRGKRSCWGGRATVRTGLFMATRSAIRFNPPIRAFYTRLIDAGKLKSVASVACIRKLLLIITTMLRTNTDWDPDRFRPTATPTPA

SEQ ID NO: 52635 - protein, 339 aa, unidentified
MKLYSGIDLHSTNSYLAIIDGKGKRIFHEKLPNDITTIVQRLELFAGTLQGVVVESTYNWYWLVDGLMAAGFAVHLANPAAIQKYHGLKHADDKHDAFWLAEMLRLDILPEGYIYPKEERPIRDLLRKRGHLVALRSSMIISLQNIISRNCGIKVNVIDIKRLREDRVSPLLAMNEDLALAGQMSKESIDFLTRQIHSIEAVIERKLKLEDRYKLLLTVPGIGKIIALTIMLETGPVDRFQNVGNYASYCRLVSSRWTSNEKTKGKGNKKNGNKYLSWAFSEAAEFARRYDERARAYYNRKLRKTNFMVAHTALAHKLARAAYHIMRDQVEFVQEKIFT

SEQ ID NO: 52636 - protein, 321 aa, unidentified
MSHTTSTLGFVGIDVSSGTLDVYVLPEKRTWTVANDPAGRAALAEELQSRGGALIVLEATGGYEVPIVAELAAAALPVVVVNPRQVRNFAKALGITSKTDRLDAGVLARFAQDIRPEIRPLPSEEERFLRELLARRRQLVQLQTQESNRFQQAASAKVRHSISDVLRILEKQLRQIDADIDRLIRQSSVWREKEEILRSVPGVGPTTARTLLAELPELGRYGNRQISSLAGLAPRNRDSGKFRGRRSIGGGRGNVRKALYMAALTAIKHNPSLHEFYQRLRNEGKKFKVAITACMHKLLVILNTMMRNNTPWNPKFNPQFS

SEQ ID NO: 52637 - protein, 368 aa, unidentified
MDEIITGFVGLDAHAESTAIGFAEAGRAAPRFVGTVGAKLTELTKALGKLGEPQSLLIVYEAGPCGYVLARELAAQGYRCEVVAPSKVPKKPGERVKTDRRDALKLASLARAGELTPVTVPDERDEAIRDLSRARVDAVRARLKARQQLQALLLRHGRRYTDQTSWTAAHERYLASISFAHSAQDIAFTEYRQAVSEGATRVQRLSQAVAHEVERWRMQPVVNAIMTLRGLDLVAATTVVAELGDLRRFARPRELMGYVGLVPSEHSSGSKRRQGAITKTGNSHVRRVLIEAAWNYRFPARVSRALQVRQEGQPSAIRAIAWRAQLRLSHRYRRLTARGLQHNKICVAIARELTGFLWDIGRHVGPSA

SEQ ID NO: 52638 - protein, 386 aa, unidentified
MKRNDLSRSLVAFNQASTMVAVVELSFRSWLVAGLVPGLTRQPLKKLGPDAQALLTLLRRWQGEATKAGSTINRIVVAFEAGRDGFWLARWLRARGIEAYVIHPTSIPVSREHRRAKTDRLDTGLLMRAVLGWLRGEPKHCSMAAIPTIAEEDARRPNREHQTLVQERTRIVNRMKATLIRFGIRTFNVKLRKASDRLAVLRSPEDEPLPPNTGAELRRDMARLQLIRDQIKVIEEARLQQLKHAPRKGTHPMLLMLAEIIGVGVETADMLVHEVLSRKLRDQRAVARYGGLTGAPDESGTKRREKGLARAGNARVRRGMIQLAWRWLTHQKNSELAQWYQTRTTGAKPAARKTMIVALARKLLIALWRYVTTGEMPAGVTLHPAT

SEQ ID NO: 52639 - protein, 417 aa, unidentified
MRRMLERCAALDVHKKTVMACVRVVSPGGELSELTVEFATMAADLLALRDWLRELGVTHVAMEATGVYWKPVYYALEDDFELLLVNARHVKNVPGRKTDSNDAQWLCQLLECGLLRASFVPPKPIRALRELTRYRKALIRERAREANRLQKVLEDAGIKLASVATDVLGVSGREMLQALLTGTRDPEVLAELARGKLRAKLPELQRALAGNFQAHHALIVSQILAHLDYLDETIQTLTEEVEQRLAPFAHKAENLGTIPGVAARSSQVILSELGPDMTRFASDRHAASWAAICSGNDESAGKRRSGKTRKGNPYLRAALIECANAAARSKNTYLRAQYEQIKRRRGHKKAIVAVAHSILIASYHILKDDVPYRDLGGDYFARRADPERLAKRLIAQLERLGHTVTLKPSTTPDTVAA

SEQ ID NO: 52640 - protein, 448 aa, unidentified
MFIMHYKRLLTFIDSVSPYLSVGLDVGADFTWMSIALPNGSFIGKPFKIIHSDPGSRELAVTKIKEAQETYSLKSRCFLESTGIYHIPLLCFLRDKGFDCSVINPIITKNSTNINIRKLHNDKFDSKKAALVGLNVSLKTSIIPDDSVVDLRNLVRDYYYFKDLQSAVALKLTAELKVSFPAYAKVFSKVTTQSSLKLLSSYPLPEDMLAASKDDIVDIIRSTARFGETYALRKYDAIIAAAQDAAVFGRALPSNAVRIRLYINTYQEYQKHLNALLKVLHETVEKLQDTLLYEQICLLQSLRGIGFLSAVVLIAEMGDFKLFSSPKKLYAYFGLDPAVKQSGKLNGDKVHMSKRGSTLARRVLHMAALNNVKVDKGSCTPVNPIVYDYYTRMCSGKKKPVAMGAVMHKICNIIFAMLRDNKPFEIITPEEHCRRFAAEHPDKIRKAA

SEQ ID NO: 52641 - protein, 351 aa, unidentified
MIIIGVDYHPSSQTIAFLDQETGECGERQLNHSDGEAEKFYRELKQRGVSVRVGMEATGHSRWFERLLAELGFELWIGDAAEIKTKRVRKQKTDREDARLMLKLLLENRFPRIWVPSPENRDLRQLLWHRHRLVQMRTRIMNQLQAVAMNEGYRWKKKLFSEKGRGLLEKLPLAPWASRRRKELLELLDQLDPKIAELTAAVEQEAKKRPEVLLLMTHPGVGPITGLVYVLVIGTPKRFPCGKQIGSYTGLIPCEDSSAGRQRLVHISKQGNTLLRFLLVEAAQAAARCNPDWRRKYLHLMIRREKRIAKVAMARKLAVRLYWMWRNHWQYSQLVEFGSNAGKLVLVHGVK

SEQ ID NO: 52642 - protein, 345 aa, unidentified
MGPMYYIGLDVHKRKISYCVKDGSGRIHAEGSISATRLKLDHWMRSLPQPWSAAMEATMFTGWIYDYLQPHAATLKVAHPLMLRAIAAAKKKNDRIDASKICDCLRCDFLPESHMASTAIRERRRTLRYRNLLVRQMVQMKIKTSALLMEAGVSYNKQRLHKAGYFRELLTTNPDIDEGLRSLLRLCRETVVRLGKSETALVRSLERDSLLVERVERLMTIPAVGPITALTWALEVGDVQRFSSIKKAISYCGLCGAEKSSGNTVQRTPLSKQRNKHLQTTLIEAAKMAPRNSPELAMLYDKEKQKGNANRATLAVARKLVAYMMAVDRGQRNFQRAETSSSIAA

SEQ ID NO: 52643 - protein, 334 aa, unidentified
MWHVGIDLHRATVVLAAVNDAGEAMNAITIRCEDAEAIRAVVKKLGVFRAVIEATGTYRWLYNLLRPYGTVLLAHPLRLRAMIQRRSKTDKLDAQLLANLLRINQIPLAYIPPEPYQQLRELTRCRARLARDQAEVKIRLRGLLARQNRQAPYRVPFGVRGLAWFRKQDFGIIENLVRDELLARLEHFGRQLAILDQQVTELQKAFPQTEVLTTIHGIGLYSALLIVAELGEVERFRTAKQVGAYAGLTSRVHQSGGHCYRGSITRQGSPWLRWILVEAAMKAIQDDAALKNFYTRVRKRSSAKIARVATARKLAEICWKRLRRWQRTHAEQAA

SEQ ID NO: 52644 - protein, 360 aa, unidentified
MLAELIDAVVGVDTHRDTHEVEIALPTGTAIGTRKISNTNSGFAELLAWILDHAPGPRVVVSIEGTRSFGVGLARAVAAAGLTVIESEQPNRKARRGKGKSDPIDAHLAVLAALRLNADRLPIPRADGDREALRILLGTRHELSVVNTAQTNRLRALLLGGGDSERDLARATLIDPVLLAMVRRREPPQASREQAVRHGEIRRLAHALRAGRHALAANRAQLQTIVDQIAPGLTQRRGIGAVTAAQAIVSFSHPGRCRSDAAFAALSGTSPLQASSGKTVRHRLNRGGDRALNSAIHTIAVTRMRCCPTTKNYVARRTAEGKSSREIRRCLKRYIARELYRTLNASTTLTAQKSAPPAAA

SEQ ID NO: 52645 - protein, 428 aa, unidentified
MNCNTQNAKIASITEKTLIVGIDVGSGTHYARAFDWRNYEYSRKPLEFSNTEAGFQTLKSWMEELAGKHGKTAVIPGMEPTGHYWFALGKFLQDNGMKPVHVNPHHVKKSKELDDNNPNKNDRKDPKTIAALVNEGRFSYPYIPTGIYAEIRSLSNLRFQTQEELTRIKNRLARWFSIYFPEYKDVYGDLKAVSGRMVLKVAPLPEDIIKLGAERMNRLWRSAKLRGVGMKRAKTLVSAAEHSVGSKEAPEAARLELKNLLNDMDVYASRMEELLRRIEEKLKEIPHIDNLLAIKGIGVVTVSGFIAEVGDIGRFDSPKQLQKLAGYAIVANDSGKHNGESRISYRGRKRLRYVLYEAAISLVGKNAEFREIHEYYRTRKENPLKKMQSVVAVACKVLRIFYAILTKGVRYAPEKLLGDIRRPQEQTA

SEQ ID NO: 52646 - protein, 426 aa, unidentified
MEEEKISMEIVNPHAAGVDVGSRSHWVAVGQQEKDIREFGVFNQDLFEMADWQREKQVKTIAMESTGTYWQNLYALLISKGFHVILCNGKFTKNIKGKKTDVKDCQWIQQLHSLGLLSSSFLPEGKTEELRTYCRQRANLLHQTASTSRKMQKNLRLLNLRLDVVVKDICGLTGLLIIRAICNGETNPQQLAALRHGNCRKSEEEIAKALQSNGRKDYLFALRQELDTYDHLQKKIQQCDEEIEKMLDQIINSDDNKRQHHIEPKPHKRINKNTPGNIDLNLKSYQMFEGADLLAIEGVSFSTVLALMSEVGVEGIRKFPSAKHFCSWLRLAPNNKISGGKVLSSKVPKGSNRLKIALRNAANAIGNLKESTPLRDFFQRINFRKGRVSAISATARKLAVIIWNMVVKGTPYNNPAGYLFLDQNLC

SEQ ID NO: 52647 - protein, 391 aa, unidentified
MRFVGIDIGAERHMVASIDEQSTVLQRPTAFREDAEGYQQLIGLLGPPAGTLIVMEATGHYWQNLFAMLAAEGFVIALINPLRTRRFAEEDLVRTKTDAIDALGLARFGQQKRPPATLLPDVATRDLRELVRLRARFLQDFGDRTRQLHRVVDLSFPEFTRYVVQLDSPRATALLQAFPTAAAVRTASERQIASIRGGQRPVGRELARALKSAARTSVGHHDTEVYARQVRFFCEDLDLLRRRLGNLERDFEHLLAAHQVGQLLTTIEGIGPQTAAKLVAELGDPAAFRSAGALAAYVGAIPGLRQSGKQTWNRAGLTRVGHAKLRAALWMPTLVAVRRNPWLRAYYQRLRVRGTLPKVALMAAMRKLLIAIYTVAKHRRPFIPIITMTTP

SEQ ID NO: 52648 - protein, 368 aa, unidentified
MKKVSTAEANEIRNFSLQQRLTIGLDLGDRSSWYCVLDEGGRVVREQRVSTTAKALREQFSTLPSCRIALETGTHSPWVSRLLSELGHEVIVAHARNVRLIGESRKKDDRLDAQTLARLARIDPELLCPVKHRSAKAQADLTLIRARAGLVRARTALVNTARGLAKSYGERLRSCNVRNMNPEKAEGLSPALQAGLKPLLMALESLSEQIGEYNQRIEELAQQSYPQVALLKQVKGVGTLIALTFLLTLEDPHRFSKSRDVGCYLGLQPGRRNSGQSEPQMHISKEGDPYLRTLLVQGAQHILGPFGPDCDLRRWGLKLAERGGRNAKKRAIIATARKLAVLLHHLWVSGEVYEPLWNSNRMVVPAAA

SEQ ID NO: 52649 - protein, 354 aa, unidentified
MSNQSNSTVATMGIDIGKNSFHVVGLDQRGAIVLRQKWSRGQVEARLANMPPCLIGMEACVGAHHLSRKLQSQGHDARLMPAKYVRAYLKGHKNDFRDGEAIAEAVQRPTMKFVATKTAEQLDLQALHRVRSRLVGQRTGIINQIRAFLLERGIAVRQGLRFLRTELPKILATRCDVLSPRMVHMISDLAGDWHRLDERIEGVSTEIEALADQDPACERLMTVPGIGPIISSATVAAIGNGAAFSKGRDFGAWLGLVPRQMSTGDRTILGRISKQGNRYLRVLFVQAARVVLMKPQTWERHGLKSWIESAQKRMHRNVLAIALANKLARIAWAVLNKEHNFECTRTNAMTSRPA

SEQ ID NO: 52650 - protein, 342 aa, unidentified
MPCFVGLDASKRSTSICVLDEKGALLREGKVDSDPKAITGFLRGEGRRYARVGMEAWSLAPWLYAGLARAGLPIICIEAQHAHGVLKAMRANKTDLNDARGIAEIMRAGIYKAVHIKTVESQKLRALITVRKLLRTKSLDVENGIGSVLLVFGLKLKTGARSTFERRVRKLVGSNTDLASLVEPLLLVRACILDEMDAFQHRVVSAATEDPVCRRLMTAPGVGPVTALTFRAAVDEPRRFSRSRDVGPHFGLTPKAHQSGEMDRSGRITKRGDGSVRTALFLAAQYQLRRNAKDSWLRAWGLAIAVRRGRMKATIAIARRLAVSLHRMWLTDTDFRWTAETA

SEQ ID NO: 52651 - protein, 391 aa, unidentified
MSMYFVGIDISKYKHDCCIISAADQQIVSKFTVKNDKDGFEHLLTTLNSLSNPEDIKIGFESTAHYALNLELFLENAHHSFMEVNPVLIKEYKKSTTLRRTKTDSVDCESIARWLMTVEYKPHSKGFYHSYSLKSLTRLRDRLIRQRSFYLVKITNVLDHTFPEFKPFFNERLSKTAIYLLENYGSAEKMAHMNSASYDKLRCASRGKFSIQQFLRLKELAANTVGVNNSIFDIELNSLLTLYNSLCKEIKTLEAEITKLIEEVHPHYMSIPGIGPISAAIIYAEHGDISNFSNPGQMLAFAGIEPGINDSGTESHGGRMVKHGSSQLRYVLLNACLPLIRFDITFATYYAKKRAEGKKHRVAITHVAKKLIRVIYALERQDVDFNVQKLR

SEQ ID NO: 52652 - protein, 346 aa, unidentified
MSYSTTVGVDLAKNVIQISVVSSRGKELSNRSLTRKKFAEFLGKQKPSRVAFESCASAHYWARAAQRHGHEARIIPAKAVAPFRQGHKTDSNDALAVAEAARRPNIKEAPMKTVEQQGLQAIHRSRELLIQECTALSNHLRGLLMEFGIVIPKGFASLLKAVPEILEDGENELPDLYRPTLHRMYSRLLELREDIEAMTKEVDRLAKAHPICSRLMALEGVGPIGALLLYATMGSGAAFSGSREFAAYLGLAPKQYSSGGKTNIVGLSKKIGNSRLRSVLILGARAYTYRLKEPKSLKDKWLKANIERNGECRAAIALANKNVRTAWAMVTQGTEYQRRVQLEMAA

SEQ ID NO: 52653 - protein, 413 aa, unidentified
MKDLLECAMGLDIHRDTIVVCLLKGELDTRPEVEIRSFGTMIPEMQKLREWVVETNCRYVAMESTGIYWQPIYETLETCFDGDMYLLVVNARHMKNVPGKKTDMRDAEWIATLLRAGLLKGSFIPERPFRELRQLTRYRKNIQADVTSQKNRIDKFLHSAGFRLSAFISDIFGASGRNIMRHLCEHGSVDKAALDKCLKTQTRRKIDDILVSVNGTLSVHQRSCLRMMLTYLEQIEAHKQVIEAAIAEEVQNHTEALSLLCSIPGIDVISGTAIIAEISSNMDHFPSAEHLCSWAGLCPGNNESAGKRKSSHITKGNVYLKSMLCEVAWVIAGKRKTYLSNWYWRIKQQKGAKRATIALARKLLVVIYTMLKNGTPYDENIYEQRRQQCERKRANRLIHELSKLGYQVSPVNV

SEQ ID NO: 52654 - protein, 385 aa, unidentified
MTRLAETVDGVIGVDTHRDTLAAAATDRVGGTLAQTSAAADLAGYQELLGFAQAQVPGRRCWAVEGAGSYGAGLTAFLQARGERVVEVGRPKRLARRTGAKSDALDALRAAREALACDHPVAPRGRGDRQALQVLLATRHSACRAKVNAINQLKALIVGAPEELRAELRGLATKRQITRCASLRDRPARWLEHRMTVRALRLTARRIQLLAAEAAELRAELEQLVAAVAPWLLELPGVGPISAAQVLVSWSHVGRFRSEAAFAALAGANPIPACSGQVTRHRLNRGGDRQLNRALHTIVLARLRDDPTTRAYAARRRGEGKSVRDIRRCLKRAVARQLFKLLERHDRPGVEVVKVTWRTLGTQWCQEGRAAPPQTVHARSVREPG

SEQ ID NO: 52655 - protein, 355 aa, unidentified
MVAVRNSFHGEVFYVGLDVHKRSWNVTVRSNHMKLKTFSMEPSPKKLFATLSKNWPGGKYVSVYEAGFCGFWIHKQLCDLGIENIVIHAADVPTTHKEKVTKTDKVDSGKLARELENGTLNAIYIPNGFHQQIRSLCRLRHTYTIHSARIKNRIKGTLNYYGIPTPTEGKNWSYRYISEIKRCAEDIRTPGSSTLLFSLDELLEQRKRVLDVTIALRKCIKEYKDQLHTVDLIRSVPGIGFVTAMTFYTEIMDMKRFPSLDTLASFTGLCPACHSSGEKNNITGLTPRRNRYLRHLIIEAAWIAARTDPALFKSFTELSKRMKKTNAIIRIAKKLLNRIRYVWINQEYYKCQIYE

SEQ ID NO: 52656 - protein, 360 aa, unidentified
MFEDVAHLVAVVDVLGVLVISLSFAVTESGVAELLALLKRTCLNIDRIGVEGSGGLGRPVMLALAAAGYDVREVQANRTADRRRRRRRAKTDAEDAEAIARETLADPDLPPAGKDAAPSPASNELDVVRDWRESLVLQRVRLLTEAEPVLLSLPLALREQLPSTSRVLASLNRLTELENVDAGLSAGDRLKLDRLAASRADIVAISARIKDLDAQIPALLKALGCTLTAIHGIGVVTAMTLLTEIGDPHRFSTEGRFARWCGVAPVAMSSGEGDGPPRNHRLDLGGNRRVNSMLHIVHVTQARCHPEAQAYMTRRAAENKSKRAARRAHKRQLANVIIRRMWNDADNLARANSTPSSAAA

SEQ ID NO: 52657 - protein, 456 aa, unidentified
METTTIGVDLGVTSASDVAVAEGATVTASRKVASTPEALTAMFEKLGAHGPVNVVVESTAMAWFVAAVAVLRSGIDAQLFRVSGTKAAALRKFYRAHTKTDRIDARVLARMPLVDDGLDELVLPGAGELALKRLVVLRNKLVGEAVKVGDRVRSTLHWAAPGLLSGRESVTDGFVAVLARWPDLRRLAAARPATIAKVGSLSKARAERIRDAAADAVNFYDGLVDFDALAVEFEIAATQHATLKEQVGRLEERITALHAEQYPDDVLLSVPGVGAVIASVLRGHLGNLDRFTNLAALRAYTGLVPRENSSGDAERRGKISKAGPSMLRWSLYLAADTARKWDPQLAELYRRLMVDRGRHHHQALCAVASHLVGRIWAVIREDRPYQWRDLDGQPITREQARAIATSLAVDPDTRQRLRQQRGPDASHPRQQQAPHDHDRPSPADLTEHALKVASSP

SEQ ID NO: 52658 - protein, 394 aa, unidentified
MILVGIDIGKNKHTFSIIDKNSGEILLSPSDFSNNLKGFLFLIQKLSSYTKSELLIGMEDTGHYHFALLKYLLDRRYTVALINPTTTDLTRKLQGGITKNDPLDSLTICDVISSNHRNKPYRVTTLNRFDLYEQKQLTRHHHNLKEELYTYKNRLQKCIDIVFPEFNSLFHSKYGIVYMNILKAFSSAKAIANADIRSIRKCFEFKGQGKRISLSAEQLKLTAKSSIGIPSVAEEIQIRHLVSQIELLEKQLSEIDKRIEEFSLKNNSPILTIPGISHFSGTSIISELGDICNYTKASQIIKFAGVAPYHYESSQFTAQHTAITKKGSKYLRKTLYQIILPVISNNEVFYAYYTKKLNEGKGHRCAQGHCIRKLLRVIYHLLCTRQPFNPKLLV

SEQ ID NO: 52659 - protein, 337 aa, unidentified
MNKQSNKQFAVGVDVSQETLDVAAHSPSGEHRTAQFANASAGHRQLIKWLTKGGRRARVVLESTGVYSLDLALALDAAKRIEVMVVNPRAARKFADACLQRSCTDTTMAVALQEYAARMEFVPWTPPTPAVREVRAIARRIAALTLEKSRELNRQHAAGASADTPAVVIKDVAVNVRHLERRIAELERHAVVLIAADSQLQPIYQHLLSVCGIAETTAIQLLGELLVLPADMTARQWVAHSGLDVRHVTSGTSVHKIPRISKQGNAQLRRILYMPALVAIRHEPHVRAFYEQLLAAGKKPLQAVVAVMRKLLHAIWGMLQSNTDFDGSKFRKLPEAA

SEQ ID NO: 52660 - protein, 369 aa, unidentified
MKKDITHVALDDSKNSIVLGILRPRATEPELRQIPNEAGHLRRLFARLQREGPVATCYEAGPAGYDLYRQLTAFGVPCQVMAPALTPRKPGERIKTNRRDAAKLVRLFRAGELTPIRVPDEAQEAVRDLLRCREDVQEDLLRWRHRLLKFLARHGRVYREGRNWTQRHWTWLRGQRFANPILTRTCQEYLFTVEQLLARRAELDRELEAIAQQEPYRTPVGWLRCFRGLDTLGALTVLIEVGDFPRFESPRTLMAYLGLVPSEASTGDRERRGSITKAGNTHARRILVEAAWAYRHPPRLGPALARRSQDQPPAVLAQAWKAQQRLHRRYRHLVGHGKRPPVAVVAIARELVGFLWAALTQTGRSAQAA

SEQ ID NO: 52661 - protein, 346 aa, unidentified
MVLIGCDFHPSWQQVCWLDLATGETEEKKLVHAPGEAEKFYRQFPAPSRIGLESTGNCQWFVDLLTSLGHEVWIGDAAKIRASDVRQQKHDKRDAQLLLRLLEDGRFPRIWTPSSEEKDQRQLLIHRHKLVRVRAQVKNELQHLALNQGVQKKRHLWSEAGQKLLRQLPLKPWAGRRREDLLKLMTMLDEQIKLLDEAVTKASEENEKARLLMTQPGVGPVTSLAYVLTMGDVTRFPRGKQVASYLGLIPREYSSGGHQRLGSISKQGNRFLRMLLVEAAQIAVRYDPEFRREYLHRCQTKPKGVAKVAAARKLAIRLYWMLRTNTRYPEIVRIESRPRVPLVSAS

SEQ ID NO: 52662 - protein, 360 aa, unidentified
MKNSSRAEEWKVRPDRTVGVDLGDRCSRYCVLNGEGEVMEEGRIRTNEEAFRRHWAGQPGQRMVLETGTHSPWISRLLEGLGHEVIVANARKVRAISENESKNDRQDAEMLSRLGYCNPKLLSPIRHRGVERQRDLNLIRARDTLVRARTMLINSVRGLVKSAGGRLPAAASESFAARVCSAVPAELERATQPLLQQIAALTVEIRGLDQAIEKLAQRYPEIRILRTVPGVGPVIAAAYVLTLDGVDAVRHSRSVGAFLGLRPKQSQSGDSDPEHNISKTGNLYLRRLLVQAAHYILGRFGPDSALRRWGLKLAAGGKRARKRAVVAVARKLAVLLHHLWRSGQNYQPFPQAVATQGNAA

SEQ ID NO: 52663 - protein, 325 aa, unidentified
MHTTTVGVDIAKAKFDAARPGADGKYEHKKLANTPAGFAEFAARLEGFGGERPLLCTEASGAYGVPLAECLADPGWPVSVVNPARIAAFAKAGPGRAGPGRAKTDKADAKLIARFAREKQPEARAPPPANIRLLQALLRRADDLQEMAQMGRNRQGTASADLEGSVEAVPERLEAELEAARRRIKDHVGGDPDLRGRADLLASIPGVGEAAAARLLVALGPHYGFASAKQAAARAGLDVRIRQSGQWQGQSKITKCGDPVLRKALYMPAVAARRRNPAISAFRDRLRANGKSGRAIACAAMRKLPHIAFATLKSGKPFDPECKPV

SEQ ID NO: 52664 - protein, 325 aa, unidentified
MQSQTNYTGIDISKSFFDVAVPNGELHRYYKFSNDESGFKELLKVLGADSHVIMEASGPYYLRLACNLYEQGISVSVVNPLVIRRFCQMRLSRAKTDKKDSRMIAEYGRVEKPVLWQPPLQHIIVLQQMEAVLSHLNKEHTALSNQLESFESSGMLDKRLRKTIQKELAHKQRLIEELTNNMQQIAEEHYSDMLTNLQSIPGMGKKTAMMLVVLSGGFNRFDDYRKLSSYIGLCPRIFESGTSVKGRARICKMGMSRIRAMLYICSWSAKRCNKACKELYERLLAKGKAKKLALIAVANKLLKQAFAIATQKTKYTENYSNYICF

SEQ ID NO: 52665 - protein, 353 aa, unidentified
MRGIFEGGCDYHPGFQQIAFVSTDTGKVGERRLEHTEEAEQFYREVGKHGEVVRVGMEASGHARWFERLLHNMQFELWIGDAAEIRTKRVRKQKTDRQDAQLILQLMLENRFPRIWVPDAENRDLRQLLWHRHRLVQMRTRVMNQLHVVALNEGLRRKKALWRPEGRAELQALSLAPWAGRRRQDLLDLLDRLTPKIHELNGKLEQIVERRPVTRQLSTHPGVGPLTALAFELVIGTPERFACAKQIASYVGLAPSEESSGDRRRLGHISKQGNVLLRFLLVEAAQVTVRSDAQWRSQFFHLAMRRGRKIAKVAMARKLAVELYWMWRRGWDYRQMQQLGSHAGEPGNPHGVQ

SEQ ID NO: 52666 - protein, 361 aa, unidentified
MQRMTDPTRPVTGGVDTHRDTHVGVVLDEVGRVLGTEEFPANAKGYAALRTWMASHGELGKVGVEGTGSYGAGLARHLATTGVEVIEVVRPNRQVRRRRGKSDPTDAEAAARAVLSGEAQGAPKSRDGVAEGLRALRVARRGAVKARTQAGNQLRDLVVAAPEELRARLVSLNTKARVALASGFRPGQRTGPLEVTKAAMRSVARRHEELTAEVVRLDLAMAGLLDHAVPEELSDKVGVGPQVAAALLVTFGDNPGRLGSEASFAALCGVSPVDASSGLQRRHRLNRGGDRQANSALWRIVRTRMLHDPRTIAYVERRTKEGKTEREIVRCLKRYVAREIYKVLVPTTSSTKVEVARAAAA

SEQ ID NO: 52667 - protein, 366 aa, unidentified
MDAIYIGVDFHARQQTICYLKTETGELVISELKHEDKEKVRAFYAQFQGLVIIGLEASGYSPWFEAMLEQLGKEVWLGDATEIRRRARWRQKSDRRDAELIWDLMVHDEFPRLHQPTAQSREILRMLRYRQKLIKVRTMSKNSLQAIALQAGLAKGSRLFTKDGQAEFKAAAMSPALQWQRDHWFELLKPLNEQLLETMVWFKAQSKDDLVIARLRTHPGIGLLTALCIWHTLQPVSRFRNQRKVVAYAGFDPMIRSSAERAIYLGISKAGSRMLRYLLVEAVHTAIRYDDDLKRFYKRVAERRGRPKAKVAAARKLLIRAYIMLRDEIDYAEFRRRAVAVDLPDEVKGQAKVPEVLIRKSTSPGA

SEQ ID NO: 52668 - protein, 420 aa, unidentified
MEEVSDERAELVERVAALDIGKASLVCCVRVPHESKPGARRQEVRTYATTTPALLGLRDWLICQGVTQVVMEATSSCWKPPFYLLEDGIECWVVNARDVKNVPGRPKTGRLDAVWLAKLAERGMLRPSFIPARPQRQLRDLTRYRRTLVQERTREKQRAEKLLEDAQVKLSSVISDIFGASGRDMLAALIAGQRDPRALAGLARKQMRAKISVLQEALTGHFTDHHAFLLGMMPGRVDALTAQIDQLTTRIEEAISPFGAQIAQLDEIPGIGVTAAQEIIAEIGTDMTRFPTPGHLVSWAKFAPKARQSAGRSKAAGTGKGNPWLGGTIGEAAAGAARTSTFLASRYNRIVKRRGKKRALAAVGNSILVIAWHLLSDPDARYTDLGPHWHDRLAPQRRKRQLIAELERLSGRKVTLHDAA

SEQ ID NO: 52669 - protein, 392 aa, unidentified
MYIVGIDIGKNHHEASIVSPEGKQIGRSLRFATTHKGADSLMSFIFKNIGNSPCVFGMEATGHYWYPIYSFLKAKGYTIYVINPIQSDSLRKMYIRQTKNDSIDSFLIAEVIRFGQFGTTSMADENILAMRQLCRYRDSVISSRTEIKLRIGTIMEQIFPEYEKQFSSLWVSTSMGILEKYLTPENIENAPIDELFEIIKDKSHNRLTRAKAISIKEAAADTFGIKIAQDAFSFQLKQLIDRMNFLDKQIEALDCQILEYYEKFDCYLHTIPGIGMIAAATILAEIGDINRFKSSSALVAFAGIDPTVRQSGEFNSTHNHMSKRGSPYLRHAIFLAATTCSFHNSPLNAYYKKKRDQGKHHLTATGAVARKLTTIIYAVLRDSKPYEPKKFC

SEQ ID NO: 52670 - protein, 345 aa, unidentified
MTIVEADRVTGGVDTHLEVHVAAALDAIGGVLGVESFPTSPTGYRELLAWMSSFGPVARVGVEGTGAYGAGLARYLNRHGVEVIEVDRANRQARRQGGKSDPADAVEAARAAQSGRARGIAKTRDGNVEAIRVLLVARRSSRAMRVKTLCQIRHLTFTGPDELRERLQGLSAIMLPREAASMRPRAAGDVVAYTTKLAIRTLARRVVALDEETEEIDELLAVLVAETAPALLALHGVGVDGAATLLVAAGDNPERLRSEAAWAHLCGVSPIEASSGKVVRHRLNRGGDRQANSALWRIVMVRMVSHAPTRAYVERRTEEGRSKLEIIRMLKRYVAREVYRLLPRA

SEQ ID NO: 52671 - protein, 327 aa, unidentified
MILSSSPQDKCFLGIDVSKSWVDFADTQGRHRRVSNDETSLAAQFTGPWARELCGRVVCEATGGHERPLLRVARRLALPLCRAHPNRTHAFTKAFGKAAKTDKIDARMLADYACATQGEALTFLPGETQQKLKDMASRLQQLKALHQEEACRCGQTDVRLVQGSIHAILRVVEEQMKDIQAKIDELIASDATLYHQYRLLRSCKGVGPQLAQSLLAFLPELGALNRRKIAALVGVAPITKASGSCLNVAHIHGGRKVLRDILYMASVAASRHNPALKSGYRRLVANGKPPKLALTAVMRKLIVTLNAMVKTDTPWSPDFLPKAQNYS

SEQ ID NO: 52672 - protein, 382 aa, unidentified
MDTLSNTVAAIDSEQQKAKLFVALELGQATWVVALHSPIADKISIYRIEGGDTDQLMALIEKKRVQAARRLGRAAQVVSCYEAGRDGFWLHRFLIRRGIDNRVLDSASILVDRRARRAKTDRLDARALLRVLMALVRGEEQVCRVVRVPSIAQEDERRLSRERERLLHERNSHIARIKGLLILHGVRDYRLIERDWKERLDAVRTTEGQALPARAKTEIERECRRLWLAKQMLAEVEREIEQMIARDGVVAGKLIQVRGIGQTFASVLTHEVYYRSFDNRRQVGSYLGLVSIPWQSGSVRRDQGITRSGNARARRCAIELAWLWLRHQPGSALACWYRTRVGTMTGRMRRIALVALARKLIVALWRYLQNGIVPEGAVLKAA

SEQ ID NO: 52673 - protein, 328 aa, unidentified
MTKRTTICAGIDTGKRKLDVGLDGSGKQLQVENTPEGHKVLLAWLSQHRVKRVGIEASGGYEQPVVAELRRKRFVVVVFQPAQVRAYAKFHLQRAKNDKIDAALIAACTAAVRKIHAAPDPRLLPFAEQLTMIDQINEDTARLKNRIESCRNAQIKKLWKEDIARLEKREKAELKALVASIRKHPDLAKRLGLINSVHGIGLPTAVAILVRLPEIGRITREQAVALAGLAPYDDDSGEQVGVRHIEGGRKRLRRALYTASLAASFRWNQQLIQLYQRLTAAGKEHKRALVACARKMLIFANTVVARGTPWCDEPPAVKASMARSLSVS

SEQ ID NO: 52674 - protein, 354 aa, unidentified
MAISKQCIGIDISKATFTACVCQRLGDGELTFSKTVDFINETKGFNQFLRWAKGFIAPNTELVFLMEATGVYYENLAHHLHKIKKKVHVVLPNTSKHYFSSLNIKTKTDAVDARILSQFGVERIHKAWTPPPLILLQLRNLTRYYVQLQEQKIALGNIKHSKDCSHDIQRFILKSNKKLIAEIEKEIGRCTKEITMLVKSDPDLDKKVEKLSTIKGIGMITMVTILAETMAFEQFGSAKQLVSYAGYDVVQRESGTSVKGKTRISKKGNRYIRNALYFPAMVACRYNPSLKETYLRIIQKKSSKMVGQVAIQRKLLILMYTIWKNDTVFIENYKVSSPDSKTETTLDSSEVELL

SEQ ID NO: 52675 - protein, 335 aa, unidentified
MSKIPVFVGLDYHREAVQVCVLDGAGRVLVNRSCANDAATIGAVASRHGRPQVAAIEACCGSADLAEELIEVCGWNVVQCQAGIVARMKNNPDKTDYGDARLLADLARVGYLPRVWLPPERIRQLRQLVRYRGQLAAERKRHKQQVGALLRQERLPLAAGTTWTKRWTAALRGLAWPRLSRLIVESHLEEIQILSRRIVELERTLEEELRDDAVATWLRTQPGVGLITAATLRAEIGDVGRFRTGKQLARFCGLSPCNASSGARRADAGLIRAGNPELKRVLIEAAHRLIRYDPRWTASAVRLKQAGKPASVVVAATANRWMRGLFHAWKERAAA

SEQ ID NO: 52676 - protein, 411 aa, unidentified
MDVFCGIGWAEGHHDVAVVDRDGNLLAHQRISDDAAGLAALLELLAGHGDTPDDPVPVAIETPRGLLVACLRATGRKVYPVNPMAVARYRDRHSVTGRKSDKGDAAVLAGVLRTDMNMHRPLPADSELAQAIAVLARAQQDAVWDRTTAHNKLRSHLREYFPGFLHAFAQVRSGIMRPEARAILAAAPGPAAAATLTPAQLRALLKKAGRVRGIDAEARRLRDAFRQEQMRQLPLVEQAMGRQTLALLRQLDAACASADDLEQAATGSFNQHPDAGIITSFPGIGTLTGARVLAEIGDDRSRFQDARGLKAYAGSAPITRASGKTRSVTHRKVKNNRLASAGYAWAFAALTASPGARAHYDRRRDAGDRHTAAQRNLFNRLLGCLHHCLATGQHYDETTAFPNQAATSAAA

SEQ ID NO: 52677 - protein, 319 aa, unidentified
MSKNNLTIIHLGIDVAKLTLQLDAAHLGGLCQVPNTPAGLKILLGALRRLQRQRAASVHLLCEATNSYHRLLADTMHQAGILISVLHGERVRHFAEACGQHAKTDRCDAMVLTRFGQVMTPAPTRPPTTQQQHLNALMTRRAQLVGMLVMEKNRLESCSLPAVLKQLRQSIRHLESQVTKLDTLIAEFTAQSAVLQQQIGRMCQLQGVGKVTATGLLATLPELGTLARRQIASLAGLAPHVRESGQYKGKRTIGGGRAPARRYLYMAALTASRMNPRLKTFYQHLIAKGKPAKVALTAVMRKLLCVLNSLLKDPNFSLA

SEQ ID NO: 52678 - protein, 386 aa, unidentified
MQKLNDLSRSLIVLEPAVTLIAVIEMSLSSWLVAGIVPGVERQPLKKLAVDESALLKLLHRWREEAEKAGRRIERIVVGFEAGRDGFWLARWLKARSIEAHVIHPASVAVSREHRRAKTDRLDTALLKRAFLGWLRGERDHCKVVAIPTLKDEDAKRPNRERESLVGDQSRIVNRMKAALIRLGIRGFNPKLKRAAGRLDSLRTPEGEPIPSNTLAQLRRDMERRRLVRNQIRQIEKARLKHFEQAPNDGPHAMVRLLARVIGVGIETADMLAHEVLSRNMRDRRAIARYAGLTGSPDESGRKRREKGLARSGNGRVRRGMVQLAWRFLTYQKQSALAQWYRARTENALGARKPMIVALARKLLIALWRFVRQGVVPDGLVLRPAQ

SEQ ID NO: 52679 - protein, 342 aa, unidentified
MKIIGCDFHPSFQQIAMVDTETGEQTERKLTPEEAEQFYGQLQGEVVVGVEASGNMLWFERLLAGMGHRLRLGDAAQIQAREVRKQKTDRRAAELILQLLLEERFPEIWVPSLAERDARQLLIHRHKLVGMRRQVKNQLQHLCMNQGLQLKRRLWTQIGRKRLEELLLEGWTAKRREDGLRWLDQLDSDVAELDAAVARQAQQNAVARLLQTHPGVGPITSLAFVLTLGRIERFRGSRQVVSYLGLNPSEHSSGMRRRLGAISKQGNPMLRSLLVEAGQSAARFDTELKRAYQRLKQKKHSAVAKVMVARKLAVRLYWMWRTQQPYTATRMQGSPSHPVAKR

SEQ ID NO: 52680 - protein, 421 aa, unidentified
MDRFLLISQQVVTFSSTRNVRNLNMRRAYTMYIVGIDIAKRKHEAAVIDGEGTVIIKPFSFTNNCSGYNRLLAMLTKAKLPLDEVSFAMEATGHYWLALFTRLQKEGFRVQVINPVQTNSIRSFYIRQAKTDPRDALLIAEVIRFGHFSESTLHPENIYELRELCRGRHAIVSMQADVKRKVVALLDQVFPEYETAFANMFGDTSMAILQTCPTPKELSEMRLEELCHLIEVSSHKRFRMAKAQELQALARNSFGFAMAGDVFSTMIRLYAKHLDFLKQQVREMDRKIAEIMETLDTPITTITGIGLTLGAYILSEIGDISRFSSAAKLAAYAGIDPTMRQSGEYNGVRNRMSKRGSPYLRHAIWLAASSAVLHDPALKLYFQKKRDEGKPYMASVGHACRKMVSIIYAVMRDNKAYCLCA

SEQ ID NO: 52681 - protein, 357 aa, unidentified
MKQRRNYILRNEKVFVGLEDSKKTWSLCIRSGGIIIHETSMPAQYGVLRNYFNNKFPKCQIEVMYEAGFRGFELHDQLEADGLECVVTPPHTVTEEKCQRKKNDRTDCRRLAKNLENGDYHRCFVPDKELREDRQISRICGQVQADLVRVCSRIRRMLEFHGLDSGFPPGIWRGPAYSRLRQDLAKLELSDSLRFSFEVMFRELENLRQLKKELLLQLRKLAKSHRYKGSVELLKSAPGIGVLTAIRLALEWGDVSRFRRKEEFASFLGLVPSEYSSGGQEHRGHITKQGNRSVRRWLVESSWVAIRHDPVLLEKFRRVLRNCGSKKKAIVAVSRKLALRLRRVLLIGEPYVAGVIE

SEQ ID NO: 52682 - protein, 461 aa, unidentified
MARRKKSRNQAVPAPALPKSLEQVNLHAAGIDCGATEHYVAVPDDRDPQPVRKFGTFTADLLALVQWLLQCGVTTVALESTGVYWIPLYELLVTHGIECLVVDPRRLKNVPGRKTDWLDCQWIQKLHTFGLLRGSFRPDDEICVLRSYMRQRDMLVSYAAQHIQHMQKALEQMNLKLTEVISDITGVTGLRIIDAILGGERDPETLAALRHEKCKNDEATIALALEGNCREEHLFALRQAVELYRFYHQKISELDQRIETYLQTLPDHSGGEIIERSRPRSRSHNEPAFHVPQYVLQLSGVDLTTLDGFRCGYNMLDLLSETGTDMSHWPDEKHFASWLGLCPGIKKTGGRRLSGARPKNACRAARIFRLAAYALSRAKCALGAFFRRLKARLGAPKAITATAHKLARIFYRMLKYGKPYVDQGMEYYEQKYRERVLKNLKRRAAELGFELVERPVAAAAN

SEQ ID NO: 52683 - protein, 477 aa, unidentified
MPAGQQVEVEVDEHEEIVGRVAAIDVAKASGMVCTRVPHATKAGRRVTRVWQVPSTTNQILELAEQLAGEGIERVVVESTSDYWRPFVYVLEARGLVVWLVNARDVKHLPGRPKTDKLDAVWLCKLNERGMLRPSFVPPAQIRRLRDYTRLRADLTADRTRHKQRLEKLLEDALIKLGTVATDIFGVSGRAMLEALIAGQRDPKVLAELARGRLRVKHAALVQALTGRFDDHHAELARMLLDQIDTLGGQIDQLTARIEQMITAIPAAQPPAPATGPGGDAAATLHAGMESAESVPDHPNSDGVDPETGELLAAPLPVVDRLDEVAGIGHHAAQVIIAEVGLDMGQFPTPAHLVSWARLSPRTIQSGTRHRAGATGKGNPYLKSVLGEAATAAAKTDTFLGERYRRLVRRIGKRKALVAVARSILVIVWHLLADPTARFHDLGADYHASRIDRDRKTRNLVHQLQALGHKVTLQPAA

SEQ ID NO: 52684 - protein, 359 aa, unidentified
MVGIGVGRVVVGVDAHKRTHTLVAVDQVGRKLAERTVAATSDGHLQAVRWAAQWPQPQVTFALEDCRQLTRRLEADLLGAGHRVLRVPTRLLATARRSGRQPGKSDPIDALAVAQAALREPDLPVAHLDGPTRKVKLLADYRADLVVERTMLCNRLRWHLHELDPELEVPSRGLRRYQVIDQLAAHLAGVDGTVAQIARELLGRCRELTVRINQLERELRDLVRVLAPGLVAIPGCGVLSAATIVGETAGAGRFRSRHAFARFNGTAPIPVWSGNSVRVRLNRGGNRTVNWALHLIAVTQARGVGPGAAYVERLLAGGKTRTEALRLLRRRLSDVVYRVLLADEHRQAEPVLASAPQAA

SEQ ID NO: 52685 - protein, 404 aa, unidentified
MWYAGLDWADDHHDVVVIDEAARQVASKRVAHTKAGLEELTSLLKSIAGPSFQEQLACIVETNRGLLITALLEAGFTVYPVNPKAIDRRRVASGAKTDRIDAYLLAKLGRSELADLRPLKPDTPKIAELKALTRDQDALVQMQTSLVNQLTACLKAYYPVALKLFTKLQQRSTLLFLQTVPTLQAAQAASQHQLVQVLKQAGHPTAEKVTPKIYEALHQPQLTADAITTSTKARLMLVLVGQLLPLVEQIAAYDKDIKDLFLTHEDRHMFESLPRAGKRLAPRLLAELGDDRDRYADARSLQALAGTAPVIYQSGNYQKAHRRSACLKPLRNVLYLFAWQSTLSETWAKAYYQRKRAEGKSHSVAVRALSNLWLRIIFAMWTSKHAYDATAFEASRQLHAPRAA

SEQ ID NO: 52686 - protein, 398 aa, unidentified
MNAIGIDVSKGKSTIAVISETKEVLLAPQEFFHTDEGLRKIVTTILAFGKNTKVVMEATGHYHEPVAQALHKMRVCVSIVNPLLVFAYGDNSVRRVKTDKKDALKIARYCLDNWEELREYIPQETIRHQLKLFSRQYNLCIKTVHTLENNLVSLLDKTFPGAPGFFTSQKKKNGRQKWVDFVLAFWHADIIATVAASEFYKAYQDWCEQNYYRFSLHKAQEIYQKSQGLTTTLARSIDNKLLITSAVTQVIALATALAQIKAQLIHLSSLLPEYEHARAFYGVGEVTAAQLIAEVGDVRRFHSGRALIAYAGIDPLPKQSGTYEKKSTKTSKRGSAPLRKTLYQIVVTHLRHSPKGEAVYEFMDRKRTEGKPYFVYMTAAANKFLRIYYARVKEYLND

SEQ ID NO: 52687 - protein, 375 aa, unidentified
MSKIRFIGLDVHADTIAAAVAEPDGEVRPLGIIPNRLESIRKMVAKLGLVNQLKACYEAGPTGYVLYWQLTGLGVPCEVVAPSLVPVKAGDKVKTDRRDAAKLARCYRAGDLTPVWVPDAAHEALRDLVRDREDAREDQQRARQRLGKFLLRHGRQRPADIKENWTQKHMDWIKRQVRFEQPASQAAFLDYVHEVEHAADRLGRVEKAIDDAIAAAPAEIQQVVQALQALRGVGKIVAVSVVAEVGSLSRFPNPRQLMGYSGMVSSEYSTGKHVRRGGITKTGNAHLRRVIVEAAWAYQHKPWIGGWLAKRQQGLDEETKAIAWKAQWRLCTRYKKLAAGGKNKPQIVTAIGRELLGFIWAIAVRAEARAAGQTA

SEQ ID NO: 52688 - protein, 333 aa, unidentified
MTTKTIVCVSAGIDVGAETLILVIRKNAVSMKAQTFANTLADRKRLVKKLAPFPGIIVCLEATGVYYLDLAIALHAAGIRIMVLNPKASHHFAQVLLRHSKTDAVDADTLAQYAERMPYQPWARPADEALALRCLARRINTLTRNKAAAKNQRHALTFSPQTPKAVLRDLKLSITQLEKRIDCLTEEAKTFIQAHPALARPFALLLTVKGIGEASAIALLGELLLLPKGLTHKQWVKEALLDPRHFQSGKSIDKRARLSKAGNRAIRQALYMPALSAKAHDPYVRGFFEHLIANGKTPLQAVCAVMRKLLHAIHGMLTHHQPFDNTRFYTFPA

SEQ ID NO: 52689 - protein, 392 aa, unidentified
MNRIVYIGMDVHTSNYTLCSLDPGYGVEKDNYFAEVQFTNDFIKNVVNYVTNLKKKLKDCEFVCGYEAGCLGYSTYKDLTKVGIKCVLMAPSTMAVQKGGKKVKNDRRDARVIAQCLAYQTYKEVYVLSEHDEAVRGYLRMRDSHNKALKRIKQQIIAFCTGHGLFSPTKSNWTVAHLKWLKDLKFNDPVEQEILNEDLSSLTFLSDKIKAMDVRIEELASEKQYCENVKKLRCIKGIETNVALTLLAEIGDFNRFSKPTDFASYLGLIPGEQSSGDKVRGTGITKAGNSTLRRKLTESAKGYWRGRIGIKSATFKKLEKELPKEVTEYALKANTRLQRKFFNMTHVKGKNMNVAASACAREMACFVWGLITNHYEKAPAVPKTDEELLDLN

SEQ ID NO: 52690 - protein, 433 aa, unidentified
MNTPHPYDLVIGLDRSDKKADLHLIDTATGQRRSEIIDTAPEALREWLLQLRQQYPQARVALCLEQPAVHLIAFLEAYEWITLYPLNPISLQKFREAFVTSRAKDDTRDAYYLAELLLTHHDQLKPWAPEDSATRAVQQLVFHRRAVIDERTGLTNRLIALLKQYFPQALVLCGEDLWRPLSTRFLLKWPSLQAVQKAKPATLKQFYYLNGSRSAKLLEQRLALAAKAVPVTDESALIDSFVLRIQLICRQLQLLQQTLASYEQQIAQAYAGHPDQPIFASLPGAGPVLGPRLLASMGSQRERFPSNANLQCYSGVAPVTKKSGGSCRIHRRYLCPKFHRQSFHEYAKESILWSRWAAAYYLQQRTKGCPYHTVVRALAYKWQRIIWRCWQNHTPYQEEIYEAALRRSKSPLIALLDKVELGKSPYKKPANNN

SEQ ID NO: 52691 - protein, 430 aa, unidentified
MNYNTQNAKIASITEKTLIVGIDVGSETHYARAFDWRNYEYSKKPLSFSNDEAGFATFKAWMEDMMEKHEKTAVIPGMEPTGHYWFNLGAYLQEQGFKPVHVNPHHVKKSKEMDDNNPNKNDRKDPKTIAALVNEGRFSYPYIPTGIYAEIRNLSNLRLQTQEEITRIRNRIARWFSIYFPEYKTVYKQPDSVSGMMVIRQSPLPCDIKKLGVDGINKIWRDAKLRGAGLKRAKTLISAAEHSIGSCEAPESARMEMQNLLKDHEVYQGRMDELMAAIERKLAEIPYIDKLMEMKGIGIKTVSCFIAEVGDIRRFDNPKQVQKLAGYAIVSCDSGKHQGESHISYRGRKRLRYALYEAAISVIGKNREFKEVYDYYRTREKNPLKKMQSVIAVACKLIRIFHIILTKGVDYDGERMLRDIIRPEIAVQAA

SEQ ID NO: 52692 - protein, 311 aa, unidentified
MEIYVGIDIAKLTFDLCSGPQKQNQQFENNTKGIRQAAKMLTGLRPKLVVMEATGGYETPLAAELYAVGLPVAIVNPRRIRDFARARGQLAKTDKIDAEVIATFAAKMQPPTQEHIDHTSRLMKALVARRHQLIRTRTAENNRMEHALEKVITASLGRIIKTIDREIEKVERLIREQLARMPELKAKAQMLDSTPGIGETTAAMLVTEVPELGRLNRRQIAMLIGVAPINRDSGTFRGKRMTGAGRRDVKSRLYMPTLVAIRHNNVIRSFYQHLLSKGKPKMTAIIACMRKLITILNIMVAKNETWNPNLA

SEQ ID NO: 52693 - protein, 344 aa, unidentified
MEISTIGLDLAKNVFQVHGVDPEGNVVVRRTLRRAQVLPFFAKLPPCLVGMEACGTAHHWARELARLGHDVRQMPPAYVKPYVKRGKTDAADAEAICEAVTRPTMRFVPVKSPEQQAALSMHRARDLLVKQRTQLVNMMRALLAEFGINIPQGVRLALEMARKIVDGEAPAVPREAAKIAGRLSQQALDTHAQLREIDLDLLAWQRANDTARRLTSIPGIGPIGATALAASVTDANQFRSGREFAAWLGLTPRQHSSGGKERLGRITKMGDKYLRTLLVVGMASLIKRVNRKPETADPRFVALLARKPVRVATVAMANHIARVVWAIMARGETYRAGHQPRLAA

SEQ ID NO: 52694 - protein, 399 aa, unidentified
MRQYFVGIDVSKRCHTAAVVDEDGQLRLKDFDFTDDVAGYESLLGALGRLPEGGDLHVCLEATGNYAHRLAAFLRAQPGFTVSVVNARSSHHFAKVLMARTKTDRVDAVVLARYARALRPRATTAGRQEALARLTRSRRTLQLSLIAQVNQLRNLLERVNPGVERGFHRLDCGGALAVLERYATGSMLARARPEKVAQLRLNKRLVGRVRADRLVASARSIPGEQGAATDAVVVRQLVAAIRQLQRSLAALEETIAEQVRGHLLFTIDGLGPNTVPVILAESPVDQLDTDTQAMAFAGLNPRLRQSGRFAGKVKLSKCGPAALRHALYLGAVSVRNYNPVLRQYYLRKLAEGKRPNTAIIACMSKLLRIIFAVLKTGRPFDSDYETNRTRARPLAPQAA

SEQ ID NO: 52695 - protein, 327 aa, unidentified
MTQPVLGIDIAKASFDVCLIIEGKNRQAEFENNSSGFKKLSHWLGKHTPVKVHACLEATGQFGEALAEYLYQAGHMVSVVNPARIKAYGSSKLRRNKTDKADAELIAQYCLREQPALWTPPPASFKDLQALVRRYDDLQTTYQQEKNRLKSGTTQPVVVADLKEHLAYLEEKLALILQAIQEHIQACPELKQRQDLLLSIPGIGKLTASKLLGEIRDVCAFGDARQLAAYAGVTPRNFVSGTSICKKARMTKMGNANLRKTLYMPAISAKRYNPIIRAFCQRLLDAGLSPKQVIGAAMRKLLHLIFGILKSGKPFDPNFLQKKAFAS

SEQ ID NO: 52696 - protein, 358 aa, unidentified
MKIVGCDLHARQQSIAMLDTESGEFTERIVRHEGNAVREFYAALEGPVVVGIEATGSMQWFLQLLEEMGIQYRVGHPAKIRAAETRKQKHDRRDARLILDLLVMKDRFPEIWMPSMEQRDLRTLLRDRHQWVKMRARLQHTLQSIALNHGLRQGPGLWSVAGQSAMQALPLTLYTTQRRNALLSLYTQLQKRIQELDKVVEGEAQSRPQACRLLTHPGVGPVTALATEVFLGDPNRFRTGKQVASYIGMIPGEHSSGKRQRLGKLSKEGNALLRYLWTEAAMHAVGKDPELKRFYRRKLIQKGMGKARVAAARKLGIRLWIMLRDQVNYEEFCRRGRLRQEGEAHAGMPAFNSGPALQ

SEQ ID NO: 52697 - protein, 346 aa, unidentified
MEISTIGLDLAKNVFQVHGVSATGEVVIRKALRRSQMLPFFEKLPPCLVGAEACGTSHHWARELTKLGHEVRLMPAAYVKPYVKRGKNDAADAEAICEAVTRQTMRFVSIKSREQQAALSLHRVRSLLIKQRTQLVNMMRSVLAELGIAIPVGIVKALQMAREIVDGEFKLDLPTEATNVVAMLAGQLLQLHAQLRKLDLRLAALQRSDERARRLATIPGIGPIGATALAASVTDPSQFSSGRQFAAWLGLTPRQSSSGGKERLGRITKMGDRYLRQLLIVGATALVRYAKEKPSTVDPRFVALLARKPARVASVAIANKMARIAWAVMARGGVFERGHAPMLATA

SEQ ID NO: 52698 - protein, 391 aa, unidentified
MAFFVGIDVAKFKHDCFIADDNGRVIKDSFSFKNDKAGFNVLLLALDELKPKEQIKIGFESTGHYHFNLKLFLEENNFTYMEFSPLLVHKFIATVSLRRTKTDKKDASMIARYLMTVDYKPYPNKFYHINNLKSLCRFKESLIVERTKYLNKLTVILDLIFPEFKPFFENKFNKTAFYLLSKYKSPKRIANLSINAYHEMRSKLKHTISYQKFSALKDLASDSIGKTDDVLNFELESLLDLHFSLNVRIEAMEKKIIVIYQSLAYKVHSIRGVGLGSAAIIASEIGNFSRFASAHQLLAFAGLDPSQSQSGISESSGKMVKHGSSYLRAAIMRVAETFYVFNPQISDFYWKKRKEGKAHNVALSHVARKLVNTIFALEKSPDKVFNSALLK

SEQ ID NO: 52699 - protein, 368 aa, unidentified
MTMIAHYVGLDVHKETITIADAKAGRDPARLVGTIPNDNPKLLKRLVKLGPRETISCCYEAGPTGYGLYRFLKTSGIQCEVIAPTLIPRQAGKRVKTDKFDALKAARCHRSGDLTPIWVPDEQAEALRDLVRAREDAKATERAARHRLSKFFLRQERRYSGGRPWTGMYLEWARVQKFAHDAQSRVLREYLHVVESATATVERLDLDIAELVPSSSLNPLVKALQALKGVRLLTAAGIAVEVGDLHRFRRASNFMSFVGMGVAERSTGDQRRQFSITKTGNGHVRRLLVEAAWAYRHPPKMGNDLRKRSEGLPPKILEIAWKAQDRLHRRYRRLRARRKPHQVVIVSLARELAGFVWAVGQDIELPAV

SEQ ID NO: 52700 - protein, 361 aa, unidentified
MKRPLAVIWVVKPMRQETKVYVGLDVHKEFCQACVMNESGKVISNERFLSTQDALDKFLDRFEDAEFVLESTGIWEFIYEGIEKRGFEVILAHPLKVRAISEAKVKTDKVDAETLAHLLRADLIPRSHVPPRDIRNLRQLVRHRAYLVRQCTSIKNRIHAELLRRGIRRPDDLKKTFTFKHVEWMRSLGILTVTSSLDCLEGIQEQIREVESFLLVEYNSRRDAQLIATIPGIGFYGALLILAEIDDIHRFSHPEKLCAYAGLVPTVHQSASRSYNGSITKNGSPHLRWILIEAVHVHTNYCPGSKLSKFHAKVAQRRGKQRATVATARKLLHTIYWMLLTKEKFHCQGFNLVEKAATLIA

SEQ ID NO: 52701 - protein, 356 aa, unidentified
MSQGTWIGLDVHARKTVAGVLDAATGEVRTCRVASRPLETVAWLRELPAPVRVAYEAGPTGYGLARACAAAGIACTVAAPSKIPRASGDRVKTDRRDAERLARLLRLGELVAVRVPEPHEEAARDLVRVREDARGELMRARHRLSKLLLRHGLVYDAAAWTLAHDAWLRRQRFDSAALQLALEESYAAAVHAKTRRDALDQAIAELAIEPPFAEVVGKLCCLRGVSTLTALALTVELGDWHRFRPESLGPFLGLTPSEDSTGERRRLGAITKTGNTHARRLLVEAAWHQRRPLRSSTALERRRQGQPAAVQARADQSGRRLYRRWHALESRGKRRTVIAVAVARELAGHCWALATM

SEQ ID NO: 52702 - protein, 347 aa, unidentified
MQVTTVGIDLAKNVFQLHGCDARGKAVLRKQLARGRLLGFVANLPRCLVAMEACASAHYWAREIEKLGHEVRLIGPKFVRPYVKANKNDASDAEAICEAASRPSMRFVAVKSAAQQDVQAVHRVRQQLVKTRTALVNQVRGLLAEYGIVFPQGIAHLRRALPLISEDCDNGLSGVMRELLGEIGERLKFIEERLRQYELRIQRLFRQDERCRRLAEVEGVGPLIATALVAAVGNASEFKSGRELAAYLGLVPRHRASGGRTVLLGISKRGDRYLRTLLVHGARSAMRTIERRRTARSVWAGRLKLRRGSNVAAVALANKNARVLWALLTRGESYRPTPVSARIPQAG

SEQ ID NO: 52703 - protein, 412 aa, unidentified
MKDLLEISCGLDVHKEKIVACILTGPLGKPTHSEIREFTTLIPDMIALRDWIVSQNCHHVAMESTGIYWMPIYEILEDAFSGDITLLVVNARHMKNVPGKKTDMRDSEWISTLLRAGLLNGSFIREKRIREFRDLNRYRKSAIRDITSQKNRIEKFLQSSGFRLSSFISDIFGASGRNIILHLIKHGQIDRTALDSCLKTKTRNRIDEILMSVNGMLSEHQKSFLKILMSHYDSLKEHLTEIETNLKEDMAPFALQVEQLNSIYGISTIASCAIIAEIGIDMKPFKTAEHICSWAGLCPGNNESAGKRKSSSITKGNPYIKSILCEISWVIAGKRNTYLSSWYWRIKQKKGAKKAIIALARKLLVIIYTMLKQGALFDESCFEARRKSCEQKQLSRYIRELEKQGYHVEAQA

SEQ ID NO: 52704 - protein, 365 aa, unidentified
MKDTMIGVDLAKNVFQVHGATMAGQLKFRKKLTRFQFRQFMACQAPAVIVMEACGSASHWAREMVKLGHEVKLIAPQYVRPFVKRQKNDAADAEAIVVAAQRPEMRFVQPKSEDQQACAVLFRARARLLHQRTELVNALRSVLYEYGHVVPKGIAHIKRIESILDDPNSDLPALVREECRDLIEQIAEKTTRIESKTKKARALSMATDTARRLQTMPGVGPQTALAISGFAPPMESFKRGRDFAAWLGLVPRQYTSGGKERLGRVSKAGQTDIRTLLISGAMSRLTVLGRKSIVEGSWLARMLRRKPLMLVAIALANKMARAIWAMITKKEVIEIRREWRLHDGYAPPQAGVGERGVGSRRPEWA

SEQ ID NO: 52705 - protein, 432 aa, unidentified
MIEAARFANTVGGYAELIAFAARWAQRRWAVEGCHGAGRSLAQRLVADGELVLDVPAKLAARVRVYSRGHGRKTDKDDAVSVGLAALDGTGVTLVACDDATVSLRLLCDRREELTAQRTQAACRLHRLLAELTPGGMRRELSANKAQALLARIRPAGDVATVRVHIARDHLADIRALDARIKYLGGQIAALVTASGTGLTGLFGIGPVIAGRLLAEVGDVARFATKDTFASYNGTAPIDVSSGEQVRHRLSRAGNRRINHALHMMAVTQIRYPATPGRLYYERKRREGKTPKEALRCLSGGCLTRSTISSSPTGGAQSERADHLRPRRRRGLHPPHQRPAHTRPHHPPGPYTARHHRVHRAGLERRPPRRHRDPRRQHPPPPRPPRPGRNRQLKRQPLDREEPIWSVFGIGGTRSAGVTRCRCGAIQPVQHA

SEQ ID NO: 52706 - protein, 348 aa, unidentified
MEHYAGIDVSLECSSVCVVDASGKIVREDKVGSEPEALIVWFGSLGFELGRIGLEAGPLSQWLYGGMKQAGFAVELLETRHVRDAFKAMPVKSDRNDARGIAQLMRLGWFRPVHCKSIVAQEVRAVLTARKLVQSKRLDVENSLRGILRGFGLKVGKTTHRSFAGRVDELVAGHPTLQGIAKALLAVHAVLLREFNALDKQLRAVARSNPQARLLMTTPAIGPIVALTYACAIDDPSRFRSSKAAGEHFGLTPKKYQSGETDRTGRISKIGDASVREALYQAAHVMLVKPIRGCSELKSWAMRIARRAGARKAKVALARKLAVILHRMLADGQAFNPTAKARMLAVAV

SEQ ID NO: 52707 - protein, 399 aa, unidentified
MHDGYGVYLGLDVGKGDHHAVGLAPDGKRLHDAALPNTEVRLRQLFGKLARHGRVLVVVDQPASIGALPVAVARAAGHQVAYLPGLAMRRIADLHPGTAKTDARDAYVIADAARTLPHTLRRVDVGDEALAELEVLVGFDDDLAGEATRVSNRIRGLLTQIHPALERVLGPKIHHKAVLELLSRCGGPVGLRKAGRRKLVSIAAVHAPRMGERLVEQILTALDEQTVTVPGTQAAETILPRLADSLRDVLRQRDQTAGEVERMLDAHPLAPVLTSMPGIGVRTAARILLEVGDGTAFPTPGHLAAYAGLAPVTRRSGSSIRGEHPPRGGNKNLKRAFFLAAFAALADPTSRAYYDRKRAEGKRHNAALICLARRRCDVLFAMLRDKIPYQPRPTSPVPA

SEQ ID NO: 52708 - protein, 347 aa, unidentified
MLHAGLDLSRKKVDVCLFSEAGEHLDQLATAPDAGSLRTLARRIEETHHQPVCAVIESMTGARFVHDTLEQEGWSVEIADAQKVKGMAPLACKTDKIDSKVLATLSHRDLVPAIWLPDPRVREERELARFRLHLVKHRSALKNRIHSSLINFGKPCPVTDLFGVEGRKLLEHLEVPEPWRSNITASVELIDDLEDQIADANKRLKQGHADHPYIPLLISAPGIGWVLAFTIAAEIGEIERFSSPDKLAGYTGLCPRVNQSGDKDRRGPITKHGPTYLRWALLEATMHASRHPAYAERYQRNKKRLGKQRGAKVAQIDIARRLTHAIWHMLRRGQTFAPRGAAFRLAA

SEQ ID NO: 52709 - protein, 344 aa, unidentified
MDKSITVIGLDLAKSVFQVHGINAEGEVVVRRKLSRSRVLAYFNQLEPCLVGMEACATAHYWGRELRALGHNVKLMPPQFVKPYLKSQKNDMRDAEAICEAVTRPTMRFVPIKTPDQQALLALHGVRDHWVRLSTRLINTLRGYLAEFGIVAARGRMGVEAILDTLADDQDERIPDLARECLRPLASELRHVKRQILEMDRKILKAHRANSICQRLETIPGVGPVIATRVVAEVPDPKIFKSGRAFSAWVGLVPKQHSSGGRDRMGRITKTGNPELRRLLVAGAMSMIIRAKQLGFTKHPWLSRLLERKPMMVVAIAMANKIGRMIWALMVKGEKFNPAKLMPA

SEQ ID NO: 52710 - protein, 385 aa, unidentified
MQADHTDAPAGVDYATVHVVFELSKSTWQLGVMTPGAEKMSRYRINGGNLAELSHVFAKVRAKAEQLGKPVRILSCYEAGFDGHWLHRWLTDNGIVNCEVDASSIEVSRRARRAKTDRIDLALLMRAFLAHLRGEPGVCSMVRVPTPEDEDRKRRTRERDRLLTERTAHTNRIKGLLHAQGIRDVLPLKPNFLSDLDEMRTGDGRALPPRLSGEVRREHERLLLVHKQIKTVEAENSAAYREPAKGSVEAKAALLVQLKAVGPQTAQVLTNEVFYRDFKNRRQVGSCFGLTDTPYDSGDSRRQQGISKAGNHRARKVAIEFAWLWLKHQPDSELSRWFFQRVGKVKGRIRKIAIVALARKLMVALWRYLETGLVPTGAVTHPTRL

SEQ ID NO: 52711 - protein, 347 aa, unidentified
MRFYTKQHPFYGGIDLHARTMYVCILDQAGDILLHRNMPATPEALLKAIAPYREQIVLAAECMFTWYWLADCCSDHGLPFVLGHALYMKAIHGGKAKNDKIDAHKIAVLLRGGMLPQAYVYPAEMRATRDLLRRRMHLARKRGELLAHVQNTNSQYNLPAIGKKIAYKANRDGVAERFADPAVQKSIEVDLALITYYDELLRDVERTIVKTAKHHDAQTLYLLQTVPGIGKILSLVLLYEIHDLARFPRVQDFASYCRLVKCAKESAGKRSGTSGSKIGNAHLKWAFSEAAVLFLRDNPAAQKLLTRLEKKHSKGKALTILAHKLARAVYYMLQRQTAFDLETFLHT

SEQ ID NO: 52712 - protein, 414 aa, unidentified
MKELYPCVCGLDVHKKAVVACLRRIGEQGRIHREVRTFGTMTRHLVALREWLRQAEVTHVAMESTGVFWKPVYNVLEGHFAQVVLVNAQHVKNVPGRKTDVGDAEWIAQLLQCGLLRASFVPARGLRELRELTRHRTQLTQQQAAVANRIHKVLEDANIKLAAVATDILGVSGRAMLEALIGGQTDTAQLAELARGQLRGKIPELRVALEGHITDHHRFELRTLLAHYDFLGQQIEALSARLEEVSPRPFREAIALVCTMPGTQARSAENVLAETGIDMSQFPSAKHLNSWAAICPGNHQSGGKSKTGKTRKGNRWLRGALGPMARGGARTKGTYFRTQFQRLCTRRGKQRALVAVQHTQLTAIYHMLKHQLPYAELGADYFERRDAARLTRHHVNRLERLGHKVTLIPIGDAP

SEQ ID NO: 52713 - protein, 333 aa, unidentified
MDHCAIDLGGKKSQVCLRSPDGRVLLEARYDTLSLPDFLRQLPHSRVILETAAEAFRIADAAKTAGHEVRVVPATLVRTLGVGARKTKTDRRDAQMLSEVSCRIDLPSVHIPSARSREWKTICGMHDALISSRTKLINNLRGWLRGQGLRLSSGSAETLAGRIAEIESLPEYVASQVAMLALLTEKIRASEQRIEDLAKSDELCKRLMTVPGIGPSTAARFVAAIDDIRRFESAHKVEAYLGLAPGESSSSERQQRLSITKAGPSTVRWVLVQAAWSLQVRCRSVAARPLQLWTAEVAKRRGKRIATIALARKLAGILYALWRDGTTYELRPQ

SEQ ID NO: 52714 - protein, 341 aa, unidentified
MSKVTVYVGLDYHKDSIQVCVMDAAGKVLVNRSCRNDARALTRLVAAQGNRVRGAIEACSGAADLADELVGRYRWDLDLAHPGYVHRMKQSPDKSDFSDARMLADLVRVGYLPKVWLAPEDTRQLRTLVRFRQQLVNQRRAAKLRVTALLREARVEGPGTRRWSRAWLAWLATAEGLGSEARWVLDNHLADLRRLDEAVLRVEARLAKVTAGDPVVAQLVALRGVGPVTAWALRAEVGRFDRFHSGKQLARYCGLSPQNASSGQRQADAGLIKAGSELLRATLIEAAHRLIRFDTRWGALAARLRAAGKPACLVAAAVANRWVRWLFHQVEGGSITLRAAS

SEQ ID NO: 52715 - protein, 338 aa, unidentified
MEQQQQYVGIDLHRRRSVIVRMNEGGEVLETVRVANDPLEFALAVAKAGSDPEVALEATYGWYWAADLLEANGAHVHLVHALGLHWDSRRVKNDERDATELAHRLRRSDLPDPWMAPPDVRDLRELVRYRAKLRALRTSAKAQIHAVMAKEGFLPTFDDMFGPGGQDALDKMDFSGAFKTRVDSLRDLLDVFNREIATVEGHLARHLDEHEGYRAIQAIHGVGPILAAIFVAEIGDVDRFKSARHLCSWAGLTPTHRESDTKVSRGHITKQGSNLVRFAAVEAVAAYHGGAPIAPAYHRIAKRRGMMVARIAAARKLLTLVYYGLRDGEIRCLTEEAA

SEQ ID NO: 52716 - protein, 309 aa, unidentified
MFVGIDGAKAELVIAVRPTGARWTVPQTEADWAGLVPQLAALAPTLVLLEATGGLARPVASTLAAAGLPVAVVNPRQVRDFAKATGSLATTDAVDAAVLARFAEAVRPVPHPLPDAATRALEALGTRRRQLVEMRTAEQNRLGSTPALRRPRLQAHIRWLRRELGAVTAELQDAVHAHPGWRVQDNLLRSAPGGGPICAVTGLAGRPERGRLSRRAIAALVGVAPWRRDRGTRRGPRRCWGGRAAVRPVLYMGTLAAIRHNDVIRAFYQRLRRAGKLKKVAIVACMRKLLTILNAMINHQTPWAAVRPV

SEQ ID NO: 52717 - protein, 324 aa, unidentified
MTDAVLGIDVSKNTFDTNLGAGIKARSQSFANSPDGWHHLIAWLGEHKIGQVHACLEATGRHGLGIALALHEAGHVVSIVNPAQIRDFARTKLGRNKTDQVDAVHIREYAELFKPRPWTPPSPAMRRLCELQTIRAGTVAGLTEWKNRRGSGMADDLALSLAETTIQHFTSQLKAVDQAIAETIDNDLELSAKRDLLVSINGVGEALAGIVLAELPGSDILGCSAAVAAYAGLNPQQHQSGISVNRPVRISKIGNAVLRTALYMPALSAMRYNPAVVALVDRLKAQGRLKGKQIVIAAMRKLLVLCFGVLKTGKEFDPAMAMGK

SEQ ID NO: 52718 - protein, 395 aa, unidentified
MEEHSAGENLSWFVGIDWATEAHEVCVVDNAGKKVATKSFSHSGDGLVALCDWLAKVTSAAHPSAIAVAIELVRGAVVSTLLERGFQVYSCNPKQSDRLRDRHSVGGAKSDALDAFVLAEAARKDRLLLRKIQSESAQTIELRELTRLHADLTDDALRLENRMREQLLRYYPQMLAFGNDLDELWRLELWELAPTPDSASKLKETYVKTMLRRHRIRRVTADQVVKTLQARKLHVAPGVTEAAVLRIRTLMPQLRALREQLRLVDKQTTQMLESMAGDPECIEGQSSEQRDVAILMKLPGVGKVVASTLLAEGAELLRTRDYHQMRALAGVAPITRQTGKQGRSKGSTPFVTSLRARGKNLAQTRRIIGDRLLRTLCACLRDGKHWDPARHALIA

SEQ ID NO: 52719 - protein, 341 aa, unidentified
MNENARMEIEAVVGIDVSKKKLDLVLVQAAKSKSKVFANDAGGHAQLRRWLMERGCRQEFTRVCLEATGPYSEPLALALVDGGWQVSVVNPARLKGFAQGELSRNKTDRADAGLLARFCAAMRPELWQAPAREVRQLRAWVDRVQALKDMRQQELNRIEALEAAEHSAVKSHVQAHVIWLDGQISALERDIDDHIDRHPQLKGDADLLETIPGLGPTTAAKLLAYAGDLRRFHNAKALAAFIGVSPRQRLSGSSVRGRTMMSRTGHKALRRALYMPSLVARRHNQALKAFADRLAARGLAPKAVIGAVMRKLTHLIYGVIKSGTPFNLTQAMPKLDTQDGI

SEQ ID NO: 52720 - protein, 345 aa, unidentified
MNYVGIDWAYGRAAFCSMNQTGAIEAEGMIPASEDGLARLVLKVGTEVKACVEMMSGAVWVRDQLALAGWEVMVAHARKVRDVAPLACKTDKVDARVLAELTRRDLVPELWVPPPEDRALRERLRRRMHLVKTRTAARNRIFGLLTQFGLKISLRRLQEDDALELLERRGVPGPWRASIAELLEVIAEMDARAKVIEAELRPVSAADRRAELLMTMPGIGPLLGLTIAAEIGEVSRFSSPAKLVGYAGLAPRISQSGDRSATGALSKAGSRTLRWAAVEAANQAWRPSNPWHGHYARISERHGKNPAKSAVARKILIASWHMLARGEPFRPHQPAPANSSRFLAA

SEQ ID NO: 52721 - protein, 339 aa, unidentified
MKVSTLGIDLAKNVFQLHGVGCNGQTVLKKKLTRDKFLPFLMQLEPCLIGMEACASSHHFARVLRQYGHEVKLIPPQYVKPYVKTNKTDAADAEAICEAVARPNMRFVQIKTAEQQAILVLHTERNILIRERTACANSMRAILAEFGIIMPRTLSQLYKKIPEILEEYDNELSPFVRCSVARQLEHLQGVEDQITLIEQELSRWAKIQPACQRVMKVPGVGLMTATYLVASVGNGQQFHSAKQFAAWLGLVPREFSSGGKQRLGRISKRGDRYFRYLLVHGARAVAAVIERHKDNMPWLYRLLNKKAYNVAVVAQANKTARILWSMLVHHTEYRTLSVV

SEQ ID NO: 52722 - protein, 341 aa, unidentified
MEHIAIDLGSRESQVCIRNEQGKILLERRVLTLGLEGMLAARPPARVIVETSSESLAVADAAVQHGHQVRVVPATLVRALGVGARGIKTDVRDAQVLSEASCRLDLPSVHMPAPLSRERKAMCTCRQSLVRTRTHLVNTTRAFLRTRLVTLSPGAPESLPKRVRERLLKTPQGVPEHVEWLLKSVEALNEQIHLADQRLTSLAKQDATCRRLMSVPGVGPITALRFVSTVDDVKRFPNADKLQSYLGLTPGESTTGFRTQRTRLTKAGPACVRHCLGQAALVLWRIRPNDPMVVWAKAVCGRVGKPKAVVALARKLSRVLYAIWRDGSSYNPNHRRPAPRA

SEQ ID NO: 52723 - protein, 349 aa, unidentified
MYYVGVDVHQRRSSVEILDQNGALYKRFQVFGRWPELIQRIDTEAPRPFAVCYEASCGYGYLHEQFSRMAHRVAVAHPGQLRLIYRSKKKHDRIDAAKIAKILYLDTVPEVHVPSMDIREWRALVEFRQRLVARHIAVKNQLQALLRGLAIVPVKGLWHRKGLQWLKELSLRDLDAVRRDLLLEELDQQYQKIQRLNRALAQIAARHPGITLLRTIPGVGVRTAEAVLAYVDDIRRFRRVGQVASYFGLIPCQDASAAKNRLGHITKDGPDTARKLLVEASWMAVRRSPTIRQLFDRFVQEKPGRRKIAIVAVAHHLIRVMTAMLRTGEVWRESPLMTTGRHGTPIRPT

SEQ ID NO: 52724 - protein, 359 aa, unidentified
MGSIAFDPADVIVGVDTHKDQHVAVALDGLGRRLGERFVSAAPAGYADLLAWAAGLGRVAAFGVEGTGSYGLGLARFLRRHGVMVLEVARPPRKGQRRLQGKSDPVDAEHAAREVLAGTSVVTPKTGEGAVEAIRLLKVARDTAVVAHSQAMITLKATLVTASDTLRAELEPRTDFALVTACAALEVSGELADPEVAMRHALRALACRWLALHEEIKAHTRHLKRLTSRTAPALVATFGIGFDCAAELLCAAGDNAGRVRSEAAYAKLCGACPIPASSGKTSRHRLNRGGNRQANAALFRIVVVRLRWHPATIAYVHRRTAEGLSKREIIRCLKRYVAREVYRLLPVPATASAEPLQAA

SEQ ID NO: 52725 - protein, 422 aa, unidentified
MSKRRYSATKFNAVNWAGIKEQVAGQRTVFAIDVAKEDFVGAVMSSDRTVLVTVKWTHPQQTRALVEQLEGLARTAMVEAVMEPSGTYGDALRCQLSQAGLVVYGISPKRVHDAAEVYDGVPSLHDAKAAHVIGRLHLEGTSQPWREPSVQRRSLTAQLRLLELYKGRERAGVSRLEAQLSRHWPEVLQVLEPGSVALANLIATYGDAARVAAEPVAAAALLRRAARAALAQEKIAAVLASAEQTVGLPCVQAERQLLQGLAQDLNETREALHRLEREVQGQVVADATLQRMAAVVGKTTSAVLAAAQGLPQDYPNAASYVKSLGLNLKERSSGKHKGQLKITKRGPGVSRHYLHFAAMRQVYYDPIVQQWYQGKVRRDGGLTGKAMVAVMRKLAKALWHVARGEPFDSGKLFNCKQPQVVA

SEQ ID NO: 52726 - protein, 424 aa, unidentified
MKYSQNEKIAQVTEKTLIVGVDVASMTHFARAFDFRGIELGKIIRISNDAQGFRLFKLWVNELKGKYNRDTVMVGMEPTGHYWFNFAQFLKDSGIRIVLVNPFHVKRSKELDDNNPTKNDRKDPKTIAMLVKDGRYQVPYVPEGLYSELRTAMETRWHIVQGLNAIGNRVKRWLSIYFPEFSKVFSAWEGKGALIVLKEFPTPEKVLQKGVDGIAARWRKDKLRPLGLKRAMRLVEAAKNSVGVREGLRAAETSLRMLLAEYEMKKQQLEEIMVLVEELIYQIPGIKEVLKIKGIGLVTAAGFMAEVGDLSRFDHPKQIQKLAGLNIRENSSGKHKGKTTISKRGRRRLRALLFQGIMPVVAKNPEFRRLHQYYTTRAQNPLKKKQSLILLCCKLIRIIFALMKKQVAYDPQKMMNDIQRPVAA

SEQ ID NO: 52727 - protein, 315 aa, unidentified
MEQSSELFLGIDVSKHHLDVYWDPTGRSARYTSASQGLAELVEQLLVEPPVLIVLEATGGYERAAAGALAAANLCFAVVNPRQTRDYARATGRLAKTDAIDAEVLARFACAVRPEPRGQRSADQQTLDELVRRRRQLVELRVAERNRLEQARSASVRRGIERLIGVLDEQIGELDVQLEQQMTSDPRWHRTKELLTSVPGVGSGTSWTLISCLPELGRLNRREIASLVGLAPVNRDSGQWRGRRRIWGGRALVRAALYMPTLTAMRFNPTIRTFYQRLRQAGKTFKVALTACMRKLLTILNAMVKTNTTWNPKTA

SEQ ID NO: 52728 - protein, 320 aa, unidentified
MPVMIGVDPHKASHTVAALDEHGRLLDRKGIPASLDGYQQLRQWAGCWPQRCWAIEGAHGVGRALAQRLVGDGEQVLEVPAKLAARVRVLSVGHGRKSDPADAVSVAVAARSGPQLRQVGVEDQAMVLHLLTKRRQDLVAARTQPINRLHRLLMDLVPGGARRNLTVKRAAALLAAVTPTGAPAVTRWQLATELVADVRQLEQRITAVEARIKTGVAQANTSLLELFGVGPVLAATFLGEVGDIGRFPTKHHFAAHTGTAPLEASSGQVVRHRLSRAGDRKLNHALYMMAMVQVRRPAPGRPTTSASWRRASPPRKRCGV

SEQ ID NO: 52729 - protein, 590 aa, unidentified
MFQVSSLDRIGVGIDTARYGHRVCFLCPDRQPAAKPLTVLESRAGYEALHERLEQLHQQHPQAHFHVRIDAAGQYAANLEHFLRGLPLPMTLSIGEPKRNKDYQKAHFPKRTTDDTESQAMARFAVVELPGATAAISPAMTLLREVAGRLQAKVRQSTQAINRLHNLLARVFPELATLTDDLTASWALQLLDKYPTAQRIGQARLATLEKIPYLSPELAGQVHLVAQQSVACLSGDVAETLVRDLVAQVQHTQRAEDRMRRLLSDAYAALPASPHLQVATVPGIGVATAAALIAQAVDINRFRTPEHFVGYFGVFPEENTSGVDKFGKALPPGTMHMSRKGNDLVRSYLWNAARCAIRHNPAISALYHRLKAKGKRGDVALGQCMRKLLHLVYAVWKTNRPFDPQRFAGEQPSDDSLSSGLPSVGASASGPPLSAAAATTNETAVGHKRDEPAEEVVTTANTTVAPTPVPVKPANRPARPKVDFAFLRQQVALAQVLRHLGLLDQLRGRGLQRRGPCPIHAQPNDTQPTFSAHLGKHIFQCFHAGCRAQGNALDLWAALHHLPLYEAALHLAETFHLPRNREEEPVSGSR

SEQ ID NO: 52730 - protein, 355 aa, unidentified
MESTKYVGLDVHQEATTIAVMNSAGKLIMESIVETKAITIRQFIQGLHGDLHVTFEEGTWAAWLYDLLKPYVTKVIVCDPRKNTLLKVGNKSDRIDPKKLAELLRNGALSEVYHGENGVRTLKELARSYLTISKDLGRVMNRVKAVYRSWAIPCAGTQVYALCHRSEWLSKITEAGVRRRAEHYYQQLDALQTLRREVRKDLLLESRKHNATKLLRQIPCIGPIRAAQLVALMQTPHRFRTKRQLWTYSGLGLETRDSAQYCYVEGQLQRSKKPQQLRGLNSNHNHDLKNIFKGAATMASVSAGPFHDFYQALLTKGMRPTMARLTLARKIAAITLIVWKKGVRFDPQHLKQQAA

SEQ ID NO: 52731 - protein, 343 aa, unidentified
MEYGAIDLHLRRSQFRIGLQDGTILKEGRCDTTRADFTRIFGDRAPMRIVLESSTESEWVAQHLETLGHEVIVADPNYAPMYGSRSRKVKTDGRDTAALFDACRLGIYRRAHRVSAGQRTRRQQLRIRRHLVQLRSRSISLLRAVLRQEGWRLPSGSTQAIERRVEALPLPSPLLATLAPLRTWLHALNELLRAADAAVDHLAATDPVARGLMTAPGVGPVVALTFAAVLDDPARFAGDAARASAFLGLVPSEDSSAERRLKGHITKAGPSDLRALLVQASWTIWRGRSAAGAELRAWAHALAARRGRRIAIVALARRLSRILFAMWRDQVEFARRRRRAVAA

SEQ ID NO: 52732 - protein, 378 aa, unidentified
MIEYLPESGYGRSIDLGFNKTVGQRGRHTLISNKARTVARVNQTRMMQGRAKKEEKLMTEEEVCVGVDIAKDVLDIAVSNLSEVRQFNNDSKGITGAVRYIAGFKPTRIILESTGTYGMPLAASFQSKCLPVIIVNPRQVRDFARATGVLAKTDRIDARILALFGLQIKPEMRPLPNKQAREMKSLLTRRRQLIEMLTSEHNRLLQADEGVRPGIEIHINWLEEAISTINDTLDSQIRSSPAWLEKDHLLKSVPGIGNVVATTLLIELPELGQLNRRKIAALVGVAPLNRDSGTMRGKRMVWGGRAKIRAALYMAALVATKYNPIIATFYRRLLDVGKVKKVALVACMRKLLIIINAMIRTMTLWNPELSNHFAAEAK

SEQ ID NO: 52733 - protein, 408 aa, unidentified
MNTLYVGIDVSSKSNVVYLMLPNGDKHSNFSVANSHEGSTQLVKRILSALTSHSLDTVLIGLEATSVYGDNLVYFLREDATLAPFNRKIHVLNPKQVKKFHDAYNDLPKNDYVDSFVIADCLRFGRINKEVYMGDYRYKALQNLTRARFFAVQNLVKEKQRFMNVLFKKYSTMTQEKVFSDTFSTTALAVYDEFESAEALANMDLHELTGFIIEKGKNRFPDPDAVAKAIQKAARNSYRLPKTVNDSVNQVLSISITSMKALESQIKEFDKAIKAQMELLPNVLISIPGIGPVYSAGIMAEIGDINRFNSQAALAKYAGLAWKQHQSGGFESEVTRLIPSGNRFLKYYLCEAAFSLVRCDKEYSDFYHLKYKEVNRCQHKRALALTARKFVRLVFRLLKDNRLYCPAK

SEQ ID NO: 52734 - protein, 339 aa, unidentified
MNEVTLIGIDLGKHSFHLHAQDATGRMVFRKKLSRQQLLRTLANVPCCRVVMEACAGSHWLARQLAGMGHEPRLISPQFVRPFVVGNKNDFGDAQAICEAACRPSMRFVSPRNEAQQTVSAMHRLRERLVRERTATVNQIHGFLLEFGISLPRGAALMSRLPTVLDHETLPPRLVGLVVRLRAQVHYLEEQLRQVVQDLKASLREDDKSRRLLEIPGIGPITASALAVELGDARQFANARQFAASIGLVPRQYSTGGKPTLLGISKRGDRNLRRLLVQCARAVMQHTASRTDALSLWVKTLSTRRHSNVVACALANKLARIAWAILARGTHYQARALTT

SEQ ID NO: 52735 - protein, 321 aa, unidentified
MKKQEITFVQVVKVGCGIDVHRDIIVATIRKSNYEYETREFGAYTSSLKSLRDWCKTEEVTHVCMESTGVYWKPVFNVLEEDFEIILVNARHVKNVPGHKTDKKDSAWLSKLLLSGLLKGSFIPPCDIRELRDLVRYKKKVVAQAASEKNRIIKILEDANIKLSSVLSNVDGAVGTKIINSLIEGQTDVEVLLKFYHGKMKVSKAEFRKALEGRITKHHRFMLQLHKDSIVDKERLIARIETEIDEATKAYQVEIDLLQTIPGVGKDSAISIISEIGVDMSKFPNDNHLSSWAGMSPGNNETGGKKKQQKQSMETNIYKAH

SEQ ID NO: 52736 - protein, 351 aa, unidentified
MKICAGVDVSAATLEVAWRVTDRPLRRRTFANDSSGHQALIKELRRERLPVFVALEATGIYGLDLALALDRASGVEVMVANPRTIADFGKALLQRSKTDRLDAETILLFVERMPFVPWHAPSTTTLELRAITRRIAALGKMVRAEKTRQHSAEASKAVGAILRKSARNTVAMLEKEIVTVRNAARKVIDGDAQLKRRMELLTSIKGIGLISAVQILAELMLLPADMTDRQWVAHAGLDPRLVQSGTSVRLTARISKAGNHYLRGALYMPALTAGRYEPHVVAFRAHLLARGKRPKQIHVAVMRKLLHAIHAMFRTDSLFDGTKFYRIAAGAAGTSGIALSAISEVSAAHPA

SEQ ID NO: 52737 - protein, 397 aa, unidentified
MAHNTTTRSSGVVGCRSFAVKTIGVASGISLYASLELSRATWLVTSLAPGSDRMSKHSAAGGDGGALLGLLERTRTRMQQVAGHPVKIVAIQGAGLDGFWVHRLLEANGIESHVVDPASIAVPRRRRRAKTDAIDGETLLRTLLAWKRGEPRVCAMVVPPTPEEEDRRRVCRERAILLQERIRHTNRIKGLLAGQGIADYNPLHKDRRHLLDATRTGDSRPLPRQLKAEILREIELIELLLRQIADVEAAREALTRPRTAKAPSPVVLLEQLKGIGPEIASVLYLEGLFRTFGNRRQVAAYAGLAPTPGRSGTVDQEQGISKAGNPRLRSTMIELAWLWQRHQPGSALSRWFHARVGTERGRIRRISIVALARKLLVAIWRYVTQGEIPEGAVVKAA

SEQ ID NO: 52738 - protein, 342 aa, unidentified
MDHYAGIDVSLEYSSVCVVNASGKIVREGKVLSEPDALIGWFGSLGLELGRIGLEAGPLSQWLYAAMTQAGLVVELLETRHVRDAFKAMPVKSDRNDARGIAQLMRLGWFRPVHCKSMSAQETRAVLTSRKLVQSKLQDVENHLRGILRGFGLKVGKTTNSSFGRRILELVADHASLATIAKALLAVHAVLLREFKAFEKQVRAMARQDAKARLLMSTPSVGPIVALTYASAIDDPGRFKSSKLVGAHFGLTPRKYQSGQTDYTGRISKIGDASVRTALYEAAHIMLTKPLKGCSQLKSWAMRIARRAGMSKAKVALARRLAVIMHRMLADGTTFNAAAMAA

SEQ ID NO: 52739 - protein, 397 aa, unidentified
MYIVGIDIAKRKHEAAVIDGEGAVIIKPFSFTNNCSGYNRLLAMLTKAKLPLDEVSFAMEATGHYWLALFTRLQKEGFRVQVINPVQTNSIRSFYIRQAKTDPRDALLIAEVIRFGHFSESTLHPENIYELRELCRGRHAIVSMQADVKRKVVALLDQVFPEYETAFTNLFGDTSMAILQTCPTPKELSEMPLEELCHLIEVSSHKRFRMAKAQELQALARNSFGFAMAGDVFSTMIRLYAKHLDFLKQQVREMDRKIAEIMETLDTPITTITGIGPTLGAYILSEIGDISRFSSAAKLAAYAGIDPTMRQSGEYNGVRNRMSKRGSPYLRHAIWLAASSAVLHDPALKLYFQKKRDEGKPYMASVGHACRKMVSIIYAVMRDNKAYTPCIPNEISA

SEQ ID NO: 52740 - protein, 339 aa, unidentified
MNSTTVGVDIAKSVMQLHWVDPETGEIINKPVKRVAFLEHFANRTPCLIGMEACGGAQHWARRLIEMGHQVKLMPGKFVKAFVMGNKNDAADARAIWMATQMTGKSVAVKTEAQQAVLALHRMREQKVKFRTMQVNGLRGLLTEYGEVMGKGRAALDKAMPGVIETLTDHLPAMLIDSLREQWNGLADLDRQIAEIERRLRHWMKEDKACKAVAEIPGVGLLTATAAVATMGDPKSFRSGREFAACIGIVPRQTGTGGKVQLGGISKRGDTYLRTLLIHGARSVLAHAKEPGPWVEQISKRRPPNVVTVALANKMARTIWAVLAHDRPYEKGHVSVKPA

SEQ ID NO: 52741 - protein, 345 aa, unidentified
MPPPTYRPPYQLFVGIDIAATTFTAVTTTEGPPSERARTFAQTPLGFAALIDQLRATGVAPAHTLIVVEATGSYWVALAVTLHEAGYVVSVVKRAHAHHYAQSLPRRAKTDLLDAPVLAQLAAERKPPPWTPPPQVYHELRQRLIARDALLTMRQQARNQRHALLQWPIVIESVRVQLEGLIADLEMRLATLEVEIAQVLCDGAWAESATLLASITGLGLITTAWLLVGTVNFQACASAEAASAYVGLVPLAHESGSSVRGRAQIGHGGHARLRTALYLATLSAARFNPMIKAHYERLRAAGKPAKVARCAAARKLLHLAWAVVTKRQPFDPTYRMRTAEAPLAA

SEQ ID NO: 52742 - protein, 415 aa, unidentified
MKVVFPTCCGVDVHKTFLVATIITTPADSLQPNYQKKRFSTFNSDLNRFADWLLEHNCLDVCMESTGKYWVPVFNVLEKRGIRVVIANPKWVKAVKGNKDDTKDSKWIGDLFRIGLVKSSFIPDLNIRILREFTRYRYKLVSMKSSEKNRFQNAFTVCNVALDSVVSDMFGKSATAITDYLTSDESFDPEHCVSLLQRSLKKKAEQVLESIEGFSIASEQKARIKIIREHYGFLEKMIAKVDTCVSEMVEKHEGEINLLCTIPGIDRNSAITIISEIGTDMRQFGSSKRLCCWAGLTPGNNESAGKKKSVGISRAGVYLKPALVQVAHAAVKDKASPYYALKYERIAKRRGKKRAIIAIARMILTAVYSMFCTGEVWNPVDLYKVDMPEHLKEQQLAKAIKQATRFLEKQGLSVA

SEQ ID NO: 52743 - protein, 352 aa, unidentified
MQEYIALDVHKHYTFAGREEVGTRRAAYDRLEHTKGIFKRYLAEVEPGTTVALEATGNWYWVVDEIEASGMKPALVHPYKAKVMLGCINKTDKLDVTGMNRLQRTGTLPTVWIPPVETRDQRELPRTRMFLTQLRAKLKNRIQATLTKYALNVTGYSDAFGQEARKVMAKRIEELPPQAKKAIQQLLELLDPLEEQIQDQEKRIQEMVKVTPEMDLLLTLPCIGKILAVVIASEVGDIRRFPKAENYTSYAGTAPRIKASGDKYRIGRLRADVNHYLKWAYIEAANCVCMHQRHYPDRHVTLLYKRIVRRKGHPKAIGAVARHLAEATFYVLTRNQPYRDPALSKRVVATGT

SEQ ID NO: 52744 - protein, 355 aa, unidentified
MNQQYRTIIGVDLGDKKHHVCITDKDGTIISEKTIRNNHTQLSTLAHEHKGALFAVEVGVHSPWVSRLITASGCSCLVANARKLRAIYQNDRKCDMLDARMLAKIARVDPELLSPIQHGSEERQLHRLSITLRDSLVRQRVNIISTVRFSLKSLGMRLPGCSTPYFANLCRKELAGSPLLEVISGSLEALDGLDEQIKKLDKRIEQIAAQFYPQTLLIQQIAGVGPITSLSFVLAVGEPDRFENPRDVGAYLGLVPRRDQSGQSDKQLPISKAANREVRRLLVQAAQHILGQFGPDCDLRRYGLNIAASGGKAARRKAVIAVARKLAVLMLVLWKTGQAYEPLRNTQKKEAEEAA

SEQ ID NO: 52745 - protein, 460 aa, unidentified
MNPKRSKSRNGGKMPMVHPNAAAIDVGATMHMAAVRADCAPEPVRSFGTFTVDLHRLVDWFTECGVETVVMESTSVYWIPIFELLDARGFTVFLVNARDAKHVPGRKTDVSDAQWLQRLHSFGLLRASFRPKGQIAELRAYVRQRERLLEYAASHIQHMQKALTEMNLQLHHVVADITGATGLRIIRAILAGERDPEALACLRHYSCHSSAETIAKALTGSYRAEHLFALEQALALYDAYQEKAFACDARIEAVLKKLSIHRGHGHGSAPRASRRRNRTDQANALAFDVREALFALLGKDITTIDGLGPYLSLKLIAECGDDLSSWPSAKHFTSWLGLAPSNKISGGKMLSSRTRRSGGRAAALLRLAAVTVGRTDTALGAFYRRLSARIGKAKAVTATARKIAVLFYNAVRYGMDYVDPGASSYETRYRTRVVNNLRRRAKAFGFVLQPSEPKVGAAVS

SEQ ID NO: 52746 - protein, 338 aa, unidentified
MAIVMGLDQHRAQITADWLNTETGEVSRARVTPAHRDRVGQFVGRFAGQDLEVALEATTGWRFVVEDLQAIGADVHLAEPAETSTLRGSKKRAKTDRADARHLRELLMVGRLPEAWIPPEHLLDLRARVRLRHTLVDQRGEWQQRIQAVLYHHGVAQRRDLLTAGKRQWLEGLELPAAAREQITVALTVIDALDAESAPLTRELRAYGRRQPGCRALMRHYGIGALTAVTILAELGDARRFSSSRHAVRYAGLDITVHQSDQRRAPGHLSRQGPPALRWALYEAAQLARRPGSPDHAYYEQAAARLGGNRACLAVARKLLKRSYHTLRELGDEALQPA

SEQ ID NO: 52747 - protein, 315 aa, unidentified
MEEKVYIGIDISQDSLDMAAYPSGQIWNYKNNQNGIAKTLAKLKSVKPELIVMEATGGLEIPLRDALDEADLPTAVINPKRIRDHGRSMGVLAKTDKIDAKVMAHFAAKIEPPAQPARSKEERDLDSLLTRRNQLNDMLTAERNRLKQHGESGVQADIKEHILWLESRIKSLDKEIKEKIQQNPTFKAKSELYQSMKGVGYVFSSTLIAKAPELGRINQREIASLVGLAPVNKDSGKLRGKRMIQGGRAMVRKAAYMPVLSAIRYNPAIRALYERLIAKGKLHKVALVACMHKMLTILNSMAKNNTPWRCPALAV

SEQ ID NO: 52748 - protein, 312 aa, unidentified
MTLHRDVVGIDISKLHLDIHDNQSGVTRRIANSAAEAAELAASLAERECLVVFEATGRYDTALRHALGTAGIAHARVNPEQARNFARATGRRAKTDAIDARMLAELGERLSLRLEPPANPARERLTLLIRRRDQLVLMRKQERVRTQSETDPLLKADIAAHIAWLDHAIARTEQEITKLMREDEVIARTDALLRSAPGVGPVTAAVLIGHLPELGILPAKAVTALAGLAPYNNDSGAFRGQRSVRGGRTRIRQALYMAAVSIARGSSSLAAFHKRLIQAGKPPKVAIIATARKLLTTLNAILKQRVPFSSPA

SEQ ID NO: 52749 - protein, 337 aa, unidentified
MTQVHILAIDLAKRSFQACGTDRGGAVLFNRVLSRARLQQFLGKQSPCIVAMEACATSHFWGRFARSHGHEVRLIPPIYVKPFVKRQKNDAADAAAIAEAALRPNMHYVAVKSAEHQARAVAFRTHQCFVRQRTQLINALRGHLAEFGIVIAQGPANLNAVAGILAEESVDLPDGVRVIGQLYLDQIGMLSEKIDELSLKLREATKSNEDMRRLCTVPGVGPVTAGAILAFAPDLRAFKSGRNFAVWLGLVPRQHSTGGKTRLGGVSKMGQTDICRLLIVGAMSLIRWIVRKGVLPDDWLGHILGRKPRMVAAVALANKMARIIWAMMTREQNCRMA

SEQ ID NO: 52750 - protein, 454 aa, unidentified
MAKGSGTTRGDRRRNARRERLRGLLPRDGVVVGIDLAEDKQALAVVDHDVRVLARKTVRVKAFRLGEALDWAVAQARAKGFTAVTVACEPTGARWLQVQRLCAERGLPLVCIQPLVSHIAREQQDYTTHKTDESDCVMIARLAVELHCYVPEELDEAWAQLRHLGRRRAQLITAATASAQRIRDFLSVAWPTVTETCARPLASVTWLAALQVVTDRCGGQPGRLAVMGEEAFTTLVRSAMPDWGARRACGRICVHVFAALTDAEGVVASCRRGLLRRIADELGELGLSRLGDIPGLTAVGAAAILAETGDPRRYDSSSSLVKHAGLAPSDNASGAFAGQAHISRRGRPGLRLAVWRAVWPMLRFNPVMAAKYAALTQAADTAAQDAGTPDGARARPATAAAAAARARRATARVACAASLLRWIYSMVAHGTSWDPAVAAGAPCQHAAGNQPEAA

SEQ ID NO: 52751 - protein, 387 aa, unidentified
MPQPNDLSRSLAALDQDSTLIAVVEMSQTSWLIGAIVPGVERHPLKKIVPDENELLRLLYRWRDEAIKAGRRITRITVAYEAGRDGFWLARWLRARGVEAYVIHASSVAVSREHRRAKTDRLDTELLKRTFLGWLRGERDHCKMAAIPTLTEEDAKRPSREREALVRERTRLTNRMKSALARLGIRNFKPQLRKAAERLAAVRTPEGEPLPPHTLAELHRDIARLQLVKGQIEQIERARLERLRQPPTDAPHAMLVQLAQVYGLGIETADMLVHEVMVRDLRDRRAVARYGGLTGAPDESGARRREKGLARAGNARVRRGMLQLAWRFLRFQKQSALVKWFEARTADGRMATRKTMILALARKLLIALWRLATVGEIPPGVKLRPAA

SEQ ID NO: 52752 - protein, 362 aa, unidentified
MQKHIFVGIDLGDKNSVARIGVDLEKSERFGFVNTKAGRARLIEEVKRRGDQAGAAVVIMAYEASSCGFILRDQAQAAGVDCRVLAPTKMEKSVEQKRNKNDDRDADDVLEKLRGHVLAGNRLPTVWVPDLETRDDREVLRTRLALSERQTQVKTQIQMLLKRHGLERPSDLGSTRSKQYRQWLEGLSQWESLGWGTRQGLASLLRQLSGIEAEMENLEKLVRELGSQPRHKPIVEALMQEKGVGLLAALVYRTEIGQARRFHRGRHVGKFVGLTPTSHESGQQSDRKGHISRQGPPRLRKVLCQASWVHVRYDPYSREAYQRLVAKNPKKKKIALVAVMRRLAVRLWHRMREVELKLETSS

SEQ ID NO: 52753 - protein, 331 aa, unidentified
MSRYYLGLDVHKVRTQYCLVDQEGRIVREGNLPTEDVASLVELPGLPVVLEATGHWCAPYDALRASGGQVKLAHPARVRAIASARIKTDKIDARVLAHLLRTDLIPEAWAAPQDIRNLRDLLRLRWGFICDQTAAKNRIHVLLAREGLRFQGSDLFGRRGRRWLASLSLRPHVQELVSHLLQHLEETTRHVEALTERLHELLDADPAIHLLVTIPGVGFITAATLLAELGDWRRFRGPKQVAAYFGLVPSVRASASTARYGHLTKSGSSHARRVLVEAAQSAVRIPGPARHRYLSLFRRRGKKVAIVAAARTLLVLAWTLLINGEVYQRAA

SEQ ID NO: 52754 - protein, 303 aa, unidentified
MAIIGMDIHRAFAEVVALEGKSRRRLGRIAMRCDRLAAFAAGLTKEDIVVVEATGNATAVAEVLAPHVGRVIIANPKQVRVIAHAKIKTDKIDAAVLAELYASGFLPEVWIPDKDTDLAQYGLADLRVKQLMTVPGLDMIVATALVAAIGDVSRFGSPRKLVSYLGLNPSVRQSGSGPAYHGRISKQGPGRARGLLVEAAWAAARAPGPLRAFFLRIRSRRGQHVAAVATARKLAVLVWHVLTKEQGHAPVRGQRGSAYDYNIKGDQERRRVQQAEKVYERFVAGWNRRGPRVRTSAAKEERQ

SEQ ID NO: 52755 - protein, 418 aa, unidentified
MNTNWTQHAYFAALDWASEHHDVIVLDGHGAVQVEFRFAHTADGWAEFTTKMQPFTGAPITLETSSGPAVDQLLQRGWSIYPVAPPAAAHYRERKVPSGTKTDRHDTWALADALRTDGHAWRPLRPQDEATATLRALCRDEIALIEQRTALVNQLQAALREYYPAALAAFDDWTAPHAWALLLQFPSPAQLQAAGQRKWEKFLHTHSLWRPQTAAQRLDLFAHATALPASPAVTAAKSLLAVSLAKVLVTLQTQLDEYRRRIAAAFRQHPDHDVFGSLPGAKATLGPRLLAEVGTVREEYPDADALMCQAGVSPVSYQSGKVKKCRLRQACNKVLRATVHLWANASRQSCDWAQAYYAHKRAEGHSHASALRCLGKRWLKILWRIWQTGEAYDETKYLAQLQRRGSLTWSKLQAAPAT

SEQ ID NO: 52756 - protein, 379 aa, unidentified
MRRVCGLDVHKDSIYMCILYENGSKIESVFGVLTPELDKLRDLLVSHHVCEVALESTSIYWIPIWNILSVDFSLKLVNPYFIKQLPGRKSDVKDAEWIATVLQKGLIRGSYVPDCMIQCLRQYERRNHELSKNIVHAEQRMDMILQRCNIRISNYVSCISCKGYQKVVNAIISGESNPKVLVTLIHKRTLNKHGRQVVEDSLNGFVSDTDRDILRQYRDERMQMEQHKSENKAKMQAICEAHYCEELELLQTLPGIKEESAANIIAEIGVDMKMFLTASAIVGWAGLKPRNDQSAGKIKSRKITHGNKYLRKILVEAAWSAARTKDSRFMKMYQRLLARGKSKQKALIAVVRKLLVLIWNMLSKKEAFNPEYKRRIQAA

SEQ ID NO: 52757 - protein, 340 aa, unidentified
MYYIGLDIHKKTISYCTKRVDGAVHAEDTIDATRLALDHWLAGLPQPWTAAMEATIFTGWIYDHLKPHAAVLKVAHPAMLRAIAAAKKKNDQVDARMIADLLRCNLLPECYMAPSEFRERRRTLRYRNLLVRQSVQMKNRISGLLMETGVVYNKQKLHQKRYFAELRDSAEVPACIQPLLKIGRETVEQIDRTGRALMRTLERDATLKARVERLLTIPGIGPVTALTWVLEIGEVSRFSSVKDAVSYCGLCSAERSSAGIQKRSPISKQRNKHLQTVLVEAAKLAPRWNADLALLHEKAVQKGNRNRATLAVARKLVAYLLAVDRREKSFQPRKELGEAA

SEQ ID NO: 52758 - protein, 411 aa, unidentified
MRLFVGDDWAEDHHDIEVMDAAGTVLAKRRLPGGVAGMAQLHELIGAHLGEDAADAEVVIGIETDRGPWVAALAAAGYAVFPVNPLQAARYRDRHQVSGAKSDAGDAHVLADMVRTDSHQLRPAAGDSPQAEGVKVLARTHKTLIWERARQVQRLRHQLREYFPAALQAFEDLDAPDALELLAKAPDPARAAKLTRAQVAAALKRARRRHAADKATAILAALRGEQLGQPPALTAAYAAAVRALIAVITTLNEQVSVLEGQVGEHVGRHPDAEIYRSQPGLGPVPGARVLAEFGDGPHRYADGKARKNYAGTSPITRASGKRKVVAARFVHNDRLIDALMAQAFSALRVSPGARACYDAHRDKGLEHNDALRRVANRLVGILHGCLKTRTRYDEATAWGHRENPGQSPAAA

SEQ ID NO: 52759 - protein, 351 aa, unidentified
MKEYISLDSHKCYSIVERENCASREAVQCRIGHSRGSIREYLGKCEPGTPVAVEAVGNWYWIVQEIEDAKQVPQLVHPRKAKLMMGMINKTDKLDVHGLNRLQRNGTLPTVWIAPGELRDLRELTRTRITVARQRTRLKNRISSTFSKYGLTVEEYSDMYGKKAREELNKLLEQLPPQTKYVTEALLQQLDFVEQQIEGMEKRLQELVKITPAIQLLMTMPGVGFILATAIAWEIGEISRFACAPRLAAYAGTTPRVHASGGKIRYGQMRSDVNHYLKWAFAEAGNSVALHAKRSPMRHVSQLYQRIRDRKGHAKAVGAVSRHLAEATFYILSKQESYEDPALKRSSSREV

SEQ ID NO: 52760 - protein, 364 aa, unidentified
MNNTIKVEWPSHEGTRSEFNPGQAVIKLGIDVHQEFYVVVLQEGGSNPKPAQRFRKEAFLCWAAKLKQKSGAEIHAVYEACGFGFGLQRQLAALGIACHVVCPQKLDERNKRVKTDGLDAKALCLKLDRFVEGNREALALVRVPTPEEEQVRAIHRQREQLVKTRKQLEAQGRSLMVNHGIEPVKSWWKRRSFAALCVPEWMKQLLSNSQPILLGLEEKIRALTVQLQTAAAPNQPRGLGMMTSVVIDREVGNWSRFRNRRQVGSYTGLCSGEYSSGQTRLQTCVTKHGNPRLRAALVELAWRLVRFQPQYKPVVKWRRVLAKGALATGAARKKAIVAVARQLAVDLWRIRTGRLNPEQLGLSI

SEQ ID NO: 52761 - protein, 427 aa, unidentified
MCYRIAAIDVHKKMLAVVVTDVAGEGEYQFERRRFGATPDELQQLAEWLIQQEVEEVVMESTAQYWKPVWAALERYWKPARQQREGATKMSGTLHLCQAKSNHGPRGRKNDFADAERMIKRLVAQELVLSFVPDPSQRLLRTVTRRRHQLTRAKVSFRNQLESLLEQGHLKLSSFVSDLLGVSARRMLQALAEGETDPAVLAAMADRGLRATPEQLRDALGASAQLNGVYRRLLKMALEELQIIETHIEQLDREAMELLGEHQEVVQRVAEVPGFGVDSAMQMIAEVGLQAATFHAPKKLCSWVGVCPGNEESAGESQSTRSPKGNRQMRRLLNQAAQSAVKTKGSVFEVTFSRLLPKLGYKQAIWAIAHRLCRLLWLILHEGVRYEERGPAVSAKSKRVRAARMIRELKKLGYRVEGGPLPATARA

SEQ ID NO: 52762 - protein, 398 aa, unidentified
MKYPCIAIDVSKESSHIQGFYELDKEASDPIRITHDNLGFNELTNLIDSIYFQTSKEVIVVFEDTGVYDKPLQMFLADHSIRYATINPLLSARYRKQSIRAVKTDRKDCSNIARVYFNEDLKFKSIESDYYSNLRKLNRYYEEHLDHLRKYKVNFRESLDTVWPGYNDVFVNLFAELPLSIIEKYGHPYKLKNIKKKTLVKFIMKNSTHRESWSEKKALEILQYVNSTQSGCKEDDILSSIMVDKVSTVKFTLTKVEKYLADIIELSKEDSNFVLLTSIPGIGENIAARLIAEIGDISRFDNANQVIAYAGLDPQVYESGNYKGNFSISKKGNKRLRSLLYLAASCSLRVGSKSNSIKDYYKRKTQQGKLHKVVLIACCNKLIRVIYSMCNTGTLYEY

SEQ ID NO: 52763 - protein, 339 aa, unidentified
MSKLFKNFVGIDISKSWFDVSLITKENSAKAVHQQFAQSTSGYEQLLQWLQDHNTGIKDEILFCMEYTGIYNTGLVNFLIHHSADIWVEMPLRIKRAGGLERGSDDRSASVRIAWYALRYHDQAKLWKPADTSIEKIKHLITQRERIITSLKHLTVPAQELIDCGCIKEGNMVMKLQQPVIKALQKTKQQIEALINKIIKQDESLSHTVELIQSVNGIGQVTATALLVYTKGFTAFTSAKELACYCGVVPFNKTSGSSVRYKPSVSPFANMKLKKLLHLCAMSAMQNDKEMKAYFERKLLEGKNKMSIINAVRNKLVHRVFAVVRDNRMYENNYIRACA

SEQ ID NO: 52764 - protein, 352 aa, unidentified
MLPGIERQPCKKLEPSAERLLGLLHRWRDEAVRAGSSITRIALAFEAGRDGFWLARWLQAHGVEAHVIHPSSVAVSREHRRAKTDRLDTELLKRSFLGWLRGERGHCSMARVPTMLEEDAKRPNRERECLVGERTRIVNRMKGTLARLGIRTFKPTLRKAAERLATLHTPEGSPLPPNVSAELQHDMARLRLLISQIREIENARQERLEQEPETGPHAMVRLLARIVGVGIETADMLVNEVLSRRMRDRKAVARYAGLTGSPDESGTKRREQGLARAGNARVRRGMIQLAWRFLLFQKESALALWYRARTADSRLGTRKTMIVALARKLLIALWRFVTTGETLEGVVLRPAG

SEQ ID NO: 52765 - protein, 343 aa, unidentified
MEHFAGLDVSVKDTSVCIVDDAGKIVREVKVASEPAALLAVLASPAYHFKRIGLEAGPLSQWLFSALAEVGLPMICVETRHMRAALKAQINKTDRNDARGIAQMMRAGLYRPVHVKTLRSQKLRMLLTHRKLLQSKTIAIENDLRATLRNFGLKVGAVATRKFEARIKELVENIPDLAELVEPLLVVRQTLREQIGILHRRLLAIVRGDAVCRRLMTVPGVGAVVALTYRVAVDVPARFRNSKAVGAVFGLTPAKYQSGEIERTGAISRCGDEMVRAMLYEAAHIVLVRSVRWSWLKAWAMKLARRRGLKKAIVALARRLAVIMHRIWVNGTEFRWTREAVAA

SEQ ID NO: 52766 - protein, 350 aa, unidentified
MIIIGCDFHSRFQQIAMLDPQTGEVIEHRLEHENGEARKFYAGLATPARVGMEATGYAQWFERMLAEQGHQLWVGDAAEIRAAMVRKQKTDSRDACHILDLLLKDKFPRIWIPSTEERDVRQLLRHRYKLVCLRTSLKNQLHAMAMGHGICRKKKLWTAVGRKELQGLSLGPWASRRRQHLLGMLDQLEPVLEELDRAVIQEVEKRPAAMRLMTQPGVGPVTALAYVLTIGPVSRFQRSKQVVSYLGFNPSEESSGGRQRLGSISKQGNSMLRFLLVEAAQTASIYDPELRRDYRRLKFRRGSGVAKVAIARKLAVRLYWKLREQPSPVPPAPMQGSPAVSVVGESLSSS

SEQ ID NO: 52767 - protein, 402 aa, unidentified
MNAVGIDVSKGKSMVAIMRPFGEIVSAPFEIKHTAGDIHSLVELINSVEGESRIVMEHTGRYYEVLAHQLSKANLFVSAINPKLIKDFDNDSLRKVKSDKADAVKIARYALDKWQNLKQYNVMDELRNQLKTMNRQFGFYMKHKTAMKNNLIGILDQTYPGVNTYFDSPARSDGSQKWVDFASTYWHVDCVRKMSLNAFIDHYQNWCKRKKYNFSQSKAEEIYGKAKELVPVLPKDAITKLIIKQAVDQLNSASTTVESLRTLMNETASKLPEYPVVMAMKGVGTSLGSQLMAEIGDVSRFTHKSAITAFAGVDPGVNESGSYEQKSVPTSKRGSSDLRKTLFQVMDVLIKTHPQDDPVYQFLDKKRAQGKPYYVYMTAGANKFLRIYYGRVKEYLSSLPES

SEQ ID NO: 52768 - protein, 318 aa, unidentified
MLNESFVGIDVSKDWLDVGWEPAQQTERLAHDEVAMVGLCERLVQERPCLIVLEATGGLETHLASALAAAGLSVAVVNPRQVRDYARACGRLAKTDRIDALVLAAFARAIRPQVRAPKDDETLELGALLARRRQLIDMRVQEKLRLERASPVQRDSIKEHIAWLTERIARLDTDLTHRLRSSSLWRDKEDLLKAIPGVGTITRVTLIALLPELGKLNRREIAALVGLAPFNRDSGQHRGERVIWGGRAQVRRVLYMASVAAIRSNPVIRAFYQRLRAQGKPGKVALVACMRKLLTIMNAMLKHNAPWNPNALDLEHSC

SEQ ID NO: 52769 - protein, 348 aa, unidentified
MRFYTNTHKHYCGIDLHGRKMYVCIIDGEGKILVHRNINCNPEEFLKSIGPYREELVVGVECMFAWYWLSDLCRKEKIEFVLGHALYMKAVHGGKAKTDKIDAHKIAVLLRGGTFPIAYVYPPKMRATRDLLRRRNFFVRKRADLMAHIQNTVTQYNLPKLSFDLSNESNRHEVVQLFPNPEVRKMIDIDIAMIDAYDKVLKVLELDIDKTARQHDWHALTLLRSIQGVGPILGLVLLYEIHDINRFETVQQFASYCRLVKCCHESAGKKKGTGGAKIGNAHLKWAFSEAAIHFICNNPPAKKLLENLAKTHGKGKALTILAHKLARAIFYMLKNKRPFDRDKFLATA

SEQ ID NO: 52770 - protein, 378 aa, unidentified
MKNVRWVALDVHALTIAAAVAEANGEMRDMGVIPNTPEAVSKLVRKLGKPEQLRVCYEAGPTGYVLYWQLTRLGVHCDVVAPTLVPVKAGDRVKTDRRDARKLARSYRAGDLTPVWVPDAAHEALRDLVRAREAAKSDQLRARHRLGKFLLRQGRRAPEGTKAWTGKYLQWIKQQHFEHAAQQETLLDYLHEVEHAAERIVRLEKAIDSAIAGVQPKMRAVIEALQGLRGVAKISAVSIVAELGELSRFAKARQLMGYSGAVSSEHSSGERVRRGPISKAGNGHLRRIVVEAAWAYRHRPGIGAALATRQKALSAEVKEIAWKAQHRLHKRYVQLLARGKTKQKAITAVGRELLGFIWAIGMQVEHTMPAAAPMPRAA

SEQ ID NO: 52771 - protein, 343 aa, unidentified
MQYLGIDWGTRRASWCALDEHGALREGAIPADQDGLARLALTVGTDEEVRGCIEMMSGAVWVRDQLALVGWDVRLADARKVKSIAPLACKTDRVDARVLADLVRRDLVPEVWVPDLAERANRERLRRRSHLIRLRTSAINRSFGLLTQWGLRRNLTALRQPDAIPELAEHGVPPVWLQSITTLLAVIDDLDRQLAVLDGELRPVARADDRVKLLITIPGIGELLGLTLASEIGDIARFPSAGKLVGYSGLTPTIKQSGQSSRTGRLSKAGPNTLRWAAVEAAQQAWRPTNPWHRLYTDTKHRHGKSNPAKAAVARKVLIAAWHVLARQQPFKPSPAAAAIPAA

SEQ ID NO: 52772 - protein, 373 aa, unidentified
MTNNLRYLGLDVHAETIAVAVAEPGGEVRSLGMIPNEPSAVAKLIRKLGGREHLRACYEAGPCGYVLYWQLTKLGVACDVVAPTLVPIKPGDRIKTDRRDAEKLARCHRAGDLTAVWVPDAAHEALRDLLRAREAAKADQLRARHRVSKFLLRHGIRPPAGVKPWTQRHRRWLDTVTFGPAAQQATLADYVHEVDHAGARLERLETALDGAITAAPPAMQAIMRALQCLRGVRQVTAATIVSELGPLSRFTHPRQLMGYSGTVPSEYSSGSSVHRGAITKTGNAHLRRVLLEAAWAYRFPPKCADALRARQRGQPAHVIEISWKAQHRLHTRYRRLLGRGKPVPHVITAVARELVGFIWAIGIAAEREVAIAA

SEQ ID NO: 52773 - protein, 341 aa, unidentified
MQHVAIDLGGRESQVCVRAENGQILDERKIATRGIEAYLKGQPPSRVVVETCAEAFCIADQALRSNHEVRVVPATLAPTLGVGARGIKTDRRDAQMLSEVSCRIDLPSVHLPTQLARERRNRCGVREELVAVRTALINCVRGWTRSLLLKFPSGATATFTKRIRDAAIKHPQGLPDYIERVLASIDAIQEQILKADKELEQLAAEDPVCQRLMSVPGVGIVTSMRFVAAVDDVARFPSAHAVQSYLGLTPGEHSSSDRRQRTGITKAGPAPVRRTLTQAAWSLRRSHPKDPISLWAADIELRRGKFIATIAVARKLAGVLYALWRDNSRYTPNYVARNRQA

SEQ ID NO: 52774 - protein, 465 aa, unidentified
MGKGSGGNGMTRGDRRRNTRRERLRGLLPRGGAVIGIDLAEDKQALAVIDHDVRVLARKTVRVKAFRLGEALDWAVAAAKVKGFERVTVACEPTGPRWMQVQRLCAERGLPLVCVQPLVSHIAREQQDYTPHKTDESDCVLIGRLAVELHCYVPEELDETWAHLRHLGRRRAQLITAGTASVQRIRDFLSVAWPVVTEACARPFESVTWLAALQVVTARCGGDPARLAALGLGEFTALVRAAVPAWGGKKGWGKICGQVFAATGDTEGVVTWSRRGLLRRVADELGDLQRTRAQLRATEADMVLVLGELGLSRLGDIPGLTAVGAAAILAETGDPRRYDSSSSLVKHAGLAPADNASGAFEGQAHISRRGRPGLRLTAWRAVWPMLQFNPVMAAKYAALTQAADAAAADAGPRQARAAAAARARRAKARVACAASLLRWIYSMVVHDTSWDAAVASGAACQPEAA

SEQ ID NO: 52775 - protein, 413 aa, unidentified
MIYCGIDWAEKTHDVALVNDTGELLAKRRITDDAAGYTILLDLLGEFGDTEDNPIPIAIETSRGLLVAVLRTGIRQVYAINPMAAARYRDRTSVSRKKSDPGDALVLANILRTDMHVHRPLPGDTDLGRAIAVLARAQQDALWNRQQLANQLRSLLREYYPAALDAFATWANGLCRPEARELLKTAPTPARAARLSRTQISTAFKRAGRKRGIDAEADRIREVFRSEYAHQSPLVEDALGKQLLALLLQLEAACTAADNLAQAVEESFPQHPDADVILSFPGLGVQLGARVLAEIGDDHTRFADARGLKAYAGSSPITRASGKKSSITRRRVKNDRLNHAGYLWAFAALTASPGAKVHYRRRRDKHGDWHAAALRNLFNRLVGQLYHCIQVHEPFDEALAFPASAEAMTATAA

SEQ ID NO: 52776 - protein, 348 aa, unidentified
MNTLHYIGFDVHKKTISFCVKTAAGEIVEEGVVAAQRAGLRQWAAARPQTWRGAMEATLFSGWIYDTLQPYSEQLEMAHPAKMKAISAGKKKSDTLDARTIADLVRCNLLPACYVAPPRIRELRRLLRYRSLVVSEAVRMKNKMAGLLMETGALYVKEKLHRKKYFASLLEDLEEVPQSVIDLLRLSRGALEMFESTQKRLVRELLADSELAERVERLMTIPAVGEITALTWALEVGDPQRFHSNSDAMSYCGLTAALKSSAGKQQRGPISKQRNRWLQTTLIEAAKLAPRWNPQLAALHARELERGHRNRATLAVARKLVAYLLAVDKSRQPFQVRAPSEVPTQKAA

SEQ ID NO: 52777 - protein, 357 aa, unidentified
MKYIGCDFHPSFQQIAMLDQETGELVERRLLHTEEARDFYARLREPVVVGIETSGNTHWFESLLAGCGHQLWIGDAAAIARQEGRKQKHDRRAAKLILKLMVENRFPRIWVPTVGERDLRQLLVHRQHLVRMRARIKNQLQHIAINQGWQKKRKLWSQAGLELLRSLKLEPWTQQRRDSLLEMLEELEDKIRPLDQAVGQEAEQCEAARRLATHPGVGPVISLATVLTMGDVKRFANSRSWVSYLGLNPSEESSGQRRRLGAISKQGSPFLRYLLVEGAVTAIRGDKSLARMYARLRARKHHGVAKVAVARKLAVRLYWMARTEKSYPEVVRTQGSQSHAVAESMAERLNRPPASHQ

SEQ ID NO: 52778 - protein, 465 aa, unidentified
MKRKRWTKGHKPRQHISLLERINPDVAGIDCGSAEHFVAVPVGRDPDPVQSFKTFTADLHRLADWLAACGVRSVAMEATGVYWIPLFDILEARGFEVIVTNAHHVKNVAGRKSDVVDCEWLRELHSVGLLRGSFRPAEAITALRGYVRHRDTLVAEMSSTIQRMQKALVQMNVQLPQVITDIMGTTGLAILHDIVDGRTDPQQLVLHRDPRCHASPKQFVAALTGNYRPEHVFALKQNLALFEYYQGMLAECDTAIERHLQTLAAQAEDPAAPLPPRRTKAQPRSKEPRFDIRGYLHRLTGTDLSQIDGIGPYQALRLISEIGTDMGRWRTEQHFTAWLTLAPQNKISGGRLLSSRTPASANRAAVMLRMVAMSLARTQTALGAFYRRLAARIGKAKAITATARKVAILVYRMLKGEIQYQDPGPDVYDARQRQRLVRKLHKRAEALGFALVAINTGELLPAGVS

SEQ ID NO: 52779 - protein, 411 aa, unidentified
MQNMLYIGIDLSDNFFDSCITNSQGAVLSTKRFDLSHDGFCSFIKLVHENETENHKSIIGLENPRSRLVDFLAGRGYTVMLTNPNAISSYRKSRKPSKAKSDKDDAKLIADYVREHHTSLRCIQIPDETMRELSLLLEDRDRLVHQKVRFSNQLTSTLKEYFPQALDAFGCIDNKCTIKFLKRIDTYAQLKALSAKKLEQLLNDCGVYRTDSKERFYQAIRKPVYHISQAVVKTKTRLKNSLVAHLDLLIQQIQEYETQIQNLMDDSSNGHIFMSLPGADYILGAKLLVLYSTRDFADASEAQQLFGTAPYTAASGQSRSVGFRKGANKLGRNTFQQFAKCSIKSSNWANKQYARRRNQGKGSQHSFRCLANTWVKITFAMWRSKTTYDENRHMASITNHIVNQPAFVNGD

SEQ ID NO: 52780 - protein, 391 aa, unidentified
MTKRKTETVNDLSRCLNPLDMDATLIAVIELSQSSWLVAGIVPGVERQPLKKLAIDEHALLKLLNRWRGEAEKKGHRITRIAVAFEAGHDGFWLARWLAAQGVEAHVIHASSVAVTREHRRAKTDRLDTELLNRGFLGWLRGERGHCKMVTVPTLAEEDAKRPSRERETLVGEASRIITRVKAAFVRLGIRGFNPKLKAAATRLATLRTPQGEPIPPHTLAALKRDLERHQIVKQQIREIEQTRLEHLAQAPAKGPNAMVLLLARVVGIGVETADMLVQEVLSRNMRDRRAVARYAGLTGSPDESGAKRREKGLARSGNARVRRGMIQLAWRFLWLQKDSALAEWYRQRTQTAPAMRKTLIVALARKLLIALWRLVHDGIVPEGLQMRPAA

SEQ ID NO: 52781 - protein, 315 aa, unidentified
MTQTNILTAGIDTSKAKLDVAVHSRTERWQVANALPGWRALAANLAKIGVTRIGIEATGGYERGVVEHLRAAGFTVQVLQPIQVKAFGRAHLRRAKNDALDAALIAACTAAIDQPRIAPDPRLAELAANLTFLEQLEEDIARFKTRLEHIDEPGLRRLVNSDITRLKARKAAQIRYLAKHLRDHDDLAKRLALVLSIPGIGERTALALIIRMPELGQISREEAASLAGLAPFDDDSGLHRGQRHIAGGRGRLRKSLFAAALPAAFRWNQALIALYARLTAKGKVHNAALIACARKLLIYANTVVQRGTPWTEKAA

SEQ ID NO: 52782 - protein, 353 aa, unidentified
MLADQADHVLGIDTHRDSHSAAILATDTAVVRGQITVAANERGYRQLLRFARESAPGRRAWAVEGTGSYGAGLTVFLLREGELVLEVDRPRRPARRDRAKSDELDAIRAAREALTREHLARPRQRGEREALRVLLATRDSAVRSKRAAITLMKGLLVSASPGLREGLRSLATNEQLARCARLRVISTQDPEQRATTIAIRASARRALALQQEALELETEIKPIVAGLAPYLLAEMGVGPIVAAQILCAYSHHGRIRSEAAFASLAGVAPIPASSGQTVRHRLNRSGDRQLNRALHTIVLCRMRDDARTRAYAARRQAEGRSTREIKRCLKRYTARHLYRLLQASPPNLANSVT

SEQ ID NO: 52783 - protein, 439 aa, unidentified
MTTPSLAVLDPSAAAIDVGSEQLHVSVAGGPPKVFGTMTGQLHQLRDWLKAQGARSVAMEATGIYWLCPYEVLEQGGFEVVVVNGKYVKNLPGRKTDMSDCQWQATLHAHGLLKPGFVPPAHIRRLQDYIRVRTDHITMAASHEQHMQKALDRMNVKIHEVISDLTGESGLSVVRGILDGLRHPQALLALCHRQIQEKKAERMLAALEGTWKEEHLFALRQAYELWKFYQEKISECDQAIEKVLQEIAGPEDPTKPAPPATKRGGVNRPGIVGLHSLLWRLCGNKDLTVLPGVADYVLLQLLAETGTDLGEHWKSEKHFTAWLGLAPGSRQSGKRRGSQKRGRNRAGRLFCVIARSVGRSVDKALGGFYRRLKGRRGGLVANLGLARKLAEMFWRLMVHGITYVEQGLKKYEEKVAQTEQRLLQKLARKYNMVLQPKAP

SEQ ID NO: 52784 - protein, 342 aa, unidentified
MQIASIGIDLGKTTFHLVALEERGKVVIKQKFSRKQLFAYTANLPSSLIGIEACSGAHFMGAALRDQGHDVRLIPAQFVKPFLKSNKNDFLDAEAIAEAVARENMRFVPIKTDDQLDLQALHRVRDRLVHRRTALINQIRGFLLERGITFAKGPANLRQQMPAILEGAEQNLTPRLRSLLAHLWQEWKQLNCDIERVSDEIDAIAGQDAACQRLRQIPGVGPLVATATVAAIGNGAAFHRGREFAAWLGLVPRQHSTGGKAQLLGISKRGNVYLRRMFIHGARAVLLCVKHDTGRLGQWMRQLELRAPRNKVIVAVANKLARIAWAVLSTGNEYRNTAVTAA

SEQ ID NO: 52785 - protein, 333 aa, unidentified
MFPVGIDVSKDTLVLCILYDDIKVRIRTKKIKNDRSAAANIFRWLRLQHCGPGDVHLIMEATGVYHERLAFSLHEAGGYVSLTNPHRSRDFARGMGILTKTDKVDAYMLACYALLKKPQRWLPPSDEVRYLSALIRRRDALLSDAVREENRLEKYQSTHTPPDVISSCLRMVRILREEVKATEQLIKTHIKAHESLQQDYDLLTSIPAVGPQLGINMLIVLRSHDFESAGQIAAFMGVAPIEKRSGTSVRGKARMSKIGPPQLRAKLYMAAICARRCNKRMRIFYEELLLRGKPRIVAIGAVMRKLVHWCYGVLNSGKIFGSDAEFTAGTDSS

SEQ ID NO: 52786 - protein, 347 aa, unidentified
MRFYNQQHKFYCGIDLHARKMYVCIIDQKGKTRVHQNLKTDPEPLSDIIFPFLEDVVICVECMFSWYWIADFCAEHKIPFVLGHALYMKAIHGGKTKNDKIDSYKIAKLLKGGTLPFAYPYPAEMRATRDLLRRRTYMVRQCSLLVGHILNTNTQYNLPAFNKKLSRKFNHDGVAERFDDPSVRAAVAADLAMIKAFNELIKPLEWQIEKIACRHDHNSLYLLRTIPGVGQILALVILYEVHDIKRFGSVQRFCSYARLIRPEKESNGKWAGKSNKKIGNAHLKWAIRTAAMISLRESDQAKKYVDRLSRKHNKGKALGIYTHKLGRAVYFMLKNKRAFDMKHFFSH

SEQ ID NO: 52787 - protein, 320 aa, unidentified
MRNAVGLDISKTTFDATAIIGGIENSAKFDNDSKGFEQFKHWLTELGCTDAHICMEATGNYYEGIADYIGSLYKVSVVNPLKISKYAESRFTRTKTDKQDAKLIAEYCQTAKAQDLVIRKPVINDGYKLKRLSALYAQLTADSTAQKNRLEAAKDTFVVKICQSNIKHLQRQIKAVKKELEKLTKQPALKDQTDRLATIPAIGRLTAVMLLNYLSGTDFPTSNKFAAFAGLTPQIKDSGTSVRGKPSLTRYGNRRLRAMLFMPAMVAYRIKAFPDFIARLEAKNKPKKVIIAAIMRKLAVIAYHVHKKGEDYDPNRYKEA

SEQ ID NO: 52788 - protein, 422 aa, unidentified
MKRITEFTKKVKGQVKNTVLNKASWIVGIDIGKIKLSCVLMKKDQTVLYRFNAKSSMSGYKKILDQVKEKIKGRGRVVYAMEPTGHYWMVLGQFFEDHNQKYVLIHPLAVARSREVVRLNRGKTDPMDAHLIGELACREIATRTQIPEDYYATLRFLAREYMDREKDIVREKLRINSYVETTLPDFLDVFPNPLCLAGRACLRTLSNFKGAIKGDFSSFEKQVRKHYTGKRLWVSRVRQVYDTLRETHSMGLRAGRHAMFWRIINSLERLEVAEKQQETTEQSLLYHYNQSEYKPYLNSIQGTTSTTNALILGFMGNPTVYDNPKALIKLAGCDPVLNESGKYRGKTSISHRGRSLLRKAADRTAFCIEKRNVVFRNFFHRLVTRNKNKLTKRQARIACINKYFRIIWVLCNHRVTFNPSLA

SEQ ID NO: 52789 - protein, 367 aa, unidentified
MEKSSKVFVGMDVHKESIDITLAEQGGEVRRLGQIGGDRVSLLKMVRKQQSKGGERVFVYEAGPCGFWIYRELAALGERCLVVSPALVPRRAGDHVKTDRRDSERLASLARAGELEAIHVPDIRDEAIRDLVRARDDVVIAQRRVRQQLKALLLRNDIRYVGKTSWTGAHRRWLSELKLPEPAQRIVFEEYVDAIVVATARIERLTRAIETEVISWRFAPVVAGLQAMRGIQFVHAVTLVAELGDLTRFHSARSLMGYLGLVPREDSSGEHRRQGSITKAGNSYARRALIEAAWAYRHPARVTRIIATRQTGLPKAACDIAWKAQLRLSAKYRRLAARHLNHNKIVVALARELSGFIWAIGHSVQPQ

SEQ ID NO: 52790 - protein, 331 aa, unidentified
MMSLPNRTNETPLTVGVDVSKATLEVGFSDRDVTLAPANDEAGHAALLAHLAALRAKGSEIGLIVLEATGGLELDVATALQLAGYAVVIINPRQARDFARSMGFLAKTDRIDARVLAHMGQTLLQRDDLRKLIKPLPDEGQRMLQALVTRRRQLLAMRIAEQQRASGPDRRMRRSLNIILKALDRELARLDKDMQAFIGEHHAELAALLNQVKGVGKATISTLLAEVPELGELNGREVSALVGVAPINRDSGTMRGKRTIFGGRPSVRKVLFMAALVASRHNPVIKAFYQRLLAAGKPKKLALTACARKLLTILNAMARTGKPFNATLHLG

SEQ ID NO: 52791 - protein, 358 aa, unidentified
MKWCCRSDHPIEEPSVIQITVISLDLAKSVFQVHAVDAEGRVVVRKALRRTQVLPFFARLPSCLVGMEVCGTSHHWARELTKLGHQVRLMPPAYVKPYVKRGKTDAGDAEAICEAVTRPTMRFVPVKSAEQQAALALHRTRDLLVRQRTQLVNMLRGLLAEFGIEMARGLHHALRLAGQLSTGEAPEVPPLARLVVKGLADQIGTVQLQLARLERELLAWHRSNELSQRLATIPGIGVISATALAASVIEPERFRSGRQFAASLGLTPLQNCSGGRERMGRISRMGDRYLRRLLVVGMTSLVRRARIQPASVDPRLSAMLARKPVRLVTVAAANRTARVAWAIMTRGGTYRAPISAAA

SEQ ID NO: 52792 - protein, 384 aa, unidentified
MKTNSDAPQTLYLGLDVHKAETVISILEPDRDAEPRHHGAVATTVHALERAMRRIAKNQNRELSDLHVCYEASGCGFWIARRLIQMGIRCDVIAPSLIPTKSGDRIKTDKRDAAKLAKNLRSNDLVPVNIPDSVDEAIRDLCRARTDAVDDLRRAKSRLLAMLRRLGYNYDGKTHWTEAHMRYLRHLTLPDAAHNRVLEDNLTTIDFHHQRIAKLETEMLQLLEDWQRKPLVDALMAFKGFKLVAAMVTVSEIGTFTRFDHPKKLMAFLGLVPSENSSGNKQSRGGISKCGNPHARWLLIEQATHYRVSPKVSAQLSARQEGVARWIRELSWKTQTRLSHRFSTLKKRKLHHNKIKVSVARELCAFIWELGTRIEAKQGTPAQN

SEQ ID NO: 52793 - protein, 291 aa, unidentified
MSQPGSLCVDIDVSKAILDIAASSAIEQFSVGNDSDGFDAIIAELRMYAIALVLMKATGGLETAIVCALQAEGFELAVVNPRQARDFARAMGYLAKTDSIDARVLSQMAEVLNRHPERERFIRALPDTECQVLTAMVVRRRQLITMLVAERNRLHPAHPLNRKSINIIIKALEDELARLDADMNSHIHSHFKELAKRLSSIKGVGTMTAAALLAEVPEQGNLSRREISVLVGMVPVNRDSGTMRGRRTIFGGRAGVRTALAPHNNRGDIVCSASWLYAPRVRHPVRIAADV

SEQ ID NO: 52794 - protein, 340 aa, unidentified
MKKEVKFYLGMDVSKLWIDIVVMCVVDHKKQPTVSGHFENNAVGMKALDKWLRKNNVSFDENSLLVIENTGVYHRIVWEYCSSQRLPLYIGNATHIKYSFGLARGKNDKIDSERLCAYAFKNADEIKANPVLDPVFLKLKDMMTSRSRLLEQKNSIKVYLGELKLSNSKESQLIIEKAHKSALEGIEVSIDEVEKQIKQIIKENAAIEKNYELLITVPGIGHLTAVYIICCTNNFICKITGKQLASYAGVAPFGNKSGTSIKGRDKVHKMANKELKKLFHMGAISAITHYPEFKDYYDRKVKEGKHKLSAINAVRSKIALRAVAVVNNQEAYVNKYKKAA

SEQ ID NO: 52795 - protein, 409 aa, unidentified
MEALYPHCAGLDVHKETAVACVRHMEGQVRTAVKTFSSTTRGLMDLSAWLSEEAVTDVAMEATGVYWKPVWHILSDGEFHLVLANAAHVKNVPGRKTDVNDATWLADLMAHGLIRASFVPDEPTEQMRNLLRTRKQFVRERASQVQRIQKTLEDANIKLESVISDVVGVSGRRMIEALIRGQSEPQELAALADGRIRATGAQLEAALRGRVKAHHRFLLRLHLDHLDAVDAAIARIDKEVDGQIEPFRTAVERLSSIPGVSSLSAEVIVSEVGLDMSRFPTVGHFISWAGLCPKNDQSAGKRRSTRMRKGAPWLKTILIQCAWAATRVKGCYLQAQYLRLRSRRGAKKAAGAVAASILTAAYHMLRDGTSYQELGGSHFDRRSTTQQVDRLLKRLHHLGYDVQIAPVAA

SEQ ID NO: 52796 - protein, 344 aa, unidentified
MIVIGIDPHKSSLTAVAVDDTGHELAARRFVVNAGTFTQLISWAQRWPQHRFAVEGAKGLGRGIAQQLAAAGAGVVDVPATLAARARLLTTGGGRKTDATDAASVARVALHHHRLNPVQPEDQSTILRLLTEHRDDLTHERTRILNRLHGLLRDLVPGGAPTGLSADKAATALRTVRPATATDACRRDIARQLLAALRRIDAQLKANETELDHAVTAARSSLTELPGIGVIMAAKILGHVGNVTRFPNADHFASYTGAAPIDASSGPRKRHRLNTGGNRQLNSALHIIAVVQAHHSDLGRAYYQRKLGEGKTPAEARRALKRRLANVIYRRILKDQKQAHPTAA

SEQ ID NO: 52797 - protein, 366 aa, unidentified
MKKTSTILVNGNMIFKGHKLTIGLDLGDRWSCYCVLDEAGKIILEQKVAMTPEAMKQAFAKIPRSLIALETGTHSPWVSRLLTELGYKVIVAHAQKVQLITKSNRKDDRHDARTLARLARIDPELLGPVRHRSAQAQIHLTVIRARAELVRARTALVNAARGLVKSYGQRLPKCGTRQVSRELGAGLHAELREVLEPLLKEIESLNERIKEYEVRVEKIARESYPQVELLKQVKGVGTQIALTYVLTLEDPQRFPKSREVGCFLGLRPGRRDSGESQPQMRISKEGDRYLRTMLVQGAHYILGPFGEDSDLRRWGLKLAGRGGKNAKKRAVVAVARKLAVLLHRLWVSGEVYEPLRNSQKAMRAAA

SEQ ID NO: 52798 - protein, 310 aa, unidentified
MSMNNTPVYVGIDIAKDTFQYHINPNLQGNLPNSQDGFKRLLRLLDGRTVHLICEATGGYEQPLIAFCADQKLSASVVDPARVRHFIMGKGQRAKTDKIDAAMLALFGAENRPAPVEPLSAEQRELRELSRRRGQLLQIRQSLANQSRGLSLKALLSGQRKLLKEFDRQISVIEQLMEKHVAASELLRRKRDLLMVEPGVGPVVALALLAEMPELGTLNRASAAALAGVAPYARDSGTKSGRRYIRGGRALIRKKLYMAALVASRHHPRLKAIYQRLIARGKPAKVALVALMRHLIIQLNHNLKNVPSTP

SEQ ID NO: 52799 - protein, 343 aa, unidentified
MQTVTTIGLDIAKSVFQVHGVDAAGQVVIRRQLKRRTVLAFFQKLPPCLVGIEACASSHHWSRELQALGHSVRLMPPAYVKPYVKRQKNDMADAEAICEAVTRANMRFVPTKTAEQQSCLMLHRTRHLLIRQQTAVINSIRAQLAEFGIIAPVGRKGVTELLHVVADPNDKRVSDVARACLAALGTQLLSLKEQIMEFDRMILDWHRSNETSQRLHYIPGVGPVLATALVASVADPRTFRSGRNFSAWIGLVPKQHSSGGKDRLGSISKQGDRYLRSLFVAGALAVIRYAKIHGTKHRPWLTALLARRPTKVAAIALANKIARMAWAMMAKGERYKQPVALAA

SEQ ID NO: 52800 - protein, 348 aa, unidentified
MPNYNQAHQFYGGVDLHARSMFVHVLNAKGKTVFERDLPAEPDAFLGAIKPFRKNLVVGCECMFAWYWLADLCEDKRIPFVLGHALAMKHIHGGKAKSDKIDAGKLAAMLRGGMFPLAYVYPRGKRQTRDLLRRRSFFVRQRAQLITHIVNTNSQFNLPPFPKKLSYAANRSEEIAERFTDPSTRLSINADLRLIDAYDAQIAELERHLLHSAKVDDPVTFGFLRTIPGIGPILGLILLYEIDRIERFPEAGNFLSYSRLVRCAHESAGKGKGFGGKKIGNAHLKWAFSEAACLMLRTCVPVKSWLQRQESKRGKRKALSVLEAKIGRTVYHLWRKQQAFDVKKFLHS

SEQ ID NO: 52801 - protein, 316 aa, unidentified
MANHVDKITLGIDVAKDHHVIYNWQTKQTTRLPNECGDIKAWLKTFHGPVRIAIEPTSHYHMIMVDEALALGYEVYLINPRQLLHYREAVNERNKTDPLDAWLLARFLEHEVDQLRPFKPRDPRAQRLWSLVLRRATVVKSRQQLQQSFAEVKLSIQALLTQFQHLLDRIERRIIALIQELGWWSDYQRCLSIPGIGEGNAGALVVVYHRGCFAGSDAFISYLGLDVRIRDSGHFKGKRKLTKRGPPELRRLLFCASHAARHYHRFAEYYQKQLDKGLCKIAARVILARKLARIAFTLMRNEENFIKEEKIHCVAS

SEQ ID NO: 52802 - protein, 430 aa, unidentified
MKSNTQNAKIKAITETTLVLGIDVGSETHYARAFDYRGIEYSKKPFKFSNDEAGFVTFKAWILDIKEKHGKDKVVPGMEPTGHYWFNLGKFLQDNEMKPVLVNPHHVKKSKELDDNNPTKNDRKDPKVIAGLVREGRYMIPYLPEGVYADLRTASNMRFQLQAELTRIQNRISRWFNIYFPEYKTVYGQPDAKSGMLILKVAPLPEDILTLGIDGVNQIWRDAKVRAVGKARAKTLIEAAEHSVGSKEGEISARMEIRMLLEDYESRNTRLQEVVALIEELVKKIPMAEKLLEIKGVGIKTVSGFLAEVGDISRFNNPKELQKLAGLALVENSSGKHKGETTISRRGRKRLRYLLFEVAMSLVSKNPEFRELHSYYTTRKLNPLKKMQSLMAVAAKLLRVFFAMLTKGVDYDPKKLVGDIKRPAVYLQVA

SEQ ID NO: 52803 - protein, 449 aa, unidentified
MARKHTKDSKANNAMLPVMRPDAAGIDIGATEIFVAVPADRATENVRSFPTFTQDLYRLADWLAECGIQTVAMESTGVYWIPLILEDRGFEVCLVNARHVKNVPGRRTDVSDCQWLQFLHSVGLLRASYRPAQEVCAIRALLRHRESLVQMAATHVHHMQKALDQMNLQIHHVISDITGQTGLAIVDAILAGQHDPQELAKLRNERIKASEEVIAKSLVGDYRAEHLFTLRQSLAAYRNYQKLIVACDREIRRLLEQFQPPHQADVSVPNKTTAKTLTTESVMGAELKRVFGVDLTKIPGIRVGIAPTLFGEIGPDFTKFRSASAFASWMGLCPDNDVSGGKVLWVGTRKVNCRAATALRIAAQSLHHSKSALGDFYRRMRAKLGAPKAITAAAHKLARIIFHLITTRQEFDDSRFAADRVRYQKRQEVKLRAKAKAMGFELIPVVPAR

SEQ ID NO: 52804 - protein, 368 aa, unidentified
MSTLRFVGLDVHKDTIVIAVANEGQSEAVTLATIPHDVTKLVKQVSKLVDDKKHLRVCYEAGPTGFGLSRRLKAAGINCVVIAPSLVPQQVGIRVKTDRRDARRLAHFLRSGDLVEVWVPDEKTEALRDLERSRDDAKNAERVARHQLDKFLLRNERVYRDGRSWTQKHSDWLKQQKMGDPCKQCVMDDYVKAVDDATERVNRLSKDIELFVRGTALEPLIRAFMAFRGIKTLSAVVIAAEIGDLRRFTTARQFMAFLGLVPSEHSSGKSIKRGALTRTGNVHVRRILIEAVQHYRHRPTLSAALRERQEGISPEVISISWEAQKRLCKRLNYLIEQKKPRNKVIVALARELAGFIWAVGQVSKPLAA

SEQ ID NO: 52805 - protein, 357 aa, unidentified
MTTEQRQKTMFIGVDVHKDTHTAVGVSPFGEKLFEITVGNYKKDFENLTEKVELMKGSLSPYFGLEDCHGYGERLAGYLVEAYPVIHVPSIMVDRLRQNATHPEKSDSLDALGVAKVMMQSIDTLPIYTISEESKRAKQIKELSMDREYLVEERTRLKNQAHTLLYRIYNTEYQERFKDPFSLKALRYWSLARPAGDPFLLKAMKRKVRRLVAIHTEVTDLEKDMELMLTEGKYTIQTASGCGLVIASMIIGEIGDIARFHSPGALAKYAGCAPRECSSGKTKRYRKTRSGNRRLNCAFHRMALSQISRMGNDKARVYFKRKMSEGKSKSQALVCLRRQMVNIVWMMLKHKTIYRNA

SEQ ID NO: 52806 - protein, 451 aa, unidentified
MKKGVEKRKIIKMGTGLPAFNLHAAGIDIGDSLHCVAINDGKGGHEVKTTSSFTCDLKEIVDYLQSNGVTTAAMESTGVYWLPLYIMLEEAGIEPYLVNAKYVKNVTGRKKDDTDSIWIQKLHTCGLLHKCFQPENEIRQLRDYTRQRRNLILLSSDTVRRMQKALELMNIKIHTVISDILGKTGMKMVKAIISGERDPQILSTLCDSRIKASQEEIIKSLHGIWKEEYLFMLEQAVENYEFHQKQIKSCDEKIKQQLLKQVAIIKEGDITSLEETPKKKVKSRKNQFDFSISPYLKAITGVDLCKISGVSEVTVLGFISEVGVDMSKWNSYKHFTAWLNLIPNTKISGGKIISSKMMKKKNKAGQYLKQAASSLSSNKSPIGDYYRKMQARLGGKGAALCTAHKLARIIYTMLLKKTEYNAGMMIDNQEKLKEDKIKKLEKQLARLKQVA

SEQ ID NO: 52807 - protein, 375 aa, unidentified
MSEHSEAFVGFDTSKLRNAVAIAEGGRDGEVRFFGEIENTTEATAKLVRKLAGKYERLTFCYEAGPTGYGLHRQITGLGHGCNVVAPSLVPKKPGNRVKTNRRDAVSLAKLLRAGELTAVWVPDEGHEAMRDLTRARDTAVNDLRAKRQQVSALLLRLGRHYPHQRQTWTKAHMNWLASQKFDYPQQRFVFEELMLAMRQAQERLTRLEEAIRNAVPEWSLAAVVTALMAMRGIDLISAATLLAEIGDLSRFRTPHELMGYLGLVPSEESTGDTVRRGSITKAGNGRARRMLVECSWSYQHPPRVGAHKQHKVDAAPPAVREIAWKAQCRLHKRYRALIRRGKLKTIAITAVARELAGFIWAINREITTACSAAR

SEQ ID NO: 52808 - protein, 316 aa, unidentified
METPQTFVGIDVSSQHLDVDSLPASHHFSEPNTEDGIASLVLRLRKLNPQIVLLEATGGYEVPVAYALYEAGLPVVIMNPKALRHFAKAIGKLAKTDKLDAQVLAHYAQSIRPPVRPLKDQEQLELATLMTRRRQLQGMIVMEGNRRRTCTPKVRGNIDQSLAHLRQLLEDLDREIHDSIRRTPLWHENSEILQSFTGIGPKVSASLIAVIPELGTLPGTKVSALAGLAPMNRDSGQYRGKRKIQGGRPAVRQALYMAALVASHHNPVIMEFYQRLRLAGKPAKVALTACMRKILVILNAMLKNRTYWNPQLPLAA

SEQ ID NO: 52809 - protein, 343 aa, unidentified
MQTVTTIGLDIAKSVFQVHGVDAAGNVIVRRQLKRRYVLPFFQKLPPCLIGIEACASSHHWSRELKALGHTVRLMPAAYVKPYVKRQKNDAADAEAICEAVTRANMRFVATKTLEQQSCLMLHRTRHLFIRQQTAVINAIRAHLAEFGIVAPVGRNGVEQLLNVVADPGDKRLPDVARACVATLGAQLQMLKARILEFDRLIMAWHRSSEASKRMDEIPGVGPALATALVASVADPKAFRSGRNFSAWIGLVPKQHSSGGKDKLGSISKQGDRYLRSLFTAGALAVIRYAKIHGTKHRPWLTALLARRPTKVAAIALANKIARMAWAMMARGDRYKEPVALAA

SEQ ID NO: 52810 - protein, 457 aa, unidentified
MHSTRRAHKRQVVAGKWILGIDPAKERHTAILVDPSGDTQGSSFSFKVTAQGFRESLPKLLTGRLPTASPEHVLIAVETACNLWQTIAAFCHGQGYTVLLVNPLTTYHSRPLQDHDFSRTDPKDARLIAENAQKGHFDTYRIFDPGLNALHQLSIARHKLVKDKTRARLRLRSFVELYFPEFLNALDLGTKSALHLLRRHFLPRHFLTLDLPQEAEALRKLSRGNHGSDTLQRLRQWAGESIGLPVDSVLEQVVRQTLYVWLDQLELLQRQLAAIDTQMAERAAKLPEFKLLTSIPNIGNCLAAGLIAECRGLAPGVHPKQLEKFAGLNLRLAESGTYSGQRRISRIGNARLRCVLYQMAVQTCQSVPYVRRRYLQRQLKHPAYRKNVVAAISQLLKLVCALVNEQRPYETRTGEWTEVRKLERKLKPTTNKKPTQRRSVHRLGNPNERPRRRRKAA

SEQ ID NO: 52811 - protein, 342 aa, unidentified
MDEYDGRQFVGIDLHRQRSVIVRQSESGEQLSAVRIVNDPVALALQLEQAGSDPEVVLEATYGWYWAVDVLQDCGARVHLAHPLGVKGFRYRRVKNDVRDAGDLADLLRMGRLPEAWIAPPETRELRELVRYRAKLVAIRSGLKAQIHAVLAKAGVLIAVSDLFGVTGRQRLAKVPLGPAYAQRIRSLLELIDILDGHVARFAAMIAERLRAQRGYQAIQQLPGVGPVLAAVFVAEIGDVHRFAGPAQLCSWAGLTPTHRESDTVVRRGHITKQGSKLVRWAAVEAIQRQPDITKIALDRKRIEARRGRNIAKIAAARKLLTLVYYGLRDGHIRALARQVAA

SEQ ID NO: 52812 - protein, 338 aa, unidentified
MNYVGIDHHRQYSHITLLDEKGEVVKSRRVANFRRELEKFLQGIGNVKAVIEAGRSSYTMVDVLDNMGIETVIAHPKDIKAIAKAKVKTDERDSYKLAHLLRTGYIPEVYKRSRENRSSQRVLRQRAFYVGKQTSVKNRLRALLAQQGEEIRGEVARVENLFTAKGMRVLEGLDLPEREGKMVGALMKTYRHLEERIRETNALVEELYEKMSSARLIQTVPGFGKFLSVLVAVEIEDLGRFKDVSKLHAYAGVIPSTHSSGERSYHGKIIKEGNRWLRWAAVEAVWPAIRADFDIRLYNEKMKRRKGANSAKVATARRLLTIIYRMLKENRPYIPYKR

SEQ ID NO: 52813 - protein, 347 aa, unidentified
MRFYTQQHQYYCGIDLHARKMYVCILNNIGKIVLHKNIRTDPELLFEILFPFLPEVVVGVECMFSWYWIADLCREHCIPFILGHALYMKAIHGGKTKNDKIDSRKIAALIRGGNFPLAYAYPKQMRSTRDLLRRRMHLVRKRAELLSHIQNTNTQYNLPLIGERITYKANRKGIADRFEDPSVNKSIQIDLAMIDTYDKLLKDVESYILKHAKAHDANTLYLLQTIPGVGKILALVMLYEIHDIGRFPLVQDFSSYCRLIRPAKESNGKTTGKGNKKIGNPHLKWAMSEATVLLIRESDRAKKLHQKLVKKNKEGKALGILSNKLGRAIYYMLKNKQAFDMDKFFGN

SEQ ID NO: 52814 - protein, 422 aa, unidentified
MLAESHDEEQIIARVAALDIAKAELVCCVRVPSPAGGKRRLQEVATYSTMTQALTELANRLVEMRVQRVVMEATSSYWKPVFYLLEAHGLDPWLVNARDVKHLPGRPKTDVLDAVWLCKVAERQMLRPSFVPPWPIRRLPDLTRYRTDLVAARTAEKNRVEKLLEDACIKLSVVASDIFGVSGRAMLAALVAGERDPKVLAQLARARMRGKIDRLEQAFDGHFDDHHRFLLSRMLARIEGLDADIAAVDAQIDVQLAPFAEAAARLDEIPGIGPVAAAAIIAEIGVDMSRFPTAGHLCSWAKFAPGINSSAGKSKGSASSGHGNPYLARILGEAAVGTTKTNTFLAARYRRIARRRGQPRAVVAIGRSILVIIWHLLHDPDTRYRDLGSDHYARHVDPTAKKRSHIRQLEALGYTVTLTPAA

SEQ ID NO: 52815 - protein, 340 aa, unidentified
MGEITTIGVDLAKHVFQVHGVDAEGATVLRKQLRRGQVLAFFSKLPPCIVGLEACATAHYWARELGALGHEVRLMPAQYVKAYIKRNKNDAADAEAICEAVSRPTMRFVPTKTAEQQAALLLHRGRERLVRQRTALVNALRAHLAEFGVIAPQGLRNVGKLIGIVRNEEDARLPDAARQVLQVLAAQIEQLETAIAELEKQLMAWHKSNPVSQRLATIPGIGPIIATAIAATVVEPNGFRSGREFAAWLGLVPRQNSTGGKNRLGGISKRGNQYLRRLLINGASANLLRSKATNADPWVIGLRRRRPSLVVAVALANKTARIAWAVMHRQKNYQRMAAAA

SEQ ID NO: 52816 - protein, 320 aa, unidentified
MKIHPGFVGIDVSKRHLDIFDGTTGRSFRMPNSAAALTEHLAAWQAADAFVTFEATGHYDLALRHGLEGTGVRFARVNPERARAFARAAGYLAKTDKVDARMLAAMGQSLVLPAAAPGDAVREELAGLHKRRDQLVECRKQERTRAHDAPAAILATIDRHLAYLDGAIREIEAAAAALIARNAALVATQRLLLSVPGIGQITAMTLLALMPELGQRAGGSLAVLAGLAPLADDSGDFRGQRKIRGGRKRVRDALYIAAVAASHSHSRFADFYKALRERHKPPKLAFVAVARKLLITVNAVLRDGTPFSSEHATRPAPAAA

SEQ ID NO: 52817 - protein, 409 aa, unidentified
MLNLVVQLGEFAMRGAPRIATRLGLTAICACCIDSLTEIAAAPGMTTRGQCCGIDRVNKTCVRPARSVVELSINTKDTGMDSLCLDLGKDEIVAFLIDADGNPIHDKPRTFNQTPRGYRQLLKWMRRPADTRVVFEATGVYSKRLVRALNGSVASMHELNPRIIKRFAISMTQTKTDQADVRAIADVVHTLTLKRPEKLEQSRVICDPQRDNLALWLQEYDRLRRVIARLKNQIDNLTHETADDASIILQRRRDELARLQDDQRQVRRQVDRAFKAWKSEEAALACSITGIATLTAASILTSIHHIEQFQSADAFKAYFGMYPRRRQSGSHESKSRMAKNGNRLVRHNLWNAARSAARHNPVCRELFERLVAQGKHEAAAYGAVARKLLQILYGVLKNKQPFQIQPLST

SEQ ID NO: 52818 - protein, 387 aa, unidentified
MSTMPGVDPAVDVRATATPLTPLQVVGGIDTHKDLHVAAVLDERENVLGTCSFSTTRAGYRALVRWMRTFGTLAKVGIEGTGSYGAGITRHLTDLDVQVIEVDRPDRSDRRRKGKDDDLDAISAAKAALRGQRTSTPKSKTGKVESLRVLRVVRSTAVKSRRVALQMLRAQIVSCPEELRDQVRNLTRMQLIRTCAGWRPDSTDAADPVTATRIALKSLARRMLELGDEIAMLDELIEPLVSALAPNLLERNGIGIEVAGQLLVTAGDNPERLHSEAAFAMLCGVAPLPASSGKTQRHRLNRGGDRQANSALHLAVITRMRTDAKTQAYVAKRTALGHSKLETIRCLKRYLAREVYYLLNPGKPQLAAPPPSTATSVHGGKPTKAAA

SEQ ID NO: 52819 - protein, 449 aa, unidentified
MSKSVSTQSGLPVVHARAAGIDIGSRFHVVAVAPNLTDEPVRTFQAFTADLGRMADWLVALGITTVAMESTGVYWVPAFEVLESRGLDVILANAREARAVPGRKSDVNDAQWLQRLHACGLLRASFHPRRDIAALRVYMRLRERLVDYAAAHIQHMQKALTFMNLQLHHVVSDVTGVTGMKIIRAIVSGERNLEVLATMRDVRCKANTETLRGALTGNYQPEHVFALRQALALYDFYQSRIDECDVQIEQVLAALTADKPNPATPLPQPRHRTKQPSDLSFDLRPVLYQLTGLDLTQIHGIGPHLALRLIAECGTDLGKWPSAKHFASWLTLAPGCKISGGKVLSARTRKTTNRLAAHLRLAAVTVGRTSTALSAFYRRLAARIGKAKAVTATARKIAILFYNAMRFGRDYRDLGADEYERKYRERVIKHLHRRAAEFGYTLQQVVGVS

SEQ ID NO: 52820 - protein, 366 aa, unidentified
MSAISKTTDRVVIAIDPHKASWTAAVVDASSQPVATIRVPVSRDGYRALRRFADRWPDPTWAIEGASGLGAPLTARLRTDGIDVVDVPAKLAARVRMLSTGHGRKNDDADAVSVGIAARSAPRLNSAAVDDTVTALRAIVDHRDDLVKTRTQTVNRLHVVLTNLIPAGAQRDLTAERAAELLRGIRPRDTAGKTLRGLATDLTSEIRQLDRRIAKAAADIQTAVTASGTTLTELCGIGALTAGKILGRVGTIDRFRSAAAFASYTGTAPIDVSSGDVVRHRLSRAGDRQLNLCLHVMALTQIRQDTPGRAYYLRKRTEGKSHKEAMRCLKRRLSDVVYRQLLRDANRLEAGPGGHSGAALSSSAAS

SEQ ID NO: 52821 - protein, 408 aa, unidentified
MLKIVHPVCCGIDVHKKFVVACIASTDERGITTYKVSRFSTFTGGLVKLSEWLLYNSCRDVCMESTGKYWIPVFNILEDVCRVTLAHPKYLKAIRGKKTDKKDARWIADLFKHDLVAASFMPPADIRQLRDLMRYRTKLIGFASSEKNRFQNCLTVSNIQIANVVSDTFGASSMKIINSLLEGSDIPDIEPLLHGSMVKKADDIRLAVRGVVTKEQKEKMKVILSHYHGIEECKARLESVILSLAEPYARELELVLTVPGIGNPFSAIAIISEIGADMSVFTTAKHLCSWAGLVSQNNESAGKKYSVAISRAGIYIKPLLVQCANGVVKSDKHPEIRGRYLSIRKRRGHKRAIIAIARMLLTAIYYILSSDKPYNPDLFRKADVLPKNRNITVDQAVSFARRFGYCVN

SEQ ID NO: 52822 - protein, 434 aa, unidentified
MMKVLYERVAGIDVHKDMIKVAIRSPGEKPWTRTTEILEFRTFYGVLQEVARLLRRRGVTHVVMEASGVYTEPVYHALAEQDFEQVMVVNPAHVKALKGHKTDAADCRRLAELLECGLLRGSYIPPAELKEVRDLTRYRMKTVQARTSEIQRLAKALESAGIKLGSVASEITGTSATAMIEALIDGERRGGVLADLALGRMRTAGKLADLSMALSGRFGEHHALLCRLHRDRITLFDEAVAGLDEQIGARAARWAREAALLRSVPGFGDVVTWTWLAEIGPAPHQWFASHGKLASWVTLCPGNNISAKKRKHGRTGDAGAYIKPMLIQAAWTAIRTRGRLQARYRRLVRRFGGEKNPAAKKKAITAIAHTLLKIAYQVLKSGEPYTDLGADFYTRRESPAQRQAWLERQLQNLHPGSLITITITPPEAALPPSR

SEQ ID NO: 52823 - protein, 481 aa, unidentified
MKKRSIYQQQSQELMRIYEEAGNSKKVLVVAIDYAKKEHTIMLCNGNGDILRKPFGVWNNPEGVNYLLEQVQKTCTYHKIKTRHAFFGGEDSGSYTENFAQCLRERGYLVAGVNARDAKKQRENMQASTDRLDLLGIARMLISRRGNCAPSQSGAYRNLRTLVRHRRKIVALSTEERNRMHCLVDRLFPGFLEERKSGLTPFHEPSLRIMESRFSANQIKRRKQTTLVDILARAGAQKPQQKAKQLQTYAGNVLQPPKDYVATWQTSLTQHVSLYRCLLGNIASLEREMAIWLAQTQGAFLMSVKGIGLVLAAGVTAEIGDALTQKPVGNLTSYSGVIPRVNQTGGSDRSPHTGSVAKRCNRILKDYLVQSASHQGLHGVDDLMADHKRREANGQHANFGIARRYLRMAMHMMRLSHIYLPPELRVDATSEARGEYYQMIWPYLLEKWKRYDAHDIAFNSEHSLGQWRDMVQSIYKITLKI

SEQ ID NO: 52824 - protein, 313 aa, unidentified
MDRVVGVDVSKSQLDAYDLGAGRRLRVGNDAAGVARLAAWASPGALVVMEASGGYERPAHRRLLERGLKVAIVNAKRVRDFARASGRLAKTDRVDAEVIARYGAFARPPATPAPDPAGRELAEVLAFRQRLVSEITARQQQLGHLETPLLRRRAQADLARLRRDKAEIETLLRRAIGGAPHLARGFALLTSMPGVGLILAATLLALLPELGALDRRQIASLVGVAPIAKDSGLKRGQRVVAEGRSAVRRVLYMAALSASRGGSRFAAFYRRLVAKGKPPKLALVATMRKMLVTLNAIARAQQPWSETALKPAA

SEQ ID NO: 52825 - protein, 332 aa, unidentified
MIRKIEIIGIDVSKLTLDVFIHSLNFHFVVSNDPDGYSKLLQVIWQKLPGKKDNLFLCFEDTGKYSLPLCIFLNAEKIDFILASALDIKRSMGLVRGKSDKKDAKIIALYAWRKRDELKPTIIPAASIIRMKQLLSLRNKLVKHKKSYQNSMTDVHDYFKEGDSKLYLDINKHIIKSINTEIAKIEKEIDTIIKTDDKIKNNYKILKTVPGIGKIIAFYLIAYTHNFTKFETARKFCCYCGIAPFENTSGTSIKGRTKVNPLANKMIKALLNMGAMSAIQNYKEFKTYYNNRLNHGHSKMSTLNIVRNKIVFRAFSVVKRGTAYVDLHQFAA

SEQ ID NO: 52826 - protein, 406 aa, unidentified
MSLPHTIPKRFVGLDVHKYYLVATAVDADLNLLFGPQRVQLANLESWIAKTLTSEDAVVLEMTTNTWQIHDELLPHVHSVTVVHPPHVALIVRAQVMTDKIAAYQLARLHAKGLLVGIWVPTQEVRERRALVAQRAKMVRLVNQAKNRLHSTLHRHHLALPGEGNPFAPPLRNWWLSLPVSVLEKVNILSDLDTLAFAQQQVANLEQAMLSLAAQDERVPLLVQLPGISLITAMVILAAIGEIERFPEAKSLVGYTGLGAGIHDSGLTTRTARITKAGRRDLRAALVEAAQVAANTHPHWQAELARLEPRLGRNKAIVAIARKLLIAVWHILTQQVADRFAQPELVARKMLKYAYRLGKSRRPQGLSASAFVRSQLDRLHIAQDLTHIPCGAKKKPIPLPPSSQAG

SEQ ID NO: 52827 - protein, 400 aa, unidentified
MDEKERFGWFLGIDVSKETFDACCITRQGERVFRMSTSMDRRGFEELIHQLSAVSVAQESVLVGMESTACYHLNLYSFLISLGYPVLVINPLLISNFVKLQLRKTKTDKKDAWVIAQFLLLNRDSLYRTVGTSEFSDIRDLSRQRESLVDQMTAIKSDMKRLLTITFPELEHLAGIFTKSMLRLLSQYPSAASMRRAKRSKIAGILIPGSYGKQTDTSVQRIIKAAEASIGTASPAKEIILKQKVSLLIQLEEHLQELTTILIEHCQEKMRRDMDILTSMKGIGEKTAMNFLIEMGGDIKQFESHKKLIAMAGLDPALYQSGKIDRRGKISKRGNRHLRRVIWLMTTKVIQFNEIFKQYHLKRLQEGLPYKMAVLATAHKLIRVVFAMLTNQTLFNARAN

SEQ ID NO: 52828 - protein, 425 aa, unidentified
MDCNQNEKINQVTEMTLVIGMDIAKRTHYASFIDVRGRALKKAFPVLQSKEGFETFYRSVLEAMEEYKKTDVIVGIEPTGHYWLNLAYFLTERGIPLVMVNPMHVKRSKELDDNLQTKHDAKDALVIARLVKDGRFSYPRILAGVEAELRVGTTLRKQFVEEQIAIRNKLIRWLDRYFPEFSKVFPTFGKTAMAALECTPLPCDVVGKTVEELLHDYRQVEGITSPQKHKVMRLTQIALDSIGVTEGLEMARVEIATLVRRYREIENELKELMSRLTNLAKNSEEYDWLSTVPGMGDATIIELLSEIGSFSYYQHPRQLIKLAGLTLREHSSGQHRGQKRISKRGRRHLRALLFRVMMPMVRCNEAFRQLHVYYTTRSKNPLRKKQSIVVLCGKLLKILHALSTKQVEFDAQRMLADIPSLEGAL

SEQ ID NO: 52829 - protein, 364 aa, unidentified
MIAIGIDPHKRSHTAVAVDGATGQVVDELTVPASEDGHEGLRRWAHGLCADGDPLFALEDCRHVSGRLERLLVARGERVVRVPPKLMGEARRGQREPGKSDAIDALAVARAALREPRLPAAHLDPQARELKLLADHREDLVRERTAQIQRLRWHLHDLDSGLEPAPRALRSERARSLLARRLARGEQTVAVAIARELLRRIGEITRRERALEAEIRERARAYAPALFELAGCGALTAAKLIAEIAGAERFRSDAQLARHAGCAPLEASSGARRRHRFSRRGNRQLNSAFHRIAVTQARISPEARSYLERKRAEGKSTREALRCLKRQIVRRAFKLLRARVDEKTTSALTEIGANTDLPPAVALT

SEQ ID NO: 52830 - protein, 345 aa, unidentified
MKITTVGIDLAKNVFQVHGIAERGKAVLRKQLRRSQVAVFFGNLPPCLIGMEACASAHYWARTLQCFGHTVRLMAPQFVKPYVKTNKNDVADAEAICEAVSRPNMRFVPIKSIEQQGILSVHRVRQGFVKARTAQANQIRGLLGEFGLVIPQGIYNVAKGVPEILEDASNELPVPFRHLIDRLTQHLKELDRQVKEFEQEIIAWHRGSELSRKLEKIPGIGPLAASALVASIADARSFKNGRQVSAWLGLVPRQNSSGGKPTLLGMSKRGDAYLRTLLIHGARSAILAAKNKVDNTQGWLTNLLKRRHPNIAAVALANKNVRTVWAILAHGREFKADYVPTRMTA

SEQ ID NO: 52831 - protein, 332 aa, unidentified
MNQYKHFFGVDVSKNTIDISYYCSDKEQIIHRQFANQSDGMNEMTQWFVDLSIEIREALFCMEETGLYCFTLTNYLLKNGIDTWVEHALNIKRSIALSRGKNDKVDSKRIAQYAATHTDRLRLWKPMNATLEKIKHLAALRDRIVETQKRLLVPIKEFEAVGNTEMVKLIRNSIKTTIAALDKDLKNIESKIIDIVNSDDHLLQLYKVVVSVVGIGFVTGINLIVHTQAFTIMNDSRKLACYCGVAPFEYSSGSSIRGKTKVHPMANKKLKCNLHMAALSAVRTDADLKKYYERKVEEGKNKMSVLNAVRNKILNRVVACVNKNKEYVKVPA

SEQ ID NO: 52832 - protein, 321 aa, unidentified
MTSTLAQNAGVDISKDWLDASISPNNESARFTNNVNGLKALRRWLAARRPARVVFEATGAYHRLFERTLAQAGFPLVKVNPRRARRFAEAIGKLAKTDAIDAAMLARMGAVLELEARPIVSQTLDEMKELISARDALIKDRTAALTREKTVRATLLRNQLAARLRQIGAVETALKALRSADADLNARFEILLSIPGVGEITAYVLIVEMSELGMLEPEQASALGGVAPFAQDSGKFAGRRCIRGGRERVRRALYMAALSAMTHHPEYSAKYQALIKAGKPPKVALVVLMRKLLLLANALLRDKRKWTPQAPQKQEVSASKA

SEQ ID NO: 52833 - protein, 339 aa, unidentified
MKLYSGIDLHSSSSYLAIVDETGKRIFKETAPNDITAIVRSFEPFRNDLVGIVVESTYNWYWLVDGLMAEGFALHLANPSAIQKYSGIKYADDKHDAFWLAEMLRLNILPTGYIYPKDTRPIRDLLRKRGHLVSLRSSLLISLQNIITRNCGIKMKTNDIKRLRENRVHPYLADNEDLALAGQVSKDSIDFFTRQIYAIESFLEKKLDLTDTYKKLVTIPGIGKILGLTIMLETGPIERFEKVGNYASYCRAVSTQWVSNGKSKGKGNKKNGNKYLSWAFSEAAEFARRYDDKARAYYNRKLRKTNFMIAHAALAHKLARAAYHVMKDGVDFMPEKIFT

SEQ ID NO: 52834 - protein, 343 aa, unidentified
MSKITTVGLDLAKSVFQVHGSDRTGRPVVRKKLRRKQVLEFFAALSPCLVGLEACASAHHWARELQALGHEVRLIPPQYVRPFVKTNKNDASDAEAICEALMRPTMRFAAVKSAEQQSVLLLHRARELLVRQRTMLINALRGHCGEFGIVVAQGAPKVTELIERIEDPDDTRIPALARAALRSLVEQYRKVQTEILGLEKRLKAWHRSNEASRRLEAIPGVGMITATALVATIGDASQFHSGRQLAAWLGLVPRQHSSGGKERLGRISKRGDGYIRRLLVHGARADLRWSRRRKQARSAWQESLLARRPTNVVLVAMANKTARVVWAMLSRGETFRNQAPITA

SEQ ID NO: 52835 - protein, 454 aa, unidentified
MAKARDRRRTLDGFAEINHDAAGIDVGNAQHWVAVPAGRDAESVRMFGCFTAELHALANWLERCGIKTVAMESTGVYWIALYEVLESRGFKVCVVNARQAKNLPGRKTDVKDCQWLQQLHTYGLLTASFRPQGEIIILRRYLRHRETLVQEAATCIQRIQKALTEMNLQLANVISDISGTTGLRILRAIVEGERDPQRLAAMRDWRIKATPDEVAKSLLGNWRDELIFVVGENLALYEVYQQKVERCDYRIEQHLKNMSAQVDNNTNPMPKPRKGKRPHGNAPSFDLRSELYRVTGTDLTQIEGINVVTAQAILADTGTDMSAWRTEKHFVSWLGLCPDHRISGGKVLQRGTRKVISRAATAFRLAASALRRSQSALGAKYRRLQGRLGAPKAITAMAHHLARLFYRMIKYGSKYVDHGAAAYEAKFKEQQLRWLSRKAAELHLCLAPLPNSAV

SEQ ID NO: 52836 - protein, 329 aa, unidentified
MVYVGIDVHRKRSQVAVLDDAGTQLSNRNYENSSGDLRAVLDELEPGTGVAFEAAYGWGWLADLLEECELEAHLAHPSACKAIAHARLKNDKVDARILAQLLRTDFLPEAWIAPKEIRDLRSLLRHRASLVRVRTSLKNRIHAVVADEGLKVEVGTLWSAEGETWLARVALRPMHREIVDDCCGLLDALATPIRRLDAEIRDQAEPDPRVEALRSLYGVGLITSMTLVAEIGDISRFPTARKLCAWAGLTPSVHNSDVKVRHGHITKAGPAAVRAVLTEASYQARHVAPFAKYFEEVAKRRGKRIATVALSRKILARCFHILKSLDEPA

SEQ ID NO: 52837 - protein, 596 aa, unidentified
MLAQHATTPQSPPRIGVGIDTSRYGHYAVFLKDDLQPAADELSFPESAAGYALFRQRLQALVQRYGAVDFAVRLDVAGPYADNLLHFLHGLTMAAVDRPAAAAPLALTISCGDPQRNKNYRAALFGGQKSDPVEARAAARFAVTERPRSDKRLSLELRILRQIAGRLQAVVRQRTRLINQFHHLLGLTFPELALLTKDVAAGWVLELMHRYPTAPRIAQATPAELTAIPYLQDAQVASLLEQAHTSIASLTGEAIDELVRDHVRQLRDVGARQKRLENLLVGAYGALPQANQLDTIPGIGAVSAAVLTAFILDIDRFATPGKLVAYFGVLPIEVSSGVDRDGQARSPRRWIMSRRGNDLVRRYLWMAALSAIRCNPAVRALYARVVAKHPRRKAIAVGHAMRKLLHLAFAIWKRGRSFDRNHYPWQTPAHVATSDNDMSVDGQMSDNDTSMISQAAGHKPDVVPAEQVVTAACADSVGEATIVGESTAVDFAHVKAQLSLSQVLDQLGLMARLRGSGPQRRGPCPLHRGDGRGRTFSVNLDAHVFQCFDKKCGQKGDVIDLWAAWHGLSLREAALDLIRTFGLEACARPATEKRNG

SEQ ID NO: 52838 - protein, 402 aa, unidentified
MNAVGIDVSKSKSVVAIMRPFGEIVSTPFEIKHTASDIHSLIELINSVEGESRIVMEHTGRYYEVLAHQLLEANLFVSAINPKLIKDFDNDSLRKVKSDKADAVKIARYALDKWQNLKQYNVMNELRNQLKTMNRQFGFYMKHKTAMKNNLIGILDQTYPGVNTYFDSPARSDGSQKWVDFASTYWHVDCVRKISLNAFIDHYQNWCKRKKYNFSQSKAEEIYGKAKELVPVLPKDAITKLIIKQAVDQLNSASTTVESLRTLMNETASKLPEYPVVMAMKGVGTSLGPQLMAEIGDVSRFTHKGAITAFAGVDPGVNESGTYEQKSVPTSKRGSADLRKTLFQVMDVLIKMMPQDDPVYQFLDKKRSQGKPYYVYMTAGANKFIRIYYGRVKEYLASLPES

SEQ ID NO: 52839 - protein, 449 aa, unidentified
MREPQEIEDEEHEQTWERVAAIDVAKASGMVCTRVAHPSRPGRRLTKVWEVPATTGAISELAGQLAGLGIQKVTVESTSDYWRPFVYLLQAGGLSVQLVNAREVKNVPGRPKTDRLDAVWLAKLTERGMLRPSFVPPAEIRRLRDYTRLRADLTQERARHYQRLEKLLEDALIKVSSVASKLDGLSVRDMLEALIAGERDPAVLAGLARGKLKAKHGALAEALAGRFDDHHAELARMLLDQIDALGGQIGTLTTRIEELLAAIPAAHGVDADGTTGPGAGSGPDAVVLPAVARLDEVSGIGPGTAQVIIAEIGLDMGVFRTPGQLVSWAKLSPRTLQSGATRRAGKTGKGNPYLKGVLGEAAAAAAKTDTFLGERYRRLVKRRGKLKALVAIARSILVIVWHLLADPTARYHDLGAGYYASRIDKDKKARNHIRQLQALGFAVTLTPAA

SEQ ID NO: 52840 - protein, 339 aa, unidentified
MNNSVIGLDIAKHIFHLFTQRTDGKMIKKKLKRSELLMHFANYPVSVIGMEACGSAHHWARELTKLGHEVILLNARYVKSFVVGNKNDFNDAAAIYDAVTRPNKRVVAIKTVAQQDIQLIHNIRKELVDKRTALVNQTRGLLSERGIIINKGITQVRQQLPLILEDAENGLTTLSRELFAEQYEKLKALDDEIKAQDQRINRLCNANELSKRFLAVPGVGPVTATIVAADIGDSGKGYESSRDYAASLGVVPRQHSSGDKQVYLGISKRGNRYIRTLLIHGARSVLKNCSKKTDKLSLWLQSLVARRGFNKAAVALANKNARILWAMANKNKDYDALVA

SEQ ID NO: 52841 - protein, 355 aa, unidentified
MTSTKYIGMDVHKESISIAVINAAGKVVMECVIETKASILLQFTDGLRGDLHVTFEEGTWAAWLYDLLKPYVTEVVVCNPRKNALLKDGSKSDRIDARKLAEQLYMNKIKSVYHGEHGLRTLKELTRSYLTITKDLTRVMNRLKALYRSWGIPCAGNEVYAPRHRSEWLSKITEAGVRRRAEHAYQQLDVLRLLRQEVRRDLLLEAKKHKAWKLLRQIPGIGPIRAALLVALIQTPHRFRTKRQLWTYSGLGLETHDSAQYRVVEGQLKRSKKSVTLRGLNKDHNHDLKDIFKGAATRVSSSSGPLRDFYEALLAKGRKPTMARLTLARKIAAITLIVWKKEVRFDANYLKPQAA

SEQ ID NO: 52842 - protein, 419 aa, unidentified
MTNQLNIVCGADIHQRFLVATILCRDGRTWANRFLMNLNGLIDFKSWLVSHGCQKVAVESTGRFWIPVHMILEGTIDVIVANAYKIKHIPKKKTDLKDSEWLAELCLNDMIEPSRIFPKEDRELRNLTRTREAYVRDLSKEKNRIHNVLESCSIKLASVISDIFGKSGMHILKGLLSGTSIDEVLKGIPDKRVREKKSEELRDALMGKLEATDIFLIRQSLQIMSQFEMRIEELDREIRSRIASRPMDIKILRSIPGIGMVSAYTILAEIGNYLDFKKPEQLAMWAGLVPSVYQSADKLITGGITKQGSKHLRWILVQVAHAIAHAKGGKLKKFFLKIRAKKGYLVAVVALARKVLCLIHHLLVNQEMYEEEGRLSKRDAPIPKNKNPAILTIEDMIQCIAQAGYEIKKVNFGADGQCR

SEQ ID NO: 52843 - protein, 356 aa, unidentified
MWILAFTAEPSFELADKVELPTRATQIKVGNFKFMQKDLLYCAIDVSKDKLDVDGAALALPAQLNNDQAAYRQLIKAAKKHSGPVQFVFESTGPYHLGLALALWEAQMPLSILNPARVRHFAKAQGKAKTDPLDKQVIGAFAQAFRPPPTPAPDELSRQLTELLQRRDELISTRGAEQNRLAQCRHELIKKQIGRLIAQLTEQIKQIDGLMNKLARSSAELQSKIEQLCQIKGVGQLTALTLLITLPELGTVGRNRISRLAGLAPLNDDSGKQKNKRYIQGGRKRPRGALYMAALTASQHNAQLSAFYQRLLKAGKLKKVALTAVMRKLLICLNALLRQQLEHKGSPDAQPVYNKV

SEQ ID NO: 52844 - protein, 418 aa, unidentified
MSKKLLSRPLGRCVGLDVHLEFIEIAICEEGRVWSAGRVPATPEGIKTLADSLLPTDRVALEVTGSSREIARLLEPHVSRVIVVSPSDTGISQARAKTDRLDARTLARLLWTGELEAVWMPPEWTCRMRRRLARREQLVRTRSRVKNELHAVLMRCLKGRPPVSDLFGVKGRGWLRGLELPEEESETVQAGLRHIEFLDCEIEQVERLIATEALKSPQVKRLMTVPGVNVICAAIFLATVGDIRRFKGQRQVVAYLGLDPRVSQSGSAPARSGRISKQGSPRARWALVEAARSVAQQPGPLHAFSERIRARRGHNLAVVAVARKLAVLFYCMLTREEDYAHQQPSLTARKLRMLEVKAGQPTLKGKPTGVFATRERMRQAEKQLAAQAKASYKRSVADWQAASPSTKKAGASVTAGRA

SEQ ID NO: 52845 - protein, 356 aa, unidentified
MIKRNRLNFTGQPIYIGLDVHKKSWSVSISTKYGQYKTFSQPPEVDKLVHYLHHHFPGALYSSAYEAGYCGFWIHDRLKEKGIGCLVVNPADVPTKNKERKAKRDRIDCRKLSRSLRNGDLEGIYVPPRGKVEDRSLIRTRLSMGRKQTRCKNQIKSMLHFYGVVIPEKREMGHWSRRFIRWIEGIRMERASGDMALKIHLEELCHLRQIIAKLNRAILALSRTEEYRSWVLLLRTVPGISTLTAMILLTELGEISRFPSIDELTSYVGLIPDTEASGEKEHIGGITQRSHSQLRWLLIEASWKAVQKDPALMITFDQYCKRMRKTKAIVKIARKLLNRIRYVLKNRSEYVPAVLE

SEQ ID NO: 52846 - protein, 323 aa, unidentified
MFDSIVALDWAKSNLAIARLKKDARVPKVFETKADIEFLKQYLDELPGTVQLVFEISSSARKLFFELRDYVDDIIACDPLKNDPIKKGAKTDKIDAIKLALLARDNRLKNVYMDQGENFKLRRLVSGYTDKVKALVRCKNHRADFEENIIDSEYDRFVVEQTRSEIETLGTIKSQYEDKFKELGKSNLQVKLMAGVPGIGTINAVKLVATVVSADRFQSYKDYWGYCGLARYLVESGKRSYGTRKIRYNPMIKSIYKTAALVAINTAPEFRKYFDYLTTNRMLPDYNARNAIARHIAKMTLMMLKHNTKYNSKLVLQKIKAQD

SEQ ID NO: 52847 - protein, 420 aa, unidentified
MKVIYRRCAGLDVHEKSVSVCARIMKGTQVETVEATFPTFTEDLEQLRDWLTRNRIQRVAMESTGVYWRPVWNILEQKPAKLDLLLLNPQHVKALPGHKTDRVDAARIAELLQYGLVRASFVPPQEIRELRDLVRRRVHLQQDRSRVSSRIHRLLELYNIKLSSVLTKMTSQTARSILEGLATAKTMKPEALALLATHKRVRGKREQLKKALHCQPTDHFRFLLRELLEELDRLTDKMKQMEERIAERMAPYAELIGRLCKIPGVEKLTAWTLISEIGVEMSRFPTAGHLASWCGLCPGNAESGGKRHSGRTSKGNRYVRRALLQAAWAAARITRRRTFFTTFFFRVSRKAGMKKAAVAVAHKILALAYLMIRDGSEYREQGADYFDRVHPERTKNKLIQRLERLGFEVRLTPKSMPETS

SEQ ID NO: 52848 - protein, 344 aa, unidentified
MPCFAALDVSQETTAICVVDDNGTIIAETTIATCPDVITSYLRDRAPNLSRVGLETGPLAVWLWNELAARQLPVLCIDARHANSALKMRPVKTDRNDAAGLAQIMRVGWFKQVRIKSHNCYQVRSLLTARETLVRIRVKIENELRGLLRTFGVLFGKRVGGFTGRAHEIICGELEASPEMRIIAETLMKARASVCDQIKVLDTRLAAIARANPTVKLFMTTPGVGIITALSVVSAFDDASRFKRSSSVGAYLGLTPRRYESGETSRNGRISKQGDKMVRKHLYEAATTLLTRNLRSSSLKTWGMKLVKVSGFKKARIAVARKLAVVLHAMWKTNTPFRWTQSAA

SEQ ID NO: 52849 - protein, 343 aa, unidentified
MQVIIGVDPHKASHTAVAIDTSEAQLDHKKVRAARTQVDHLLSWAKPYPARTWAIEGAEGMGYLLAQQLVAAGEHVVNVPATLASRTRLLGTGRTNKNDPNDALSVAITALRSTGLHPVRPVGHSEVLRLLAKRNRDIGAHRTRQVCRMHALLVELDPGGISKEINASDVDIFLANLAPTTPVEQIRFDLAVELLTDIRRLDEQLKESHKRIRTAVAASGTTLTEVFGIGPIIAAMLIGFTGDIERFASRDRYAAYNGTAPVEFSSGGRTVHRLSTRGNRNVNNALHMAAICQLRQPHSDGRAYFDRRVAEGKTPKEALRALKRQISNTVYRHLVTDAARTRG

SEQ ID NO: 52850 - protein, 384 aa, unidentified
MSADPRPEQTAIRTDLGAIFVSLELSRATWLITSLSPGRQKMSKHQVRGGDTAGLLARLAELQARAHARTGQLFPLIVIQEAGLDGFWIHRVLQSEGIESHIVDPASIATSRRRRRAKTDKIDGEALIRALLAYKRGEPRVCAMVKAPTPREEDERRIGRERKVLTAERVAHVNRIKGLLFAQGISDYEPMHRHRRARLDDLTTGDGRPLPQHLKAQVSRELDRFELLLEQLKAVEAERDALLAAAESPDKPALAALLLDLKGIGPEFASVLWSEGLYRSYANRRQVAAYAGLAPTPWQSGAVAREQGVSKAGNPRLRTTMIQLAWLWLRHQPGSALSRWFHERVARRSGLRKTMIVALARKLLVALWRYVTAGVVIQGATMKR

SEQ ID NO: 52851 - protein, 436 aa, unidentified
MRGCRCSMIMGFTKPIEHFNLQRKKVITMNTLYVGIDVSSKSNVVYLMLPNGEKHSNFSVANSYEGSTQLVKRIHSALTAHSLDTILIGLEATSVYGDNLVYFLREDATLALFNRKIHVLNPKQVKKFHDTYNDLPKNDYVDSFVIADCLRFGRINKEVYLGDYRYKALQNLTRARFFAVQNLVKEKQRFMNMLFKKYSTMTQEKVFSHTFSTTALAVYDEFESAEALANMDLHELTDFIIEKGKNRFPDPDAVAKAIQKAARSSYRLPKTVNDSVNQVLSISITSMKALESQIKEFDKAIKAQMELLPNVLISIPGIGPVYSAGIMAEIGDINRFDNQASLAKYAGLAWKQHQSGGFEAEVTRLIPSGNRFLKYYLYEAAFSLVRCDKEYSDFYHLKYKEVNRCQHKRALALTARKFVRLVFRLLKDNRLYCPAK

SEQ ID NO: 52852 - protein, 347 aa, unidentified
MRFYTHRHKYYCGIDLHASYMYVCIMDRDGDILLHKNLKTRPELFLAAVAPYKEDLVVGSECVFLWYWLADLCEDHGITFKLGHALYMKAIHGGKAKNDRIDSRKIAALLAGGNFPLAYTYPRGMRSTRDLLRRRNYLVRHRAELDVHAQNTATQYNLPPFGKRIDRKTNREGFAERFPDHAIRKNVELDMTLMDHFDQVINSIENEILRTVRRQHQETVSILKSVPGIGKILSLVILFEIHDISRFPTVQQFASYARLVKCQHRSAGKLRGTGGAKIGNAHLKWALSEAAALFLRGNQKAQKLKARLERKHGEGKSMSIITHKLGRAIYYMLKRKTVFQPERFYSC

SEQ ID NO: 52853 - protein, 339 aa, unidentified
MDTLYCGIDLHSNNNVVVVSNNEDEVVYRKRLKNEADTVLKALSPFSENLHGVVVESTYNWYWLVDALMEGGHQLHLANTGAIQKYSGLKYANDESDARWLATLLRLNILPEGYIYPKEGRPVRDLLRKRMFLVRDRTSHLLSVMNLFSRNTGRRVSANAIKRLSDADVDEMLPGADLALAVKSSIAVMQCLDIQIKKLEKTALERVRIHPDFRLLQTVTGIGPILGLTIMLETGTIARFPTVGDFASYARCVGSAHISNGKKKGKGNTKNGNKYLGWAFMEAATFAARYDKTIQRYYQRKKAKAHLMVAKKTVAHKLARACYCILRDQTPFDVDKVFS

SEQ ID NO: 52854 - protein, 328 aa, unidentified
MNNSHFCVGIDVGKDELVVAVEQGRPRVFGTSMAEIRRLELWVLKQAGERQVHIGMEATGVYSRGVAATLSRYEQFTVSVINPAQIKAFGRAMLTRTKTDQVDAGVIREFVRSQSPSAWTPPQPVREQLSALVAQSDAIQQEIQQWKNRQHAQQHHGNTPRTLTRSTATIIRSLERERQRLDDAINQLCETDTALTKDMALLTTISGVATRSAAQILAYGGDSLISRSRRQLDAHAGLVPAERQSGTSVRGKSHLAKQGNARLRRALYMPTLVAVQFNPLLKRFYQRLLEKGKAKKVALIACMRKLLNIIRAMLIKRTPFNPKYQPLT

SEQ ID NO: 52855 - protein, 351 aa, unidentified
MKIVAQNEDVAMGIDAAKSHLAITVMSNGEVLKQVTIRHTRPAIESFLRRFPDCRIRAAYEAGCFGYWLYDTLRKLGVDVIVTPPSKLERAPGDKVKTDRRDSARLAEQLSAGRLRAVSVPSKDERATRQVVRTYEQLKRMRVQSMVRIRSFLEFYHIEPPLEAGRKWTKAFLTWLETLPFAETPGAEYLRRSLDALLRVYRDLTDEASQLKKEIGRLAKTKRYARAATVLESTPGIGTLSAMVVLTEVRNARRFPTSQQFTSNLGLTPSENSTGETQHRGHITKAGNRFIRGVLVECAWTWIRKDKAAYAIYRGIARRREPKRAIVAMARRLAVKIYWQLRQIRFGEQAA

SEQ ID NO: 52856 - protein, 461 aa, unidentified
MNNKHLNAKNKKSKKVALNEQWEKIHPHAAGIDIGAREIFVCVPSDRDPEPVRRFGTKTPDLEALAKWLKDCRMDTVAMEATGIYWIGCFQLLEREGLNPVLVNPRQIKNVSGKKSDVMDCQWIQKLHAFGLLAGSFRPADPYCVARTYMRLRDDLIAGASAQIQLMQKALHQMNLQLSHVLSDLTGSSGMAIIEAILAGQRNPLALAELASLRVKSTKDEIAKALVGEWRPEHLYCLAQAHGMYLRYKTEIAQCDTKLAEELEKLPSRVDPELKPMPAKMDRKKSINEKLRLGLYCKFGVDVTAIEGIGPTAALTLLTEVGADLSAFASEKKFCSWLGLCPDNRISGGKVLSSRTRRVVNRLADVLRMSATTLKHSQTALGAFYRRMIAKLGPPQGITAVAHKLARLLYSLIKHGHEYVRTGLEQYEKINADRKLKALRKMAASMGLQILEPQHLPKGVS

SEQ ID NO: 52857 - protein, 350 aa, unidentified
MNRNDISNNLTLGVDTHLDNHVAVLVNDIGQVVDTQEFTVNSTGYSQLYKWCKSFGTVNQAGLEGTGTYGAGLCKFLQEQKVTVFEVNRPNRAIRRLRGKSDPTDAESAARSVLAKESTAIPKSHDGIVEAMRFLVVARKSSVKSKTQAINQIRALLVTAPEHIRQQCYVPSSYRCITACKALEMNSVNVLEETLISMLQLLAERWMMLSQELKTIDKKLKALTNSAASTLLEQYGVGSYVAATLLVAAGDNPERLKKESSFAALCGVSPLDASSGKKQRHRLNRGGARDANNALWTVALIRMRNDFRTRKYVEKRSSEGKSNKEIQRCLKRYIARELYPIIVSDLSKLT

SEQ ID NO: 52858 - protein, 480 aa, unidentified
MAKRTHAHPDLKAVPMLLNESLYIGIDIGKGKHVAGFLSQTLLSRHDRFEACPALVFENSREGFRLLIERIRSYSPLEHVFILMERTGHYHRALEQYLQDLDIPVYVMHVQSRPAGMLKTDKRDALTLANQLYSQLELGVQVANKLQLIRRIVPPTEAAAQLKGLVRHRYELIRESTQRKNKLTAICDEVFPELTRVVKDPNALVALALREKFPTPQALATASLTTLQQIRGGARSLSDAKLLELQRLAAQSIGAKDLARQRGLVLEQTQLIKELRLLREHVEQLETEIVSIVEQAREGQILRSFPGIGPVMAATMIAAVGSIHNFPSASALKSYFGWAPVVVQSGSTLDHARLTRGGTRTMKQMLFLAVLQAIRLQDNEWAKLYERLVKTKCPYDERTQSYVGKTRVIGRVAGQMTEAIYALLKRDAEVLSKVLPGQEPPAPLLYDPEVHRKHRQGQYRPLKSTPLPNTITVLHPRSPQ

SEQ ID NO: 52859 - protein, 348 aa, unidentified
MTLVGCDLHSRKQQVAVLVTDTGEVLEQELLHEGDAVERFYRALPRPVTVGIEATGYTLWFHAVMQKLGHTLLVGEAAKIRAMVVRKTKTDRRDAQHLLDLLKHERFPTVWMSDPTTRDLRALIAHRVRLVRMRTMVKNGLHAIALNQRVALGPSLWTKRGLAQLRALSLPPHTANRRADSLELLTWLTTHIDQLDAQIAEAAAADARAQRLLTHPGVGPLTALITVLVLGPAARFPTSKHVGLAPAIHSSADKYHLGKITKQGNALLRWILGQAAPLAARADGELRRAYFAVLHRRGRPKAKVALARKLLVRLYIMLRDQIDYEEFRRRGRVRRSRIAVNPVSATTM

SEQ ID NO: 52860 - protein, 358 aa, unidentified
MAKLSLTRLEAFVLGFETTAFRVGIDVHKKSYALALLREDGACLTWTGPARAETLLEPVRRFGLCIKAVVYEAGPTGFSLARRLEEAGLRVMVVAPSRVPRPVRAGAKSDRLDGIKLAEYADNRRVRSIAVPTESEEAERSLLRRRHALASGRRRCKQRIKAHLLYLGVSAPEGLDHWSQAAVSALRGLGLKPSARLTLESLLRELDFHNQELRQVEGQLLELLASGAQRERLGYLRSVPGVGFLTAASYMLEVFRPERFNNARQVASYLGLAPMVHHSGDRKPRGKITPVGQSRLRSLLIEASWVWKSHDSYAAKLYNRFLSRMGIAQKAIVAVARRLAIILWRLSIEQRSYRRQPV

SEQ ID NO: 52861 - protein, 355 aa, unidentified
MPTIAQPQPTRVTIGVDTHGDRHVAAARDQLGRPLGTTMVATTPAGYRQLLGWALELGEPVAFGIEGTGSYGAGLTRYLRASGQQVVEVNRPDRAARRRKGKSDPIDADAAARAVQAGDATAIPKAGVGVVEMLRVLHLARKTAVKARTQTVNALRALLVTAPPELREQLRGLSKTMLPRAAAALEAGNITSPATATMLALASLGRRHGALTAEIATLDGEIERLLGRFARPLLDRVGIGPDSASALLAAAGDNPGRLRGEAAFAALCGTSPVEASSGKTVRHRLNRGGDRQANAALYRIVIVRLRWHQPTREYMARRIAEGKTKTEAIRCLKRYVAREVFAVLNTLAFDLASAA

SEQ ID NO: 52862 - protein, 466 aa, unidentified
MGKVKLGHRSKVFFNAFGDGFNPRSLAVVAIEVAKNKPMAAVFDYFGEQLHESFFFTPDIRGVEEVCGIARETAAKAGKEQLVYGLEHTGHYHEHMAAILRERGCVLMPLNSFTTKRERDSMLDYSKTDDLDLHAIAAAVSAGKTVTDRCPTGREAELRYMSRTRRSMVQDRSKTFVALHTLLDHYWPAMQGVNEIQDGEPVLRRIFGKTWTEQSLKFLRHVNTPLQALVLGKSGLERLSREKRLRLGKRRISLILLAAKLAPKTEEPLLELYSTRLKELLDTIDSLNKNVGDFECRSQAILADSRGVLLLTIPQFGPVTAAEYMAEIGFQVPRLHAAPAIIKLAGTNPVPRQSGNYRGPTRISKQGISHLRTLTYQMGQNLSEGRGNPYFVAFGQRLKLLKPKQRRIAVGNKAHHIAFAMLKKGEIFAPKTWQGPPLAVDPLEKLLPQFRETARRQLKSLGIVQY

SEQ ID NO: 52863 - protein, 409 aa, unidentified
MTQAEYLVRVGIDWASESHQICILDKDGNRTEHPVPHTSAGLMALATELAALNPEDPGRVAVAIEVPRGPVVDTLLERGLHVFALNPKQLDRFRDRHTVAGAKDDRRDAFVLADSLRTDRPAFRRVQLDDPLIVELRELSRLDDDLREELSRLSNRLRAQLHRFCPEPLCPAADEPWFWALLDRAFPPPRPKPLSIKAVTAVLKVHQIRRLTVDTVHAALQVPPLRVAPGTIEAACTHIALLLPRLRLVHDQRHRTVGARIEKLLAELAKEDGEGKHRDVTILRSLPGVGRLVAATVLAEASRPLAERDYQTLRAQAGSAPVTRQSGKKATVSMRLACNRRLRNAVYHWARVSVQVDPRCREHYDRLRQGGHAHARALRGVVDRSIGVLVAMLITRTLYDPERRYPKAA

SEQ ID NO: 52864 - protein, 390 aa, unidentified
MGRAAKDLSRSFTALNQDSTLIVVIEMSQSSWLIAGMVPGVERQPLKKLEPDEDQLLKLMNRWRHEALQTGHAIERVVVAYEAGHDGFWLARWLRERGVEAYVMHASSIAVSREHRRAKTDRLDTELLMRAFLGWLRGERRHCSMAAIPTIEEEDAKRPNREHEKLVGDRTRIMNRMKSTLSRLGIRGFKPTLRKADEKLSELRTAEGTLLPENTRAELRRDMTRLRVVREQLKEIEQQRLRKLEAAAPAKKGPHVMVHLIARVIGIGIETADMLVSEILSRHLRDSKAVARYAGLTGSPDESGKRRREKGLARAGNARVRRGMIQLAWRFLRFQKDSVLAQWFRARATDGRSGTRKTMIVALARKLLIALWRMATTGEIPEGVILRPAA

SEQ ID NO: 52865 - protein, 360 aa, unidentified
MNTLKVNLGIDAAKDNCECNLSKLTAELDVKVIASKIFLNTDNGLKELLKWLIKNSPAQDATLHVVIEASGVYHERFALGLQQAGYRVSVVLPNKAKKYMESLGLKSKNDRIDAKGLARMGCEQKLDQWSPLSPFYHKLRTYTRLHEDIQQKKTETINQLHALKHSAVQMADAIEVLERLVEVFDKELVKTKQLIDDQIESNAAVKERMDKICSIKGVGSLTAATVVAEANGFDLINNIPQLISYAGYDVVEDQSGKRIGKTRISKKGNTHIRRILHMPALNMMTHKVGAMPALFERTFDKHGIKMKSYVALQRKLLILIYTLWKKNEAFDSNYHKSKSAGVEKTETSSRLSLEEAGTAA

SEQ ID NO: 52866 - protein, 411 aa, unidentified
MEWVACVGIDWADQQHDYALRGQNGEEERGTFSSSPEEVHAWVTRLRGQYPAGTIVVAMEQSRGPLLYALSIYDFLALVPINPRAASAYRQALHLSGAKDDPIDAGLILDFAAAHLNQLRVWHADDSATRKLRLLVEDRREFVDQRTSLMQALTATVKQYFPQVLTWFGGKSTLLRDFLAALPTLESAQQARPERIQKLIRSSSRTPTAEIEKIIVTIRSAVPLTTDTAITSALAMRAQALVAVIETLQEQVEMHERAIAELWSGHDDRALFESFPGAGPVLAPRLAAAFGSDRTRFTDAEQMENYSGTSPVTIKSGKRRTVQARWQRPRFLHQTFHEFAEASIPQCEWARAYYHQQRERGASHRVALRALAFRWIRVLYACWSTKAVYDEPLYLAALARRGSPLCARFAA

SEQ ID NO: 52867 - protein, 356 aa, unidentified
MQTQVTKKIDFTGKNLFIGLDVHKKSWSVTILVEGMEHRTFTQPPDPQTLYNYLQKMFPGGTYFSAYEAGFCGYGIHRELNALGIKNIVINAADIPSSQKDQLQKRDPVDSRKIARALEKGLLRAIHIFDRDMEELRSLNRTRFYLMRDYRRSKNRIKSFLQYYSISIPPEYDNNQWTLKFIGWLKQIQMKTSSGQDAFSSLILSFEYHREQILVLSRQIRVRMREYDNELYNLLKTVSGIGPLTSSALITVLGDIIRFPHINHLSSFVGLVPRVKQSGETSYNGGMTFRCNEYLRTLLIESSWQAIRQDPALMQYYQQHLINNKGQKVIVKVARKLLNRIRYVMKNRQPYVTGVA

SEQ ID NO: 52868 - protein, 367 aa, unidentified
MTIVAQTRPFVIGVDCHARTHTYAIIESSTKRQIACEQFPTTPAGMSRALGWVGRRTDGDMACLWAIEGIGSYGARLARAATDAGYDVAEAPRMNARARRGIGKSDPLDAAAIGTAVLGLEESQLRTPRRDEGTRAGLRILSAARDQLTRDRTMNVNALVALLRAHDLGIDARKTLVPAQIATITRWRERQETIELSIAREEAIRLARRVLEVTTQLAANQKRMTDLIQESPAAPLLEMVGAGAVTIATVLTAWSHPGRVRSEAAFASLAGVNPLPASSGNTVRHRLNRGGDRRLNRALHTITMTRMVHDPGTRDYVAKRTQEGRSYREIRRSLKRYIARTLYRQLNNLYAAVDPTPDLARMALPDR

SEQ ID NO: 52869 - protein, 415 aa, unidentified
MIHEQQFAAYVGLDWGDQRHSVHLQVSGQPKAESFELEQKPEALHEWVARLVERFQGRWIAIAIEQRKGAVIHALMMYGFLVLFPINPKALARYREALYTSGAKNDPTDSELLLDFLTKHSEKLRPWIPDSEPTRELQALCEQRRKLVNRRVALTNRITSLLKQYFPQALDWIGEIASIQACDFLESWSTLDAVQASGQNQLRTFYRQHNCRKASIISERLDQIARARALTNDRAIIEPYSLIVEASAAQLRNLIRAIKRLDKRIAELFTQHPEHDLFDSFPGAGAACGPRLLTVLGTDRSRWTSAVELQSYSGIAPVTERSGNSCRIHHRLACAKFVKQTFHEFAGQSIRYSNWARAYYDLQRSRGKDHHAALRALAFKWIRIIFRCWRDGKPYDEATYVESLRRRGSPTIEKL

SEQ ID NO: 52870 - protein, 394 aa, unidentified
MVAHSPKADVPPVSDGTLTQIIHPYGVGIDTHSKFIQVCILCVVHKPDASTAVQRLEHEFATTWTGIKSALRWVLEKLGLLATQDTLRYCIESTGTYHFPILKAWEGVPCVINPHLTGPTRRKTDVLDARLLAHYSITGLWKPSFVPSNEAQVLRVLWAAHRECAMLATRASNRLNNIVLRFGHTFGRRTSMRTAEGEGVLSDLIEGRVPAVPDVAPDGLPAEVRPLVAALLADLRSAQVADRKAIAAAVNYVKARDWPIGSGTLPGQQFLNVLTSVPGVGQITALTWLAEVTDPRRFDDQRQVAAFCGCDPSLKVSASKVTSYTKRQGNLRLHHALSYAARSLMTQANEPLGRWGRAIAGRHKKGGHRKGTAAVGRRIGCMLWHVHRKGEMFS

SEQ ID NO: 52871 - protein, 342 aa, unidentified
MQISTIGLDIAKNVFQVHGIDANETLVVRKRLRRSQVLAFFKALPPCLIGMEACATAHYWARELTKLGHRVRLMPAKDVKAYVKRNKNDAADAEAICEAVRRPTMRFVQVKSAEQQGQLMQHRTRDLLMRQRTQSINALRAHLAELGIVAAQGDKGVKELLSIVADEKDARLPIDARASVIVLAAQLQAVQTLIGSIEKRIKTQHRSNEASKRLETIPGIGVIGASAIAATVADPTVFRSGRNFAAWIGLVPRQDSTGGKQKLGPISKQGDRYLRRILVVGAHSVLRRAKQNPEKYFWLTQLLARRPFKVVAVALANKMARMAWALLAHGGTYRAPVLAAAA

SEQ ID NO: 52872 - protein, 325 aa, unidentified
MSEVRIIGLDIAKSVFQLHGVDDAGATVLQKRLTRARLLPFFEKLPPCLVGIEACATSHYWARELGKLGHEVKLMPAQYVKPYVKRQKNDMADAEAIAEAVTRPTMRFVGQKSPSEQSAMMLHKVRLMLTRQLVMITNATRAHMAEFGIIAPVGRSGVDRLLAIVDDETNEQIPAEARRCLQMLVAQLKLVKLQILDNDRQVLALARSTEIGRRLMEVPGIGPLVASALVACVPDPSMFRCGRNMAAWLGLVPKQNSSVARSGWGRSPRQGTAICGRCSSPAPWLSYVERCRARAVPGSSGCSNGAGRRSQRWRWRTRMPGSLGQ

SEQ ID NO: 52873 - protein, 356 aa, unidentified
MTSTTKYIGMDVHKESISIAVRNAVGKIAMECVIETKASMILQFVNGLRGDVHVTFEEGTWAAWLYDLLKPHVTRLVVCDPRRNALLQEGNQNDRVDARKLAELLQNNQLRSVYHGDHGLRTLKELVRSYLTITKDLSRVMTRVKAIYRSWAIPCTGKQMYAPRHRAEWLGKIAEPGVRRRAEFYYQQLDGLRSLRQEARRDLLAESKKHKAWKRLCEIPSIGPIRAAVLLGILQTAHRFRTKRQLWTYSGLGIEVHSSADHHVVKGQLERKKKHIEIRGLNENCNHDLKNLFKGAAVVASTKPGPFEEFYAALLAKGTRPEMARLTLARKIATIVLIVWKRGVCFDAQHLKPQTV

SEQ ID NO: 52874 - protein, 315 aa, unidentified
MVDVPCFVGIDVATAQLDIAVRPSGERWAVPNDASGVTTLVDRVQALQPTLIVLEAPGGLERLVASALATAGLPVVVVHPRQARDVARATGQLAKTDALDARALAHCADAIRPTPRPVPDVQTQALRALLGRRQQLVAMRTAEQNRLAGTSGRLQADMTAPIAWLNARLTALDDDLDTALRSSPLWRENDDLFQSAPGIGPVCARTLLLALPELGTLTRQKIATLVGVAPLTCDSGTLRGRRMIWGGRARVRTVLSMATLVATRFNPRIKAFYERLLAAGKVKKVALTACMHKFLTMLHAMLKHRTPWQGQAVQG

SEQ ID NO: 52875 - protein, 421 aa, unidentified
MRAVALDVHRDFCEVAIVTEGQLRSAGRIETKPETLELFARSLDVRDWVALEVTGNAWAIARILEPHVARVIVISPSDTGIRQARAKTDRLDARALARLLWAGQLDGVWTPDERIRAMRRRLARRSQLVRARSRAKNEIHAVLMRCLKDRPPASDLFGVKGRRWLAEQQLAVTERETVDSGMRQVEFFDAEIGEVEKLIAAEALSWPEVKRLMTVPGVNVIVAATFIAAVGDIRRFPDRRKLTAYLGLDPRVRQSGVGPASHGRISKQGSSSARHALVEACWSTVRQPGPIAGFYQRVKARRGHSIAIVASARKLACLFWCLLTRGEDYAFAQPSLTKKKMRRLELQAGAPRWQGARGVWSTNEAMRQAERELALQGQRAYERTVKDWQHTAGASATPGHASQGSSKEHVARQTSRPKSAL

SEQ ID NO: 52876 - protein, 422 aa, unidentified
MTLGQNTSILRVMHEVCCGLDVHKELINACVITTNENGHEDSELKVFQTFTDDLFRLRDWLLDHNCPIIAMESTGIYWRPVHNILEGFFEVILVNARHFKNLPGKKTDMSDCQWICGLLRVGLLKGSFIPQKHVRQWRDLTRYRRSKIEDLGDVKRQVHKLFESANIKIDSVASHLFGRSGRNLMELLLEKDRELSLEDVRKCLKGTLKSKSEELYRAVQGFFEEHHRWLLEKMLAHADHLEHLINDIQARLRVLLEAHEDAIDRLNEIPGINFISAYAIISETGPTLSTFPNTASLCSWAGVCPGNNESAGKRHSGRSPVRRGNLKTILIEVAWSAVRTKRSYYRAKFFSLRSRLGPKKAIMAIAHRILKAIYHVIKHGEKFKDLGEDYLSDLHKKSKINYLIRQAGKFGYMLTPCAVIDK

SEQ ID NO: 52877 - protein, 421 aa, unidentified
MEVVAPRCAGLDVHRSVIVACALLSEGGGRVRKLGGEFVTTRAGLERLLAWLQDLGVTHVGMESTGVYWMPVYAVLEQAGGFTLIVVNAQHAKAVKGRKTDVKDAQWLAELVRHGLVRGSFVPPRPIRELRDLTRYRRTLVENQGSERRRLIKLLEMADIKLAGVISDIFGVSGRAILRALITGGQTAVEMSKLARGSLRKKRGQLIDALAGALAEHQRQILALQLARVEADEADLAALDQTIAERLAPYTAQMARLMTIPGIDWVVAATVIAEIGVDMAVFPSAGHLAAWAGTCPGNNESAGKRKPTGARTGNPYLKTALCNAAIAASRKRGSFFKAKYHKLKSRRGGGRAALAIAHKLIVCVYHMLSSTAPYRELGEDYFDKRDTQRAARRYVRRLRDLGFSVLLQPLSQLQPIAANAL

SEQ ID NO: 52878 - protein, 468 aa, unidentified
MKRKSRGAKKQKVSPFDGELKLIEPDAAAIDIGSRSHWVAVNPQRDREAVREFGAFTTDLMRLADWLEQCEAKSVVMEATGVYWVPLYELLESRGFKVYVVDAHTVRHLPGRSKSDVKDCQWLRRLHSYGLLRGSFRPPAQIRQLRNYQRSCAKIVEAAAQQQLRMQKALTLMNIQLHHVISDISGLTGLGIVRAIVGGERDPKQLVKLRDPRIRASKETIQKSLEGNWQEELLFDLKIALESYDHFQGQIAAYNEQICRELREVPSKVDVVREPLPAGRPKVCHKRPGMSQQDQLDLRQELYRISGVDLTRIDGISLQTAQKVFFEIGTDVSAWDDEKQFSSWLGLSPNHRISGGKVLKRSSRKVVNPLSVGLRLAARPLRNSHSALGANFRRLIAKIGMPKAITAMARKLAVLIYRMLKYGTQYVDKGMEHYEAKYRETKLQYLRSQAAKLGMALVPNLEAVSAAL

SEQ ID NO: 52879 - protein, 345 aa, unidentified
MLAEEVAYVLGVDTHTDSHAIAIVETGRQKVEGSVSIPATRRGYRQALRLARLRAPGQRLWALEGTGSYGSGLARFLDSRGERVLEVERPRREGSHGRLKSDPLDAERAARAALSGAAGAAPRLSPQTQALRALLVAREGAVTASRAARNELGALILTAPPELRERLQGLPRAALIETCARLRPGTDSERAAVALALRSLALRVRHLNEEAKGLEQELATRVQALAPALLARRGVGPICASWLLVAWSEPGRLRSEAAFARLAGVAPIPASSGKLVRHRLDRGGDRRLNRALHTIVLGLRRTDAETQAYIARRVSEGKTQREAVRCLKRYLARSLFRQLEAMPRA

SEQ ID NO: 52880 - protein, 357 aa, unidentified
MTNIAQLEKRRVTVGVDTHLDVHVASAIDSIGLHLGDFSLPTTTIGYRDVVSWAKSFGEIESFGLEGTGCYGAGLARHLGVEGIKVIEVNRPDRSTRHQKGKSDPIDAQSAARAVLAQTATSIPKAGNDVVEMIRVLRVARSTAVKAKTQAMNALKSLIVTAPIELRDQLRVLSAVKLIATVAAFRPGEITTPSHATRLSVRILGRRHAELTKEIDMLDAEVDRLTLEASPELRELKGVGPEVAAALLQAVGDNPERVTSEASFAQLCGVAPLPASSGKTTRHRLNRGGNRQANAALYRMVLVRLRWHQPTKDYMKKRLSENKTKPEIIRCLKRYVAREVFTVLRASDVMKNLPTAT

SEQ ID NO: 52881 - protein, 385 aa, unidentified
MTIQRVACKFIPRDYDVFAGLDVDKKSMSVVFADHQGAMRALRMAYRAEPLVNYVRKHFAGQRVAFAYEAGPTGFGLHDELVRQAYTCVVAAPSKVPRAPGERVKTNRLDSRKLAESLRGGQLQGIHVPPPIYRDLRHLVQLRDTHVRQLTASKLRIKSLLLYEGIPFPDPREKWTVRAMRELQTLPCSETVRFKLDDLLDTLHFHFQAAARATKQIRQHCLRDPQLQQSIDLLLSLPGIGWIVASHLVARLGDPQQIKNGKQIAGFLGIVSSEHSTGEKENRGEITRSGDSRLRNKLIQSAWTAIKKDPELRDFYRRIYQRHPKKVAARKAIVAVARKLTQRIYVVLKEQRPYVVRPDSSIAPLTAEETVGPRDRLDTAQNDQP

SEQ ID NO: 52882 - protein, 424 aa, unidentified
MQNTAARKRKQVPEGYLVVGVDPHKKRHAAVAITQDFTTQAKFKFDNTREGLESMLDSAKVEMVKSGCRGVMFAIETGGHYWRNVAYFLDEQGMPFRFINQFTLKRRREGKDLNRRKNDYRDSEVAAQLLCTGEFTESKLPQGVYAELRTAHNAYRRLVKETTRITNLVKGLLDALFPEFTQVFKDPGGLTALSVLSTCPIPGVIAGMTEDEFEVTIEAQHKGRRLMRKKLRALHYLARTSIGIDAGARSVSSEIAFLVDKLELIRQQICIIEGTLVRLVDETEEGKYLLSIRGLNYIAVAGLLAELGCFKAYRSAKQMIKMAGSNPTESESAGKKKSRTPMSKQGRPVLRYCAWTSVIPMLRFNSDFRAWAKQRRERPVHANPLGGREVVGAALNRLLRLAFALVKNQTYYQVSKPELTLVAV

SEQ ID NO: 52883 - protein, 482 aa, unidentified
MAKRKMSTFERLQHGKMNRKQRRELDRQLNSEDPSLAVVHPNAAGIDIGNESHFVSIPPDRDAVTIREFGSWTADLHEMANWLKEHGIETVAMQSTGVYWIAVQEVLEQAGLEVYLVNARGTKNLPGRKSDVQECAWLRKLHAYGLLRNSFRPPEEIRAVRTIWRQRDRWVKECGRAVQQMQKALTTMNVQLANTISDISGVTGQAILRAIVVGKRDPWELAKLRDRRIAASEQEIAHSLQGNWREDVLFELRQVLEAYDFYQKQMAACDQELTKYMAAVASREITEKSDLPKDASVLPLSKTARRPQHRRKNQPSFDLATELQRTMGVDLTRIDGIDVMTAQVIFAEIGPDFSAFPDENHFASWLTLAPKHDISGGKVLRRIPAAGRNRVANALRMAAESLCRSNSYLGARYRRLRIRLDGPLAVKAMARYLACLVYRMVTKGQAYVDRGAHYYESKRQEKERLALQRRAATLGLKLVPAT

SEQ ID NO: 52884 - protein, 343 aa, unidentified
MTKLNVIGVDLAKNVIQVSVLSPSNQELRNSALTRRKFSEFLGRQRPSLVAFEACATSHYWARVAQRQGHEVKILPAKAVFPFRQGHKTDENDALAVAEAARRPNVKLAPLKTVEQQGMQAIQRSRELLVHERVSLANHLRGLLMEFGMVIPQGFASLYRLLPEILEDGENELPDLYRPTLNLLYGRLCDLREDLERLNREIEVLVQANPVCRRLTALEGVGPIGSVLLYATLGTGEAFTNGRQFSAYLGLTPKQFSSGGKVNLVGISKRVANRRLRAVLITGARAYVYHMKEPKTAKDRWLWAIVERSGKCKAAVALANKNVRTAWAMLTQNTEYQRYPMAA

SEQ ID NO: 52885 - protein, 346 aa, unidentified
MPSLPTFVGLDYHQDLVQVCVLDSEGRTLANRSVRNEADLIARFALQHGTPQRVAIEACCGAADLAEELVTHRNLPVQLAHPGYVARMKRSPDKTDLADAQLLADLARVNYLPSVWLAPEATRQLRRLVRHRAQLVRRRRDVKLRIRGLLRENRVPSPGGTPWTKKWLTWLQETDDLAPSDRWLVEDHLEELTSLGRRIRAVEAKIRHTVEDDPVVAKLLTMPGVGLVTAVTLRAEIGRFDRFTRGKQLARFCGVTPRNASSGQRQADAGLIKAGNPDLRTVLIELGHRLIRQTSGPWTKLATGMLSRGKPKNVVVAAVANRWVRWLHHELRRETPQADRVLEQAV

SEQ ID NO: 52886 - protein, 366 aa, unidentified
MSSLAHRGFTHLGMDVSKNSISVAVLEPDSDHAVIDRIFHDEPSVRRLINAFPNPAKLWTCYEAGPTGYDLHRLLTSMGVRCEVIAPSLVPKGRGDRIKTDKRDARRLAGLHRAGELVAIAVPAPAQEAVRDLCRTRGDMVEDLTRARNRLTKFMLRHSRVWRGGSNWTFKHERWLATQHFEDRALAATYQHYRATVAIRHAALEAVEADLEPWCARNPFGAQVGRLAAYRGVTHLGGLCLAAEVFDWRRFPRARPFMSFTGLVPSEHSSGDSAHRGNITKAGNAHVRAQLIEAAWAYQHRPSVGAHIRRRQEGLTPETVARAWSAQLRLSGRFRALAARKNVKSVVAAAVARELAGFLWAEMTAD

SEQ ID NO: 52887 - protein, 312 aa, unidentified
MSQPNPLCVGIDVSKATLDIAASSDVAQFTVSNDSDGFNAIITGLRRHSVALVLMEATGGLEVAVACSLQAEGFEVAVVNPRQARDFARAMGYLAKTDRIDARVLTQMAEVINRHPERKRFIRALPDAERQALAAMVVRRRQLIAMLVAERNRLHPSHPQNKKSINTIIKALEDELVRLEKEMDSHIRNHFKEIAERLSSIKGVGTMTVSAMLAEIPELGTLSRREISALIGVAPVNRDSGTMRGRRTIFGGRAGVRSALYMAALVATRFNPVIKTFYVRLLAAGKAKKVALVACMRKLLTILNAMLRKNEE

SEQ ID NO: 52888 - protein, 396 aa, unidentified
MEDYDGRQVVGMDLHRHRSVLVRMTEDGRRLGISRITNSPQELRKEIARAGKAPRVVLEATYGWYWAADVLEAAGAEVHLAHPLGVKAFTYRRVKNDVKDAADLADLLRMGRLPEAWTAPHAVRELREITRYRHKLVKLRTSCKDQVHAVLAKLGIAVPHTGLFGTGGQAWLDGLKLPQPYAGKVTSLRQLTGELTTEITMLTDVTGDLLAGDRGYQVIQQLPGIGPVLAAVIVAEIGDITRFRNAGQLCSWAGLTPRHRESDLKVARGHVTKQGSRMLRWALTEAIQRTPAGNPVRQRKDSIIARRGKEARNIARVAAARELLTLVFYGMRDHPAAWPGPPPARRTSSQHDQPWPAAGREAAEHSAPRRARGRKLFCPPPPAAGRPCDWPRLTAT

SEQ ID NO: 52889 - protein, 422 aa, unidentified
MRSVALDVHLDFCEVAIVEEGEVRSAGRIETKPCQIELFAQSLGPDDRVALEVTGNAWEIARLIEPHVAQVLVVSPSDTGIRQARAKTDRLDARTLARLLAAGSLDAVWRPDRQTWVMRRRLSRRSQLVRARSRSKNEIHAVLMRQLVGRAPVSDLFGVKGREWLKGLQLAVEERETVDGCIRQIEFLDSEISEVERLIAGAALDSTEIKRLMSVPGVNVIVAASFMAAIGDISRFENPRKLVGYLGLDPRVRQSGVGPATHGHISKQGSVRARHALVEACWTTVRQPGPLHAFYQRIRARRGHSVAIVAAARKLACLFWHLLTREEDYAYAQPSLTKKKLRRLELTAGAKRYAPEAAGIWHANETVRQAERELARQAEVAYARTVRDWHAVQAVKVGASVTPGRASNKPSKGKAARQTTSP

SEQ ID NO: 52890 - protein, 318 aa, unidentified
MNIIGLDISKDTIDATLHKTNGSIHYIKFKNNDDGLKQFRLWIKGNRIRKAYIGMEATGIYYEKAADMLSSYYTVYVINPLKIKDYGKIRFNRTKTDKADSNLIADYIKRHQDTLIPYQIPKNKALQKLINLKNQLQQHQKQIKNRLHSTEEDFIRNIHQDLIDTIQDKMEQVKIAISEQIKKQTDNNHYRNLQTIPSIGKDTASVLYAQLTEKHFKTANQFVSYAGLSPAIIQSGTSVRGRGRLSRYGNRRLKSTLYMPALCAYRFNAFPKLINNLKKAGKPKMVIIVAIMRKLAKLAYYIVKTGQPYDAERHRLNQ

SEQ ID NO: 52891 - protein, 378 aa, unidentified
MHSMKEDALVVGGVDAHADTHHAAALDQRGALLATQSFPATTPGYLELLAWLRSFGEVDVVAVESTGSYAAGLVRYLRGHGVRVLEANQPHAHTRRRRGKSDPIDAEMAARLALAGKATTVPKQTDGIVESIRLLRVARQSAVKSRSAAMVQLRDLTVTAPQELRDQLACRKTIRGKAALCRRLRPSTGELGQPAHAAKFALRSIAVRIKALDAEVAVLDRQLEELVSGAAPRTSQLLGISTGHAGRLLVTAGENIDRLRGEAAFAALCGASPVPASSGKTSRHRLNYGGDRQANRTLHLIAVCRLRYCARTRAYARRRTAEGKTKPEIMRCLKRYIAREVYYALRADLARLDHPRRPTRVTTIICGAGPIGITRRRT

SEQ ID NO: 52892 - protein, 412 aa, unidentified
MQVVHPVCCGIDVHAKMLVACLILANGEKQKRTFSTMTAELLQLRDWLVAVQCTHVAIESTGVYWKPVFNILEDALTVILINPEHAHALRGRKTDVKDAEWLADLLRHGLLQPSFIPPPVIRELRELTRYRESVVREQSSVANRIQKLLESGNLKLGQVASDALGVSGRMILKALAKGESDPRKLAALARGKLKEKSLSLEQALHGRLTVNQRFVLGELLSRWEQLEAADARVTSEIDKYVQANPKLARARELLDSIPGIGPRVAEVIMAEIGIEMASVFADAAHLASWAGICPGNKATGGKRLSGRTRKGNTYLRSALVQAAWGASLKKHCYLSSQFQRLVKRLGRKKALVAVGHSLLVIIFHVLQNDQTYTELGGDYFDRRHVEQQRDYYVRRLQMLGLKVTLEELPQAA

SEQ ID NO: 52893 - protein, 347 aa, unidentified
MRFYTRQHRHYCGVDLHARSMYVCVLDRDGNVLVSKNIASAPEPFLELIAPYREDLAVAAECMFTWYWLADLCAREGIVFVLGHALYMRAIHGGKAKNDRIDAHKIAGLLRGGMLPQAYVYPQAMRATRDLMRRRNYLMRQRAELLAHITNTNHQYNLPALGVRPARPAERSGLLEHFTEPQVRRSVAVDLSFIEHYDRELPALERYLESNAQAHDPLALAIVRTVHGMGKVLGLSILYEIQDIGRFARVQQFLSYGRLVKPTKESGGKILGHSGRKIGNAHLKWAFSEAAVCFLRANKPAQALRARLMAKHGKGKSLAIIAAKLARAVYFMLKRGEAFDAERFFAH

SEQ ID NO: 52894 - protein, 305 aa, unidentified
MITLGLDPHPASHTVMALDESGVSQGHLTVPNTEEGLMRLHEFSARLEPRRWAVEGAGNHFISMFVGQLLSRGDRVFSISPSLTSQYRARRGRKKNDIIDAGNVARALLANPQLPELNVVEQQRTLQELTRTQRRLSEQLKATRGAQQELASESPVREVLQRLIETLASEVKKLEQRIREMVRKIMPSLLEIPGVGPVVAGVLLAETAGPKRFATADHFASYCGAAPVERGSGQNSRVQVNPGGNRRLNWALHIVAMVRLRTDGGRSRAFLDNVKSSGKTQRAALRVLKTYIARELFRAMRNAIA

SEQ ID NO: 52895 - protein, 400 aa, unidentified
MKGFLHMKLIGIDIGKNKHFFCVMDQQTGEIISQPVSFSNDKEGFDFLIQKIKSYSKDSVLIGMEDTGHYHFALLKYLLDLQYTVALINPKTTDFNRKMQGGITKNDKLDTINICDVLDTPERKKQYRISKVNSFDLYEQKQLTRHHHNLKEEENVYKNRLQKCIDIVFPEFNKLFNSKYGTVYMNILKTFGSAENVANTDIRTIRKCFEIEGRGNRISLTPERLKECARSSIGISSSAEVIQIKHLTAQIELIEEQLTEIDKKIEEFSIQNNSPILSIPGISHFSGTSILAELGDISNYSKPSQIIKFAGVAPLHYESSQFNAQHTSITKKGSKYLRKTLYQIILPVIRHNQVFYKYYQLKISQGKGHRCAQGHCVRKLLRIIYHLLKTNQQFDPQLLR

SEQ ID NO: 52896 - protein, 346 aa, unidentified
MLYAGLDLSRKRLDFHLLDAEGGTLEVGAAPPDTDGLRGLSQRLERHGAPIRAAIESMNGARFAHDRLEVAGWQVEIADAQKVKGLAPLACKTDRIDAWVLAELARRDLVPAIWLPDPVVRAERERARWRLHLVRHRSALKQRVHAVLLAHGKPCPVTDLFGVRGRQLLASLGLPEPWQGTIEASLRLIDELEREINGCERELRRLGADHRYVPLLCTVPGIGWVLAYTIAAELGDIGRFPTPRKLTGYSGLCPRVYQSGERDLRGPLSKHGPRYLRWALVEAATHACTHPAYRDRYQHTKTRIGKQRGAKVAQIDLARRLTEAIWHMLTREQPFAPKGATDPLAA

SEQ ID NO: 52897 - protein, 395 aa, unidentified
MYFLGIDIGKRTHVASLMSEEGKVILKGFSFPNTTEGADSLIERLSKYSETPADFIVGMEATGHYWLSIFSYLHESDFLIHVVNPLQTDGWRKGTEIRKRKNDIIDSVLIADLMRYGSFVETVLSDENVFSLKQLSRYRTYLVGTASDFKRKIIAVLDQVFPEYASIFSKQGIFGKASKELLLEFSSPIELEEISAETLAQYLAELSRNRIKPEKADQLKQAASNSFGVKFAQEAFTFQLRSMIEQLKFIESQVKETEKEIKRIMSNLDSVILTIPGIGPINGATILGEIGDIRKFSNPKKLVAYAGIDASVSQSGQYEATHNVMSKRGSPYLRKALFSAALVASQCDPVFRAFYQKKISEGKHHLTALGAVSRKLCYVIHAILTKNEPYKIVSD

SEQ ID NO: 52898 - protein, 327 aa, unidentified
MQVIADRPEAASAIRSDLGAIFVSMELSRSSWLITSLSPGGGEKMSKHSVGAGDIRALLTRFSALKQKALARTGKTFPIIVIQEAGLDGFWIHRVLQQEGIESHVVDPASIATSRRRRRAKTDKIDGEALLRALLAYKRGEPRVCAMVKAPTPEEEDRRRLCRERKVLIAERVSHVNRIKGLLFGQGISGYEPLRRDRRRRLDELKTGDGRPLPNHLKVQISRELDRLELLLDQIKAVEAERDALLDAQRIVATSPAAMLLNFKGIGPEFAAILCMEGLFRHFDNRRQVASYAGLAPTPWQSGSSAAKLAAILAGASPASRRVQLLL

SEQ ID NO: 52899 - protein, 455 aa, unidentified
MARRRKQEKNVYSLPVIRPETAGIDIGATQIYVAIAPDRDPEPVRMLGTFPRDLRAIADWLRATGVKSVAMESTGVYWIPLYQYLESCGFEVVLVNAHHIKNVPGRKADVRDAAWIQLLHSVGLLSGSFRPAVEICAIRALVRHRQNLVEWSSQAILWMQKALTQMNLQLHNVIDDITGASGMRILRAVVKGERDREVLASLCDKGIRASREVIINSLEGDYRSEFLFILEQTLQQYEDLQKRIGACEAEAARLMDELPEKVDLKEKPLPAARIRVKRRASQPAAVPNLREKQYRVLGVDLTTAPCLNTTTVEVFLSEVGPDLSKFKNASHFANWMGLPPNNRVTGGKRLSSKRRKVKSRMATALRVAAQSAARSENAIGDVYRRMKSRIGPEQAITATAHKLARIIYHMVTTGEAYDESVFAKAQQKFRRNQESKLRANAKRLGFKLIPLEEAA

SEQ ID NO: 52900 - protein, 341 aa, unidentified
MDHYAGIDVSLEYSSVCVVNASGKIVREGKVLSEPDALISWFGSLGLELSRVGLEAGPLSQWLYAAMTQAGLVVELLETRHVRDAFKAMPVKSDRNDARGIAQLMRLGWFRPVHCKSMSAQETRAVLTSRKLVQSKLQDVENHLRGILRGFGLKVGKTTHLSFGRRILELVANHASLATIAKALLAVHAVLLREFKAFEKQVRAMARQDAKARLLMSTPSVGPIVALTYASAIDDPGRFKSSKLVGAHFGLTPKKYQSGQTDYTGRISKIGDASVRTALYEAAHIMLTKPLKGCSQLKSWAMRIARRAGMSKAKVALARRLAVIMHRMLADGTTFNAAAAA

SEQ ID NO: 52901 - protein, 350 aa, unidentified
MLIIGCDFHSRFQQIAMLDPQTGEVIECRLEHENGEARKFYAGLATPARVGMEATGYAQWFERMLAEQGHQLWVGDAAEIRAAMVRKQKTDSRDACHILDLLLRDKFPRIWIPSTEERDVRQLLRHRYKLVCLRTSLKNQLQAMAMGQGICRKKKLWTAVGRKELQGLSLGPWASRRRKQLLDLLDQLEPVMEELDRAVIQEAEKRPAAVRLLTEPGVGPVTALAFVLTIGPVERFPKSRKLVSYLGLNPSEESSGGRQRLGAISKQGNTMMRFLLVEAAQTASRYDPELRRDYQRLKFRRGSGVAKIAIARKLAVRLYWKLRKAAQPVSPAPMQGSPTVSVVGQSLSSF

SEQ ID NO: 52902 - protein, 324 aa, unidentified
MKMSIGFDISKETVDAAFFNGKTMEHIQVENSKKGFSQIWNRCKGFDSHDLIFTMEATGVYHECCAEYFHDKGSMVSVVNPLIIKRYADMKMLRAKTDKVDAKLIAQYGFSETGFEYKRKSETSLKIKAFLKVIDALQRTRTQNGNRLEALRHHAMRMPEVEAVYCKINREISEQITHVEKEILLLEKKEFAGELNNLLSIPGVGKRTASAIIGFFERMDDFGSAKQLISFIGINPSPRTSGTSVRGHGSISKKGNAYLRKLLYLAALSASKHNRSCSDLYFRLVAKGKSKKLALVAVANKLARQIFAVVRYNRGYDPNFSATI

SEQ ID NO: 52903 - protein, 405 aa, unidentified
MAVILDQQDIDVFIGLDVGKSGHHAVAMDRAGKKLFDKALPNDEARLREILDGLSGHGKILLVVDQPATIGALPVAVAQASGAAVGYLPGLAMRRIADLHPGQAKTDARDAAIIAEAARSMPHTLRSVALEDETLAELGVLCGFDDDLAAQITATSNRIRGLLTQIHPALERALGPHLDHPAVADLLTRYPTPAALKTAGRGHVRARLKKHAPRAAERLTDAIFTALGEQTVVVIGTGAAGIVLPKLAEQLLSLRHQRDDIAAQVEALVEAHPLHKVLTSMPGIGVRTCARILTEVTGKHFANAAHLASYAGIAPVTRRSGTSIRGEHSSQRGNKKLKRALFLSAFAALHHPPSRAYYDRKRAEGKRHNQALIALARRRSDVLFAMLRDGTLYQEPEPRSLPSAA

SEQ ID NO: 52904 - protein, 347 aa, unidentified
MNHYAGLDVSLEETAICVVDSTGQIVKEARAASEPETLIAALREIDLPLERVGLEACSLTAWLHDELHSAGLPAVCIETRHANAAMKTMPNKTDRNDARALAQIMRTGWYRQVHVKSRQCRLWRSLLVARRTVLNEMRSIENVVRAVLREGGLKLGTPSRAAFAERVRDLMAEDASVKPLVDPLLTILVTMSDQFARLTKQVLDIVRREKVCRRLMSVPGVGPITALAFRATIDRPDRFRRSRDVGAHLGLTPARYQSGETDVSGRISRCGDELARTALYEAAHTLLVRSRKWSSLRAWGMKVAKTRGMARARVAVARKLAVILHRMWSDETEFRFGRNPAAALAAA

SEQ ID NO: 52905 - protein, 345 aa, unidentified
MNIATIGIDLAKNVFQLHGVNGHGKVVLRRQIHRGQMRGLFINLPPCLIGMEACASAHYWARTLESYGHRVRLIAPHFVKPYVKTHKTDATDAEAICEALSRPNMRFVPIKSIEQQSALSLHRVRQGFVRARTAQACQIRSLLAEFGLVMPPGIANIPKQVPKLLQVAAKELPAPFCRLIERLLAHLKELDRQARELEEQIVDWHERSEPSRRLAKIPGIGPITASALVASISDVRSFKNGRQLAAWLGLVPRQHSSGGKPTLLGISKRGDRYLRTLLVHGARSVIVRARKRDDEKGSWLKKLLERRHVNIATVALAHKTVRTVWAMLAHDREYCANYQSPPVAA

SEQ ID NO: 52906 - protein, 327 aa, unidentified
MTASVSSHNHIFIGIDVGGASFEAAWHRGGSTHCQNRPDAIAAFVARLSVEKQIIRIAVEPTGGYEKPLVKALRGAGLPVEMVHTSRFAAYRTLIGVKAKSDTSDARLLAAYAAAPEEVRGRKAGYVVLPQDAMREQLAELAARRDQLKHMIHAETCRLSTVRSQSVRDEITAHLQALRQADCKTHDAMMQLVHQRDELRNAKWLLKTIKGIGDKTALTSIAAVPELGLISNKAAAALVGVAPFVRRSGTMNAPARIHGGRAPVRNAFYMAAVTASRHNRVLAPFYARLIAAGKPPKVALVAVMRRLVVYANAVLRSGQPWKGAEII

SEQ ID NO: 52907 - protein, 344 aa, unidentified
MIYVGMDIHKKTTTFCALDQEGKVIHRGTVPSGETGWLEAIHRWPKDEIAVALETGSMTWWVVDVLREAGIEPIVVDARQFKMIADSKKKSDRHDAWALADGLRGGLAERIAVNVPREKARRARSLMQTRQQILKQRNMTVNAVKAMLRSVGVEMKKAQWPKDSHWEKVLENPAVPIWMKPFLITQRSIWGHLEQQRQDFDALVHEELSCWPEAQLLLEMPGFGPIVTLGILSGIDDIKRFRRSNQLASYAGLIPSSRDSGAVQRRGGITRQGRSLMRYFAVQAAWAAMRSKNLTIPLRKWSRRLIVKRGKKVAAVALARRLLVLAHKLLTTEEVYNPNYPVVA

SEQ ID NO: 52908 - protein, 378 aa, unidentified
MTCKERGRVIRLAHAVQYLINTELSSHEETRFEFNRSTGAIKLGIDVHQDFYVVVEQVEGGNPKPPQRFDKQAFLHWASKLKQRGAEVHAVYEACGFGFSLQRNLTALGIKCHVVCPQKLDERNKRVKTDGLDAKALCLKLDRFVPGNRDALALVRVPTEEEERSRAIHRQREQLVGARKRLEAQGRSLMVNHGVDPVQNWWKPRTFATLPVPHWMRELLLNSQPILLALQEKIAVLTLQLQNAAAPNQPRGLGKMTSVVIDREIGDWHRFNNRRQIASYTGLCPGEYSSGNTRLQSCVTKHGNPRLRAALVELAWRLVRFQPNYKPIVKWRQILAKGALATGAARKKAIVAVARQLAVDLWRIKTGRLRAQELGLIN

SEQ ID NO: 52909 - protein, 299 aa, unidentified
MSPSPLVPQLFVGVDIAAATFTAAWGRADAPVGTPRTYARDPQGFTAMKAHLAATTIPPAAMLVVMEATGSYWIALAVTLHAAGCPVSVINPLQAHHFAKAQLRRAKTDALDAQDLARLAATLRPPVWTPPPAVYHEVRQRLLVRDGLVTMRQQARNQQHALTQWPVMVAGATEQLTAVIADLDGRIAVLEGEIATALAGSEWAESLGYLTSAPGIGLLTAAWLLVTTLNFTLGDTPEAVTAYAGLAPVPRQSGTSIRGAARIGHGGNGRLRTAVYLATLSATRFNPMIRAFCGRWASR

SEQ ID NO: 52910 - protein, 482 aa, unidentified
MAKRKMSTFERLRSGSMNRQERKEWQQRLYAEDAGLEAVHPDAAGIDVGNASHFVAVPADRDQQPVREFGSWTADLQRMAEWLKRCGIRTVAMQSTGVYWVALQEVLERDGFEVCLVNARGTKNLPGRKSDVQECQWLMKLHTYGLLRNSFHPPEQIRAVRTIWRQRDRLVKEAGREVQQMQKALTTMNVQLANAISDVSGLTGQAIIRAILRGERDPQQLAKLRDYRVAASEAEIAHSLEGNWREDVLFELQQVVDAYDFHQKQIAACDVQLQKYLSALPIRSRPGAGEQSTADAPSEKPNKQRRHKLQKNQPTFNLAAELQRTMGVDVTAIDGVDVMTTQVILSELGPDLSTSFPSEGHFASWLELAPRRDVSGGKVLRHKSRKSNNRVATALRMAAQSLWRSDSYLGARYRHLKARLGGQKAVKAMARYLACLIYRLLTKGKAYVDRGAAHFQSKRTERERLALRRKAAELGMEVVAVS

SEQ ID NO: 52911 - protein, 329 aa, unidentified
MFVGLDLHKNYLQTAVMDDQGRLLSQERILNKDENIEEFASKRLRDSHAEIVIESSSTWYHVYELLSKNQNCHVVLSNPVKTKAIASAKVKTDKVDALTLANLLRTGYIPESYIPPRHIMDLREMVRYRTSLVRMRVEAKNKIHAILLQNGTRITEKPFTIGFVEELRKLGDYRIDGYLNIISSLSHQIQTVSSTIKREATEDESTRLLMTIPGVGYFSALLILSELGDINRFPDSHHLCSYAGLTPSTHSSGGVTYHGSITRSGSRYLRWILTECAKAHIRTRRDSQLTRFYTRLAKRRGGSKATVAAASKLLRIVYWVLKEKRPYRS

SEQ ID NO: 52912 - protein, 318 aa, unidentified
MEPSRQQQVVGLDVSKAWLDGYVPTGGRRFRVRNDPAGIGELVRKLDGSTGWLVVMEASGGYERTAHGTLTAQGVPAAIVNPKRVRDFAKASGLLAKTDQVDARLIARYGAVMRPAATPAPDLARAELREILAGRRQLVAEIAARKQQLEQLRSPLMRARVAKALAFLQEEAKTLLALLRERIAADRALAADFALLMSMPGCGPVLAATLLAELPELGTLDRRKIAALAGLAPIAKDSGLRERRRVIQGGRGQVRNALYMASLASLKTDKSPLKARYAQLTARGKPPKLALVALMRTMLVTLNAMMKAKASWKDPRQK

SEQ ID NO: 52913 - protein, 343 aa, unidentified
MQTITTIGLDIAKSVFQVHGVDAAGQVVVRRQLKRRYVLAFFQKLPPCLIGIEACASSHYWSRELRALGHTVRLMPPAYVKPYVKRQKNDATDAEAICEAVTRANMRFVPTKTPEQQSCLMLHRTRHLFIRQQTAVINAIRAHLAEFGIVAPVGRKGVTELLHVVADPSDGRVPEVARACLAALGTQLLGLKEQIVEFDRLIMAWYRSNETSKRLHYIPGVGPLLATALAASVADPQTFRSGRNFSAWIGLVPKQHSSGGKDRLGSISKQGDRYLRSLFVAGALSVIRYAKIHGTKHRPWLTALLARRPTKVAAIALANKLARMAWAMMTRGERYRNLVALAA

SEQ ID NO: 52914 - protein, 366 aa, unidentified
MSEITRGAACGVIVRVGVDLAKQVYQVHAVDRSERVVLARAMSPQKFLAWAATLPAGCMVAMEACGGAHHLGRALRLLGLDPRLMAGHFVTPYRVQGRSGKNDANDAAAICEAAGRPRTRFVPIKSAAQQGVLSLHRLREGYKADRTGCINRLRGLLGEFGLVFPQSPEKLRAKLGETLEDASNELPGDLRLGLQQLHLHWIHLDLQIHWCEQRIAQHARSNAQASAAMQLMGVGFITASAVAASVGDLKQFANARQFAAWLGLVPSQHSSGGKASLGGITQRGDAYLRTLLIQGAKSAVMTAEKRQDRVSQWLVQLKRRAGWQKTVVALANKNARILWAVLTRGLSFDPNHVAPPPVRLAPELAA

SEQ ID NO: 52915 - protein, 341 aa, unidentified
MEITTVGLDIAKRVFQLHGVDAAGKAVLRRKLQRSEVLAFFKALPPCLVGIEACGTAHYWAREIRELGHEVRLMPPSYVAPYVKRGKTDAADAAAICEAVTRPTMRFVPIKTAEQQAVLMLHRTRDLLVRQRTMLVNALRGHMAELGIIAPQGIARVADLMAVLLGEDTTNVPALARQALRGLAAELEALDRRVKEIEVAIVRWHKDNEASRRLATIPGVGPITASAIVATITDPFQFHSARHLAAWIGLVPRQHSSGGKPRQGGISKQGDRYLRRLLVLGATAVIRYSRSKSTAEAGWLKSLLERRPARLVSVAQANKTARIVWALLVRGEAYRMPSGVA

SEQ ID NO: 52916 - protein, 414 aa, unidentified
MEVIHSRCAGMDVSKRDAKVCVRVAGRGRRRTVETVRTWLSTTNAILALGEHLIAEQVTLVVMEATGDYWKPFYYLLEDAGFELMLVNARHVKNLPGRKSDVSDAAWLAQLGAHGLVRGSFVPPAPIRELRDLTRARTMMTRERGREIQRLEKLLEDAGIKLSSVASDISGVSGRLMLQALIEGQRDPAVLADLAKRRLRAKIPELTEALTGRFSEHHAFLARMYLDVIDHRTRQIEQLNTRIEVAMEPFRSFCALIGTIPGIGQRCAEVIVAETGADMDIFPTAAHLASWAGTCPGSNESAGRVKSTATRPGNPYLKAALGAAALSVANTHGTYLAAKYRRIAARRGPKKALVAVEHAILTAVWTMAHTGALYDDPGADYHIRRDPDRLKARALSQLQQLGYDVTLSPTAASA

SEQ ID NO: 52917 - protein, 410 aa, unidentified
MSQEVAVVFLGVDWAEEHHDVCLLDERGQVLGRARVANSLEGVSRIHALVADHAEEPEAVVVGIETDRGLLVQALVAAGYQIYAINPLAVDRYRDRHSVSGAKSDAADAKVLADLVRTDRSNHRPVAGDSQQVEAVKLLARAHQALVHTRQRQVNQLRSALHEFYPAALEAFKDDLGGRDAVAILEYAPTPSRGRSVSQAKLISALRKAGRERNLEARAVELQGILRRPHLEQPATLVAAYELIVRSAVRMIRELNAQTTELEDELTKSFELHPDAELYLSLPGLGFVLGARVIGEFGDDPNRYLDAKGRRAYSGLAPITKASGTRHVVLARNARNRHLADACYLWAFASLNASTGAHRYYRALRARGKSHPQALRALGSRWVSILHGCLRHRTLYSEDVAWPVQVAAAA

SEQ ID NO: 52918 - protein, 375 aa, unidentified
MDVVHPRCAGVDISKRDAKVCVRIASSGRAKAKSTVTTWGAVTNQVLALRDHLVDEQVTLVVMEATSDYWKPFYYLLEDGPFEVMLVNARHVKNLPGRKTDVSDAAWLAQLGAHGLVRGSFVPPEPIRQLRDLSRTRTTLVRARAKEIQRLEKLLEDAGIKLSSVATDITGVSGRAMLEALIDGQRDPEVLADLAKRRLRSKIPELTEALTGRFSEHHGFLAQLHLDLIDNHTRAIDEVTGRIEVVVEPFRHVRDLLVTIPGISTLVADVIIAETGGDMSRFPTAGHLASWAGTCPGSNESAGRIKSTQTRPGNPYLKGALGVAAMSAARSRDTYLAAKFRRIASRRGPIKAIVALEHAVCDHRNPRSAITEIRG

SEQ ID NO: 52919 - protein, 338 aa, unidentified
MNMSLLAIDLAKNVFQLHGVDESGQPVLCRQVSRKKLPQVVHNIPPCRIVMEACGSAHHWARRFQAMGHTVELIAAQFVKPFVKSQKNDRADAEAIAEAASRPTMRYVPIKTIEQQDVQTLHRVRSLLMRDRIAQGNQIRGLLAEYGVIVPQGSTQVRKLLPAILEDADNDLTVLTRQMFAELYERLVALDERIAHYDRQIQQLHRASPQSCRLEQVRGVGPLIATALLASIGDAKAFKNGRQFAAWLGLVPRQHSSGGKPRLLGITKRGNTYLRMILVHGARAVVAQATRRDDSFSQWINALRKRRGTNVTVVAVANKTARVIWAMLAKGEDYRPAV

SEQ ID NO: 52920 - protein, 308 aa, unidentified
MSSPKVYCGVDVAKASLVLAAPGVRHQIPNTAEGHRQLLALTPAHSHFIIESTGGYERALVLALHASGRALSVVNPRQTRDFARAKGRRAKTDPIDALELADYGAKLTPAADVPPSTAQQQLWELSSRRVQLIAARTAELNRLDHLGLKKLRTQAQTLLRQLSRQIAQLDQWIAELIAADSALQTKAERLQQVQGVGAVTAATLLAHVPELGSLSRRQAAHLFGLAPFNSDSGQAQGRRHIAGGRAVPRSALYMAAMVAIVHNRQLKAFYQHLLHAGKLKKVALIAVMRKLACLLNHLLKNPHFALAD

SEQ ID NO: 52921 - protein, 413 aa, unidentified
MRDIVHRRCCGLDVHKDQIAACVRWAEDGGSIQQETRVFGTTTQQLRDLASWIRGHGVSLVAMESTGVYWRPVWNVLEGEFQLRLANSQHIRNIPGKKTDKKDGAWIAKLLQHDLVPASFVPSAGIQELRELTRSRATLVQEKTAVANRIQGILEHANIKLASVASDVLGRSGRTMLEAIIAGEADPGRLADLARAQLRGKIPQLRLALEGRVRDHHRFCLRQLMDHLEFLEGKIFVIEEELRKRSKPYEEAIQLWITIPGVRWLIAVTLAAEIGIDMQQFPSAAQLASWAGVCPGNNESGGKRKSGKTRKGSVWLRRALCEAAWAASRTKKTYLSAQYRRLAARRGQKRASLAVAHSILVIAYQLLKHKTPYQEPGGDYFDRIRADGLKRYYIKRLEQLGVSIFPTSATDHA

SEQ ID NO: 52922 - protein, 414 aa, unidentified
MEDILECCCGLDVHKETIVACLMKGPVGKGLKPGSEVREFGTQWKDLVALRKWLEKHECHYVAMESTGIYWQPVYAVLETALSDEMHLMVVNARHMKNVPGKKTDMRDAEWIATLLRAGLLKGSFVPERDIRDLRQFTRYRKALIRDITSQKNRIEKLLQSNGFRLSSFLSDIFGSSGLAIMQQLVQVGSISSQSLDRCLKARARQKAGEILSNLNGTLSMPQRKLLKMQLAHLADLQVNLGEVEEEIRDHFSRFQGPIELLDSIPGIDRTAAYAILAEIGQEMSVFPTAQHICSWAGLAPGNHQSAGKKKKQRVTQGNNYLKTMLCEVAWVIASHKKLYLSGWYWRLKHHTDAKRAIVALARKLLVIIYTLLKTHQPYNEQKFVERKNASEQKRVKRMVYELSRLGYAVSLAA

SEQ ID NO: 52923 - protein, 429 aa, unidentified
MNYTQNEKIEQVTDSTMVVGIDIGSQIHYARAFDNRGRELTKRIFPFHNDLEGFNSFNLWAETLKTENKKTAVLIGCEPTGHYWFAFAKYVNDHQKRLVMVNPFSVKKIKELDDNSPKKTDSKDPKTIAKLVVDGRYSIPYMPEGIYAEIRDLVYSRDRIMKQHNISANRIQRWLAIHFPEYLGLYTRFDAISGLAVLEKAPLPKDVIALGVNGIRKIWHDKKMRGRGVTKDRAKTLVEAAHNSVGLDGGIGTKSELYMLLEEHRLWTSQLEAVNKVLEEMILKVPHVEKLLAIKGVGSITIAGFIAEVGDIRRFDSPKQIQKYAGLELVENSSGKHKGRTRISKRGRRKLRKILYQVMVPLLARNKEFRGIYDYYVTRVKNPLKRRQAMVAVSCKLIRVFYAVLTKGVEYDRFKMMSDIHRKSDIIAA

SEQ ID NO: 52924 - protein, 333 aa, unidentified
MKSDTVHIGVDVSKEKLDVYVPPHGGVRAETKQLDNSVAGFRTLRGLARKAKATVCVEPTGGYELELIAFMHKFGVAVAYADALRVRQFARAEGCLSKNDAIDAALISRFADKIGVRVLEPQEVEAVELKRKAKFRQTMTDSRTAMINRLETEVDPEMKALLKEQIKHMDKVISKAERLCLKTVEKDERMNALRERFTRVGGVGDMTAMSILAGLPEIGKLPDAKLNRLVGIAPEEKQSGTKEWQRRIWGGRKDVRNALFMACLASIQWNSILGAYYHKKRAEGHLHKWAMVPTMRKLLSLLNRIARDPNFTPKPEPESTKKNTRAGRKKKTA

SEQ ID NO: 52925 - protein, 429 aa, unidentified
MNKFAFNFVVGIDVSSKTSVVTILSPTGDIYGKKLTITNNLIGFKKLKYILDDINTNFSLKPNIFMESTGLYHILLYTYFSKCGFNCYVINPIKTKNFSKQSIRKVKTDKVDSLRIAQLAQSPTFVTESSYDENFFILKKLCREYSSLVDQRSVYKKKLTSSLNLVFPRFHELFSNIYSEIPMALLLKYSSYDEFLKAPKAEVIQTIISTVSHSYEWAENKYNQILEVANEANEMNITLTYLSIEIKTWINIINALSKACDELLISIDNLHRKIPTLERNVKLLCSHPEVGFISAISFLSEIGDINNFRNAKKIVAFVGLDASISQSGDFTSTHNSLTKRGSNFARRTLFNLAIASVKTRRNGVAANPVLLAYYKKLTLRKPKKVAICAIMHKLINHFFAILRDQKPYELRLPETHNKIYKQNNLKPVI

SEQ ID NO: 52926 - protein, 345 aa, unidentified
MNGMYYIGLDVHKKTISYCVKDASGQVHQEGKIGATRRELDDWIKTLPQPWSVAMEATIFTGWIYDHLLPYAEQVKVAHPLMLRAIAAAKKKNDRIDAGKIADCLRCDFLPECHLAPTAIRDRRRTLRYRHLLVRQMVQMKNRISGLLMETGVEYNKRRLHKVGYFRELLSTNEEVNESIRPLLKLSRETIVRLQKTEYALLSSLQRDPLLAERIKRLRTVPGVGPITALTWALEMGDASRFRSIRQAISYCGLCGDEKSSADKVIRTPLSKQRNKHIQRVLVEAAKLAPREDHKLALVYATEKQKGNANRATLAVARKMVAYLLAVDRGRRNFVPAEEHRQTAA

SEQ ID NO: 52927 - protein, 350 aa, unidentified
MSIIGCDLHSRYQVIAMLDTETGEIVRRRLEHEKGEARAFYAALPKPSLIGIEATSYTQWFERMAGEQGHQLWVGDPAKIRASETRKQKYDGRDAEHLLDLLLTKKFPRIWVPTRQERDLRQLLKHRDKLVHMQTAVKLQLHFLAMSQGICRKRKLWTEQGRALLERLSLDPWASRRRQELLELLDSLAPRIEPLDEAVEREAQQRPDAVELMKQKGVGPVTALAFVLIVGPVERFPNSRKLVSYLGLNPAEHSSGGRQRLGHISKQGNAMLRWLLVEAGQSASRFDPQLRRKYQRLKSRRGANVAKVAIARHLAVHLYWALRQMKDASPPVRMPGSPVSSVVEATPSIL

SEQ ID NO: 52928 - protein, 485 aa, unidentified
MTNGVEQAWFTRHLSVYPVGVQPGIEDLACPALRAPAQDRPPGLLGGTVKSVLRIDRPNRDTIAHTTPPGLQPLLKEVHMQVYLGIDWSQRKHDVVFMNQIGACIAQLTIPHTPDGFLKLDATRQQIGVSPSDCVVGLETAHNLLIDFLWDRGYTQVYVIPPNVIKSSQGRYRQSGARSDPGDAFVVADVLRTDRGRLQPWFPDSLLTRQIRAKVSMIDHLTRSIVRMSNRLRAVLVRYYPAALNVFSSLTAQITLQFIQAYPTPEAATDLTFAEFQAFARQHRYPKPKALPRCFARLQEPQPKANLQTILVYQEEAPLLASLLLSMVRAKRDALRELKVLFSEHPDYPIFSSLPGVGDFLAPALLAKFGDDRQRFPEPASVQALAGTCPVTKASGKRKVVLFRYACDREFRHIAQQWARCSLSVSVWANAYWERTRPHCRSESHAYRCLANRWLAIAWKLWQTCQPYDEAYHLRQRALRSKPRS

SEQ ID NO: 52929 - protein, 356 aa, unidentified
MSRDIKYIGMDVHKEAVVIAVLNSSGKLVMESIVETKASSILQFIHGLRGELHVTWEEGTWASWLYDLLQPQVKQVLVCNPRRNALLKEGSKSDKVDAQKLAELLRTGMLRPVYHGENGLRTLRELARSYQTISKDLNRVMNRLKALYRGWGIACAGTQVYSSRYREEWLNKIPHAGVRRRAELLYQQLDGLQGLRRTLRPELLAESRKHKAVKLLRQIPCIGPIRAARLLALMQTPHRFRSKRQLWTYSGLGIETHDSAQFRFVGGQLQRSKKPQQLRGLNRNHNHEMKEIFKGAATRASCGRGPLHDFYAALLTKGMKPEMARLTLARKIAAIALTLWKKEERFDAEHLKPQAA

SEQ ID NO: 52930 - protein, 344 aa, unidentified
MGEVSTIGLDIAKSVFQVHGVDREGEVVIRKRVSRLKLLEFFAALPSCLIGIEACPSAHHWGRELQSLGHTVKLLPPSYVKAYLKRSKNDANDAAAICEAVARPSMRFVLLKTREQQAALMLHRTRRLLVRQRTMLSNALRGHLAELGVVAAKGRNGTGELLGIIADAEDHRVPPAARAILEVLARQYSAIGVEIGLIDKSILAWHRSCEASRRLAEIPGIGPIVATALVAEVGDWQSFSSGRSLAAWIGLVPKQHTTGGKERLGHITKQGNRYLRWLLVVGAMAVIRYAKQHGAKNRPWLARLMERRPAKVAAVALANKIARIAWAIMVRGERYSEPKLLMAA

SEQ ID NO: 52931 - protein, 465 aa, unidentified
MHVIDRTAERVNVEQHAGRGTQGLDVILPGAAGIDLHKEVIVACAPKAAGDTRHPVKKFSTYTSDLLKLAAWLKQHAVTSVAMEATGVFWMPVVSILRAAGFEVLLVNARDVRSVKGRPKTDKLDCEWIRRLHACGLLRGSFIPDAETEVLKSLWRHRMNMEEEDARAIQRIQKSFQAMNIRLDIAVTDIVGETGLCIIEAILAGERDPRKLAALRDRRVAKTELEIADALTGNFKEEHIFIIRENLTHHRFLQERIQETDTRMAAQMETMKKKGCASQLPAATKPDRSRHGETLNRERLYELLGVDLTQIDGVNVLTVSSFLVNAGRDMSHWATENHFASWLALSPNVKESGGKMRSGPTRKTASALAHSFRMAAMTISRLDSWLGAYCRRLKGRIGAPKAITATARKLAIIFYRAVKEGGEVKRLTAQAYELANQGRILKALRKRASHLGFDLIPKQTVPVEA

SEQ ID NO: 52932 - protein, 353 aa, unidentified
MHTHQQSSDPVATIGLDIGKNTFHLVGLDKRGAIAIRIKLSRHQLVRRLVNLPPCLVGLEAGSGSHHIARQIQPLGHNVRLIPAQYVKPFLKAHKNDYRDGEAIAEAVQRPTMNFVAIKTPEQSDLLSLHRVRSRLVRQRTAIINQIRGFLLERGIAVRQGPAPLRKALPAVLSSPPEALSPRLLRLISELDQDWRHLDERIEALSAEIESLSDNDAASQRLMTVPGIGPIISSAVVAAIGTGSGFKQGRDFAAWLGLVPRQESTGDRTKLGKISKRGNKYLRTLFVQAAHVVLQRRPAAAMRALWPWIQRASKRLAHRNLLAIALANKLARIAWAVLARGRDYQPRITPNAA

SEQ ID NO: 52933 - protein, 324 aa, unidentified
MTDAVLGIDVSKNTFDTNLGAGTKARSKSFANSPAGWHHLIAWLGEHKIGQVHACLEATGRHGLGIALALHEAGHVVSVVNPAQIRDFARTKLGRNKTDQVDAVHIREYAELFKPRPWTPPSPAMRRLCELQTIRAGTVAGLTEWKNRRRSGIMDDLALSLAKTTIQHFTSQLEAVDQAIAETIDNDVELSAKRDLLVSVNGVGEALAGIVLAELPGPDILGSSAAVTAYAGLNPQQHQSGISVNRPVRISKIGNAVLRTALYMPALSAMRYNPAVAALVDRLKAQGRLKGKQIVIAAMRKLLVLCFGVLKTGKEFDPAMAMGK

SEQ ID NO: 52934 - protein, 426 aa, unidentified
MKNTQNEKISQIKITTLVVGIDVAKETHYARAFDYRGIELSKLLRFSNTAEGFQRLEEWMQNISEQHKKTDIIVGFEPTGHYWFNLGDYLKDKGHKLAIVNPFHVKRTKELDDNSPTKNDRKDPKTIARLVKDGCYREVYIPEDVYQELREAISERDRLVQRMSSISNQVTRWLDIHFPEFNTIFKDWRRKAALQILRNYPTPEKIIAAGAFKIEGTWRESMKRTAGLKRAQELVKTAEASIGRKTGLTAAEASLQNLLNEHDLYRQQYEQLEQLMLELLQQVPNAEKLLELKGVGLITAATFVGEVGDIRRFQDPRQIQKLAGFNLVENSSGKHKGKTRISRRGRRKLRHGLFMAMITILATNPEFRQLHQKNITRENNPLNKMQSIIALCGKLIRVFYALLRTGNNYSAEKMLGDIELGMKAAA

SEQ ID NO: 52935 - protein, 356 aa, unidentified
MGKRLKQCVGIDVSQEKLDVCLGYVDDNLKIHFLVQRTFNNKPSALPSFEKWITKHTESDVKTIVAMEATGVYHQSCAYHLHANDFVVSIELPNKISNYVRSLNQKTKTDKKDAQAICQYGLERDVKAWEPPNKIYRELCSLTRERTQLRRESSRIKSKLHAERAGHYANENMIERMKIRLVLIATQIKEIEAELKEKVKSNKKLNEDITRTQSIVGIGFLTSCIIHAETQGFALIENKKQLTSYAGYDIRQKQSGTSVNGKTRISKKGNSHLRAAMHHPAMTSVRHHEPTKNFCTRIIQRSGIPMKGYVAVQRHLLELAFILHKNKTTFDIEYHNKKAAKVNLRRSLADNKIAAF

SEQ ID NO: 52936 - protein, 343 aa, unidentified
MEKRYIGIDLHRNRFTSCVRLENGRNYLSQWRLEELSGFVRKLRPDDELAVEVTGNTRLFYDAVVARVARIAVVDTNQFRVISRSVKKTDSNDARLLALYLSKGLLPEVRMKNKEHGQLASLTQTRDTLVKLRSALKNKINNLLSARGINLPKEALSSERKLSEVLALPFDPPVQIELRVIVEQIRSLSQSIGELEKTIAQEASKLEGHKSLISIKGIGQITSAILLSVIGEVSDFPDESRLASYFGIVPRVVNSNETERSGHIHKRGSKLARTALVQSALIAVKYSPYLKNFYQRVKARRGTGKAIIALARKFLGIIYRTLKNKGVFEDFPNFVLAEPVETA

SEQ ID NO: 52937 - protein, 415 aa, unidentified
MDVLVDRCAALDVHKDQLTACVRRWKAGGRRERESETRTFSTMLASLRVLRAWLVSEGVSVVGMEATGVYWKPVWYELEDAEAFELKLLNPTHVKAVSGRKTDVRDAQWLAKLIECDMVDGSFVPPRAVRELRDVTRYRRRVVESGARERQRLQKLLEDAQVKLDSVVDDVTGVSARLILNALCDGERDPEMLADLAKAKLRRKIPQLREAVPGRFNDHHAVLVRELLAHIDYLAGVESRLDARVDELIAPFAAARELLMTMPGVARRTAENVIAEIGVDMGQFPTAQHLASWAGMCPGNDESAGKRRSGKTRKGDPWLQSTLVEAAWAAARTRGTSMQTRFWRLAKRRGQKKAIYAVAHHLLIIMWWILHDHVPYSEMGDDYLQHRIDPVRRQKQLIRQLEQLGVTVTIQHAAA

SEQ ID NO: 52938 - protein, 394 aa, unidentified
MKLVGIDVGKNSHHFCVMDKETGEFNVAPSSFSNNKEGFDSLINSLKPYSKKSILIGMEDTGHYHVALLKFLLSNGYTVALINPKTTDLTRKMEGGITKNDKLDTITICDVLDTPERKKQYRITKVDRFDLYEQRQLTRHHHNLKEELNVYCNRLQKSIDLVFPEFNTLFSSKYSIVYMNLLKTFGSAEAIASTDIRTIRKCFEVKGRGGRISLTPEKLKECAKNSIGISSEVETIQIKHLVNQITLMKEQIAEIDKKIEEFSIKNNSPILSIPGISHFSGTSILAELGDIGNYSKPSQIIKFAGVAPYHYESSQYNAQHTGITKKGSKYLRKTLYQIILTVINNNPVFKKYYLLKISQGKGHRCAQGHCIRKLLRIIYHLLETGQSFDPALLR

SEQ ID NO: 52939 - protein, 401 aa, unidentified
MKSLSGGIDIGSEHHHVIIMGDEEKILYDQKVSHKFSEFHRAVKEFREIEEREEGKISFAIEGKNGYGAPFDRILIENGFTLYNVDNLKLKRFRDVFGVEWRNDQRDAKMLAKMLRLRDYLDVKDEKAFIRVEKVSEVNERLKILSRHQQTLIDEKVRIQNRLRKRLLEVCPDILEVGDVDSKKMLRFLVKYPDFSSYKRLTMKALLKIEMIGEKQAFLMLESLRKIKYVEELADTYRTIILSYSRRILELKEEIEILDKKLEEIGERSFDVKRLKTIPGVGTKLSSRLIGEIGDINRFKTERQLAVYCGVACVDNISGKQKMTKVVYKANKIGKAAMIEIAGCTIRYVAESRAYYAKKRAEGKKHNHALRCLARQLIKVIFKMLKEDRNYILKEEMEKAA

SEQ ID NO: 52940 - protein, 353 aa, unidentified
MKTYYVGMDVHRASIVIVVLNGAGKVVMQSVIETGAARVRGFLKQLRGRVYVTFEEGTQANWLHEVVRPMVTEVVVCDPRHNKLLQSGNKNDRVDAQKLAELLRNGALKAVYHGDHGVRALKELVRSYDCLVSDTTRVMNRLKAIYRGRAIGCAGHDIYRQDRREPWLEKLTERGAKQRASFLYQQLAALRPLRHEAKRMMVKEARRQPAYPWLMSVPQFGAVSVAQLLAIVSTPHRFRSKRQFWTYIGLAVVTRTTADHEVVNGVLRRSQRPVSTRGLNRNHNHLLKRVFKNAANGACHGGPFKAAYELRVAQGMVPSLARLTIARQLAAITLAVWKHGEQFNPERIKPQAA

SEQ ID NO: 52941 - protein, 370 aa, unidentified
MKQQSKSSHITVGLDLGDRRHRFCALDERGEVVEEGSICNERDSLRKLAGRYHGALGVMEAGAHSPWISRFLEALGWRVVVSNPRKVRAIYQHERKSDQRDALMLARIGRMDRALLYPVRHGSEQAQQDLLRIKLRDSLVRARVALINSVRFSLKSLGYAVRNPSSERFHKVAMERLPERLQQMIAPSVQALAELSTRIAVLEREINVLARTKYPQTLWLQQVPGVGALTALYFVLKIEDPQRFENVRDVGAYAGLCPRRDQSGQSDPQLRISKRGDAYLRRLLVSAAQYILGPFGPQSALRAYGLMLAADGTARAKKRATVAVARKLAVLLLSLWKSQQPYQPFPGSPPQWPTRGPTIWNDCAASHGSD

SEQ ID NO: 52942 - protein, 343 aa, unidentified
MKIVRIGLDLAKNVFEVHGVDAEDSVVLQKTLRRDAVPQFFSELPPCLVGMEACSGAHYWARVLTDLGHDVRLISPQFVTPYVKSNKNDRNDAEAICEAVGRPSMRFVPQKTSEQLEIQAVHRIRQRLVSDRTRLVNQIRGLLAEHGVVMGRDISRLRHGLRQIAEGAANGLCEVMRELVRDVHQELAEFDQRIATYNRRIRHLFRTNEECQRIGKIEGIGPITATALVAAVGDRSCFKNGRQFAAWLGLVPKQRSSGGKSRLFGISKRGDRYLRTLMIHGARAVLGKAHSKEDPRSQWIGRMRERRHPNIVAVALANKNARIVWSILSRGEPYRPVEAVSPN

SEQ ID NO: 52943 - protein, 317 aa, unidentified
MTEVTFPQLIQRACGIDVHLKVVVATINGEGLKKETRSFGTFTSSLNELKEWLLSNNVTHVAMESTGVYWKPVYKVLEGFIPNVWIVNARHIKNVPGHKTDKMDSEWICKLLLAGLLKPSYIPPKEQRQLRDLTRYRNKLIQQIASEKNRMMRILEDCNIKLSSVVSSTSGVTATALIDMLCEGKQLTLDDIKSVYHGKLAASPEELLEACTGYVEEHHIYLLQMIRKDIDNTQVLIDDLSDRIKALLSKYDNVLELLKEIPGFSTKVVEDLVAEIGLDMSHFPTEKHLASWAGMAPGNNESAGKKKAQESLTETNK

SEQ ID NO: 52944 - protein, 358 aa, unidentified
MDHIGIDVHKRESQICILAEGGELIERRIRTEAERFAAVLGDRPRARIVIEASTDSEWVARCLEALGHEVIVADPNFAPMYATRTRKVKTDRRDARAMADACVLGAYRPAHRLSDPQRHVRGRLLIRDALVRTRTRYISLIRALLRQQDYRVPSGSAEAFATRVRALALPGPLLSLIAPLLAVMRPLNCQLVYSDATIERVAAHDERVQRLRTVPSIGPVTAAAFVATIDDVRRFSHAHQVEAYLGPVPREFSSGDRQHRGAITKAGPPRPRWLLIQAAVSILRRRPPEAEALRAWALRIVARRGKHIAVVALARRLAGILYALLRTARSSRHARLHRRGPMPRWPAPRPSERSTETP

SEQ ID NO: 52945 - protein, 377 aa, unidentified
MANCTRYLGLDVHAETITAAIAEGRGRMRSLGKFPNRPEGVRKLIAKVGGGGNLKVCYEAGPTGYALYWQLTKLGVECEVIAPSLIPKKAGDKVKTDRRDAEKLAQSYQAGDLTPVWVPTPEHEALRDLVRQRAAAKSDESRAKHRLVKVLLRHGLREPNESRAWTHPWWRWVQALKFEHEPRQVAFSDCVAEVLHMGERLARLDQAIDRLVESAPEHMRAVIEALQAFRGVAKLTAVTVVTEVGTFQRFRRPTEMMGYSGLVPCEYSSGKRESKGGITHTGNAHLRAVLVEAAWHARHRPWLNLRLKKTLPSLPAGVADIAWKAQERLHRKFTKMLYSRKHAGVVATAVARELVGFMWAVGCLVEAQHRDAQAQAA

SEQ ID NO: 52946 - protein, 347 aa, unidentified
MSISMIGLDTAKSVFQIHAVNEAGKVEIKRKLRRSELIAFFEKQESCTVVMEACGAAHHWARMLTGLGHTVKLIAAEAVKPFVKKGKKNDAADAAAICEAASRPDAKFVPAKSVEQQGILALHAARSLLVKQQTMLANAMRSLATEFGVTVPKGIRKLDELMTLVDTDENIPKQAKQAITGLHDYCNDLSEGIETFEAEIVAHARTDETARRLATIPGIGPITASLIVATVVDISLFKTARQFAAWLGLVPRQNSTGGKTRLGRITKTGNREIRKLLVLGATSMVYRADGWNSAVGGWLRTILERRPVRLVTVALANKMARIAWAVMTRKEVYRSKGGVAVAPQATA

SEQ ID NO: 52947 - protein, 348 aa, unidentified
MAIVGGFDVHRAQITFDYLDTDSGQVTAGQIRPATRPALRNWLERFGGRNDVAFAVEGCTGWRFVVEELVRAGGEPHLAEPADTATQRGRKKRAKTDRADARLLRELLTQRRLPESWAPPSHVLEVRTLGRLYVALMDERRAWQQRIHAQLFHQGVPSVRGLLTSDGRVAVAKAELSSAGLQVVQTAMAAVDSLILQIGPLRAQLQTIGANQPAVLALTQQYGIGLLCGTIIWAELGDCRRFSNADQAVRFAGLDVTVWSSDTKRSAGRLARQGSPELRWALFEAAKSAARQTSPDHDYYDAVRDRLGGKRPALSVARKLVRRCYHALRDLGDQVWLAPAQVQEQQAA

SEQ ID NO: 52948 - protein, 400 aa, unidentified
MTESLIVGIDPGRYGHGVVVLRRDGEEALRESVANEATAIEGLVDRVVELAGGPGLALWVIEADGGDGAVLIGELLARDELVATLTPTEVAVRRKGRRQIHKSDLIDAELCARIGREEQATLRRLVAVPEAVAEIRVLARYQEGLIRDRTRLINRLRFLLSQYWPEFLAARAFAALDGDAVTALLAELPTPSAVRSKTPLELARFLAAQRYRRRPLERAEQILAAAQIGTRPQEAVYGRLVAEVADELRALKQRIEALDVEIRDRFLLQPEAPIILSLPGMSHRTGPRFLAEVGALARFGSPDALATYAGLTPTLWQSGRSSGTHFLSRRCNLHLRQACWSAALGSLKTPASRRFYDRKRSEGKSHHQAVIALARTQLRVLWTMLRAGTLFSAERALAAA

SEQ ID NO: 52949 - protein, 397 aa, unidentified
MVGPAFAQKRGLRWQLQSKSAQSRMREAGPMGKVRFVGLDVHKESIAIAVADDEGSAPQTVATIPNDTRLLLKWVKKLGQGGRVRCCYEAGPTGFGLYRELRVKGIECTVIAPSLVPKQAGDRVKTDRRDALKLARFLRSGDLTAVHVPEAATEAMRDLERARDDAKRAERAARHQLSKFLLRYGHRYDGKTAWTAKHLDWVRSRVFEHEAQNRVLVDYVHAVERGTERVEQLTKDITELVESWSLRPLVKALQALRGVRLITAVILAAEIADFARFATAPALMAFIGLVPSEHSSGESTRRGSITRTGNGHVRRVLVEAAWSYRFRPRMSREIRERNEGVGPGVQAIAWKAQQRLHGRYQKLTGRGKNKNQTVVAMARELAGFVWSIAREPELLSP

SEQ ID NO: 52950 - protein, 403 aa, unidentified
MNMNAVGIDVSKGKSMVAILRSYGEIISKPFEVKHTVSGIRSLIEQIQSIDGESRIVMEHTGRYYEPLVRELSKADLFVSAINPKLIKDFGDNSLRKVKSDKADAVKIARYTLDSWTELRQYSLMDEIRNQLKTMNRQFDFYMKHKTAMKNNLISILDQTYPGANTYFDSPAREDGSQKWVDFSATYWHVDCVRKLSLNAFIDHYQKWCKRRKYNFSRSKAVEIYEASKELVSILPKDDLTKLIIKQAVEQLNTASQTVEQLRTMMNEAASKLPEYPVVMAMKGVGKSLGPQLMAEIGDVSRFTHKGAITAFAGVDPGVNESGSYEQKSVPASKRGSSTLRKTLFQVMDVLIKTKPQDDPVYLFMDKKRAQGKPYYVDMTAGANKFLRIYYGRVKEYLSSLPE

SEQ ID NO: 52951 - protein, 414 aa, unidentified
MKVTRWIGRAIGLDVHRDFCVVAICEDGVTSSAGRVPATPEGIRALAESLLPSDRVALEVTGSCWEVARILEPHVNRVIVVSPDDTGITSARAKTDKLDARTLASLLWRGELEAVWMPDERCRVLRRRLARRERLVRSRTRTKNEIHACLQRRLQGKPPCSDLFGVKGRQWLAGLELPLEERESVDAGIRHVEFLDSEIAAVEKLIAQQALSWPEIRRLMTVPGVNLICAASFIAAVGDPNRFLTSRKLVAYLGLDPKVKQSGEAPARSGRISKRGSPAARWALVEAAWTAVLQPGPLHAFYERTKNRRGHGKAIVATARKLAVLFWCMLTRSEDYAHQQPSLTKKKLRRLEITAGAPKNTRRSAGIWSTNDLMRQAERELALQAEASYKRMVTDQQAGAPARKVGASVTPERA

SEQ ID NO: 52952 - protein, 346 aa, unidentified
MHYIGMDCHITTLDFAVVNEAGLLVEANRIPTSVNGFMGFVKTVPRPRTIYMEEGTLAAWALETCVRFGEKLVITDPKKNHWIGSSGQKDDPVDALKLAQLGRGGYIKEIHHPVGQRRRFRELMIAYHDTVRSTTRIKNKIKARFRQNGISCTGATVYSEPYREEWKGKLPQEPTLLLILEGLWRQLEQSEQTEKELLAAARTQAKHYPEIKHFQAIPGIGFIHAATISAMLETPYRFADKRKVWMYAGLGIMTRSSGGKIYSEKLSTDYNRLLKYTLKQAAEAAIQTKDSPFRRKYLDMTLLHGIAPHRAKLTIARDMLATMWAMWRKGEKYNPEIREKAAYKQG

SEQ ID NO: 52953 - protein, 331 aa, unidentified
MTGLPSRTNETPLSVGVDVAKATLEVAFSDASAPLASTNDEAGQAALLAHLAQLRQQGRTIGLVVLEATGGLELDAATALQLAGWPVVIVNPRQSRDFARAMGYLAKTDRIDARVLAHMGQTLMQREDLRKLIKPLPDERRRLLQALVTRRRQLLAMHIAEQQRASGPDKRMRKSLNIMLKAIERELARLDKDMLAHIGEHHAELAARLGEVKGVGKATISTLLAEVPELGELNGREVSALVGLAPINRDSGEMRGKRTIFGGRPQVRKVLFMAALVATRWNPVIKAFYERLIATGKPKKLAITACARKLLTILNAMARTGKPFNAALHLG

SEQ ID NO: 52954 - protein, 341 aa, unidentified
MKKFIRIGVDLAKNYFQVHALESENGRAVTRKLKRSKMHEFFSQIEPCLIGMEACGSAHYWGRELKAMGHEVLLMPPAYTKPYVKRGKNDAVDADAICEAMSRPGMRFVPIKSPEQQATLMLHKTRELLVKQRTMSVNALRGHLSEFGIVAAKGIGRVDELLDLAESDATLPNAARASVKVLAQALKGLDKAIDDLEKEISGAHAQNEMSRLLDKVPGIGKLIASVIAASVPDPSVFKSGRDFAAWLGLTPRQNSSGGKQTLGGITKQGNRYIRKMLVLGATSLLNVVGKRKGALRDWIVGLLAKKPARLVTVALANKLARILWAMMKTGECFRTEMFAKA

SEQ ID NO: 52955 - protein, 364 aa, unidentified
MNAMIAGNTANQEAYWVGADVAKQTFDAALVSPGQHYPSTPLRDVPVATFARSVEGVNEFLSWLAAQLRGVSSPVSVRMVMEATGSYSVELAGWLNEKYPALAPAIANPRQTSAYLDSMQLRNKTDRVEARALAFYGAERRPAPYETLSPERLELRALSRHRDALVGEKVREQNRGEEPFASKLLASLHKRRLAQLERDIAKIEARSKDLIEMTPELRRDEKLLRSIPGVAFVTSMVVLAELGDLRRFSRARQVTAFAGLTPRRKQSGSSVNAPAVLCKRGNPRIRQALYMAAMVAVRLRGPLKDFYDRLVAKGMNGKAALCAVMRKMLTIMRAILIHETPYNPLWKKQGTKPSRPVDNAAQNA

SEQ ID NO: 52956 - protein, 334 aa, unidentified
MKKRYFMGIDVAKATLDFCLLSKNATLLWQGQLQNDSHAIEQFLAQLQARGYKLAQIHFCCESTGVYGQRLAASLHQAALALSVLNPAQVKFFAISVLRRTKNDKVDAEIIARFCRERQPLATRPLRPIESQLKLLVHERESRVNEQIRERNRAKKDPYQIALPKLISQQRQSRLKQLAKEVAQFDAAIESLIASDEGLKEKSRLLCSIPGIAKVTAAKLLCELAGKEFQSARQLAAYAGLTPQECRSGYSSYGKTVLCKIGNAFLRKALYLPAAVARRWCKPLRPWIALLESRKLHDLAIRGAIMRKLLHIAFGVLANHQPFNPMLVFIPKTP

SEQ ID NO: 52957 - protein, 358 aa, unidentified
MIIIGADYHPGFQQIAFVDTDTGEFQERQLQHREEAEKFYRELAAQGQKVRVGMEASGHARWFERLLAELNFELWIGDAAEIQTKRVRKAKTDREDARLLLRLLLEDRFPRIWVPSWENRDLRQLLWHRHRMVQARTRIMNQLQAVALNEGLRAKKKLWRECGRQQLESFPLAPWANRRRQDLLALLDRLNPTIAELNQAVDQEVERCPAAQRLMTHPGVGPLTALAFILIIGEAERFGCGKQIASYVGLVPLEKSSGNRRRLGHITKQGNSMLRFLLVEAAQVTARSIPEWRSRYFHLRMRRGRKIAQVAMARRLAVGLYWMMRQGLGLRPAAKVRFAGSKTLLSYCSSDRGFDSIA

SEQ ID NO: 52958 - protein, 354 aa, unidentified
MNYLGLDYHKKYSFATIITEDGEIKEKERLLNRKESFKGYLHRYEEVVAVVEACWNWPVAVELLEGLVDEVKLAHPLKVKAIAEARIKTDSIDSETLAYLLRADLIPEAYLRDKSNLGRQKILRMRSFYVKLRTQVKNRVHALIDGQGEEIRETAKGYTDLFGKGGLRWIGELRLNDPDEKMLRGLLEIYELLCKQVKATDSMVKEIVSSDEDCVLLKSIPGIGEFFAVLIKTEIGDIERFSSSSKLCSYAGIVPSTYASGGKVWHGRLTKQGNRWLRWAVVEAVIPAIRTNGELRSYYERIRYRKGPKAAKLATARRLLAIVYRVLKEKDAFKLYKTELKQRVELPSSDPSAA

SEQ ID NO: 52959 - protein, 348 aa, unidentified
MSKHSVTGGDVAALLHRFAQLQEKVRSRTGNQVPIVSIQEAGLDGFWIDRVLKANGIESYVVDPASIATSRRRRRAKTDKLDGEALVRALLAFKRGEPRVCAMVNAPSPEEEDRRRLCRERKVLIAERVKHVNRIKGLLFSQGISGYEPLRKNRRKQLDELHTGDSRPLPTHLKTQISRELDRLELLLEQITTVEDERDMLLAAQKDSVAATPIPAGAMLCDIKGIGLEFAAVLWTEGLFRHFDNRRQVAAYAGLAPTPWQSGTIDHEQGVSKAGNPRLRATMIQLSWLWLRHQPQSALSRWFTMRVQSSGGRMKKSTIVALARKLLVALWKYVTAGVVIEGAVLKTA

SEQ ID NO: 52960 - protein, 348 aa, unidentified
MVYFVGLDVSVKTTSVCVVDDAGKVILEQKVPTEPADIIAVLTPLGVSFGRIGIEAGPLSQWLVNALTAAELPVICVETRHMKALLTAQQISKTDRNDARGIAQMMRVGLFKPVHVKTMVAQEQRMLLTSRKLLQRKLLDVESDLRGTLRNFGLKVGVVSSFRYEARVRELVAGFPRLAAIVEPLLSVRRVMRQQLAVLQKMVLDTVRGDPVCRRLMTAPGVGAVVALTYRATVDQPQRFVHSRAVGAHVGLTPKRYQSGETDYEGGVSKCGDALLRTMLYEAAHALLTRGAKWSWLKAWGVRVAQRRGMRRAIVAVARRLAVILHRMWVDGSEFRWSKDSTAVPAVA

SEQ ID NO: 52961 - protein, 393 aa, unidentified
MICVGIDVAKDKHDCFILSSEGEVLADVFTIQNNAEGFDMLLQTIRRCARPEDKIKVGLEATGHYSYNILGFLLDKGLPTYVINPLHTNLYRKSLSLRKTKTDRVDARTIAAMLMSDVDLKSYTDTVYHNEELKSLTRYRFDKVRERAKLKQSVSRLVTILFPELEKLVSSLHSASVYALLSEFPGAKQISSTHMTHLKAVLKNASQGRYGQEMAETIRNAARSSVGSVMPAKSLELQHTIRLIRELDAEIEDIETAIQAIVDEMQSPITTIPGMGVRMGAVILAEIGDFSRFDSPDKILAYAGMSPSTYQSGQLSLSGAYSHMEKRGSRYLRYALYNATKHVCHWDPTFAAYLAKKRAEGKHYNVALSHAAKKLVRLIFAMEKSQRPYCAAA

SEQ ID NO: 52962 - protein, 343 aa, unidentified
MQTITTIGLDIAKSVFQVHGVDAGGQVIIRRQLKRRQVVAFFQKLPPCLIGIEACASSHHWSRELQALGHTVRLMPPAYVKPYVKRQKNDMADAEAICEAVTRANMRFVPIKTPEQQSGLMLHRTRHMFIRQQTAVINSIRAHLAEFGIVAPVGRKGVTELLRIVADPNDKRMPEVARACLAALGTQLLALKEQILEFDRMILAWHRSNQTSKRLHYIPGVGPMLATALVASVADPRTFRSGRNFSAWIGLVPKQHSSGGKERLGGISKQGDRYLRSLFVAGALAVIRYAKIHGAGHRPWLTALLGRRPTKVAAIALANKIARMAWAIMAKGERYKQPAALAR

SEQ ID NO: 52963 - protein, 347 aa, unidentified
MLYAGLDLSRQRLDVHVLDEEGRTVEVTTATPDVFGLRELVARIARHGEEVSATIESMNGARFVHDQLELYGWDVEIADAVKVKGLAPLAAKTDKIDAWVLAELGRRDLVPAIWLPDPSVRAERERARFRLHIVRHRTALKNRIHATLIAFGHPVPVSDLFGVRGRELLASLAIPEPWATTLGTSLRLVDELDAEIAACERELRSRGADHPYVALLQTVPGIAWVLGYTIAAELGDIGRFSSPKKLAGYTGLCPLVRQSGRRDDRGPLAKNGPKYLRWALIEAATHAARHPAYRERYEHTKQRLGRQRGSKVARVELARELTTAIWHMLTKNESFAPGRPPARPLVA

SEQ ID NO: 52964 - protein, 347 aa, unidentified
MLTEPADYVLGVDTHADAHAFALVDARSGALLREYALPACRSGYRQALKLARRQGPGRRVWAIEGTGSYGAGLTRFLEAQGERVFEIERPQRRGRQGRLKSDALDALRAARVALAGERLSQPRAAGEREALRILLVTREQAVSVRRAGLNELRSLLVTAPDELRERLRALPRGRLVSACLKLRWRTQSDPALAASRLALKACAERVSQATRQAAELEGEIERHVRSLCPQLLALRGVGPISAGIVLTAWSHKGRLRCEAAFARLAGAAPIPASSGKVCRHRLDRGGDRRLNRALHTIVLCRRRNDADTIAYIARRVSEGKSEREAVRCLKRYLARSLFRLLERHATT

SEQ ID NO: 52965 - protein, 365 aa, unidentified
MPRTERGSGLADDGRLRGLNAKMEVSTIGLDIAKSVFQVHGVDESGATVIRRQVRRRHLLGFFEKQAPCLVGMEACATSHYWARQIAALGHEVRLMPPHYVKPYVKRNKNDMADAEAICEAVTRPTMRFVAPKSEEQQSVLVLHRTRELLVKQRTMLANAIRAHVAEFGIVAPRGIPRVKELLAVIADPDDERLPPGARTCLEGLARQFGSLHVEIRAAEKRIHALHRSNETSQRLATIPGIGPIIATALAASITDPSVFKNGRELAAWVGLVPRQSSTGGKERLGRISKQGDQYLRWLLVAGAMSVIKSAKRRETTKRPWLDELIAKKPIKVAAVALANKMARTAWALLSHGGTYREPVVAAAS

SEQ ID NO: 52966 - protein, 356 aa, unidentified
MIPITHPNVPGIIIGVDTHKEEHVAVAVDKLGVRIGQHKLPTTDTGYAGLEHWARRLGEIDAFGVEGTGSYGAGLARFLRSQGRRVIEVNRPDRSTRRRLGKSDPTDAEMAARSVLAGVAHDRPKSGVDKVEMIRMLKSTKDSAMKSRTQAINQIKAIIITAPVELREVLRGLATNRLVLRCAKLRPGQLGTPTAAAKYVLRSLARRHTQLTQEIETLDAELARLTLAFAPALMQSFGIGADTAAALLVTAGSNPERLKSEAAFAALCGVSPIPASSGKTNRHRLNRGGDRKANAVLYRIVIVRLRYHDRTRTYFTRRIEEGKTKTEVIRCLKRYVAREVFGILQDIGKRHASQNA

SEQ ID NO: 52967 - protein, 368 aa, unidentified
MWCGVSETLEQEESEMNATTVAVDLAKNVFELAIADVHWKILERARLTRAQFERWFDNREVDLVVMEACGSAHHWARTLRARGIEVQLLPAQYVRAYVKRNKTDAADCLALLEAARAQDIKPVAVKSVEQQALQALHRIRSGWMSTRTRRINTLRGFCREFGLVVPEGAVTGLAQIARYLADERSGLPAMLRPSMRLVLEEIRLMEARIGQLEQELAALARQSPACQVLLSVPGIGLLTSTAMVAAVADPRSFDSGRRYSSFLGLTPREYSSGNTRYLGRISKRGDRYIRMLLTHGARSILRAATVARRAGRQIDRLKTWALQVQARTNHNKAACALANKLARIAWAVWVKHEKYRAEPAPATPSFSD

SEQ ID NO: 52968 - protein, 323 aa, unidentified
MQGKVSFQEDAMPVVYAGVDVSKEWLDIHLHPLGESRRFCNDKTGIRQLKRLLARHRLASIVMEATGKFHRPAHRSLWLDGFAVAVVDPLRARMFARACGYLAKTDRLDARFLALLAESLRPPADTPPSPHVEALQELVNARSAAKCDITALQNRSKTATTALLRGELNRLVRRLEQHVERLDKEIERCVGEDPQLCRKAEILTSIPGIGRVTALALMAGMDELGTCSGKQAAMLAGLAPIANDSGARTGRRSIRAGRPAPRRALYMAALSARRYNPALARFADTLKAAGKPAKVILVAVMRKLLVLANCLLSHDRLWTPNPP

SEQ ID NO: 52969 - protein, 313 aa, unidentified
MQDLLEICCGLDVHKETIVACLLKGSVNDDKPQKTIRTFSTLLPGLEELKAWLESENCRHVAMESTGVYWQPVYNIFENALDGTMVVIVANARHMKNVPGKKTDMKDAEWIATLLRAGLLNGSFIPLQTVRELRDLTRYRKSIIEELSSQKNRIEKYLQSCGFRLSNFLTDIFGVSGRAIINHIAEHGSITAEEVESYVKTRARNKLQEIKLSVNGRMNGHQRKFLRLLLKHLDETYEHLCEIEGDINSELEKFKRQIEQLDGIPGIDKTAAAAIIAEIGIDMSKFKTAEHICSWAGLSPGNNESAEKKSPLE

SEQ ID NO: 52970 - protein, 338 aa, unidentified
MSKITTIGLDLAKNVFHAVCCDEHGQVVRKRMLRRPQVLKYFANLPISLVGMEACASAYYWARELDALGHEVKLIPPQYVKPYVRGNKNDYNDALAIAEAVVRPEMRFVAAKTTEQQDIQALHRLRERCLGDRTALCNQLRGLLAEYGLIFPKGVNTLRRRLLEMLEDGENGLSDLFRRLLAQGYRQLRELDEHIDGYTRELERQSRQDDACQRLQTAPGFGPIVASVFHSVVGNGEAYRRGRDVSASLGLVPRQHSSGGKEVLLGISKRGDRYLRSLLIHGARSVVIQAKTKDDRLSRWINRVVSARGFNKEVVALANKMARIGWVILAKKTTYQAA

SEQ ID NO: 52971 - protein, 345 aa, unidentified
MPIVGGLDIHRKQLTFDYLDTATGEVKRGQITRADRGHLRAWLARFGGRDDVAFALEGCTGWRYVAEELAGAGVAAHVAEPADTAFARGRKRHAKTDKTDSRHLRELLAEGRLPECWIPPSHILECRALLETYHDLRAEHTAWVQRIHAVFFHQGAPALGEAALRIDRDLEALRAAAAAHLSPAGQLQVVTALGMLAALEAHLDVLRHRLLAAARSLTGARVLAARLYGVGPVTGLALTCWLGGAGRFSSARKAVRFAGLDITVYSSDSRRSPGRLSRQGPAVLRWAVFEAGKTHARASAPDHAYYAAVRDRKDGKRAALSEARKILRQAVHILAELGDDALTTA

SEQ ID NO: 52972 - protein, 347 aa, unidentified
MEKITTAGIDLAKRVFALHGVDGAGRVGLRKTVRREQLMQTVAALPPCLIGMEACSGAHEWARRFQELGHTVRLMAPVFVAPYRKSGKNDGNDAEAICEAVSRPNMRFVPVKSAEQQAILALHRVRQGWIGERTATINRIRALLTEFGVVLPNRAQHVRRDAMAAAEGLPALARRALEDLRSHLGALDERIGAYDRELEAQARASEAAQRLMQIRGIGPITAVAIVATVGNARDFESGRQFAAWLGLTPRQHSSGGKQRLGHISRRGDAYLRCLLVQGARSVLYTAVRHHDRLSRWVCTLRARRGDHKTLVAIAAKNARIAWALLAKNQTLQTVWQGILPSAKDCKR

SEQ ID NO: 52973 - protein, 400 aa, unidentified
MRAVFGIDVSKASSEVAILVNGEKVHGYTMSNDALGFARLLGDLRTVHKPEIIFEATGVYSRRLQAFLDEHGYAYTRLNPLEAKKQLDSLRVRKTDQIDAEKLAQSQFVLNRKPTYVQEEVYQNLRALSRFYQNLTEDIVRAKNRLHKVLQVTFPELETILSTPSGQQYWNLVIDFPCKDFVLELSKDELSESIRQSTSKRISDKRVAYLVEKLTALANQSYCAVKKTSPIMEEVRYYAKELLRLSGQRQTVLDQMVELAQPLPEYDILLSIPGIAETTATSIIGELGDIRRFQSTNQINAFIGIDLRHYESGNFLAKEHITKRGNPYARKILFKCIHNIASASHTNPCHIADFYEKRKRQSQTTSTKPHTIASIHRLIRTMYYLITHNKLYDYTSTQNR

SEQ ID NO: 52974 - protein, 343 aa, unidentified
MTKDIMIGVDLAKNVFQLHAASMTGQPLFRKKLSRQSFPKFMAEQAPAVVVMEACGSAHYWAREMILLGHEVKLIAPHYVKPFVKRQKNDAADAEAIVIAAQRPEMRFVDPKSAEQQSRAILFRARERLVHQRTELVNALRACLYEYGHVVPQGIHQIRRIAEILAAPNSDLPDLMREECRDLLEQIAEKTVRIDARTAKIKALAAEADTARRLQTMPGVGPLTALAVEAFAPPMENFRCGRDFAAWLGLVPRQFSSGGKERLGRISKAGQSDIRRLLIIGAMSRLNWLGRKSIPEGSWLARIAARKPRMIVAIALANKMARTIWAMLTKNEDYRVPAQVPAA

SEQ ID NO: 52975 - protein, 418 aa, unidentified
MQVEIDEPEIVERVAALDVGKAEVVCCARIPGPDGRRMQEVRTVATMTAALLGLGDWLAALGVTRVVMEATSDYWRAPFYLLEDRFQTWLVNAKDVKHLPGRPKTDRLDAVWLCKVAERQMLRPSFVPPPAIREVRDLTRYRVDLIGARTAEKQRVEKLLEDALIKLSVVVSDLFGVSGRAMMAALIAGERDPAALAGLARGSMRSKNARLTEALTGRFTEHHAFLLTRMLARIDALSADIATVQDRIDAQIAPFAQAVTRLDEIPGVGVTAAQTIVAEIGLDMSRFPTPAHLASWAHFAPGVSESAGRKKGNAGTGHGNRYLARVLGEAAVAAGRTDTFLGERYRRIAHRRGKKRAIVAVGRSILTIVWQLLSDENVHFIDLGPGYYDSRTNPQRKVRNHVRELQALGFTVTLNPAA

SEQ ID NO: 52976 - protein, 345 aa, unidentified
MPIVGGLDIHRKQITFDYLDTETGQVQRGQISPADREHLRAWLARFAGRQDVAFAVEGCAGWRYVAEELAAAGIAAHLAEPADTAFARGRKRHAKTDRTDARHLRVLLAEGRLPECWIPPARILECRALLETYNDLRRERTAWAQRIHAVVFHQGAPALGEGALRTEKGVTALREVAAAHLSPAGQLQVATALEVIDALEARLHVVRHQLTDAARHLAGARALAARLYGVGPVTALAITCWLGGAGRFSSSRQAVRFAGLDITVSSSDRKGPPGKLSRQGPPVLRWAVYEAGKAHARTSAPDHRYYATVKDRKNSKRACLSEARKILRQAHHILAELGDDALAAA

SEQ ID NO: 52977 - protein, 339 aa, unidentified
MENVTLLAIDLAKNVFQLHGVNKTGKTIHRKQLKRKDLLSTIANMPPCLIAMESCGGANHWGRQFEKLGHQVKLINPRYVKPFVKRNKNDANDAEAIAIAAQQTEMPSVSIKTLEQQDIQSLHRIRQRLVAQRTALSNQTRGLLGEYGVVMPLGISVLKKNIPLILEDGENELTMMTRELLQELYEELTALEARISKFTKRIELLHATNESCQAISKIPGIGPMTSTIILTTLGDPKHFKNGRHFAAFLGLVPRQYSSGGRTRLLGISKEGNRYVRALLIHGARSVVRCIDKKSDPQSQWLKILVERRGKNKAAVALANKNARVIWSMLAKNEAYRLNG

SEQ ID NO: 52978 - protein, 391 aa, unidentified
MRKPQQRDLNDLSRSLTALDMDATLIAVVEMSQSSWLVAGIVPSVERQPLKKLTTDERALLGLLQRWRREAESRGAQITRIAVAFEAGHDGLWLARWLRAHGIEAHVIHAASVAVSRQHRRAKTDRLDTELLKRAFLGWLRGEREHCNMVAVPTLAEEDAKRPSRERENLVGEQTRLVNRLKAAFVRLGIRGFNPKLKAAVERLDALRTPEGEPIPPNMLAELKRDMERQRIVKQQIAQIERTRLDRLADAAAEGPNAMVRLLARVIGIGVETADMLVREVLSRNMRDRRAVARYAGLTGSPDESGAKRREKGLARSGNARVRRGMIQLAWRFLMFQKDSALAQWFRGRTESAHGTRKTMIVALARKLLIALWRLVREGVVPDGVALRPVQ

SEQ ID NO: 52979 - protein, 355 aa, unidentified
MNSEKYIGLDVHQATIVVAVTDSSGKLIMESILETEAATILQFFAGLRGTLAVTFEEGTWSVWLYDLLNPHVDKLVVCNPRKNALLKDGNKNDRIDARKLAELLRGNQLKPVYHGENGVRMLRELSRSYLTIVKDLSRVMNRLKAVYRSWAIPCAGRDVYYRRHRAQWLDKIREAGVRRRAERLYEQLDMLQHLRQEARRELLAESRKHAITARLRQIPYLGPIRSALAVALIQTPHRFRTKRQLWAYSGLALETRISAEYRMVEGQVRRSKKLLCIRGLNKDHNHDLKGLFKGAATMASVRPGPFQDFYRAALAKGIKPTMARLSLARKIAAITLTLWKKGESFDAEKLKSQAA

SEQ ID NO: 52980 - protein, 309 aa, unidentified
MKQEVVYCGIDVAKEQLDVALGQERWRVPNTREGIARLLKRFKGQRLKLHVICEASGGYEKPIVRALQKSALAVSLVQANRVRQFARAAGVLAKTDQIDAAILVSFGRAMRPPPSVAQTEQIARLRELDAQRRHLSRLLSAEQNRLAQLSCAELRSLSRSLISKIKKQIATIDARIASLIAQDQNLSVKAQKLTSIVGVGARTAALLLAQMPELGSLNRAQAAALAGLAPFNRDSGSMRGKRTIFGGRRAVRTGLYMAALTAARYNHVLAPFYQRLCAAGKPSKVALTAVMRKLLLALNSALAPTLNPA

SEQ ID NO: 52981 - protein, 353 aa, unidentified
MEQITTVGVDLAKDVIVVCASNAAGAVVLRKQLSFSGFAAWAANVPACVIGMEACSTAHHWHRRLSDLGHTPKLMAAEVVAPFRMSRGAKNDHNDAEAVMVAVQQPTMRFVSPKSIEQQAMLSWHRARSGFIEERKSLLNRTRGLLAEFGIWVGRSAAMLIRRLPDLADEPGLPDLFKPILLHTLEHLRQLDQRIQECDARIHAHARQSEAAQRIQQLSGVGVLTASAVVATVDSAKDYRNGRQLAAWAGLVPRQNSSGGKSRLGKITKRGDSYIRGLLTQGARSTLQSALKRQAHQRSRLQQWIVALHGRVGYHKTLVAIANKHLRMIWAILAKGEDYDPNAWQRYKGSAAC

SEQ ID NO: 52982 - protein, 372 aa, unidentified
MSIGVDLHKTQFTVCELSEDRKIVEFIEYPTNDSGYEEFIKRLNNLIERGYEVSTAVESTGNTRYFKNRIVTAGVLVIVVNTLKFKVVNESVKKTDRHDARTLAEFLEKDMLPESHLCSQESEDIRRVLKSRAFLVKTVVALKNQVHALLLSYGVETKKGQLQSKIGRQRILDGLEDHKSFGSAARAIKPLLDTINQVSIEVKKLEKVLNELVKDDEDVELLKTIPGVGPITASIIRAFTDDIQRFESSKKYAAYAGLVPWVQNSNQTIHHGKITKRGPVELRTAFVQVVMGMVRSQKKTQSYRIIRKYRYMKTHKGSGKSIIATARKMSTVIYTMLKNREPFDELKMAYVTEYKEIQAAVFDTALAEEKSA

SEQ ID NO: 52983 - protein, 364 aa, unidentified
MYDSMTTVTVGLDVHARSIRVAAVRADELLEERTLPYDEEAVELVLRRWPVVRCCYEAGPTGFGLQRFLVERGIDCQVVAPGLVPQRPGDRVKTDSRDARKLARLLAGGLLEPIHVPSRELEAARDLVRAREDARLDRMRDRHRLSRFCLRHGRALPTSSWTVARRKWLSEQRFQFAAQQQTFDSYVHTVDLVDARIQALERAIRETAEEEPWRRLVASLRCLRGIDTLTALALVAEIGDFDRFSSAEEFMAFVGLVPSEHSSGDQRRQGSITKVGNSHVRRLLVESAWHARRRPTVGYQLARRQRGQDAVVVERAWRCQQRLYQRWQRMAGRGKPQQKIVVACARELAGFVWAIATEQPLRST

SEQ ID NO: 52984 - protein, 421 aa, unidentified
MKGLKSKRVRAVKEDTLIVTVDIGVASNTGYCVTLGGRDIKPFKFDNSREGFEKFWHMIVASKNRFGCGDVMVGYESTGPYAEPLAHYLMDKPVTIVQVNPMHTKRMKEVHDNSPLKTDDKDPRVIADIIRLGRTLAVIVPEGDAAYLRRLNNARERHVGEQTALLNQLQQLVFVIFPEFKTVLKDIKGKTARYLLTRYTTPEKISTVPREALGEEMRKRSMGKFGNKDAELLIGLARNTIGIKEGLAGIAMDIRHILLQLEAEARFIAEIEAEMVVTLQRIPRSGRLLSIKGLGVVSVAGLIGEVGDFSKFRTRSEIMKLAGLDLYEVSSGKRKGQRRISKRGRSLLRKILYYASIQMVRKNGIMYDYYTRLTNRGMLRLKALVAVARKLLGIIHAIVRDDRDYVGAYHAPKRRLIQKAA

SEQ ID NO: 52985 - protein, 341 aa, unidentified
MDYYAGIDVSLEASSLCVVDASGKIVKEAKLSSEPEALIAWFKGLPFGLARIGLEAGPLSQWLYAGLKQAGCAVELLETRHVRDAFKAMPIKTDRNDARGIAQLMRLGWFRPVHCKSEPAQATRAVLTARKLVQGKLHDIEMSLRGILRGFGLKVGRTTKAGFASRIRELTEHHPALKAIAKALLAVHAVLLQELNGFETQVRKLARGDARTRLLMTTPGVGPIVGLTYVAAIDDPARFSSSKTVGAHFGMTPKKYQSGEIDITGRISKIGDKGVRTALYEAAHVILTTPVKGGTLKSWAAKLAKRSGMQKAKVALARKLAVILHRMLADGSAFDAAKAAA

SEQ ID NO: 52986 - protein, 353 aa, unidentified
MEYGAIDLHKKESQVRILAESGEVIDQRIRTTRDRLTALFWGRPHARILIEASTESEWVAQHLETLGHEVIVADPNYSLMYGHRSRRVKTDRRDVAALAEACRHGIYRCAHRRSSRQRVVQWHLNVRRELLDARTRLIAVVRAITRSQGYRIVGGATDTFLTRLAALDLPVSVSESLVPVRSVMERLNQELADADQRFEALVAEDPTIKRLTTCPSVGPITATAFVAALDNVHRFAGRRGAAQVTSYLGLVPREYSSGEQHQRGRVIRSAHPYVRVLLVQAAWRICRSSDARAAALRTWAQALARRRGQNIAIVAVARRLTRILYAMWRDEMDYQPDRIRSVRRDTVAAKPAA

SEQ ID NO: 52987 - protein, 331 aa, unidentified
MSVFIGIDVAAKSFDLVVRKHGKNQVVLTFDQSPKGHARALKKLQSVKPECIVMEATGIYYLDLAVALHSGDMPVSVINPRSFKHFAQLKLQGNKTDGIDSALLAESAERMGPRLWTPPAPEKLGLRDLGRQINRLVYARTQAKNRLHALESKRDTLALILEDERDGIELLDRRIERLKQAALGFIQSSPELAQHWANMTAAKGIGDASALAILAELCVLPDNMKAPQVSRYAGLDVRVTQSGTSIHKPGRLSKSGNTYLRSALFMPAMIAIQYEPRAKAFYDTLVGRGKKKIQAICAVMRKYLAGLWACIQSGTPFNAELLFSDQHMKNS

SEQ ID NO: 52988 - protein, 336 aa, unidentified
MYYVGLDVHARSISVCILDEVGKVVKKMTYQGWWGGFPKWLRRRIEGRFAAVFEATCGYGWFFDQLTALGARVSVAHPGHLRLIFHCKRKTDRIDAEKLAKLLYLDMVPPVHVPSIHTRQWRELIEYRHRVVSRRTRAKNSLRTLLRTYAIEGPKGLWTKRGRAWLKDLALPGLTVELRRDQFVEDLERLTGQIGRAEAVLDGIADRHPGVGLLRTIPGVGVRTAEAVVAYIDRPARFRRNQCVGAYFGLVPCEDSSAGKRRLGHITKDGPATVRKLLCEAAWQVVRRDAGMRAYFERICRGKKDRRKIAITATAHRLVRAMHAMLLTGEVWRGAA

SEQ ID NO: 52989 - protein, 342 aa, unidentified
MTIQTIGLDLAKHIFHVHGVDATGQVVVSRALQRIEVSRFFANLPPCLVGMEACGGAHHWARTLKLLGHDVRLISPQFVKPYVKSNKSDKNDAEAICEAVSRPSMRFVPVKTDEQLDILAVHRLRSRLVANKIALINQIRGLLAERGIIMAREVASLHRRLPEILETVDNGLSDNFRALLADLYRQLVELETQIHQYDRQIRCIYTQHEACQRLGAIEGIGPLTATALYASAGDAQVFKNGRQFAAWLGLVPKQHSSGGKPRLLGISKRGDVYLRTLLIHGGRAALGRAGHKTDPRSQWLCALRARHHYNVAAVALANKNARIAWALLARGETYRRAQPTAA

SEQ ID NO: 52990 - protein, 350 aa, unidentified
MIAINKDIIATIGVDLGKNTFHICAMNDKGTILLRERLTRAALPKRLANIPPCRIGMEACAGSHHIGRQLTALGHDVRLMPAKYVKPFLKSHKNDYRDAEAIAEAVQRPTMRFVPFKSDEQLDLQALHRVRSRLVGQRTAVINQIRAFLLEHGVAVRQGPGALRLALPSILAQRTDVLSPRIIHLIEGLTGDWRRFDERIADVTREIEQLAKQDQYCKGLMGVPGVGPMTASAMVAAIGDGAAFSRGRDFAAWLGLVPKQISTGDRTILGGISRRGNRYLRTLFIQGARSVLQRSDGWEKKSFGCWLIAASKRLHKNVLAAALANKLARIAWAVLYNAREYDTTLAPKAT

SEQ ID NO: 52991 - protein, 372 aa, unidentified
MVPSQVCPAARDVQPPSPRSRVIEQILEGQVVVGVDTHDLNHVAMGVDHLGRRLGSISVATCPAGYREFLEWAMGLGDIAAVAMEGTGSYGRGLCALLQARGIKVVEVARPSRRNRRNRGKADLMDAESAARAYLGGEVSAEPRGSDAPVAMIRSLRVARDALVNQRTQSINQLRALIVTADAELREALTGLSATQLINCVSRFRLAGLACPSDASRFSMRQLARHVVDIDSRVAELDDQLTPLVSNRAPELLAVHGVGVEVAGNVLVAWDGARRIRSEAAFAALCGVAPVPASSGKTNRHRLSRGGDRAANRALWRIVLTRMRTDERTRDYVARRQAEGKSKREAVRCLKRYVAREIYHVLQRMAPAEISA

SEQ ID NO: 52992 - protein, 370 aa, unidentified
MRQSTPLFVGLDVHKDSIAVAHAEGGTAAPPVFVGAIGSRQADLDQLLRRLHSKAAALTVAYEAGPSGYGLYRYLTAKGVACHVVAPSLIPRKPGDKVKTDRRDAVTLARLLRSGDLTAVYVPSVEDEAIRDLCRARDAARVTMKDAKLRLKALLLRLGLHYVGRADWNAAHRRYLAKVVCPTPAQPIVFQESVRAVDEQADRVARIETELRAAAPRWRLDPVVQALQALRGVQWRVAITVVAELGDLTRFENPRQLAAFVGLIPSEYSSGGSRRQGGITKAGNGRARRALIEAAWAYRHPAKVSAHIQQRIDHLPKPLQDIGWRAQVRLCKRFRRLTARGTHPNVAVTAIARELIAFMWAIAKAVPLTT

SEQ ID NO: 52993 - protein, 310 aa, unidentified
MTSQVTVIGIDVAKETLSLCDARTGEVFELPNEASAIKAWLKTLPSNCAIAIEATGIYHVMVASLAHARKHRIYIINGFRLSNYRKGIGGRNKDDRSDAQLLARYLSHEQAQLEPWQPPSKVYCRLQALLHRRAVLVRNVTSLRQSFSQDPMLAKALKPVLKRMAVLEQRLETQIQIALEEAGLKEQSKRCQAIEGIGPLTAAALILAFQRGHFRNSDAFIAFLGLDVRLKESGRYSGRRKLTKQGDPEIRRLLHNAAMAATRTKRWRELYQGYLARGLKTTEALTVLARKLARIAFALMQTQTTYQLRG

SEQ ID NO: 52994 - protein, 344 aa, unidentified
MQVHFVGLDVHKQVIAYCIKTPSGEIVREGTIAARRESLDQWVVTLPQPWHGGLEATMFSHWIYRHLEPHAAKLEMGHAARMKAITAGKKKSDKIDARTIADLLRCNLFPACFVISPELGALRQQLRFRGLLVQQRVRFKNKTAGLLMEAGVEYQRRRLHGQRYFQDLLQHHAEIGEHLRPLLEFNQREIQTLRRMDRQIIARLQQHPRLQARVKQLQTIAGVGQITALTWALEIATPQRFASLKRALSYCGLTSALRESAGRQMRGPLSKQRNRYLQSVLIEASKLAPRCNALLREVHRKALQKGAHKNRATLQVARKLVAYLLAADRAFSAQESLAAAPAAA

SEQ ID NO: 52995 - protein, 385 aa, unidentified
MLHANDLSRSLNCLEQDRTIIAVIEMSQSNWLVAGIVPGIERHPLKKLAPNEEDLLRLLIRWRAEATKKGRTIVRIAVAFEAGRDGFWLARWLCARDIEAYVIHPTSVAVSREHRRAKTDRLDTGLLKRVFIGWLRGEPDHCHMAAIPTLEEEDAKRPNREREGLVRERTRIVNRINSCLVRFGIRNFKPTLRKAPERLSMLCTPEGVPLPPNTLFELRRDMARLRFVIEQIKEIEETRAQRLEQAPQENSHAMVRLIARVIGVGVETADMLVHEVLARNLRDRRAVARYAGLTGSPDESGSRRREKGLAKVGNARVRRGMIQLAWRFLLFQKDSALAQWYRARTEIDGRKRKTMIVALARKLLIALWRLVTTGETPAGVVLRAA

SEQ ID NO: 52996 - protein, 343 aa, unidentified
MQTITTVGLDIAKSVFQVHGVDATGQVVIRRQLKRRYVLAFFQKLTPCLVGIEACASSHHWSRELQALGHTVRLMPPAYVKPYVKRQKNDATDAEAICEAVTRANMRFVPTKTPEQQSGLVLHRTRHLFIRQQTAVINAIRAHLAEFGIVAPVGRHGVEELLNVVADPNDKRVPEIARACLSAFGAQLRRIKEQILEFDRLIRAWHRSNEMSMRLEEAPGVGPVLATALVAAVADPKSFRSGRNFSAWIGLVPKQHSSGGKNRLGSISKQGDRYLRGLFVAGALAVIRYAKIHGTKHRPWLTALLARRPTKVAAIALANKIARMVWAMMARGERYKEPVALAR

SEQ ID NO: 52997 - protein, 428 aa, unidentified
MIDQQHSTAASNLAAIDIAKDWNVALVQDTSGRRHRFKFANRGADHDRFVQFLRSLSGPVRIGLEPTGDYHRPLAHRLLREGFEVVSISSLALARFREARFGTWDKNDPKDAQVIIAMMEQGMVQIYWDPLLSGAHDWQELSNTYFHITLARTRLQHSLLLHHLPLYFPEFIRYWHSTRTTWFIHFLQRFPIPAAIRSLDREAFIAEAWKVVGRKVDKRAKLEEIYDLAGESIGVPVALDSPAIETFRLQLSRYAELNQQRDQLDRRAQELLADHPDYQLLKKLPGIGAITALTILAEAGDLRRFRHHRQFLKYCGLDLARSQSGQTKGREVLSKRGNKRLRLAFWMAELVAIHQRENAFRDKYERYLSATPFDADRKRKALTAVAAKMARVAYAVVKHGSDYQCFFEQRIPSGSIPLARAVEASSTS

SEQ ID NO: 52998 - protein, 345 aa, unidentified
MRKLIAGMDLHSNNVVIGLIDMDGKRVAHQKVECRLSEVVRFLAPYKKRLEQVAVESTYNWYWLVDGLQALRYPVVLANPAGMEQYSGIKHADDTNDAFFLAELLRLKILPTGYIYDPQLRPVRDLLRRRLTLVHQRTALMLSFKSLYTRTTGQEMTLSRLKELAIKEAQDLYDHPANQLIAGMQIKHIEQLTESIEKVEKVVLDCARELPFYSKLTTLPGVGKILGMTITMEVGEINRFAEPGRFASYCRTVEAKRTSNSKKKGENNSKCGNKYLAWAFVEGANFAGRYDPQCRRWYDRKVAKTSKVIATKALACKLAKAAWHVMAEGTDYDSQRMFGPAASTK

SEQ ID NO: 52999 - protein, 343 aa, unidentified
MQTITTIGLDIAKSVFQVHGVDATGQVVIRRQLKRRSVLAFFQKLPSCLVGIEACASSHHWSRELQALGHTVRLMPPAYVKPYVKRQKNDMADAEAICEAVTRANMRFVPTKTPEQQSGLVLHRTRHLFIRQQTAVINSIRAHLAEFGIVAPVGRKGVTELLHVVADPRDKRVPEVARACLAALGGQLLSLKQQILEFDRMILAWHRSNETSKRLHYIPGVGPMLATALVASVADPSTFRSARNFSAWIGLVPKQYSSGGKERLGSISKQGDRYLRSLFVAGALAVIRYAKIHGTGHRPWLTALLARKPTKVAAIALANKIARMAWAMMAKGERYKEPIALAR

SEQ ID NO: 53000 - protein, 349 aa, unidentified
MSILAEQFVHVIGVDTHKLTLTAAALNAGGGCLELLEVSADSRGHRRLVELGSRLAGPLLWAVEGTGSYGASLTEHLLAHGQTVTEVDRPKRPARKRGKSDEIDAIRAGRDALAMKRLNPPRRRREREQLRILFTTRQELVGNRTRLANHLMQLVVTASENLRSRFLDFGSHGAERLVRQCLASRCSSSLSAEDRTRLTTMRELAQMIRKLSADADRYEREIAILVEQMAPGLRQQPGLGALTGAQILLSWSHIGRMPSEATFAALAGVCPIPASSGQTIRHRLNRGGDRQLNSALHRVVLTRCRYDHTTRDYVVRRTAEGRTLPEIRRCLKRYAARQLFRFLNSLDKA

SEQ ID NO: 53001 - protein, 385 aa, unidentified
MQASNVCTPTIDHFGTILVAIELSRQSWLVTMHSPDRDRISRHKLPGGDHAGLLALIERAQERAARALGSVPAVVSCYEAGYDGFWLHRRLMAAGITNHVFDPASIAVEQRARRAKTDRIDGELLLRTLMAHWRGEPRVVRIVRVPSAEQEDARRDTRERQRLITEQTAHTNRIKALLRLLGMAVGNPRRRDWLIWLAAQRDWQGQPVPPRLAAELEREHARLMLVREQLEALSQAAVGADAPAAAAQMARRSALLLRLKGLGPVFAATLTNEVFYKDFRNRREVAGYCGLAPSPWRSGATNHEQGISKAGNPRARHKAIELAWLWLRHQPDSALSQWFRERTLNGSGRIKRIAIVALARKLIAALWRYLTTGLVPEHAVLKAKA

SEQ ID NO: 53002 - protein, 341 aa, unidentified
MEHCGIDLHLKSSEVCVLDEAGSVSERSRIPTSEASFRRWFGGRERMCICIEASGLSPWVARILTALGHEVIVANAQRVRLIAESTLKNDRVDAETLARLVRMDPGLVRPIRHRSEVTQRLRGMLRVRRSLVNSRTACLNTARGLLRSFGYRVPGQRPERVARALTTGKVPEALCGLVAPLVATALELDEKVRALDDEVIEVGRAFPEVERFQQVPGIGPLVALSYVLCIEDPSRFRGSRDIPSFLGLRPRMRESAERSHFGPITRHGDAEMRRLLVQAAHGCLRSRQDSELKRWAEQLAGRIGKKKAVVALARKLAVLLHRLWVTGEDYEALRHQVAAAA

SEQ ID NO: 53003 - protein, 377 aa, unidentified
MSKVLFVGLDVHAETIAVAVAEQGGEVRSLGVIPNRLESVRKLVHKLGPVKDLRVCYEAGPTGYVLYWQLTQLGVTCEVIAPSLVPTKAGDRVKTDRRDAEKLARCHRAGELTAVWVPNAAQEALRDLVRAREAAKRDQLKARHRLGKFLLRHGRQRPDAVKAWTKKHREWIQSHVRFEEAALEATLADYVEEVDHVAARILKLEKAIDEAIQQAPAEIRAVIEALQALRGVAQTTAASIVSELGSLSRFPTAPQLMGYSGLVASEHTTGNRVQRGGLTKTGNGHLRRVVVEAAWAYQHRPNVIGHLLRRQKNLAISDEVKAIAWKAQQRLHKRYKAMAARGKNKNQIVAALGRELLGFIWAIGVRTEQQQRPVKAA

SEQ ID NO: 53004 - protein, 332 aa, unidentified
MNGYKIVVGVDVSKNSFTATALYDNKKETFEVKSDPVEFEKKIKPYLKKFKQSDMLIIMEHTGVYHLKLANYLYENGYKVAVVNPFSIKKFMEAKMTRVKTDKTDSYFIAEYGRMFFDGELYKPKSDVEKEIEIKLKILEDLQKQLTMLRNQRESLAHVPMKKLKENLEYYDELIRKIEKSIKELEKEIKELTKKNYQEEYKLLKSIPGVSDRVIGVVISIFGGFKRFKSVKDAASFAGLNPSPYESGTSVKKSGSIKKMGNPYARKILYMAALSAIRFNKYCRELYERLVSKGKAKKLALVAVAHKLLRQAYGVLKSRRPFDENFCTWHLT

SEQ ID NO: 53005 - protein, 429 aa, unidentified
MDIVHPRVAGIDVHKKVIWVAVRLPGPGPGDRKVIVKSFKTFWRSLLKMTAWLAELGVTDTAMESTGVYWWPVYHALATAGVIEVCVCNAAHMRNVPGRKTDIKDCQWIAELHEHGLLRPSFIPGQQVAALRARTRYRKKLIEHRTAENQRLAKILEDAGIKIDLVASELLGVSGREMTGALIAGERDPRVLAGLARGRLRAKLDDLEMACDGRFTAGHAQMCRLHLDAYDHLTAQIATLDQLVAAAAGPFGAVIARLVTIPGIGQRVAEVIVAETGGGMARFASSAKLAAWAGLAPGDNESAGKRKKAPARKGNPHLRAAMTEAAWAVSRTASRPGARFRRLARRFGKLSATKAAVAVAHTLLCIAWAVMKHDSDYAEAGADYYDQRDQRNHEHLVKHHQEALSRLGYQVTLIPPSDGSPPPAQEPAA

SEQ ID NO: 53006 - protein, 370 aa, unidentified
MLDTTTFVGLDVHARSIKAVSLDVMTGEVRAATFGYDAGAVAEWVRSVDPRARCVYESGVTGFDLQKRLSGLGVDCVVGAVSKMIKPSADRRRKNDRNDAEFLARMLSVGNVVEVWVPDDECEAARDLTRALEDARDDLSRSKQRLSKFLLRHGFVFDERTPTGRRKGNWTRAHWSWIESIRFAEGADEEVLAYYVDAVRRAAEEKARLERLVEGEARKPRWRRRVDSLRCLKGVDTASAADLVFEAGEFSRFRNARSFAAWVGLTPSEHSSGESDRRGAITKAGNKHLRKTLVEAAWHYLTCSGRPKDLAKGQAPDPAARRHAAKGVRRLVERREALLARGVHGNKANVATARELACWVWAVGLMAEEA

SEQ ID NO: 53007 - protein, 440 aa, unidentified
MKKVTVFETVHEHSAAIDIGAEKIFVSPDGLEVVSYDTFTSGYYQCVEYLQQKGITEVAMEATGVYWIPLYFMLESCGFKVCLVNPKETKQVKGRKTDVKDCQWIQKLFSAGILRQSFIPEQKYMEVRQLVRERIDIIEMGSTYVNKMQKCLELMNIKLKEVISQIHGASGIKMIRAILEGNRDKAYLLSLCDKRIIARKGEAVLKALEGNYNDTYLFMLEQNLCMWEKHQEHLLVIDKRIELLLQQLSKDKELPLNESKPKPIRHHAPKVEGLHEMLLRLYGVNVSSVSGINDYTLLRLIGETGVDMSRFATNKHFVSWCGLSPKHHQTGKTNKRVKGTRCNKTGQIFKEIAQGLINSKHIAIGTFIRRIKARKDSAIAIKAGARKLAIAYYDTLTKGIDYVEAGTKKYEEQIVKREKAVLHKLAKKYNMDVIELQAAS

SEQ ID NO: 53008 - protein, 404 aa, unidentified
MWYVGLDWADTHHDVEVLDEAGKRVGARRFAHSHEGLNELKQFVLSIAASPDQLACIVETNHGLLITFLLEAGIPMYAVNPKMANQLRKAAGAKTDQIDAHLLAKLGRLDLAELRRLEPDSPTVQELKTLTRDQDALIQTQTRLVNQLTACLKEYYPAALHLFAKLQQRSTLVFLQAYPTPQTAQAASLEEITATLRTGKHTNPSKAAPKIFEELHCPQLVTTAVIVRAKQRLMLSLVKQLLVVIQEIASYDEAIRTLFLTHNDQQIWRSLPRAGKRLAPRLLAEWGDDRARYADANSVQTLAGTAPVPFQSGNYAKAHKRFACLKPLRNALHQFAWQSTRQEAWAASYYRRKRAEGKTHSMAVRALANVWVRIIYRMWVSNTCYQTATFEAAQLTHAPRQHVA

SEQ ID NO: 53009 - protein, 420 aa, unidentified
MKAWNQITHYAGFDWAKDHHDVIVLDVSGKIVADFRFEHTAGGWEQFREKLAAFAGVAVAVETKSGTVVEHLQEIDCCIFPVHPQSAKAYRQRKVPSGNKTDHVDAWSLADALRLDGANWKQLAPQEPLIKELRLLCRDEVALIRDRTALITQLRQALHDYYPAALEAFDDWTMPAAWAFIVAFPTPEALVKDGKRKWEKFLHVHKLGRPETYQRRLEIFARADRFAGSPPAIHAKSRLAVTRAKQLQLLQTQINEYRQEIRRLFAQHPDAGLFESLPGAGDKIAPRLLSEIGDDRVLFPDAQGLQCLAGTAPVSFQSGQIHRVHLRRQCNKSLRNAVHLWANLSREFCPWAETYYKALRAKGKSHACALRALGQRWLKIVWKMWQTRTLYDADLHARNQIKHGSWVLQLVNKADASPKT

SEQ ID NO: 53010 - protein, 422 aa, unidentified
MNLPIQWESYTGIIGIDWGDKQHAVCVWLQNGSEIVSKLNHTPEAIAEWVKALRDQYGGRFAVGLEQSRGSVCTALLEFADVLDLYPVNPLSVHLFRKTWHPAGAKNDPSDARLICEILRTHPERIRPLRPLDPGTQALKLLNEERRKLVDMRTKLVEQLTSQLKEYFPQALVLSGGDFSKRLGCDFLRKWDTLQKVQRARPDTLRQFYYNHNCRSKARVEERLNLLQTAVPLTTNEVLLKPRARMVSALVEQISLINTQITGFDQEIRNFFHSHEDAEIFRSFPGAGDALAPRLLAIFGSDRDRWSSAQELQRYSGIAPVVHQSGNSLKIQRRYARPRFDHQTLVEFARCSKLYCSWAAGFHELKKSQGMGENAILRALAFKWLRVMYVCWKQRVPYDDVAYTKTLQKHDAPCLAFIPSTI

SEQ ID NO: 53011 - protein, 420 aa, unidentified
MPNIEIGVDSMVKENFIYVGIDLHKETHTAVMIDCYNQKLGEITFPNRPADFPKLVTKVKKCNTDAKEVVYGLENAYGYGRPLAVWLIDKGYFVKDVNTAISHRQAKHRGAMYRKSDSDDAEAIALATLNMLDKLPDACPNDAYWSLGQLVHRRDNIMKQRTRLVNQLHEQLCIAYPSYKQFFNDISRPTALYFWEHYPSRKYLKGKSVEDLRAELVPVSHNKCSTRTCEKILDAIAGDKVKNNAYQDARDMVTLSIVSDLQHYDKQLAEVDKMLEQMYKMLGCTLTTIPGVNVITAVKILAEIGDIKRFSNANKLAQFAGIAPLHLSSSGKGKDVATKQGNRRLQATIYFLAIQMVHISSKGTPRNPVVRAYYEKRKAEGKTSQQALICISRRLISIIYGMLKHGTEYRMPVVESAGEK

SEQ ID NO: 53012 - protein, 333 aa, unidentified
MTILTESLFHKTFTQPASHLVLHNYLTKHFPQATYYSVYEAGFCGFMPHYRLRELGIKNIVINPADVPTTQKEHLQKDDPTDSRKLARSLRSQELTSIYIPQLSSLGDRTLVRLRASLVSDMVRYKQRIKSLLYFYGISFPEEFKKPHTHWSSRFMKWLRESVELAHETDRQSIQILVQQAEQQRKLLLEVTKKIKALSSSQKYEKNIKLLRTVPGIGLITAITLLTEIEDIGRFPNTDHFAGYIGLVPTRHSSGENARVGEMTFRGQKRLRKHLIESSWVAARLDPALLKCFNQYTMRMEKNKAIVKIARKLLNRIYFVLKNQMEYVPSVVK

SEQ ID NO: 53013 - protein, 310 aa, unidentified
MDAIVGIDVSKDRLDAHIRPAGLAFSVTRDAEGLTSLVDHLTPLGVKAIGVEATGGFETMVVASLGAAGLPVVVVNPAQVRAFATALGKRAKTDPIDAAVIAHFVEAIKPEIRPLPDAQTQLFADLIARRRQILTMLVAERQRETRAPERLRKSIKRLIKALEKELDTLDRDIDRVVQSSPIWSKNEGLMSSVPGIGPNIARTLMAELPELGSLDRRKIAALVGLAPWTRQSGQWRGKSFIGGGRAPARAALFMGAMVAVQHNPVLKAFRETLLAAGKPKMVTIIAVARKLLTILNAIIRDQKPWDPKSA

SEQ ID NO: 53014 - protein, 433 aa, unidentified
MKDVEDEALFCERVAGIDIGKAMIMVTVRVPSETRTGGRQQETREFGTTLKELTALADWLRSWQVEKAGMESTSDYWKPVYFVLERAGFDCILYQASQVKALPGRPKTDKLDSVWLAKITERGVLAGSFVPPEEIRRLRTHTRYRRKLVQMRTAQKERCEKLLEDAHLKLSSVISDIHGVSGQEMLRAITAGERSPKVLAQMARGVMRGKIKKLEEALDCSFFTEEHAFILAMMLDSIDSLTAQVTVLDEKIADMCRPYERQIEQLDAIPGFGIITAQDLIAEIGVDMTIFPTGGHLASWARTAPRVTESAGKRKGKNATGRGNPYIGGALGEASISTGRTQTFLGEQYRRMCKRMPKQKAQVAIMRKQLVIAHALLSDPEARYEELGPDYHERRKDTRRRVSSHLRELERLGYKVTVEAIDPATGELLPAAS

SEQ ID NO: 53015 - protein, 345 aa, unidentified
MTIVETRPITGGVDTHLDVHVAAALDANGGVLGVESFPATSVGFAALHSWLVEFGTLDRIGVEGTGAYGAGLARFLRGTGVSVIEVDRPNRQARRRAGKSDQLDAIEAARAALSGRASGIAKTADGNVEAIRVLVVAYRSGRDARIKCLNQIRHLGFTAPDELRERFRGVTVDTLARQAAALRPNPAGDCVAYATKLAMHTLGRRLVASAADNARLDSELTTLVQATAPSLVELYGVGTHTAAVLLVAAGDNAERITSEAAFAHLCGVAPIHASSGKVTRHRLSRGGNRQANHALWRIVFTRMGSDPRTRAYVERRLAEGRSKPEIMRVLKRYVAREVYQHLPGV

SEQ ID NO: 53016 - protein, 340 aa, unidentified
MVHVGVDLDKRSSQIAVLTEDGEVAQQRLPNDGARLEKFFAELPPHTPVAIEASGTWWWLVDLLEHLGHDPILSHPKQTKAIASARLKNDRVDAERLARLLRGDLLPTVWIPPATLREARELVRHRVQLVWLRGIVRNRLHAMLARRNLQPASTKSWLTQRGQRELQRLPLADTPNRIREDCSALLPLLDAQIRRLDGELSARWGGDPRVQRLTTIPGIGPFIAIVLVLELGDIARFPSAKQVASYVGLTPRIRASAGRIRAGHISKEGNRLLRWVLVLAATQAVRRPGPLRTWFHAVKKRRGKKVARVALARRLAEIVFHVWRQECDYFTVVRHGVVRG

SEQ ID NO: 53017 - protein, 333 aa, unidentified
MDEQGQRRQCWRFATQERAIIEHLKLIPAKTKYLAVEECGLGRWIAQVAKPHVTEVVVCDPRHNSSISRHHHKCDEEDSYGLARLYRLGDLKAVWQPKDQSRAVFKCAVQSYLDAVQRQTALKLQIKAHFRQWGVIPLGSSVYSRRGRETYLNELKEEGVRQQQRLLYELLDGALENESKARRLMIQQGKHFAEIDLLQSVPGVGRIGAHLFCAYIQEPARFEKPSQLYRYCRLGIRDRSSDNKPLGYQQLDRNGHGVLKAMTYRAWLVAMRLKKGPIYQFYLASLKRSGNEVHARLNTQRKVLITLWTMWKNNATFDSAKLFGTQAQLTATA

SEQ ID NO: 53018 - protein, 409 aa, unidentified
MDHIIMVGCDLHDQSMLLKLAMDREAAETQTVRNTSAARREMIQMLQQRAAQAGGAKILFAYEASGQGFGLHDELTAAGITCYVLAPTRIARSTQQKKRKTDEHDAQQLLDLLRAHVCAGNPLPTIWIPNAATRDDRELVRMRLDLTEKQTRLKAQVKGLLKRHAIRRTEEARQGWTVVYRRWLADQAISSLPAGAAKTLESLLRQLTCLEEEIKVADQNVLALALSERYRERFYAVLSLQGVGLITAMVFLTEIGDLARFDNRRQIAAYLGLAPCSFESGKANDRKGRITRQGPFRVRKVLCQATWTRVRSDDNEREAYQRLVKRNPKRKKIAVVASMRRLAVRMWHRAVHGRPPAEEPSAPDADRVRKSLPLGLDRRGLAEFPERKVISPRFRKKVHPSKARTDASR

SEQ ID NO: 53019 - protein, 340 aa, unidentified
MIHLGIDLHKSFSYFFAINSETGETKSEELPNDDETIRRYIRGFDEPIQAVVEATWNWEWLVYLLQEDGVDMKLANPLQIKMNTYARAKTDPVDAEMLAKLDKVDFIPECYITTKEERARIKLVRNRNQLLKARTVTKNSIHALLAQLNLYLPSSNMFGVKGRDWLRRLELPSPEDRIVRGALARVDLLDRQIGAIDKDLAKWKDIYPEVKLLQTVPGIGATISALIFAETCNTERFKNSKKYVSYCGLVPRVHSSGGKTYYGHPPKQANLDLKYAYTQTAMLIPKFDPAWRKWKNKWLEKKKRRTVRLIMARKIADCCYKMMRYGTEYREMINKGYLNL

SEQ ID NO: 53020 - protein, 298 aa, unidentified
MIKDSIVFVGLDLGDRWSQLQVLDQEGEVVEESRLPTRESALRRKFTTTGRWRVAMEVGTHSPWVSRLVKELGHEVIVADARKLRLIYRNPRKNDRIDAEYLARLARLDPQLLSPVHHRSPETQADLALIRSRDALVRVRTMLINHMRGMAKSFGKRLPACSADSFHHKVREAMPQPLQPALEPLLDTLGEMTERIRAYDRQIEDLCQSRYPETKGLRQVGGVGALTSLAYILSLEDPARFRKSREVGPFLGMVPRQNQSGGADPQLRITPGLARQGRQDRRRLLAAPTLDCPPRTGW

SEQ ID NO: 53021 - protein, 342 aa, unidentified
MKVYYIGMDVHKKNISYCIKTKSGEIVSKGNIASNRASLRRWVRGLPKRWIGAMEATLFSGWIYDYLKPYALELKVANPQMLKAIIASKKKNDRVDAQKIADLLRCNLLPECYMAPEKIRELRRVLRYRNLMVREAVRMNNKMSGLFMEVGAVYSKKRLHGKKYFSDLLERVEDVPDSVIDLLRLSRASYEMFNRVQKKLMDALNHEPLIADRVKRLMTIDGVGEVTALTWVLEVGDPMRFGATGQAISYCGLCSAQRESAGKNHRGPISKQRNKHLQTVLIEAAKLAPHWNAQLAKVHEREVKKGNCNRATLAVARKLVSYMLAVDKRGTEFVQAAEAKAA

SEQ ID NO: 53022 - protein, 385 aa, unidentified
MQSDMSKSLVVLNQDSTLIAVIDMGLSSWLVAGLVPGVKRQPRKKLGPDPKALLALLERWRAEAVKAGQTIERITVAYESGRDGFWLARWLRSRGIEAHVIHPNSIPVPREHRRRKSDRLDSELLQRAFLGWLRGEPKHCMMVHIPSIEEEDLRRPNREHKRLTKERTALANRLKACMVRFGIRDFNPTLKKAAQQLDKLVTPEGVSLPANTLTELGHDLARLRLVEERLKAIETERRTRLAAAAQDEHTTMMRQLNRVVGLGLEVADVLTNEVFCRPLRDRWAVARYAGLTGSPDESGKRRREQGLARAGNIGVRGNMLQFAWLFLVHQKDSPLAQWYQQRAQSGRKDIRKVMIVALARKLLIALWRFATQGVVPEGIRLREAA

SEQ ID NO: 53023 - protein, 333 aa, unidentified
MLPPNCGTATPYILRNTVGLDISKLTFDATAMVGKTEHSAKFDNDSKGLDQFSDRLKSLGCQNLHICMEATGNYYEEVADYFAQYYSVYVVNPLKISKYAESRFKRTKTGKQDAKLIAQYCRSAKESELVKRQKPTDEQYRLSRMIAAYAQIKSECAAMKNRHHAAKDEEAAKAYAEIIKAMNEQLEVLKEKIKEQTEKPNCKEGVKRLETIPAIGRMTAAVLFHHLTSSKFETSNKFAAFAGLSPQQKESGTSVRGKGKLTKFGNRKLRAVLFMPAMVAYRIRAFPDFIARLEEKKKPKKVIIAALMRKLAVIAYHVHKKGGDYDPSRYKSA

SEQ ID NO: 53024 - protein, 416 aa, unidentified
MNAVGIDVSSRKSTVAVLRPLGEVVCLPFDVTHDIAGLASLAEKLKALDGETRVVMEHTGRYYEAVAKALHEAGLFVCAVNPLLIKEYGANSLRRVKTDKADAVKIARYALDNWADLRDFTPMDAIRYDLKTLNRQFQLASKQRTASANNLIALLEQSFPGIRKCFDSPVRSDGTQKWVDFAHSFWHVDCVRKQPFPAFCERYRKWCKRHAYLFKLSNAEEVYALAKRAVVLTPKSKVVKVLVQEAANQLISISRSVEVYRAEMDRLAAMLPEYPVVMAMYGVGKSYGPQLMAEIGDVRRFERKQALVAFAGIDPMPNQSGDKNVRSNKSSKRGSPYLRKTLFNVIRTYLQCAPQDEPVFQFLNRKRAEGKPFYVYMLAAANKFLRRYYAKLRDYFASLNPLQPVDPISATLKASL

SEQ ID NO: 53025 - protein, 350 aa, unidentified
MLAELVDHVVGVDPDRDWITLAVLDAPSAGVVAEGRFPATKDGYDEAIAFVDGHSVDSERAWVIEGSAGYGRGLAVALERHGDWVIEFDRTTRKTKDGAKSDALDAVRAAREMLGRKRLSVPRAHEGVREAIRVHAVTRAAAVRARTGAINELKAMIVTADESLRAQLRGLRTAGQVAACARFRDRSCGAVHERATRSAMRFLARRIQLLDTEIDEHDRALKQLLDQAAPQLIAERGIGYITAAQFYVAWSHPGRCHSEAAFARLGGTSPVPATSGQNQTRHRLNRGGDRQLNRALYLVAVTKQRCDPVTKAYIVRRVAEGKTEREAIRCIKRFIARRVWRLLEHPPINT

SEQ ID NO: 53026 - protein, 387 aa, unidentified
MSQLNDLSRSLVALEQDATLIAVIEMGQSSWLVAGVVPGIERNPLKKLSPDRDRLLQLLHRWRKEAVQAGRTIKRIAVAYEAGRDGFWLARWLRAREIEAYVIHPSSVPVSREHRRAKTDRLDTELLKRAFLGWLRGEPKHCSMAAIPAPEDEDARRPSREREGLVGERTRIVNRLKANLARLGIRGFRPNLAHASSRLETLRTPEGAAVPENTLAELRRDMARLRFVKQQIKEIEGARARHLERASGERRAGMVRLLTQVVGVGIETADMLVQEVFSRNIRDRRALARYAGLTGASDESGQKRRERGLAKAGNARVRRGMIQLAWGHLVHQKNSSLADWYRRRTADARSGTRKTMIVALARKLLIAFWKLVTTGEAPAGLLLRRAA

SEQ ID NO: 53027 - protein, 463 aa, unidentified
MLPQMNAYYARLQSVPEIRIALNYSSIFSRKGGVYSMKKADLQSTLFVGIDISSRENVVCFLDFFSTTVLKSFAVPNNQPGAEQLANTILEFVAAKHDFTKVCVALESTSYYGIHIANYLSACSELMALGIEVYCLNHKMIANYKKSFLGKSKNDYVDAMVIADFARVGRIPSKPWRGSQFLALQRLTRHRLHLSKCLAREKTYMCSNIFLKFSEFSILDNENKPFSNNYGATATAVLTELLSTDDIATMSMENLVDFICSKGKNRFTDPERTAQLLQKAARDSYRLDKCLYEPLTIAIASSFNVIRSYAAELKTVNTAIEHTVRGLHPEAYTVLRSIPGVGPVYAAGLLAELGAIENFSSDDALAKYAGLTWRETQSGNFRADDTTMTKAGNSYFRYYLLEAVGSLIRHDAVYAEFYQKKYAEVKLHQHKRALVLTARKFVRLIFGLLVKNQLYSQSGVSRT

SEQ ID NO: 53028 - protein, 388 aa, unidentified
MSKPFDLSKSLAALAQDSTLIVVIEMSQSSWLVAARAPGLARDPLKKLAPEPEQLFKLIDRWREESRRAGRVVRRVCVAFEAGRDGFWLARLLRQHDIEAHVIHPTSIPVKRDHRRAKTDRLDTELLMRAFLGWLRGEADHCSMAAIQTLAEEDAKRPTRERESRVNARSRLVNRMKGALARLGIRGFNPKLRKAAEKLEELRTGAGEPLPPNTLAELRRDMAQLRFVADQIKQIEKAREARLEKAPREGAHPMVLMLASIKGVGLETAEMLVAEVLSRKLRDRRAVARYGGLTGSPDESGSRSREKGLARSGNARVRRGMIQLAWRFLMFQKESALAKWFEARTANGPRGVRKTMIVALARKLLIDLWRFVEDGTVLVGVELFDSRA

SEQ ID NO: 53029 - protein, 420 aa, unidentified
MKAYNVDNFAVLIGIDWADKKHDICEHPTGTNKYHYTVIKHTSEALHEWAMDIKQRYPKQKIAIVCELKKGPLIYALAKYDHLTLFTVNPCAVAKYRQAFKPSGAKDDPSDAFLQVEILTLHMDKLSVIEPESAAMRSLSQLVEYRRSLVQDSVDLSNKITATLKNYYPQALEWFKEKDTYIFCDFIQKWPSLTAVKKARKQTLLDFFESHNSHYCAVNNARLDSIKNAMPLTLDEGVIVPNQMLVGVLITQFKVLLKGIEKLDKAIKSAYKTHQDKKIFDSLPGAGPQLAPRLLVAFGSNRARYNDAAELQKYAGIAPVIERSGQKMWTHWRYSCPTFLRQTFVEWAGFSIRYSFWAKAYYEQQKAKGKPHNSIIRSLAFKWIRIVFRCWKTNTPYNESKYLAALKRRGSPLLKFAVNS

SEQ ID NO: 53030 - protein, 318 aa, unidentified
MLIHYIDIAKRNFVIAVSSLSKTKTETNNPKGIAHTIEYLKKHKVALVVTESTGGLEIPAAKAIRRAGIAVIIANPRQTHQFAQSQPLTKTDAKDAKMLAFFAQMMTQKEDWQTMPYQPPTEADEVLEALVNRRNQSADMRTAEKNRLHQVHETQVGSVKQLIAHFDRLIDESDKQIDDHTRTHFDGKAQVAEQIKGIGSITTATLMAMLPELGRLSHKRIASLAGIAPHPRESGETKFKSRCFGGKSAVRKALYMATVAATRFEPLIRDFYQRLLSEGKPYKVAVTACMRKLLETFAKFLSLPTAETQTQVFVYFRS

SEQ ID NO: 53031 - protein, 366 aa, unidentified
MSDVPVSFASFAGVDLHKQTVTLRAVDPAGRPIAALTCDTRCVDRIRDWMLALPRPSHLAVEAVGFVEWFIDRFRPCVDRMDIADATELANRRGKRRKTDRNDALDIALRLARGECPLGWIADEPVMQLRKLGRHWRCLSRTLSRAKHCMRSMLLAANLRGPRLDGAGAQKWLLANGHLLKEVQRQAFGNFLDIVCLIERQRESLRRKIIFANRQERFTVLVDLLKSVPGIDEIWACIIAAEVGDFSRFPNADALEFWAGMTADMKESAGRTQSGHITKAGSPSLRWAICKAALTLCRSDAKQEAIRRRLIHRLGKPKANVAMGRRLLRILFAMVRDGTVYQGQQPTGHQKAANKARMAKRKRTAA

SEQ ID NO: 53032 - protein, 356 aa, unidentified
MHGDDPPHLNCRANHATRRRTISLIPISNNVGPVNYFLRALLHSIIQAAEPLRLRSERPPAETRSKRLLAELQFELWIGDAAKIRTKRVRKQKTDRQDAQLILGLMLENRFPRIWVASWENRDLRQLLWHRHRMVQMRTRLMNQLQAVALNEGIRRKKGLWREAGRKQLQSVALAPWASQRRHDLLELLDGLSPRIAELSERVEEEARKCPVAQRLMTHPGVGPLTALAFVLILGQAERFGCGNQVASYLGLVPEEDSSGEHRRLGHISKQGNSLLRFLLVEAAQVTVRSDPEWRRKYFHLALRRGRKIAKVAMARRLAVRLYWMWRKEWDYARWKKFSPHAGQPGTGVGVQSNTE

SEQ ID NO: 53033 - protein, 345 aa, unidentified
MNNREKNNVNTMEKNNKDLYAGVDVHKDYCHGVLMDENGEVFKEEDFDNSVKGVRRFFGGFESAQVVIEACYSWRPTLERLEEFGLEVKMAHPRKTKAIAEAEIKTDSIDATTLAHLLRARLIPESYVPPDDIRELRDKTRARAGLGKERTRMKNKIKAELEKNRITMDINPFTIKGKEKLRGFGVCTVKYYLEMLETIQEQIDEIETDFEEIAEKYEEAKLLMTIPGVGAFSALLILAEIGDIDRFPDPEKLCSYAGLVPKVHKSGNITRYGNIKKAGSKYLRWILVEDVWIHVGCADSQLTKYYRKKKREKGDGRMAAIATARKMLTAIYYMLKRGEEYRSDG

SEQ ID NO: 53034 - protein, 350 aa, unidentified
MIIIGCDYHPGFQQIAFVDTDTGELRERRLQHPEEAEQFYRDLAAPGMKVRVGVEASGHARWFERLLAELNFELWIGDAAEIRAKRVRKQKTDRQDAQHILRLLLEDRFPQIWVPNGENRDLRQLLWHRHRMVQARTRIMNQLQAVALNEGLRCKKRLWRERGREQLESFKLAPWASRRRRDLLALLDRLNPTIAELTEAIEQEAEKCPEAQRLRTHPGVGRLTALAFVLIIGRAERFQCGKQIACYLGLVPLEDSSGDRRRLGHITKQGNSLLRFLLVEAAQVTVRSDQQWRSKYFHLAMRRGRKIAKVAMARRLAIQMYWMMRKEWDYEQVKKFGSHAGQPGNPHGVQ

SEQ ID NO: 53035 - protein, 403 aa, unidentified
MGAISGIDWASEWHEVHISDELGRPLAARQFAHDEAGISALIELLRLNEIECCAIERPDGLLVGRLLAAGIPVLAIHPNQLKAARDRFRAAASKNDRFDAMVLCELARTDRHRFPALAPSGDETLALKVLVRTREDLVEARVALANQLRSQLEAFWPGAERIFADVDSSIALAFLERYPSPSDARGLGEKRLASFLARHGYCGRKTPSELLGRLRHAPQAIVGELEADARRAAVLGLVAALRPIVCQIGQLTSQIAGAIRTHPDGPIFLAFFRDPKSVLTAAGLLAEVGDNRARYPTNDALAADGGQSPVAVQSGKRTSASFRWACDKRLRNHISTLADSTRHWHPWAKRLYTRARERGADHPHALRIVGRAWTRILWRCWQDRTPYDPSRHKALRNVLADRG

SEQ ID NO: 53036 - protein, 345 aa, unidentified
MSIVGGLDIHRKQITFDYLDTGTGQVRRGQISPADRAHLRAWLERFAGRDDVAFAAEGCTGWRYVAEELAAAGIAAHLAEPADTAFARGRKRHAKTDKTDCRHLRQLMAEGRLPECWIPPSHILECRALLETYHDLRAEHTAWVQRIHAVLFHQGAPALGEGALRTEQGLAALRAAAAAHLSPAGQLQVATALEVTDMLESRLHELRHQLLDAARHLTGAKVLAARLYGVGPVTALAMTCWLGGEGRFSSSRKAVRFAGLDVTVWSSDRKGPPGRLSRQGPPVLRWAVYEAGKTHARSSAPDHRYYAQVKDRCNGKRAALSEARKILRQACHILTELGDDALAAA

SEQ ID NO: 53037 - protein, 310 aa, unidentified
MDAITVGIDVSKDWLDVHVLPSQESFRVGTDAAGLDHLKARLDALSPARVALEATGGLETAAVAQLHAAGLAVVVVNPAQVRSFALALGQRTKSDPIDAAVIAAFAAATRPQVRPLPDAQTRLLADLVARRRQILAMVGAEQNRLHRAGGTQTQKSIKRLLAALKRELASIDADMDGQIRKSPLWLVRQNLLTSVPGVGATTARTLLAELPELGSLDRRQIAALAGLAPYTRQSGQWRGKSFIGAGRTSVRTALFMAGLVATRHNRAIKAFRDRLVAAGKPKMVALIAAMRKLLTILNAIIRDQKPWRDA

SEQ ID NO: 53038 - protein, 430 aa, unidentified
MEVIYPKACGIDVHKSFIVAVICDSTSVKPQYLRKRFSTFNNSLIEFRNWLLENDCQNVCMESTGKYYIPVYNALEGYISNVVVANPKWVRCIKGEKDDNKDAKWIADLFKLGIVRSSFIPNKDIRILRELTRYLYKLTNMRTSEKNRFTNALTVGNCKLDMVFSDIFGKTSSVIINTILSQNEYNDEDILKNIHKNCKSSAEDILNSVNGISWQESQKQRMNIIQEHIDYLDKSIKSVREIIDSIVAPYESAINLLCSIPGIKRNSAITIISEIGTDMGQFSSHYRLSSWAGLAPGCNESAGKKKSVKISRAGVYLKPALVEVAHCAVKDKDNLYYANKFNVLSKRRGKKRAYIAIARKILVAIYHMLSTGEFFNPTDMSKVETSDKDKIKFTKNNFLQSTKQLISLGMTIEELQAFITSKISESTPVI

SEQ ID NO: 53039 - protein, 431 aa, unidentified
MVPMGTQVREVLDCFAKGGVDMANLMVGIDVSLRNHAVQFMNDSGDALASFSIPNDLTGAEILLQRVLESADKYQADLVRIGMEATSNLGWHLAHFLKAKLHQTPDFKAQVFVLNARKVARFKKGYDCLPKNDRIDAWVIADQLRFGRLPHELTSCIQFEALQRLTRTRFHLMQNITRDKTFFLNQVFLKFSGLRQDNPFSSMFGATCLAVLQELEPEQIVSMSITELVDFLKEKGKNRFDNPEELALFLQKLARSSYRLDKAMADPVNLSLAVMLSVIQTMEKEVSKLDKEIEKIMKSIPETVSSVKGIGPVFAAGIIAEIGDIARFPNNNALAKYAGLVWSQYQSGEFESQETKRLRTGNKYLRYYLIQAANQVRRFDSEYAAFYADKYSQALKHKHKRALVLTARKLVRLVFMLLKTKQLYTPPERRG

SEQ ID NO: 53040 - protein, 289 aa, unidentified
MEHYAGIDVSLDLSSVCVVDAQGKIVRETKVASEPEALVAFFASLGFAVKRIGLEAGPLSAWLHAGLKRAGFDTLLLETRHVKAALSAMMVKTDRKDARGLAQLIRMGWFRPVHAKSMGSQEVRALLVARKQLLGRLIDVELSIRGILRGFGLKVGVVTRKGFEGRIRELVTGHITLERIAGAMLSARATLKVEYEKLHKIVLTIVREDAVCRRLMTVPSVGPIVAITYKSAMDDPNRIAKSKAAGALFGLTPKKYQWGKGTSPAGLRGPAMRWYAPRFMKPPMFCWRA

SEQ ID NO: 53041 - protein, 285 aa, unidentified
MKPKTEITAAPLAVIGVDIGKEVFHLVGFGADGRIAFRKKIRRLDLKDAFEQLPRCMVGMEACLSAHFVSRTLRALGHEPRIIPAIYVKPFLKGQKNDYNDAEAIAEAALRPNLHVVQEKSQDQLDRQACHRVRSRLVSRRTVTINQIRAFLIEQGIAVRAGPRALRNSLFAILENRKDEISPRMAKLILGLYEDWCHLDERIEGVTGEIEELSRAEAKCQRLMSVPGVGPLISTGIVAAIGTGEAFERGRDFAAWLGLIPRQHSTGGRSLAASPSGAASTCARC

SEQ ID NO: 53042 - protein, 344 aa, unidentified
MNKLSRVGIDLAKNVFQLHGADRHGKVLWKRRLSRNKWLKALLEVATPDCEIGMEACGGAHHWARVLQSYGYTVKLIPPQFVKPYVKSNKNDAKDAEAICEAMSRPGMRFVSVKTVEQQDIQAVHRVRSGLMTERTALANRIRGLVAEYGLVAPQALTALMRALPDWLEDADNSLSDRFRSLLHGLWEDLQRLNQRIGELDKEIILIAQSHSVAQRLQQLRGVGPLVATALIATVGTGQQYAKGKQMAASIGLTPRQHSSGNKDRLLGISKRGDAYLRTLLIHGARAVVSQAKHRDDRLSRWCTDLARRNHPNVAAVALANKTVRIAWAMMQNESDYDPGFSLP

SEQ ID NO: 53043 - protein, 404 aa, unidentified
MKGPIVSIDVSKGKSDYQAFKDLNVKYTGSRSIKHNKEGFDEIVNLVREMEKKLETEVCVVYEATGVYHRVLKKVLEDNNIKQFIINPLLSAKTRKNDSLRSPKTDKLDPKSIAKTYYSHSLHNSHKQETIYHELRELSRYYEDILVHIRKDKVAFRAQLDIVFPGYDTLYDDLYGPVALAIIEKYPHPEILQKKKINTVSKVIQNKTCHRQAVSDTMADKAIEYSKTIYSGCDKDDIEVLILQRFIKKLNEDMAEAERTIGEMIKLAQELPDFNIIKSIPGIGDNLAARIIAELGDMTRFKKKNELVVFAGLDPRISESGQNDGDHMHITKKGNKRLRCLLYLAVTCSIRLKRDDNSIKDFYIKKKQQSNPMCSKAAKTACASKLVRIIYSMCKTGELYQYNK

SEQ ID NO: 53044 - protein, 417 aa, unidentified
MKKHSNSLKQSEAPAKRRKLGVVVERKPQEVMAELIVKLAGQLDVEIVPAVEGKKDGRDAVHPNLDRLTVGVDLGDQWSNYCILGLGGETLVEGQFRTRKQEVAEFFQALAMSRVVVEVGTHSAWVREIIAGFGHEVLVANPRLMEGSKRRRRKSDRIDAEKLARLGRMDPKSLHPIEHRSTEVREDLVILRARDALVKSRTELINSVRGQVKSMGGRVTGCSSVAFSQKAIAEIPEEVHETLQPLLRLIATLSEEIKTFDQRIEKLAAEKYMQTQLLRQVSGVGPVTALAFVLTLETPLRFARSRDVGPYLGLVPKQEDSGDIQPQLGISKAGDRMLRKLLVGSAHYILGPFGPDTDLRRFGMRLCERGGKNAKKRAAVAVARKLAVLLHRLWASGEVYEPLGHGSVTRPAQAVAA

SEQ ID NO: 53045 - protein, 350 aa, unidentified
MTTIARRITGGVDTHLDVHVAAALDERGALLGIESFATTLAGYRRLLRWLESFGTLELVGVEGTGSYGAGLTRHLLANEVAVVEVDRPNRQLRRRTGKSDPHDAEAAARAAQGGHATGLAKSRDGNVESMRVLRVARFSARRSRTQAINQMRSLISTAPDELRAELRDLSIYKILTIASAYRQTGRTDVTTLTKLALRTLARRAVSLEEEVKEIDRLLKALVQESAPELCAVDGVGTDVASAILVAAGDNPERLKNEATFAKLCGVSPLDASSGKQVRHRLNRSGDRQANSALWHIVFTRMVNDPKTQHYIERRMKDGRTKKEAVRCLKRYVAREVFAALPRSQFWVDNP

SEQ ID NO: 53046 - protein, 413 aa, unidentified
MEVVYHNCCGIDVHAKFLVACLLQDGKKHIRRFSTMTDDLINLRDWLISEGCEIVAIESTGVYWKPVFNILESALPVMLVNPEHVKALRGRKTDRKDCIRLAEFLSVGLLEPSFIPPPHIRRLRELTRYRESLVRTRAAIANRIQKVIESGNIKLGQVASDVLGASGKKMLQKLAAGETDPVVISELAQGNLRKKLGELKLALRGELNEAQRFVLGELLQRLKELETADYNVSRQIHQAICDPEHPELFHAWELLQTIPGIGEQVAEVVIAEIGANLREVFPTAGHLASWGGMCPGNKATGGKRISGKMRKGNHYFGCAMVQAAWAATHTKKTFLSAKYHRLVRRLGKKKALIAVAHALTVIIYNVLVRNEPYNELGADYFDRNHSDKQRKYLVKRLQALGYTVTLEQNVHAA

SEQ ID NO: 53047 - protein, 363 aa, unidentified
MIVIGTDTHKRAHTCGAVFAGTGQLAGELTAPAREPGFRQLLDWGRDLDKERIWAIEDCRHVSGSLERFLIASGERVVRVPPKLMGQSRRGERSAGKSDPIDALSIARAALREGPETLPAAYLDEDALQVKLLLDHREDLVKARSEDQCRLRWHLHDLWPELEIPAGALDRMVWLERVARRLARAEQGARVRVARELVREIRRRTRRAAELEREIGALVKAQAPDLLALEGCGALTAAKLIAETAGAERLASDAKFARLAGVAPIPASSGNRVRHRLDRGGNRQLNCALHRIAVTQGRCYAPAREFLAKKQAEGKTRIEALRCLKRHLARRVWKLLVNPEREISMNTVDTQRGKLTPQIAVAA

SEQ ID NO: 53048 - protein, 406 aa, unidentified
MAAVMIGIDPHKASHTAVAIDEKEAPLGEVRVRASAAQAGRLVAWAASWPERTWAVEGAGGLGYLLAQQLVAAGERVLDVQPKLGARVRLLATGATSKNDPNDARSVAIAALRSAAPRKVAAENHAAVLKVWSKRHRDLGRTRTQVACRLHAVLCELIPGGITKEIVAAQAANVLDGIEPSGAVEVARCELAAEFLDDLRRIDAQLRDTKKRLTAAVRASGTTVTEVFGVGPVIAATVTGYVADASRFPSRDNFAAYDGTAPIEVSSGNRKIYRLSRRGNRRLNHAIHMAAVTQIRHRHSEGRAYYDRKLAEGKTPKEALRSLKRRVSDAIYSRLQADARRAAAFTTTTGPGGQPGNDSVASAAGSHPEHRLFGPATPEPDITLRRPGRRTPTGPGPAPKKTRTSS

SEQ ID NO: 53049 - protein, 416 aa, unidentified
MKKHNNSGKKSEPTSKGTKSRGPVQRDTKEVLAELVGKLKAKLDPTKVAATSAGEKHQRGELRPNLDRLTVGVDLGDQWSHYCILGLEGERLAEGQLRTTQEDLATFFQGLNEARVVVEVGTHSAWVQEVIRGCGHEVLVANPRLMDGSKRRKRKNDRIDANKLARLGRVDPESLYPIQHRSREVRQDLVMLRARDALVAARTEIINTTRGLVKSMGTRLPKCSSRSFAQKGEEAVAVEMREALLPLVRLAATLSADIKEYDKKIEELGREKYGHTALLRQVKGVGPITALAYVLTLENPQRFAKSRDVGPYLGLVPKQEDSGESQPQLGISKAGDTMVRKLLVGSAQYILGPFGPDTDLRRYGLRLCERGGKNAKKRAAVAVARKLAVLLHRLWVSGEVYAPLHHAMSAPIVAAA

SEQ ID NO: 53050 - protein, 376 aa, unidentified
MAETGCWGGRPPTASMCQNEVVADLRQKRPSVEQIIRIGMDTSKQIFQLHGVNAAEEVVLRRKLRRKEMVAFFEKLEATVIAIEACGASHHWARLLRSFGHEVKLIAPQLVKPYVKRGKNDAADAEALCEAMSRPTMRFVPAKTAEQQAALMLMGLRDQLIRRCTQLSNAIRGYAAEFGLTAAKGKAHLHSLLERIQDDESLPILARELFAMQAEAYRRVEAQIDTIDGKLAAWQKTDERCQRLMKIPGVGPIGAALMTMKTPVPELFKSGRQFAAWMGLTPKDHSTAGKVRLGVITRAGDEALRSVLVAGATSAIQHAQRSGKASPWLAALLKRKPPKLVAVALANKTARIAWKLMVTGQRYAEKSAPAAMASAA

SEQ ID NO: 53051 - protein, 388 aa, unidentified
MNRIIKIGMDVHSTNYTLCAMEPVLGAEDRIYGEIQVAPDYKAIVAFIASIKMKLGLSDKYSFECGYEAGCLGYTLYNQLTSAGIKCVILAPTTMLTQRGKRIKTDRRDARLIAQCLCYGGYNPVYIPTGEDDAVKEYLRMRDDHKLTLKKLKQQIGAFALRHGHQYTGTKWTAKHIAWLRKLELDPIYQETLNEYMASYDEQEAKIERFNKRIEEIAAQSRYKENVGKLCCFLGIRTHTALSLIVETGDFTRFAKGNTYGAYLGLAPGEHSSADDVNRLGISKAGNTHLRRLLIEAANGICKGRIGHKSKELCARQKGQPADVIAYADKANIRLRSRYYKLIRHGKKKNVAIAAVARELACFIWGMMTGNISVVSRAGSSVPAASQG

SEQ ID NO: 53052 - protein, 364 aa, unidentified
MKKVYYIGLDVHKDNTQMAVMEMKSKEPVAVKVIDSDPLKVAKAILPYQREGKVRVAYEAGCMGYTLYRVLTEMKIDCQIIAPNKVFRGGNNEKIKTDKRDAVAIAWMLRRDEGAGIAVPDREDEAARDLLRCRGDMKDDLKRAKQRLLKFLLRHGHIYENTRYWTGKHRKWMKTLTFEMTLDKAVFEQYLYTIESIEERVARIDMQIQEIAQSPRYAQRVQRFRAFKGVDYIIALSLLCEIGDFKRFPTAAAFMSYLGLVPSEYSSGKKRKQGGITKTGNGHIRRLLTEAAWHYVRPARVSKRLAGRRVGTPETVISYADRALCRLHGKYVKLLFNGKSKQASVTAVARELSGFLWGVMTSVA

SEQ ID NO: 53053 - protein, 392 aa, unidentified
MARLIIGVDPHKRSATIEVINDREHVLQQGRYATDSGGYQAMLAAGRRHGERVWAVEGCNGIGRHVAQRLVADGETVLDVPAKLAAKARIFDTGHGRKTDPHDAHHIAVTALRSRNLRQVSADGTTVALRLLADRRDQLGVTRTQTVSRLHQLLLELIPGGAKKNLRTSQARTLLDSVSVAAGDIVAATRHQLAGELVDELTALDAKMKSATKQLAALLATTGTALTGLNGIGTSGAARLLGDIGDIGRFPSRGHFATWNGTAPIDVSSGDNDHHRLNRAGNRRINRTLHIMAIAQLRYDTPGRAYYQRKRTEGKTAMEAMRALKRRLSDTVYRQMINDTKATTAPATGPGGHTGATLNSSAADPNPTIDTSDKSLPGPANHQPKTSLTATP

SEQ ID NO: 53054 - protein, 350 aa, unidentified
MKIKTTSPLKAKQIKLGIDVHADSYRVVRQVDHATPQPAQKFTPQGFLLWAQKQLEQAETVCSCYEAGPFGYGLHRALAAMGIQNYVIRPQNWDELGRGVKTDKTDALALVLRLDRLLAGNTKALAVIRVPTEAEEQARSASRQREQLRQHRQRLEAQGRSLLLYYGCRVRGRWWSPQNWPVVKNRLAVPLQALLATLRELIATVNEKLATATQQLEAQASPQPMGFGALSSELLRREVGDWGRFKNRREVASLTGMCPRVRASGNQQQQGSITKHGNPRLRRVLIELAWRVVRYQPDYPPVRRWQAVLLGPSAGARKKAIVAIGRKLAIDQWRLATGRGTAESLHLKMN

SEQ ID NO: 53055 - protein, 406 aa, unidentified
MLFVGDDWAQDHHDVEVQDETGRRLAKARLPEGISGIARLHGLVGRFLPEDSDPAEVKIGIETDRGPWVAALVASGYQVYAVNPLQSARARQGQDVSGAKSDAGDAHVLADLVRTQSHQLRTVAGDSKQAGAVKVLTRMHQSLIWDRTRLVLRLRSSLREFFPAALEAYEDLASPEVLELLTKAPEPSRAARLTRAQVAAVLKRAHRRDREAKTTAIMAALRTEHLTQPPVIAAAYGATVRSLAALITTSNEQITALEGPVEACFGQHPDAEIYLSQPGLGPILGARVLAEFGDDPTRYDGARARKNYAGTSPITRASGKKKVVLARYVRNKRLTNALHQQAFSALSGSPGARAYYDALRDRDISYNAALRQLGNRLVGILHGCLKTHTPYDESTAWNRHTQQVAA

SEQ ID NO: 53056 - protein, 332 aa, unidentified
MDQQLTEEVYVGLDTHRETIHGTALDKNGTLICSYEFPNGEEAMKEFLKKFSPWNTLIAMEACGIWRGCYKILNKLGYRVKLANPLKCHQLAKDKKTDKVDSRILADLTRIGYLPEVYIPSDEIIALRDLTRHKCNLSRLLVRVKNKVKAILLREGIKYDDEIWDKDGIFWLRGLNHEKINDFTDLYEIIHEKIKKVSKEIDKAAKNKEETRLLDSIPGIASFGAALIFAEIGDIERFPDPKHLHAYAGAVPGIYQSGTKTKTVKKKEVNHWLKWICGQCSYVALKSKNKIQKHYQKVLKKKSWKTARKAASRKLLTIIWHVLKEKQPYHES

SEQ ID NO: 53057 - protein, 460 aa, unidentified
MKKRKPVFEEKHRYVAGIDIASRADHFVCGPRLDNGDYEIVSFGTTTPKLYEMLEWLQKRNVKSVAMESTSVFWIPVADLLEMNGIEVVLVDTRVVRMIPGRKSDIEDCQWLQKLHSSGLLRGAFRPNEKITAVRSVLREKDTFVSMRTQAIQQIQKSLDQMNIRVHHAVTDITGKTGTAIIKAIIDGERDPIKLAKLRDMRCQKSEKEIADHLTGTWREEHLFNLGRSFSTLQFLDDMIKEYDNKVAIMLQSLAEDFGTKTDDNSSDTNHPLPLHKVNKSDKARIIDTISLHKIMGFDLTSIPGIGFNIASIITSEIGTSFDRFPTEHHFASYIGLAPSLCKSAGKSARQKQCKNTSRVGLVLRMAACSLCRSQTELGAYLRSIARRKDMKTAIKATARRMAHLIYRGIKYGKEYIDIGVEAYQTRMKEKTVKTINRLIKSHGINKLDIDFGDVCNLSC

SEQ ID NO: 53058 - protein, 351 aa, unidentified
MLADQLDYVVDVDPHRDSHAFAVVDVRTGAVVFETAVAANSDGYARALELVDVHAPGRRAFAVEGSGSFGAGLTRFLSGGGERVLEVGRLRRERRSGGKTDALDAVRAARSVLGQERPATPRAGGERQALQALVAAREGAVNAKCAGLSQLRDLLVTTPEPLRNELRRLTPARLLRRLAATRPDTRRDPELRGSLLALRSIARRVLQLTAEERELAREIETLTRKLAPQLLDQPGVGPHAAAQLILSWSHPGRIRSEAAFARLAGAAPIPASSGQTVRYRLDRSGDRKLNRALHLILVTRKRTHPATNAYIQRRIQEGKTRREATRCLKRYLARNLYRLLEHGPPLLRKPC

SEQ ID NO: 53059 - protein, 366 aa, unidentified
MKKNSTVAVGRKQIFKQARLTIGLDLGDRTSYYCILDEAGKVIWERNMPTTSNGIRQAFGRIPRCRIALETGTHSPWVSRQLAQMGHEVIVAHARKVRLIGESSRKDDQLDARTLARLARIDPGLLGPVCHRSAQAQIHLTVIRARAALVGTRTALVNAARGLTKSYGERLKKCGTEQMNGDSSQGLSRELRDALDPLLRGIELLNERIAEYDRRIEQIAEEVHPEVARLKQVKGVGTLIALTYVLTLDDPHRFRCSRNVGCYLGLRPGRRNSGQSEPQLHISKEGDRYLRTLMVQGAHYILGPFGQDSDLRRWGLKLGEHGGKNAKKRAVVAVARKLAVLLHKLWVSGEVYEPLRNNHKVESAVA

SEQ ID NO: 53060 - protein, 482 aa, unidentified
MKKKNIYVNQSQELLTLFEEAGNGAKVMCVPIDYAKKDHVVMFCNGHGHIFRKPFSIKNSPEGIEYLTEQVIRSCSHRRIDPKHVFFGGEDVGSYAENFVNTLRSGGWIVAGVNAHDAKEQRANMQASTDRLDLMGIASMLLNRRGNCSPAQSGIYRNLRTLVRHRRKLVVMSTEVKNRIHTVVDRLLPGFLNEKNSGILPFSKSSLFLMQDRFSPSQIRRRKRHKLIEILHRYGTATPESTAVKLQEYAARVLNTPDEYITTLQVSLAQHVKHFRCLQDSINHLKNEIAVWLAQTQGAFLTTLRGIGIVLAAGVSAETGNPHEQKPLNNLVSYSGIIPRVKQTGGPEGKTYTGKVAKRCNRILKDYVVQSANHLGLHGPEDLMADYKRREAAGQHADFGMGRRYLRMAMCLMRTSQIYMPQRLRNTEVKPEERAGYYLMIWPSLREKWNKADALEAAFEKDRPLGRWRSMVQELYEIKLKL

SEQ ID NO: 53061 - protein, 411 aa, unidentified
MHNRQNYLYVGVDLHKEHHTAVIINCWQEKLGEIQFENKPSAFSKFLLEVETYVSAGVSVVFGLEDVGGYGRALAKYLVDHEQVVKEVNPALSFLERKSHVTTQKSDSWDAECVARILINKLNQLPDAKPNDLFWSIQQLVSRRNALVKAQSALKNQLHIQLNHHYPSYKKFFSELDGKTALAFWQQYPSPSCLEGTNIKQLTAFLLDVSNNTCSVKKASDILKLVKEDGQTIKEYQEMRNFLVRSIVREIEFKKKEMKYIERELKQLVNLLDYQLETMPGIELVTASALITEIGDVRRFPNANKLARFAGIAPVYFGSGGKGKTHKSKQGNRALHALFYNLAVQQVQVAKGSKMPRNPVFHAYYQKKLKEGKTKGQALVCIMRRLVNIVYGMMKYKTAYELPVVEEKEVV

SEQ ID NO: 53062 - protein, 412 aa, unidentified
MTVTNQFAAHVGLDWADKKHDVCVQFKNGERVFDVIEHTAEALDAWLTELHQKVKGRIAIALELKKGPVVYALQKYPFITVFPVHALSLARYRQAFSPSGAKDDPQDAELALELMLRYPQKIKAIEPDNADIRLLQQLVEQRRQLVEDKRRFVNRIINTLKQYYPQPLEWFSHRGSLLLCELLIRWPSLQQLKRARRDTIRNFLNAKGGRAMALTEQRVASIDNAIPLTTDPSVIEANALMAAALATQIKVVSEIIKTYDERIETLFDTLPDAGLFKSLPGMGPCMGPRMLAALGDNRDRFNSAEEIQNYAGIAPVTERSGQKSWVHWRWQCAKFVRQTFVEWAAKTVNSSYWAKLYYQGLREKGKSHQSAIRALAFKWIRIIYRCWKARTCYDEAKYLQALEARHSPLLKP

SEQ ID NO: 53063 - protein, 370 aa, unidentified
MKKHSTTPKSPKQASACKGGPITIGLDLGDKTSRYCVLGANGEVMSEGSVATTRKAMAEKFAKMRRCRVAIEVGTHSPWLSRWLSSLGFEVIVANARQVQLISASSRKNDRLDARLLARLARVDPQLLRPIRHRSETAQADLMRIRVRAALVEARTRLVNAARGFAKAMGERLPACDTDSMGVERMESLPEGMRDTLKPLLEQVESLTEKIKESDVKIEQIARTQYPETELLRQVSGVGTLIALTFVLTLEDRERFRKSRDVGCYVGLRPKQSESGQSQPQLRISKEGDVYLRTLLVQAAHCILSRRGPDTDLKRWGLKLASRGGKNAKKRAVVAVARKLAVLLHRLWVCGEVYEPLRNSQASGSSKKAA

SEQ ID NO: 53064 - protein, 412 aa, unidentified
MWFVGIDWAGDHHDVAVTDEGAGLLARFRVAHSVAGLEELVARVAALGADRGEVRVALERPDGLLVANLLERGYAVYPVNPKAVDRYRDRHQGSGAKDDARDAWVLANILRTDGHRFAPLGAEGEVAAELRLTARAHRDLVQEGTRLANQLHAALADYYPAAPTLFGQLAQPVALAFLQAFPTAEAARAAGRAGILAWCKAHRYQPRWAEALWEKLDAPALAQPNAGVVRARSRQVQGWAAALLAVLAAQREHERALAALLGRHPDGGLFLALPGAGVVLAAELLGELGEDRAALPRADDLRAVGGTAPVTIQSGKRRLVVRRQACNRSLHASLIQFARSSVLQAGQGKEAAAWAGEVYRARRAAGESAQAAYRAVATRWAGILWAVWTRREPYDHRRYEQACRARALPKAS

SEQ ID NO: 53065 - protein, 343 aa, unidentified
MEIRSVGIDLGKTTFHLVALGDNGKVLLKKKFTQKQLIAFTANMQTSLIGMEACSGAHFLGRTLREQGHDVKLIPAQFVKPFVKSNKNDFIDAEAIAEAVTRENMRFVPIKTDDQLDLQALHRVRDRLIARRTSVINQLRAFLLERGLVFAKSPAKLRERIPETLENADEKITPRMRNLLALLWEEWKDLDQQLDDLNQEVERIASSDPACMRLRQIPGIGPLVATAIVAAIGNGAAFRKGRDFAAWTGLVPKQYSTGGKTKLAGISKRGNRYLRKILIHGARSVVFRSKRERIAMGEWMNTLEARASRNVLIVAMANKLARIAWAVLSSGQDYRAVQQPLAA

SEQ ID NO: 53066 - protein, 421 aa, unidentified
MGKLKIVYPICCGMDVHRDFVVACIASTNTQGVTEYEVKRFSTFSGELRNLRDWLAERNCVDVCMESTGKYWFPVHNILEATCNVVVSHPKFVKAIKGKKTDKKDAMWIADLFKHDLVRGSFIPPEDIRQLRDLCRYWQKLTWCLNGEKNRAQNCLTASNFKLDSVFSNVFGKSSSAILEYMLEHPGESFDVAPFVHHRCKSPIEDIQAAVDGAFNPFQAEKLKVIREHMGNLDRLKMLLESLILTLAEPYWHQVKLLLTVPGISEPMTAIRIIAEIGTDMSVFDSSKHLCSWAGLTPQNNESAGKKKTTRIGKAGQYIKPLLVQCALAACNPRSKKHPEILNKYQQLKKRRGSKKARVAIARRLLTAVHQMLLKDEPYSPFVAPAIELIPEKRILTLDEGLAMLRRKGFILEYDAAPAPT

SEQ ID NO: 53067 - protein, 449 aa, unidentified
MREPEELEDPPHEQYLERVCAIDVAKASGKVCTRVPHPSRPGARRTLVWDVDATTNAVLELAGQLAGERIEKVTLESTSDYWRIWFYLLEAAGLDVQLVNARDVRNAPGRPKTDKLDAVWQAKLTERGMLRPSFVPPAPVRVLRDYTRLRTDLTRERTRYWQRLEKLLEDALIKVSAVASALDTMSARDMVEALIAGERDPVVLAALARGRMKAKRAALIEALTGRFDDHHAELARMLLDQIDGLNAQIATLTSRVDDLIAAIPAARGVDADGSTGPGAGNSPDAARADAITRLDEIPGISTTGAQIILAEIGLDMTRFPTPGHLVSWAKLCPRTIQSGASSRAGRTGKGNPYLKGVLGEIAAAASRTGTFLGERYRRIVKRRGKLKALVAVARTILVIIWHLLTDPAARYHDLGPGYYASRTDTDRKARNHIRQLEALGFTVTLTAAA

SEQ ID NO: 53068 - protein, 343 aa, unidentified
MKLTRVGVDLAKRVIQVHGVDRVERSVWCKRLKRNRWIEEIEQNVEPGAEIGMEACGGAHHWARLLQSKGYRVRLIAPQFVKPYVKSNKTDANDAQAVCEAMSRPSMRFVAVKTIEQQDIQAVHRVRASLISERVAKANQLRGLAYEYGLVAPREIAALRRAVPAWLEDASNGLTVRFRVLLSGLYADLRALDERVRELDKEIRAIGRENEAVGRVQQLRGIGPLIASALVAMIGDARQFKNGRQVAVALGLTPRQHSSGSKERILGISKRGDSYVRTLLVHGARSALRTAEGKNDRMSRWALALAKRSHVNVAVTALANKMARVAWAMLRHGTTYEPNGLAA

SEQ ID NO: 53069 - protein, 264 aa, unidentified
MTKIICGVDVSSTSLDAFVGPSGPAHSFRNTAEGIAELAAFCRQQSVDLVAMEASGGYEKQAFALLWAGGVPVALLNPRAVRDFAKGMGLLEKTDCIDARVIAWFAAVKGSMSNAPASAEQQRLKALVTRLRQLTELQAAQRNQRLLVSEATVLELIAELLKVVASQIRMLEAEIAALLASDPLWQKLDQALRSIKGVADRTVARVMAEMPEIGTLSNKAVSKLAGLAPLAHDSGKREGKRLVRGGRSQCAGDSVCSCRCGASS

SEQ ID NO: 53070 - protein, 418 aa, unidentified
MAFKIFRKICCGLDVHKTWIYACIGITDTNGLTEYKQARFSSFSKGLRELSDWLAKYSCFEVCMESTGKYWIPVFNVLEKSCFVTLAHPKYTKPQKGNKTDRKDAKWICDLFMCDMIKPSFIPSPEIRQLRDLVRYRSKLTNMLVGEKNRAQNCLTVSNLKLDDVFSDVFGKSARSITQYILDHPGETFNVAPFVDGRCKTPLEEIQAAVDGAVSPEQAVKLRQCLAHIDELEAHREEIEQEILLVTEPFSSVLDLLYSLPGLDKNPMTAIAILSEIGPDMSVFPSSKHLVSWAGCCPRNDQSNSRIKSRRISTAGSYLKPLLVQVANALIKSKKHPEFKERYHRIKSHRGHKKAVIAVCKMLLTAIWNMLSKLEPYNPSGFLEHRPVNEKKVLTKSQALELLRLRGYTITDDVAATA

SEQ ID NO: 53071 - protein, 348 aa, unidentified
MSMVGGLDLHRGQITFDVVATETGEVWRGRLGQPTRARFRHWLESELAPRANGASVGLAVEGCTGWRYVVEEITAAGFEAHLAEPADTQAARGRKRRAKTDRTDARLLRDLLADGDLPESWIPPACVLEWRERVRLYKSLVDQRTQWVQRIHAELFQHGLPVPDAEIATPSTKAWLCDPQLAVSAAARQRIQTAYVMIDATNGEALPLRAQLTRFGTRQPACRALVEGHFGIGGLTAVAIWSELGDCQRFTRSMQVVRHAGIDVTVDSSDTHRASGYLSHQGPSILRWALYEAAKCSARPVAPDYAYYSAVKKRHDGKLAALAVARKLARRCYHTLRNIDPEEVYATV

SEQ ID NO: 53072 - protein, 411 aa, unidentified
MKVTYQTCCGVDVHKSFFVATIVKTTGGIEPSYQKKCFSTFNNSILEFKQWLLDNDCRDVCMESTGKYWVPVFNLLEDDINVVIANPKWVKAVKGNKDDTKDSKWIGDLFRLGLVRGSYVPCKKIRILREYTRYRYKLISCRSSEKNRYQNALTVCNVALDSVVSDIFGKSSTSIIDYLLEQSGTSINHEEIASKLLRSLKSKEDAVIESVEGYQMTDAQKYRMRLVRAHMDYITAEINDVDKIIENMISSNPDFENAVQFLCTIPGVKRDSAITVISEIGTDMSQFSSSKHLCCWAGLTPGSNESAGKKNSVRITRAGVYLKPALVQCTHAAVKSDKSPYYKKKYESLVKRRGKKRAIIAIARMILTAIYQMLSTGEQWNPSDLYKIDMPEALVEKQKTKAIKQAKKLLQ

SEQ ID NO: 53073 - protein, 442 aa, unidentified
MSETSSEPKFAALVGIDWGDKKHAWALQVEGSSQIERGEMLHTPEAIQEWVAELRRRFPTGCVAIALEQSRGPLVFALSKYEHLVLYPIHPTSAADYRKVFRPSGAKSDGPDAVLHLDMLVRHRDKLRSLHPDTPQTRTLQLLVEDRRQLVNERTRYSNRLRADLKSYYPQVLQWFEDLYTPVALDFLERWPTLEDLQKAKPAMLHKFFQQHRCRDDAHHQARLQAMRTALEATTDLAVITAGRAATCTAVRLLSTLHQSIQEYDRQIDQLAKAHPDFVIFDSLPGAGEVLVPRLIAAFGTQRDRYQHAAEIQQYSGIAPVTQASGQQHWVHWRWSCPKFLRQTFHEWAEKSIPYSDWAQAYYRAQRDDKNKSHHAAVRSLAYKWLRIVFRCWKDRKPYDESIYETALRRHKTAPDPQPSPFELNVRWTSCGSFQKIALKTP

SEQ ID NO: 53074 - protein, 349 aa, unidentified
MEQFVGLDVSQKLTHICVVDREGKALWRGSSPTTPEDIAAAVRAHAPGAVRIGFETGALSTWLWHGLKKIGLPIVCLDARHAKAALSMQVNKSDRNDAFGLAQIVRTGWYREVGVKSIESHQIRAVLGARAQLVGMRTDLRNQIRGLLKIFGVVLERHSDKSFENRVKEVARAAPDILATSLRSLLAILQPVCTQIALLDRLVMTQAKGTAMARHLMSVPGVGPVTAMAFVTAVEDPARFRKSRSVGAYFGLTPRRYQSGEVDASGRISKWGDPLVRAYLFEAATALLTTCKKWSALKAWGLRIAKRSGINKARIAVARKLAVILHQMWTTGEDFRWSNKGNETEVAAA

SEQ ID NO: 53075 - protein, 347 aa, unidentified
MRFYTKTHKYFCGIDLHARSMYVCILDQGGNILIHRDLPTDPQKFLAVIAPFREDVVVAVECIFTWYWLADLCAREGIAFVLGHALYMKAIHGGKAKNDKIDAHKIAAILRGGTLAQAYVYPPRMRATRDLLRRRNHLVRKRAELLAHIQNTNSQYNLPEFGKKLGRRSNREGLSERFTDPCVRRSIELDQALIDVYDEKLHALEYHLVKSAQAHDPNAFLRLRSVPGIGETLALVILYEIETIERFEKVGNFLSYSRLVKCARESAGKRYGTGGGKIGNVHLRWAFGEAACLFLRNNPEGQAYHQRLVNQHGKSKALSIIAQKLGRAVYLLLKRKETFDMKKFLAG

SEQ ID NO: 53076 - protein, 375 aa, unidentified
MKDFSTFIGMDVHKETIAVAIAEKHGTPRYYGEIANTAEAITKLVKKVVSNGGRAAFCYEAGPCGYGVYRQITDMGYRCDVVAPSLIPKKAGDRVKTDRRDAVTLTRLYRADELTSVWVPDQKQEAIRDLTRIREDMKSMERHARQRLSGFLLRNKKIYTGKNKWTQAHFRWLEKIRFESPIQQIVFQEYVDTVKQLQGRVASLEEEMRKALAGWSMGVVVEALMSLRGVNLVTAMTIVAEIGDMRRFESPRQLMAYLGLVPSENSSGKRQRRGEITKTGNSHVRRVLIEASWSYRLPARKTAHLQRKAEKTTEAVQAIAWKAQKRLCRRYWHLTLKGKLKVQACTAVARELAGFVWAIAREIMGKNNTAKVIDA

SEQ ID NO: 53077 - protein, 385 aa, unidentified
MSQPNDLSRSLTSLEQDSTIIAVIEMSQSSWLVAGIVPGIERHPLKKIEPSEEELICLLMRWRAEATKHGRTITRIAVAFEAGRDGFWLARWLRARDIEIYVIHPTSVAVSREHRRAKIDRLDTGLLKRVFIGWLRGEPDHCHMAAIPTLAEEDAKRPNRERERLVGERTRIVNRMKSCLVRFGVRNFKPTLRKAPERLETLQTPEGVPLPPNTLLELRRDMARLRFVMDQIKQVEEARAQRLEQAPQEKSHAMVRLLARVIGVGIETADMLVHEVLARNLRDRRAVARYAGLTGAPDESGSKRREKGLAKAGNARVRRGMIQLAWRFLIFQKDSALARWYQTRTASVGKKRKTMIVALARKLLIALWRLVTTGEVPAGVVLRAA

SEQ ID NO: 53078 - protein, 371 aa, unidentified
MNSIVYIGLDVHKESYTICSFRPEDDCAKHMMKLKSDYKQVLKYLDAMRKHYGEDAVFVCGYEAGPIGYRLYHDLMERNVECIIMAPTTMGVTNTNRIKNDKKDAANIARCLAYRLYSPVHVPTAEDEEVKEYLRMRDDQKQALKKVKQQILAFVLRQGLKFEGGKSYWTIAHVKWLKSLELDGLMQEVISEYLITYDYLVSKIERLDAKIEEIAASDRYKENVKKLSCLIGVKTYTAMSVLVEVGDFKRFEKPDKLASFLGLVPSESSSGETQRTGGITKAGNSQLRRLLVESAQSYTRGAIGHKSKELNRRQQGNTAEVIAYADKANERLRRKFYRMVLKNNTPRNKVATAIARELACFMWGLMTDNIA

SEQ ID NO: 53079 - protein, 344 aa, unidentified
MQPMYYIGLDVHKRTISYCVKNGSGAIHAEGTVAARRFDLDRWMKTLPQPWTGAMEATVFTGWIYDHLQPHAAALKVAHPLMLRAIAAAKKKNDRIDASKICDCLRCDFLPECYMASTTIRERRRTLRYRNLLVRQMVQMKNKISGLLMEAGVSYNKQRLHKAGYFRELLATNPDIDEGLCSLLRLCRETVVRLSKTESALARSLERDSLLVERVERLMTIPAVGPITVLTWALEIGDVQRFSSIKKAISYCGLCGSEKSSANTVQRTPLSKQRNKHLQTTLIEAAKMAPRNSPELAMLYDKEKLKGNANRATLAVARKLVAYLMAVDRGHRNFQVVATNCIAA

SEQ ID NO: 53080 - protein, 346 aa, unidentified
MEQYVGLDVSLKLTAICIVDRTGKIEREGVVASDPETIAAFVKSHAPHVARVGLETGATSTWLWTELNKMGLPAICIDARHAKAALKLQINKSDRNDAVGIARIMQCGWYKEVRVKDLDSHAIKALLVSRALLVKIKRDIENQIRGLLKNLGLVIGRAKMNVFSVRAAELTDARPELTAAIEPLLKAREAVEQQIADLDRKVMRLARNVAQVRRFMTAPGVGPITALCFLATIDDPTRFRKSRSVGAYVGLTTRRYASGEIDWTGRISKCGDKMLRSYLYEAANVLLTRVAKWSALKAWGIRLAKRTGLRKAKVAVARKLAVILHRMWIEGSEFKWSSKEAANQPA

SEQ ID NO: 53081 - protein, 343 aa, unidentified
MQVAIGIDTHKGSLAAAAVDALGRVLGAREFTNDPTGHRSLLRWVKEQAQPRTIGIEGSLSYGSAAARMLLGHAEDVREVAPSLTHLERRRRSKGKSDPVDAVAIARVVAADETLPSARRTTLLVDLKLLVDYRDQLVHARTQVANRVHADLVIIRPGYEQVVPNLRAKRHVAKARSLLSRDRSVQAELVRRRLGEILRLEAQVAEADRRIADKLAEADTTLTQIPGVGPFIAAKILGEVGEISRIRSKASFAMLSGTAPLIASSGQTHRHRLNRRGNRQLNWALHYVALVQSRTSPEAKAYLVRQREAGKSHKEAMRCLKRHLSNVVYRHLLLDARRLEQAA

SEQ ID NO: 53082 - protein, 479 aa, unidentified
MCYLSLRLVRLLSLRTCLFGLSAHRLLFNGHVLNVDPNMFKCSYVARLRLSFKTRTSLISYFLESGDFMNDLLQYLFVGIDVSKENNQVYAMNFSQEKLASFSTPNHQSGANLLEEKLLDILDRHHLSKIIIAMESTGIYSAHIATYLSASKFLFPFEVKVYVLNPKISRNYRHSFSDMDKTDPKDAFILADLARVGRCEKLTPFKGPQKIALQRLTRHRHHIAELLAKEKVYALNNVFLKFSEFKGILSNDFSKTAIELLLNFKSVDEIINVPLEELVEFVMTSSKNRFADSNQIALTLKAAARNSYRLDKMAYEPINLSLAASFNCISTYQTELKSIDLAILKQVKGLNQNHYLSLISIPGIGPVYASGILAEIGQIDQFDSDDALAKYAGITWRKSQSGTFDAEDTRMTKTGNVYLRYFITEAANLARIHNPVFKEFYQKKFDEVKTHRHKRALALTARKLIRLIYGLLSTDRLYK

SEQ ID NO: 53083 - protein, 369 aa, unidentified
MNYNTVYVGMDVHKESFTLCSCKYEDEKASHYQRTPASYKNVLRYLAFLRTIYGEYTRFVCGYEAGCLGYSLYHQLENFNVECVILAPTTMLEQRSKRRIKRDAEIIARSLAQHNYSPVHIPTETDNQTKEFIRMRDDHKAELKKIKQQILSFCLRQGYQYDGSGNWTAKHVKWLRSLKPAGLYKEILDEYLLTYTTLTDKLNRLDHRIEELASKEEYKESVSKLTCFLGIRTHTALSVIVEVGDFQRFASARKFAGYLGLVPGQHSSGDDRNGLGITKAGNTHVRRLLTESAQSYTRGKIGYKSRVLRSRQAGNSPQVINYADRANERLRRRYYKMVLKDGKKYNIAKTAIARELACFIWGMMTDNIY

SEQ ID NO: 53084 - protein, 359 aa, unidentified
MDIVGAFDLHRKQITFDYIEMDSGEVHRGRIQPADRENLRLWLERFTERFPGQDAAIAVEATTGWRFVVEELRRAGIEPHLAEPAETKSLRGRKKRAKTDRLDAGHLRDLLVIERLPESWIPPQHIQEIRTLMRMRHSMIEERSAHQQRIHAQLFHNGYPQQRNVLAAHRRERLQKMELPRAVRKVVDLSLAMIEHINEELEPIEAELRAYALSQAGCRALMEHYGIGELTSVAMLAELGDTRRFSSSKKAVRFAGLDITVHSSDDKRAAGRLSRQGSPVLRWAAFEAAMVARRRGSPDHDYYVETKERIGANRAALSIARKLIRRAHHTLRELGEEAMSQPPSIIAASEMDVFGRRRS

SEQ ID NO: 53085 - protein, 438 aa, unidentified
MSNKVIFNLDELFISVGIDVGADFSWMSIALPNQQFVGKPYKILHNSIDSLTTAVSKIKEAEELYSLESRIFLESTGIYHYPLFCYLRDKGFNCSVINPIITKNSTNINIRKVHNDRFDSKKAALVGLKPDLKVSLMPSDLALNCRNLCREYYDLMDNRSAYVNKLQGELRMAFPQYLGIFSKVTINTSLTLLETYASPSAFLEADKQEIIDIIKSTARFGLTYAQNKYNAIIQAATDANQFGYIIDSNIKRIRLYISFIRKYDEEINSILESLHELVDANEDSDFVKQIHLIETFKGAGFLSAVSIMGEIGDFSAFSKPKQLFAYFGLDPSVKQSGKFEGTKVQMSKRGSAIARRVIHTLTLQSISISRNREAKNPVLREYYLKKCDSKPKLVAMGAVSHKVCNMIFAILRDNKPFKIIAPQEHIKQYNSAKCDIAA

SEQ ID NO: 53086 - protein, 325 aa, unidentified
MTHSSLSDSSYFVGIDVAKAKLDLARTDDAKILTVNNDPNGIRQIVDALRRTPPSLIVIESTGGLERPMLDALLDADLPVALVNPRNVRQFAMGIGILAKSDPIDARVLSVFAKLANPRLAEKRSANQVELDALITCRRQLTQLRAIQANQRQSTVSKAALKTIDAILRSLGKEIGKLDGKIRALVESDDDFNSTDQLLQTVPGVGPVVSATLLAELKELGSTDRRRVSALVGVAPYNHDSGTMKGQRSIQGGRASVRSVLYMATVTAIRFNPVIKAFAQTLDQRGKPKKVQIVACMRKLLGFLNAMIRDGLTWNQLSVVKALAF

SEQ ID NO: 53087 - protein, 411 aa, unidentified
METLIVCCAGLDVHKESVEACVRRQEANRPLHKQTRHWGTMTRDLQALADWMAAQGVTHVAMESTGVYWKPIYNLLESRFTVLLVNARHLKQVPGRKTDIRDCEWIAQLLQHGLLQGSFIPPRPQRELRDLTRHHTQRVEEKGRTINRLQKVLEDANIKLASVATDILGASGRAMLQALMDGEEDPLKLAELAQRKLRGKIPELEKALEGRVTGHHRFLLRLLWKQLRQQEEVIAELETRIEELTRPFAAVMERLDAVPGVDRRVAEVLLAEVGADLKAFPTDGNLASWAGICPGNDVSAGKRRRRRITPGNHWLKRTLVQAAWAASHTKNTYLATQYRRWAGHRGKKRALVAVGHSILVIFYHMLKNGTTYADLGADFFDRLQSQRLTRYYLRRLQALGHKVTLEIAVPA

SEQ ID NO: 53088 - protein, 424 aa, unidentified
MNPSILCVGADVHLKEIVLRAVDKLTSDEVIAPFRVTNNLPGAEAAAVQLVEVATSLNYNCIQIGYEATGMLWIPFHRFLKTSQLLEPFELQQVCFNPKLVADFKDALVLRGPKDDDRDAFDVAARVQFGHWPTSYVPDDFWQGLRRLTRYRFQLSRTLSREKMRFQSYAFLKCSDWKRIKPFADLFGATSAALLTEFTVAQLREMSQTQLADLIAHRGHGRFYDPGTTARTVQRALDTSYPIEPQMDDMITATLATGWEHIRAVKRLIKRLDQQIARCIDPIPNPIITVKGLGPVITAGLLAEIVDIDRFPEHKHLAQYFGISWAKRSSGGFVSQNTRMTKVGNPYGRYYFVLGADRLRQFNLEYKAFYWRKYHEVAKYQHKRALVLSARKLVRLVHALLTKNVPYVRPQMATDPVEDDHLLQ

SEQ ID NO: 53089 - protein, 316 aa, unidentified
MQSPLCIGVDVAKSEVVIACSESSFPVRAVPNELAALKKFLKQLPPGSSIAMEATGTYHQMLADLAFQMGLHVYVLNPKDTRHYAKGVGARAKTDNVDAMLIARYLAHEIKELRRYEPATPEQRTMDELLKRRAKIVSLKTALRLTCDGAPSLKVKSARLLDSFTELLKQIDQDIARLNKDIPKRDEQVCRLQSIAGVGLLTSSWLANLFDRVRFTNSDAVVAFVGMDPRPCDSGQKRGRRRLSKRGPAEGRRLLFNAGMAAAKSKVWAPVYQHYRQLGWPSTATIMIIARKILRIAFSLIKNGVDFNSDLISIKT

SEQ ID NO: 53090 - protein, 315 aa, unidentified
MTLPSPFVGIDVAKADLVVAIQPPGERWVVANDDAGVTQLVRRLRRLAPALVVLEATGGYERAAVAALAAVRMAVVVANPRQVRDFARATGQLAKTDAIDADTLALFAERIRPEPRPVPDDAARTLDGLLTRRRQVLDMLGAERNRLTHALPAIRRDITQHIRWLERRVDDVDQDLDRTIRSSPVWRAQENLLRSTPGVGPVVSRTLIGDLPELGALTRKQIAALVGVAPLARDSGTLTGRRLVWGGRAPVRAALYMAALVASRHNPAIQTFYQRLLRAGKPKKLALTACARKLLTILNAMMRTQTPWRPTPQLT

SEQ ID NO: 53091 - protein, 354 aa, unidentified
MAEALANAIAFVGIDIGKNSFHIVGLDRSGAIVLRQKWSRGQVEVRFANMLPCLVGMEACVGAHHLSRRLKALGHDARLMPAKYVRPYSKGQKNDFRDAEAIAEAVQRPTMKFVATKTADQLDLQALHRVRERLVRQRTGIINQIRAFLLERSIAVRQGTRFLRAELPRILAMPPDVLSPRMVRIVEDLACDWRRFDERVEGLSNEIETIARQDAGCERLMSVPGIGPIISSAMVAAIGAGDVFTKGRDFAAWLGLVPKQISTGDRTILGKVSRRGNRYLRVLFVQAAWVVLIKPKIWERHGLKPWLEAARKRLHHNVLAIALANKLARIAWSVLARGRAFEVRKINQAAPQPS

SEQ ID NO: 53092 - protein, 350 aa, unidentified
MCTLPVFVGLDYHDASVRVCVLDTDGRELANADRCNDWKAIAEFADRFGRPVRAAIESCCGAADLAEELVSCAGWSVDLAHPGYVQRMKQNPDKTDYQDAQLVADLERIGYLPRVWLAPQHIRELRQVVRYRLQLTEQRRATKLRVRALLREQRCRAPQGVNAWTKAWDHWLRHTAELSAEGRWVANQHLQELACLATRIRQVEKRLERLTANDVEVQRLQQQVGIGPVTAWTIRAEIGHFDRFRTGKQLARFCGLSPRNASSGQRQADAGLIRAANPALRTVLIEAAHRLVNYDRYWQKFAQRLRAAGKPGSVVAAAVANRWIRRLYHEMKTPSGELAVAVRSARSEDS

SEQ ID NO: 53093 - protein, 477 aa, unidentified
MKDHRIAGRRRQLSQKRHRHPGPALLERIQPDAAGIDCGATSHFVAVPRDRDPQPVREFRTFTADLQRLAEWLVQCRIKTVALESTGVYWLPVYEILEARGLEVVLVNARDMHHVRGRKSDVSDCEWLQELHSVGLLRPSFRPAAAIVALRSYVRHRQTLIETAATCIHRMQKALTQMNLQLHHVLSDLTGVTGMAIVRDILAGVRDPRALAAHRYGGCKASEQEIAAALTGNYRPEYLFVLRQNFAAFEFQQRQIADCDQAIETQLASLADSRPPSSAELPAARPRAKPSKNEPRVELRAPLHRITGGADLSQLDGIGPYGALQLIAEIGTDMSRWRTEKHFTAWLTLAPNNKISGGRLLSSRTQPSASRAAAVLRRAAMSLTRSATALGAYYRRVAYRLGRPKAITATARKLALLVYRVLRGDLVYRDPGAAAYLQHHQARLIKGLRRRAQELGLGLINLATGEVLDHATAATVS

SEQ ID NO: 53094 - protein, 354 aa, unidentified
MKIAVLGIDLGKNVCSVVGLDASGAVVLRRRVRRDTLIDLVANLPACIVGMEACCGAHHLGRLFAAQGHDVRLMSPEYVRPYVKAQKNDDRDAEGIAEAATRPTMRFVEVKTEDQLDMQTLHRSRERLVGERTALINQLRAVLLERGIVVPQGKRKLEQYLVIMMNEHDGEGLSARMRMLVADIRAQWQDLDRRIGAFDAEFGRWTKENEDARRLATIPGIGVTISTALIAAIGKAETFEHGRDLAAWLGLVPRQSTTGGKPRLMGISKRGNKYLRKLLIHGARAALPHIAEKDTAADGRRVCSAASTRMSRSLHWPISWRASAGPSCGVVKSLPPRERPWWCSHRLDGAHMRR

SEQ ID NO: 53095 - protein, 366 aa, unidentified
MVRRLISTLSWMIVLAGSRRIIDMQIRSVGIDLGKTTFHLVALSATGKVLFRKKFTQKQLITFTANMQSCLVGMEACSGAHFLGRALREQGHDVKLIPAQFVKPFVKSNKNDFLDAEAIAEAVDRQNMRFVPIKTDDQLDLQAMHRVRDRLVARRTSVINQLRAFLLERGMVFAKTPFKLKQAMPEILENADANLTPRMRNLVSMLWNEWKDLEHQIVAMNEEVEQIASSDSACQRLRQIPGIGPLVATAIVAAIGNGAAFQKGREFSSWLGLVPRQHSTGGKARLFGISKRGNCYLRKLLVHGARSAVLRVKRERSPFGPWLDALERRSPVKVVITAAANKLARVAWAVLSSGEEYRPPTALMPS

SEQ ID NO: 53096 - protein, 422 aa, unidentified
MEVACTLLYFKGVVLMEVIYKVCCGIDVHKKTLVACMRKGRKKEIREFGGNTKDIRAMAAWLKSNDCELVAMESTSVYWKPLVNIFELEDINYIVINAKEYKNVPGRKTDVQDSEWISDLLRHGLLKSSFIPTREQRELRDATRYRKSITQEKTRAVNRLHKMLECANIKLSSVVSDIQGVSSKKLLAQVIENGGAISIEQVESLITTKLSASKEELAEALEGIVTPLQKFMMEEVISHIDALSQNIAKMDAVIEAYMEGYLSEIEKLIEIPGIGLTSAQIILAEIGLDMNQFPTAGHLASWAGLSPGNNESAGKKKSGKSRKGNQILKSTLVQSAKTAVKNKQSFYYAQYQRLAVKRGKNRATVAVAHSMLIAIYHILKNDKKFVDLGVDYYNQFNTEKKANSYRKKLAALGYEVDLKKTG

SEQ ID NO: 53097 - protein, 406 aa, unidentified
MELTALYKRVIGLDVHQAQITACALIEEPDGTTRIEQRQFGAFKRDRRALAEWAASLCPDEVVLESTGVYWKSPYAALEAVGIRAKVVNARHVKNVPGRKTDVGDAHWLATLARAGLLRGSFVPPAKWRELRLIARQRQKLVGQLASEKNRLHKVLADSGVRLGVVVSDLHGQSARAMVKAIIAGQPPHEVLNLASRRLKASREEIFDALQGELTDSHLFVLDELMQHIEEIEARIARFDARLLHGLKSERNALILLQTLPGVDLIGAAMLLVEIGTDMDVFGSADRLASWVGICPGNNESAGKRMSGQVRKGNLYVRRLLCEFAHAASRTKSVFKSKFQSLVVRRGYKRAIVALGHKILRTIFFMLKRHEYYRDSATDYEALSVQRNAPRWIKALTKFGFIPAAA

SEQ ID NO: 53098 - protein, 344 aa, unidentified
MNSTTIAIDVAKSVFEVAISEQPGQVRDRQRLSRERFRRFLEERPAATVLMEACGSAHHWARHAQAHGHRAVLVPPHVVRPYVLRNKTDRTDAKGLLEAFRNEDVHPVPVKSETQQALAALHRLRSTWLATRTARINTVRGVLREFGLLIPTGAHHVVPQARTLLEEADSGVPGLLRPALAVALEEIREIEARIRAVEQQLEAAAAQTLSVGQLRTIPGIGLLTATALVAAVGDVQRFPSGRHFASYLGLTPREDSTGPRRRLGAISKRGDTYLRMLLIHGARSVLCHAKTTTAPPPDRLRAWALQVERLRGHNKAAVALANKLARIVWAVWRHGTDYRGTPAL

SEQ ID NO: 53099 - protein, 400 aa, unidentified
MISVGIDVSKGNSAVCIMKNGAIFQQFVIQHSHKDMKQLKDILSSLEEEPRIVLEATGIYHLPLLQTLKNADFFVAVLNPLILKKYAAVSLRRAKTDRLDAVKIADYGLANWHKLRDYSISEDRYSQLKELGRSYGHYVKLKVIQKQCLTALLDKAMPGIKELVRGCSNDNLAKDKLLDFVERYQHYDRITAKSEKQFVLDYCCWAKKKGYQPLESKASAIYALAKASIPTSSSKLAPTTALVLEAVKVLRQLCETLQLILTQMKELAKGLPEYEVARSMFGVGTILAVRLMAEVGDLRRFYSGRSLVAFAGIDSPPCESGNFVGTKRSISKRGSPILRKTGFEIMKALMTHKPQQDNAVYLFMVKKESEGKAKKVARIAGLNKFLRIYYARVKEAYGAA

SEQ ID NO: 53100 - protein, 348 aa, unidentified
MQRRENYLYVGMDLHKDTHTAVMVNCWNEKLDVIVIENKPSEFSKLAKRVNKMAVKLGLSPIYGLENAYGYGRSLAVWLIEKGYMVKDVNPSLAYDQRKSAPMMKKNDEHDAYCVATVLINQLHTLPDAKPEDNHWTLSQLVNRRDTLVKDGIRLKNGLHEQVSTAYPSYHRFFCDIDRKTALYFWKHYPSPVYLRNKPVDELFEEFKAIASNTTKSKIELIFECVHHDGDTIREYQESRDFITKSLARCLEQQKEELALVDCEIERMLRYFDYKLTTIPGVSIATASKLIAEIGDIRRFSSADKLARYAGIAPIKFSSGGKGKEQSSKQGNRELHGLFYLYIRKYKF

SEQ ID NO: 53101 - protein, 440 aa, unidentified
MKEKKSKAFPIIYPNAAGIDISSKEHYVAVNPDSSDNPIRAFGSFTDDLHAIALWLKECKVDTVAMEATGIYWVSLFLVLEEAGFDVVLVTAKHVKNVRGKKTDVSDSDWIRQLHSCGLLSASFQPDTFTRKLRAYMRHRKNLIEMSATHIRMMHKALEQMNIKLQHVIADITGKSGQEIIKAIIRGERNPEELYAYCDKRIKADKKEAIIISLKGVWKEEHVFELEQSYSIFNFYHLKIKECDANIEKHLREKSGIDTFEEVKLKAKSNKNNLNFNAKEILNELTGTDLADIFGITESNAIEIISEVGLDMSKWPTVKHFTSWLNLAPNNKISGGKILSSRIPKKKNHAGQIFKMAAFAIQRSKNWLAMFYHRIKAKKGTPKAIVATARKIAAIFYKLVSERIKFSPITIEKYLDSFKEQQIKKIKRQAQNLGLQVLGV

SEQ ID NO: 53102 - protein, 430 aa, unidentified
MGFIVPTDMHPEPADQPMPYEWFVGIDWGSQQHQVCVLDGDRRRVGERTVDHDGASLARLADWLWTVSAGQPQRVAVAIEVPRGAIVEGLLERGFHVFAIHPKQLDRFRDRHSVAGAKDDRRDAFVLADSVRTDQPSFRRLHLDAPQLLRLRELSRAEETLLEDFRRSANRFRDQLHRLYPQMLQLCSAADEPWLWDLIDVAPTPAHVALLSEEQVQRVLKAHHIRRVTAQEVLTCLQALALPVAPGAAEAAQAHCQFLLPCLRVLAEQLQACSQQVSALLHTLAEAPGDGEGPSDVAIVLSLPGVGRKMTAWLFAEAAQPLAERDYQMLRTHSGVAPVTKQSGKRRVVVMRRGCNPRLRHALYHMARVAMQCDAHFNSVYAALRAQGQRHGQALRNIGGRLLRILIAMLRHRTCYDASRIRREPVVQMG

SEQ ID NO: 53103 - protein, 340 aa, unidentified
MTKLYVGIDVAKGKFDVSYTIDGQNIFGYSTFTNEKKGIKKFFKQAESYMRKQEQEEIHFCMEATGIYHFELCEYLQNSAHIVSVVNPLKTKSFSKSLMLRTKNDKVDSSMLALYAFLHNPPHTPKLPESIRKFRSLVRYKEVLSESRTKEITRLKSAFDSDVKQLINKKIRFIEKQTSETIFKIQNLIKEDEFLSTQMKLLKTVDCVGDKVAWVMLAEFKFEDIESISPKAMVAHAGLSPKEHSSGSSIRGREHISRMGNSNLRKILFLPALGCIKNPNYFTGFYLNLIEKGKPKKLAVTAVMRKILLTSMGVLRNQQPFDPNWAEKTRTKYFENLQVA

SEQ ID NO: 53104 - protein, 369 aa, unidentified
MTKTIKYVGLDVHKNSINIAIADEGRNGDVRYYGKIDNMNTQLDKVIRKIISTRAEVRCVYEAGPCGYDIYRHLSRKNIDCMVVAPALIPRKSADRIKNDRRDAVTLAKLHRSGELTPVYVPSEDEEALRDMSRCREDAQKALRVAKQQLNAFLLRLGKVYSGRTKWSKAHFNWLSEITMPHRSQQLVLQEYIDTVNECAQRVDRITRQLVEASKACKLAEQVKFLQSLRGISQILAIIITAELGDLKRFKHPSLLMAYLGLVPSEHSSGDKIRKGGITKTGNGHVRCALVEAAQAYRLPARKSRPILKRQEDLPDNIKKISWKAQLRLCGRFQRLLGRGKKPNIVITAIARELAGFAWAIAQEVPQAA

SEQ ID NO: 53105 - protein, 316 aa, unidentified
MTAQCVAGIDVSKARLDVFVLPQRLAFECTNDEAGITMLRQKLQGLGVERVVLEATGGLEYCAARALADAELSVERVQPGRIRAFRTVLGKRAKSDPLDAKLAARFAQAMPEEQARSIPNHQAEAIRSLSARRRQLVDLLVQEKTRLKMSRDPFVLESLKITITHLKQERARIEALLESAIEKDAAIARKNALLRTIPGIGPVVATTLITDLPELGRLNRHEVASLGGLAPHPERSGISRPGDHIGGGRACVRTALYMAAVCAIRCNPGLKTFYKRLVEGGKPHKVAVVAVARKLIVLANTLIRTDAPWNPAFGIG

SEQ ID NO: 53106 - protein, 345 aa, unidentified
MGAYYVGLDVHSRETVFVIQDPTGAVIGRGALPTTPEAFARMCHQYQVPPGTPVALETGTSAFYVARALSALDLKPIVIDAHEVRLKAHRPAQKSDRRDAFELCDGLRRDLYRSIVHIPSPAISALRTALSRRRHFIRIQTAEVNATKRLLRGAGWLIGTRGSLRNGRGWERLLGALASEPALQTHTRFHYAVWQQAGEQVRAIDLLLAELGHGFRDEVRRLETVPGVGPIVALTAVAVFADVERFGSAKHVASYAGLVPSTYQSADRDCHGHITKRGSAELRTMLCEAAQHARRPSHPLHPYFLKALCPAWLQKRGRRRGPPALPSALRPLAGWHRFPTLTSRH

SEQ ID NO: 53107 - protein, 331 aa, unidentified
MSHIIGIDVSKATLDCAYLCDPDQDKAKRKSCQNKLGCFESLVAWVETLSGVPRQSLAFVIEPTNVYHEQLVQFLHSKGTTVYLVNPGRVRKFAEGIGILSKNDVIDADLLARYGLMAKKLIVFEPAPQEVNDLRSLLNRLDVLEKNLRREFNRREKAGKSLTFHRLEQQSITRSIKRHEAEIVFFKDAARGCVNASPWLQRGVELLSTVPGVGERTAWLMMVILSSRQFHCAAEVASFLGLNPIEKRSGKSEYRKPRLSKSGSSHYRQALYFPAMVATRRNPDVQALYERLVVAGKPKMCALGAAMRKLVHICYGVYKNQQPYQPLVSPP

SEQ ID NO: 53108 - protein, 343 aa, unidentified
MQTVTTIGLDIAKSVFQVHGVDANGQVVIRRQLKRRYILAFFQKVPPCLVGIEACASSHHWSRELQALGHTVRLMPPAYVKPYVKRHKNDATDAEAICEAVGRPNMRFVATKTPGQQSCLTLHRTRHLFIRQQTSVINAIRAHLAEFGIVAPVGRHGVEQLLQVVADKSDKRLPEVARTCVAALGAQLQTLKAKILEFDRLIMAWHRSSETSRRLDDIPGVGPALATALVASIADPNAFRSGRDFSAWIGVVPKQNSSGGKDRLGSISKRGDRYLRGLFVAGALAVIRYAKIYGTKHRPWLTALLARRPTKVAAIALANKIARMAWAMMAKGERYKEPVALAV

SEQ ID NO: 53109 - protein, 411 aa, unidentified
MEVLVNKGAGIDVHRDFVEVCAVFGPGKKDFVRQRFSALPDGLQTLRTWLLELGCTHVAMESTSVYWRPVYDALEEAVEIILCNAQHVKNVPGRKTDVTDAHWLAILLRYGLLANSYVPPRPLRELRELTRYHKRVTDSKTAFINRAHKTLQIGGIKLSSVASEAFGVSGRLMLEAIINDENPTPSELADLAKGRLRRKRSELERVFAQPVSEHRKKLLAMQLNDIDRLDASVAEIENTLQPRLEPYRDFIERVAEMPGSSEQSAAVLLAEIGPDMSPWHNDFAKLAAWSGVAPGNKQSAGKRARARTRDGNPYVKTQLVEIAQAAVKVEGSRFQAMYRRVKPRLGAKRALVKIARHWLRSFFEMMVRGERYREFPPVVPDQAAQQRKAEILIKKLAALGYTGATLTPAQL

SEQ ID NO: 53110 - protein, 335 aa, unidentified
MSKITLIGIDTAKSVFHMVGIDQHGKYVWRKKVTRRRFVSTLAQLEPCKVVLEACGASHHWARQIKACGHDARLIAPQHVKPFRRGQKNDYRDAEAVISTALSPGIHFVGIKTTSQQAEQALHRVRSRLLSHRNAAANELRGLLGEYGCAFALGHKVLRSGAVAFIDSGQAQELGLVELITDVLEEMMYLEQRLKLYECQIEERVKADAVSTRMRKELHGIGPMSASALRVKVADPRDFGNGRNFAAYLGMAPGHRGTGGKVKIGKIRRNHDRYLRQLLIHGARSALRHLGDKQDDQSRWLRAVLERRGFNIACVALAHKNARQAWAIMAQEQVT

SEQ ID NO: 53111 - protein, 388 aa, unidentified
MRQTDDLSKSLTPFVQGNTLVAIIELSLSSWLVAGVVPGIARQPLKKLEPDEAELLRLLQRWRDEAVKSGCAIERVVVAYEAGRDGFWLARWLRAHEIEVHVIHSTSVAVSREHRRAKTDRLDTAMLLRVFMGWLRGERGHCGMVAVPTIEEEDAKRPHRERENLVGEKTRIVNRMKAALIRLGIRGFKPELRRAPLKLDGLRTPEGLPIPPNTLDEIRRDLARLAMVREQIDLIEQARLERITQGPKTGPNAMVRLVASIVGMGVETADMLVREVLSRDLRDRRAVARYAGLTGSPDESGSKRREKGLARAGNARVRRGLIQLAWRFLGFQKDSALTQWYRARTDGVKGASKTKMIVALARKLLIALWRMVTTGEVPEGVRLRPVEA

SEQ ID NO: 53112 - protein, 438 aa, unidentified
MCDGSVTVFFQQAKGGITVKIVYPICCGVDVHKTFLVATIITTREITPHYARKRFSTFNNSILQFKQWLLTNNCLDVCMESTGKYWIPVYNLLEDSIRVTVANPKWVRAVKGNKDDVKDSKWIGDLFRLGLVPGSYIPPRPIRELREYTRYRSKLVSCRSSEKNRFQNSWTVCNVALDAVVSDMFGKSAASITDYLLTTDSFDPQHCISLLQRSLKKKADQVVASIEGYQMSNSQKERALLVRSHLDFVDQAIDSLDQKLDVMVAPYESAVLLLGTIPGVDRSSAITIISEIGTDMTQFGSSKRLCCWAGLTPGNNESAGKKKSVRITRAGVYLKPALVQVAHAAVKSNKSSYYKTKYERICKRRGKKRAIIAIARMILTAIYHMFTTGEVFNPSDLYKIDMPQEMLLKQQEKAVKQALKLLTSLGLIQSADISVPVA

SEQ ID NO: 53113 - protein, 412 aa, unidentified
MDVLVDRCAGLDVHRDSVMATVRVPGKRRRQRERHTRAFGTTIAQLAALGDWLAGFDVTLVGMEATGIYWQPVFHVLEHRFECWLLNAQHLHNVPGRKSDVIDSAWICELVEHGLVRPSFVPPPEIRRLRELTRLRKAEIQERTRAIQRLEKLLQSVGIKLTSVASQAYSVSARAMLEALLAGTSDPSQLAELARGPLRAKIPQLREALANRFDISHHGVLVSQLLSHIDALDRAIAVFDERIAVATEPYAELIKLVSTIPGVKQRTAEVLLAECGADMSVFPTVGHFTSWARICPGNNKSAGKNRSGKTLRGSRWLREALTEAAKAAARTKGTYLASHYWQIRGRRGEPKAIGATRHDILVAYYHIVRDQIPYRELGADWLARRYSPEHRARRLVRQLEALGLKVTLEAAA

SEQ ID NO: 53114 - protein, 343 aa, unidentified
MEIHAIGIDLGKTLFHLVALDAKGNVVVRKRCSRTQLLAFTANVRVQVIGMEACSGSHFLGRALQQQGHQVRLMPAQYVKPYVKTNKSDYIDAEAIAEAVQRPTMHFVPIKTEEQLDLQAVHRVRERWVMRRTAVVNQIRGLLLERGVVLPKGRSHLEEGLPKILADAAVRLSDSFRILLAQLKLELDALAARIGEMDLVIQRTAQEDEACRRLTTIPGIGPVTATALVAAIGNGTAFRKGRDLAAWVGMVPREYSTGGRQKLLGISKRGNSYLRRLFVQGARSVLPHRNKQPAALSNWLAQLIARAHQNVVIVALANKLIRTAWAVLCKNETYRTSVPVSTA

SEQ ID NO: 53115 - protein, 358 aa, unidentified
MAKRTTKSQNGKQTVLTAKDRVFVGMDVHKKSYHAAVRINGREVATRVLAPTAEAVLVFLEPYRSGRLHVVYEAGPTGFALVRALREAKVSADVIAPSKTPQTPAKANKTDRLDCRQLTFYDEKGMLKTVAVPTAEEEADRQVIRLRDQVVDARRRIKQQIKSFLLQHGVAQPAGLANWSKESVEMLRQLPLVAALRFCLDAMVAELKDFDERLGQVNREIERLSQEPRHAEAVTRLRKYSGVGVITAMQYRTEVFRPGRFANERQVAAYLGLAPRVSESGERHRTGPLLKAGHGRLRSLLVEAAWIWIQKDETAKATYKRLLQNTAQPNKAITGMARRLAIQLWRTLVPPEERRGAA

SEQ ID NO: 53116 - protein, 395 aa, unidentified
MTATMRDCSERTEVLYLAFDLGERSWKLAFTIGRAQKPRIRNVVARDLAGVTREIVRAKQRFGLSPDAAVRCCYEAGRDGFWLHRWLTTQGIENLVVDSSSIELNRRSRRAKTDRLDAEKLVVMRVRYAEGEGKVWSVVRVPSDDQEDGRQLHRELETLKRARTSHMNRIRGLLVAQGLTVQGFDKFSAEVEQLRRCDGTPLPPALQTRLKREFERLQLVERQIDELDQERVRQLHEQATPQQHEQIRRLLALRGIGINSAWLFVREVFGWRQVRNRRELGALCGLVPTPYASGQSEYEQGISKAGNRRMRPMAVEIAWLWLEYQPRSELSQWYQRRFGTGNSRMRRVGIVALARKLLVALWKYLERGEVPAGAELREWQTKVRPRRRQKRTAAA

SEQ ID NO: 53117 - protein, 361 aa, unidentified
MAQSTTIVAFDQHAATTVAAVLLPGQRTPALHTLTSDSPTILRFVQRLRAPSVQCCYEAGPCGFELQRALTGQGIPCEVIAPALIPRRAGDRVKTDRRDASQLAVLYRAGALTAIHIPSEQEEAARDLLRCREDIRADLLRARHRLSKFLLRHGRRFTGTKKAWTKRHAAWLHAQRWPIAALEQTHCAYVRAVDDAVGRLHAVDAELRDLLTLEPLRARVERLRCFRGIDDLTALTIAAELGDARRFPSAPRVMAFTGLVPSEYSSGAKQARGRITKTGNAHLRRVLVESAWQYRHHPFLGRALRLRQRGAPAAVIEQAWHAQHRLHRRYRRLAARGKAKQHIVTAIARELSGFLWAALTH

SEQ ID NO: 53118 - protein, 391 aa, unidentified
MICVGIDVAKDKHDCFIISSEGEVLADVFTIPNNSDVLNCLLHKMLACSSHSDKIKAGLEATGHYSYNILGFLLNNGLPTYVLNPLHTNLYRKSLSLRKTKTDRVDARTIAAMLMSDVGLKPYTDTAYHNEELKSLTRYRFDKVRERGKLKQSVSRLVCILFPELEKLVPTLHMPSIYALLYEFPGAEQIANTHLTRLKSLLHDASKGHYGRDMAIQLRDAALSSIGSRMPAKSLELQHTIRLIREMDAEIADIEAAIQNIMDELDSPIITFPGISYRMGAMIIAEVGDFSRFDSPDKVLAYAGFSPSTYQSGQLSNAYAHIEKRGSRYLRYALYNATKYVCHWNPVFAAYLAKKRAEGKHFNVAISHAVKKLVRLIFALEKSRKPYQPMA

SEQ ID NO: 53119 - protein, 482 aa, unidentified
MKKKSIFQNRSQQLLRLFEKAGNRLKMMCVPIDYAKKDHMVMFCNGYGDIVRKPFSVNNTLEGVKYLIDQVMRSCRQRHIKKEYVFFGGEDVNSYAENFANALRTKGFLVANVNAHDAKKQRETLQASTDRIDLMGIAMMLLNLRAKCSPAQNGIYRNLRTLVRHRKKLVVMKTEVKNRVHTLVDRLFPGFLNEKNTGINAFSKSSLVLMEDRFSAQQIRRRQKSTLIKILKRCATPDAEKIASKLHSYAAQVITTPNEYAATLQLSLEHHIKHFRCLQENIDQLLSEIALVLAQTQAAFLTSIKGVGIVLAAGVSSEIGNPFEQKPLNNLTSYCGIIPRVKQSGGLEGHTHTGRVSKRSNHILKDYVVQSALQMGLRGPQPLLQDYKRREAAGQHADFGIGRRFLRMAMCLMRSSQVYLPPTLRSPKTQMQERAGYYLTTWPLFRDKWKKAHAHQAAFAKDQPLGQWRQVVQELYDIKLKL

SEQ ID NO: 53120 - protein, 389 aa, unidentified
MYLIGIDISKYKHDCFIATETGEIIKDTFSFTNNQQGFSKFLSTLQSLDPSQTKRIGLEATGHYGRNLKVFLDKHGYTYMEFDPFLVKKFSLGLTLRKTKTDKVDSKLLSLILLSVEHKVYPVKSYHIEDIKSLTRYYKTLTKKRSKEIVNLTNILDYIFPEFKQFFNNRFSKTALYILETYQTPRKISNMNSKSHEKLNKIARGKFSYARFIKLKLLAKETIGSSSELLNNQLQSSLRLYQAIQHEVNIIFDQLLELSKTIDSPVFTIRWIGPVSALSIISEYNNFTSFNSPAAMLSYAGLEPSVIQSGTIEKKGRMVKRGSRYLRETIMNVTINFYMSNPKIYDYYYKKRNEGKSHRVALTHVAKKLIRIIFYLVKNNEPFDKDKLK

SEQ ID NO: 53121 - protein, 342 aa, unidentified
MKFYCGIDLSARDCHVCVIDEQLKIVIEQKLRNELPGIIKLLEPYKAKLKIVVESTFNWYWLIDGLQAEGFEVVLAHTLGLYLITGAKVKTDRRDAYSLAKLLLVGAVPVAYIYPVETRPVRDLLRRRLHLVQVRAGEYGSLRRLLLRQGILSSKQQEIKTATEAELEQWFEHPLVRLHASQELQRIELYSQQIAELEKTILGLAKTEQSYELLLQLPGVGQTIALTILYEVGELTRFANVKVFSSYCRVVPGIAQSGQVSRRGRASKQGNHYLKAAFSQAAVHAVRCYPKVRRYYERQLKRHRGRGRQMICYNIIAHKLAQAAFHVLKEQTEYREELLFGR

SEQ ID NO: 53122 - protein, 420 aa, unidentified
MVYLERGYNLKELPWSKTVSNSFLFKEACMILVGVDVAKDKHDCYIMTSEGEVLFKSFTIANNMEGFNQLYEKILSVIDNFDNVKIGLEATGHYSYNILGYLLDKGLTPYVINPLHSNLYRKSLSLRKTKTDKVDSRIIASMLMSDVSLKPYSNTLYHNEELKSLTRYRFTKVQERAKLKISISRLITILFPELEKLVPTLQMNSIYALLYEFPSAHAISKAHLTRLTNLLNTTSKGHYTKDKAVLIREAAKNSIGSNMPAKSLELKHTIKLIKELTSEINEIEEEIKIIMNKINSPILTIPGIGLSTGAQILAEIGDFKNFSSPDKLLAFAGLSPSTYQSGNMYSSNAKMEKRGSKYLRFALFNAAIYVSYWEPTFSQYLKKKRVEGKHYYVAISHVVKKLVRVIFHLEKTNERYSTVV

SEQ ID NO: 53123 - protein, 391 aa, unidentified
MIYVGIDVAKDKHDCFITNSDGEVLFKPFTITNNLDGFNELYQKIESVTEDATKVKVGLEATGHYSYNLLGYLIDKGLAAYVINPLHTNLYRKSLSLRQTKTDKVDARTIASMLMSDVNLKSYSDISYHNEELKSLTRYRFDKVKERAKLKSSVSRLVCILFPELEKLVPTLHMASVYSMLSEFPGAKHVASAHLTRLTNLLSEASKGRYSKDTAITFREAARASIGSNMPAKSLELKHTIKLIQELDSEIDEIENEIKVIMDEINSPILSIPGINYRMGAMIIAEIGDFSRFDSPDKILAYAGFSPSTYQSGQLDSAYAHMEKRGSRYLRYALYNAAKYVCHWDPTFAGYLAKKRAEGKHYNVAISHAVKKLVRVIYHLEKTKQQYIKVA

SEQ ID NO: 53124 - protein, 333 aa, unidentified
MVEGTKGSHHKEGSTKMSKHTTSAAGIDTGKYKLDIALHGRKDCLQVNNDEAGHGQLSAWLRRHRIKRVGIEASGGYERTVIARLRSDGFTVIRFQPLQVRAYADFRLQRAKNDKIDAVLIAACAAEASTIREAPDPRLEPLAEHLTLVEQIEEDIARFKTRREAVRDVKLRQRLKEEIARLQAWRRRELKQILAELRQHEDLARRLALAESVEGVGQRTALAFIIRAPELGRISREQAAALVGVAPFDHDSSEHQGARHIAGGRARLRKSVYAAALPAAFHWNPHVMALYKRLVAAGKPHKLALIACTRKLVIYVNTVLARGTPWTSRTLPA

SEQ ID NO: 53125 - protein, 375 aa, unidentified
MQTTPHSKVSLYLAMELSNKNWKLAFSNGARIRKVNVPAGHQEAMREAVRRSREHFGLPADTPVRCCYEAGRDGFWIHRFLSREGIENLVVDPASIEVNRRFRRVKTDRLDAEKLLRMLMRHWAGERTVWKVVHVPSEEQEDDRRLHRELERLQKERTAHLSRTQSLLVMHGIRFRGQLSEPRLRRLRTWSGNPLPPGLHVELRDELQRTALLKDQIRALEKERSRRVKESATPSDAKVAKLLQLRGIGPVSSWLLVKEFFAWRNFRNRREVGASAGLTGSPYASGEESRDLGISKAGNRRVRWIMIEIAWKWLMFQPQSELSLWFWKRFGYGSKRMRRVGIVALARKLLIALWKYIEQDELPAGAVLSPRRNTA

SEQ ID NO: 53126 - protein, 350 aa, unidentified
MIIIGVDYHPEFQQIASLDTDTGEFREARLQNREQAEQFYRELASHGAQVRIGMEASGHARWLERLFGELQFDLWIGDAAQICSKRVRKQKTDRQDAQLILQLLMEDRFPRIWVPSSENRDLRQLLWHRHRMVQTRTRVMNQLQAVALNEGLRCKKRLWRERGREQLESFELGRWASRRRQDLLQLLDQLNPTILELTQAVEREAEKYPEAQRLRTHPGVGALTALAFVLLIGDAERFHCGKQVASYLGLVPLEKSSGNRRRLGHITKRGSSTLRFLLVEAAQATVRSVPEWRSKYFHLMQRRGRNTAKVAMARRLAVRLYWMWRRGWNYEQLQRFGSHAGEPENRYGAQ

SEQ ID NO: 53127 - protein, 351 aa, unidentified
MQAQSKEIDFNGHNFYCGIDVHKKSWTVTIQTDELKLKTFSQDPDPRHIVKYLKKNYPGGNYLAGYEAGYFGYEIQRTLESLGVPCLVLHPADIPTSDKDREQKRDPRDSRKIANAIKNQEVTSIWVPPAYLEQDRQLLRTREKLSRDKTRIKNRIKAFLQLYGIVYPESFSQPASHWSSRFIKWLDSIELRESTGTESLQSLVRCLRFQRGEILTVSRNIRKLAQSEKYNQQYLQLIKKPGIGMITAMTILTETGDISRFRTVDCFRSFMGIVPRSHDSGEKERPGRITKRANSHIRYLLVEITWMAIRHDPYYLNIYQNYKKRMPGNKALIRTAVKVTNDIYYCLKKGS

SEQ ID NO: 53128 - protein, 343 aa, unidentified
MYFIGLDVHKKTISYCVKDAAGRVFQEGKIGSTRRELDEWIRTMPQPRTIAMEATIFTGWIYDHLLPHAAKVKVAHPLMLRAIAAAKKKNDRIDAGKIADCLRCDFLPECHIASTEIRDRRRTLRYRSLVIKQMVQMKNRVSGLLMETGVSYNKQRLHKVGYFVELMTGNEDVHESIRPLLKLSRDMISRAQKLDYALVSSLERDPLLKERLRRLRTVPGVGPITALTWALEIGDFTRFSSIKQAISYCGLCGDEKSSADKVMRMPISKQRNKHIQRVLIEAAKLAPRESPELAVIRARELERGNPNRATLAVARKMVSYMLAVERRKQDFVPAEEFSRTAAA

SEQ ID NO: 53129 - protein, 319 aa, unidentified
MAQNDLVVAGIDVAKDKVDVCIRSPSMRRTFAGTAEGRRQLVSWFRRQKVGRAVMEASGGYEREWAKALRKARIEVRIVDPKRVRSFARSAGRLAKNDAIDAEMIAWFAETFDEARGQVCDAAREELVQIVNARQALLEQQTQMQNRCEHAVPVPVRKTHERLLKAIAIEVAKLEAAIAALIKASPHFAETAEIIESVPGLGKITSAGLIAAMPELGQVSNEAISALLGVAPYDDDSGKRQGERQIGGGRRKVRNLFYMACLGAATRHNPVLKAFYRRLLARGKKAKVALVACMRKLIVILNIMIARREKWDASRYAVG

SEQ ID NO: 53130 - protein, 412 aa, unidentified
MELLHRRCCGLDVHKDTVVACLRLVADGKVTTEVRTFQTTTADLLRMSEWLAANECTHVAMEATGVYWKPVWHILDDGDFVLVLANAAHVKNVPGRKTDVNDAMWLAELLAHGLIRASFVPDAQTQEMRNLLRTRKQLVREQSSHVLRVQKTLEDANIKLDSVLTDLMGKSGRAMLEALIAGETDPAKLASLADRRVKASPEEFREALRGRVTKHHRFLLRLHLNQIDALDAAMGTLDAQVEANLEPFRTAVEQIISIPGIKNLGAHVIVSEIGIDMSRFASAAHLLSWACICPRNDESAGKRRSNRIRKGGTWLKTTLVQCAWAAVRKKGSYLQAQFYRIKARRGPKKAIMAVVASILTAIYHMLKDGTMYKDLGSDHFDRRSTDQQKNRLVKRLADLGYTVEIKPIAATA

SEQ ID NO: 53131 - protein, 355 aa, unidentified
MSDVECIGLDVHKTSISAAVLNESGKLVMKAVFMTDAAAVLGFLRGVPGTLRVTFEEGTHAAWLYGVLRSQVAEVVVCNPRKNALRKSGNKNDHIDARKLAELLRSGMLSRVYHDDTQTLTLKELGRSYRSLTDDTTRVMRRLKALYRSLAIDVGGKKLYTRGRREQWLNQVQQTGQRYRAERMFEQLDSLQALRRQIRCDLIEEGRKHAATAVLSSIPFVGAIRSALLIARVQTPFRFRTKRQFWADCGLALETRSSADHQVIDGELRRKSKPVFIRGLNLNHTHDLKNIFKSAATVASVSPGPFRDFYENLLGKGIKPEMARLTLARKIAAISLRIWKKGERFDPEQLKTQAA

SEQ ID NO: 53132 - protein, 428 aa, unidentified
MKFKQNDGQNQRIERISTSHLVVGIDMAKEIHVAQATNFRGIVLAKRHLSFTNDLEGFERLQRWMDELQQKHRLNTLIIGMEPTGHYWFNLANWLADKGINVVMVNPATTKRNKENRDNCPSKSDPKDALVIADVVCRGYYYEYTRQATVFQRLRTMMSDREFWVTNSVRLQNRIIRWLDIRFPEYTSVFKDWTCKRSLATLKDLPSPLDIQSLSVSEVITSWRRHMKRAGGSTGTQKAAQLISQAKQSVGDKTALHEAKQDLGRLLEEFERIVEILEKIEKDILALLSEIPMANQLRSIKGLGTIFAAAILSCAGDLRQYAHGRQLLRKAGLNLAERMSGKHKGQIKLSKRGDATLRKYLYLATITLVGTNPVFRQMHENNVQIKQMKKQQSIFKLLGKLARILIGIVQRGESFLPEKAAPNYAQAA

SEQ ID NO: 53133 - protein, 334 aa, unidentified
MKGITTVGLDLAKTVFQVHAVDAAGAVVVRRQLRRAQVQLVFSRLVPCLIGIEACAGAHHRARELAKFGHEVRLMPSSYVKPFVKRGKTDAADADAICTAVLQPTMRFVPVKSEAQQAVLMQHRTRDFLVRQLTQLANAIRAHLGEFGLVVPKGVHNMGRLVTDAEAADLPAEARMPLDLLVGQFNDTKRRIDAITADLRRAAEADETARRLQTMPGIGPITASVPGATVPDVSAFRSARDLSAWLGLTPKPHSSGGKERLGAISKMGNRYIRRLLNLGAMGVISARKRADPGADWLGRMLARKPVKVVAIARANRMARAIWAMPRTGEAWRAT

SEQ ID NO: 53134 - protein, 400 aa, unidentified
MISVGIDVSKGKSTVCILKPYGEIVSKPFNITHTQKDLSELSSMLFRLNDEVKIVMEATGIYHLPVLTYLQEKGFFVSVINPYLMKSYRNESLRKAKTDKIDSRIIANYGIDHWFKMKEFQTSGEIYEELKLLGQQYRHYMKLHLLSLAELTHLLDLTMPGIKNLLASWNETNRKDKRSDFVERFWHYDVITSMSEQEFTEEYILWAKEKKYVPSQEKAKVIYALAQESIPTLPSETSSFKMLVTEAVRVLKEVDATLGLILSRMQEIAKTLPEYSVVIEMGGVGNTLAPKLIAEIGDVRRFRNGKALVAFAGIDPPPYESGQFVGCNRKISKRGSASLRKVGYETMRSLKMRSRPEDPVYRYVVKKESEGKSKKSAKIAGLNKFLRIYYARVTELYKNI

SEQ ID NO: 53135 - protein, 403 aa, unidentified
MNSVGIDVSKGKSMVAVMRPMGEVVRKPYEIIHRADELERLSHQILELGESTRVVMEATGRYHEPVAAALHEMGIYVSILNPILIKQSGGGTVRKVKTDRKDALKIAKYGLDNWKYLREYTSVDAVRQQLKLFSRQYNLYTKTSVSLQNNLISLLDKTFPGANELFGSPARADGHQKWVDFVTAFWHCGCISHISQKVFAERYQKWCKRNGYHFAKAKAESIYFASIGHFPTLPKNSNTKLLITSAANALTETQKILMSTKAEVLRLAQLMPEYDAVIAMYGVGDITAAQLMAELGDVRRFENRGSIVAFAGIDPEVSQSGKTKSESNPATKRGSPHLRKTLYQVAVTHLRRSPVDEPVYQFLDKKRKEGKPYFVYMTAAANKFLRIYHAKVREYLNNLDPIS

SEQ ID NO: 53136 - protein, 368 aa, unidentified
MNTVKFIGMDVHKKTITIAIADEGREDQPRLYGTIANNLDALNNFCRKMVSTSTQIHFAYEAGPCGYGIYRHLTQKGFNCMVAAPSMIPKKSGDRIKNDNRDAAMLARLHRAGDLTAVFVPDAQDEAMRDLSRAREDAVAVAKKAKQRLKAFLLRNSVVFTGRSQWSKTYFRWLADIAMPHPAQQVALQEYIDAVHESLNRVDRLTDQIRQMVAGWRLAPMVSALQAARGVSMVVAVTILAELGDLTRFKKPSQLMAYLGLIPSEHSSGPSIKRGGITKTGNGHARKALVEAAWAYRMQARVSHVLLKRQKDLPKQICRIAWKAQLRLCVRFRKLAAKGKPRQKVVAAIARELSAFLWAIAKQVPSVA

SEQ ID NO: 53137 - protein, 408 aa, unidentified
MKTLHKRCAGLDVHKAEVVACLRIISKRRVEREVRRFPTTTQGLLALAEWLESAGCTHVAMEATGVYWKPVWHILEGRFALILANAAHVRNVPGRKSDVNDATWLADLLAHGLIRSSFVPPPAIQELRDLTRTRRQLTREIVQHVQRIQAVLEEANIKLCSVITDIMGASGRRMLKAMIAGETDAEKLAALGHERLGCTRAELVEVLTGRVREHHRFLLGQHLRTIEQLKDSVAAFDARIEAALSPFHDIVERLEEVPGLAATSTETVIAEIGTDMSLFPTAGHLLSWAGFAPRLDESAGKHRSTRIRKGAPRLKPVLVQAAWGAARKKNSYFQAQFLRLKARHGAKKAAIAVAASILTTVYHMLRDGTCYQDLGPEYFTRRNPAQAAARLANRIRNLGYHVEIRAAA

SEQ ID NO: 53138 - protein, 346 aa, unidentified
MMIIGCDFHPSWQQVSWLDTETGETGERKLVQASGDAERFYRQLPAPALIGMEATGNCHWLVDLLAELGHELWVGDAAQIRASCVRQQKTDRRDAEHIRILLQEGRFPRIWMPSSGVRDLRQLLLHRYKLVTIRARVKNELQHLCLNQGVQRKHKLWSQAGQKVLRELPLKPWAARRREDLLALLAMLDQQIEPLDRAVKEEAQRDKMALLLQTQPGVGAVTALAYVLTMGDVSRFPRGKQVASYLGLIPREHSSGGRQKLGAITKQGNRMLRMLLVEAAQIAVRFDPGLRKEYLHRCHHKPKAVAKVAAARKLAIRLYWMLRTQTPYPEVVRIESSPRVPLVGAS

SEQ ID NO: 53139 - protein, 416 aa, unidentified
MSVALPQALFFTGIDWASAEHAVCVLDAAGKITARFTIKHSAEGIASLVRRLARYGDPAGLPVAIERPSGRLVDLLLEAGHPVVPVSPNAIKTWREGEVLSGAKSDAGDAAVIAGYLRLRYHRLAPAAPYCDETRALRAAVRTREDLVQMRVAATNQLSALLEAHWPGARAVFADVESPISLEFLTRYPTPAAARHLGHKRMAAFLVKHGYSGRRPAAQLLARLHGAPAGTAGRALTEALQDAVLAVVAVLRALNGAVKDLDRSVAAHLGEHPDGPVFTSLPRSGQINAAQMLAEWGDCRQAYDGPDSVAALAGVTPVTKQSGKYRGVEFRWACNKRFRRAVTTFAGNSRHASPWAAQIYAEARAAGKDHPHATRILARAWIRVIWPCWVNGVPYDPARHRAAAALAGQTPSQPAA

SEQ ID NO: 53140 - protein, 386 aa, unidentified
MGDWNALPIRLSAEKTEDIMTVNFGVDLHKTQFTVHARIGSRVEALSEIKQYPTTESGYAEFLKRIAGYRTSGYDVKIGVESTGNTRFFKNQVEKAGAAVTVINTLKFKVINESTKKTDRHDASTISEFLEKDILPESHICNQETENLRRLMKSRERLVRSIVGQKNEVHALLVSLGLSDELRSLQSKKGRQKILDTLESNNDYVLEAQSVKLMFQIIDQMDSSVKTIEKQLSELTKDDEMVQRLMTIRGCGKITAWTIRAYTEDIGRFATAKKYAAFCGLVPWVQDSNETVHHGKITKRGPQELRTAFVQLVLGIRRCKDTSDWRLMQRYSYMKKNKGSGKSIVAAARKMAEIVWALLTERQDFDSKKMKGCYKSMTLQEQALTA

SEQ ID NO: 53141 - protein, 373 aa, unidentified
MLEKMLLTFEFHNTVSGATAMGIVPVYVGLDYHSETIRVCVMDEAGEVLVNRNVANDPAAVVDLVRVNGGLVQAVSIEACCGAADFATALSAMTEWTVRMAHPSGVNRMKQGPDKTDHTDAWHLANLLRVGYLPHVWLADETTRQLRRLVRYRAGLVEQKKDIKLRVLSLLREERIENTSGASTWSKPWMVWIKTAKLGEQSRWVLDQELRRLEQAEKDLAAVDQRMEQATADDPVVAKLQEQPGIGPVTAVTMRAVIGRFDRFLTGKQLSKYCGLSPCNASSGGRQADAGLIASGNDILRPLLMQLAKRLPREAPRWKELHAKLRITKGANVASAALANRWLRWLYHEMNGRSKAQVPEGQPPVTDVKLQAS

SEQ ID NO: 53142 - protein, 396 aa, unidentified
MRNDVTIYVGIDFSKEKFNACLLMEQGVMGESEFPNSKTGYLKLTKWVKNTSELGRSFDSSLVLFCGEHTGTCSIGLCEYLYAKGMKIWLESALKIKYGSGLKRIKDDKADAEMIAYYAKRFYEPGSCALFEPDSADLKTLRTLYQFRNRVVCDRVAIGNRISSGAFDCSTLVRNRMVKHHKEAQKDEKDIEKEMVKLMETSEELASNYQILISFKGIGPITAAALIIYTSNFKKFDNPRKFACYCGIAPFGKQSGTSINTKPHVSLFAHIGIKAAIVQACKSAMQHNAVIKAYAQRLYAKGKHEGIVMNNVKNKVMHIIFKMIQTQTLWEQEYQQKHMKECKAIPGKNGIGATEAAPIINATLKTSSSVVECTFLEEHSFQKNCKKTSSFSCVET

SEQ ID NO: 53143 - protein, 352 aa, unidentified
MLISHYIGFDVHKKSISYCIKTADGRIVDEGRISATRQALREWAQKRTAPWHGAMEATLFSGWIYDTLKPFATLLQMGNPSMMKAIGAAKKKSDKLDARTIADLVRCNLLPVCYVAPPEMRDLRRLLRYRNLVVGQAVQMKNRMSGMLMEVGAEYNKRRLHGKEYFNELLDRLDEEVPESVKQLLQLSRGALEMFAATQRQLLDRLNKDPLLVKRVKRLQSIRGVGEVTSLTWALEVCDPKRFPSIADAVSYCGLTSALVSSADKQKRGPISKQRNAHLQTMLIEAAKLAPRWNPQLAAVHERELKSGDCNRATLAVARKLVAYLLAVDKSGKPFEVRNPPVKEMEEVRQMA

SEQ ID NO: 53144 - protein, 398 aa, unidentified
MKEAAPVRERITEMQVMIEGQSHFRPFGLPYWAFADLNKGVGSMTASYDYHIGVDYHKSYSHLVVQDSSGKTLRSGRVKNDRQSLGGFLERYRENSHAVVEATRNWMVMYDWLDDICDDVVLAHPLKVKAIADAKIKTDKIDATVLAHLLRADLVPEAWAPTEKSRELRVALRERMFYVRLRTMTKNRIVTVFDRYPEQTALLRKLGDLFGKAGRVQLAQVKVSETDRIQIDRGLDFIGDIDVRIKQSEATIRAMTKANGNVKLLKTIPGIGEFFARLIDAEIDDISRFRNPKKLAAYAGLVPSTYSSGGKTYHGKIIKQGNKWLRWAFVEAVAPAIASDAQLRTQYEQLKIRGTNKARVAIARKLLTIAFQILRDQRAYEPRGTSSTEGASTISRLS

SEQ ID NO: 53145 - protein, 329 aa, unidentified
MKKLFIGLDVSKDVFDFCALNDLGEQESSKKVFQNSKQGIDQFCKSLKKWNDSDILICLEHTGHYGYLLSYELAKRNLKYALINPLEIKNSIGMTRGKNDEIDAYRIAYYALTHYRKIKPHVLPIEDLQKLKALMGIRDGYVKIIVQLKNSLKALEIINESVNIKSQINDHKLLIKRFEKSIDKVEKQMMEIINKNEDIKKAFTKINTVIGVGMLTAIKCIIETDNFTKFKDGRKFSCHCGLAPFEYQSGSSVRGRTRTSSLNNKGLKSILFKAAATAIQHDPQLKGYYLRKLDQGKHKLSVLNAVANKIVLRIFAVVKREEPFVKLIA

SEQ ID NO: 53146 - protein, 320 aa, unidentified
MSAISVVAGIDVAKAHVDVDVVGAQFAPHRFGNDAEAHSAIAAALKAVDVGLVVLEATGGYEAVLACALQGAGLAVAVVNPKQPRKFAEAMGYLAKTDRIDAHVLAEFGQTLARRADLYRFLRPLDDASKQWLAALVTRRRQLIAMMLSERQRLQITPKKLHPSLEAIIQAIKTQLDDVEGQMVVHVKERFGELDALLQSVTGIGPVASATLIAELPELGKLNRRQIASLVGVAPFAKDSGTTRGRRRIQGGRFDVRRVLYMATLTAAFRNPLFKAHYQRLLAAGKLPKVALVACMRKLLTTLNAMVRTGSKWNPQHCRP

SEQ ID NO: 53147 - protein, 388 aa, unidentified
MYLVGIDIAKYNHQCFIATTHGEVINEFSFDNNSDGFKLLLKHLSALDQSLEIKIGLDATGHYGNTLKQLLSANGYTFVEFNPYLAKQFFKSTTIRKTKTDKVDARLLSSMLASVDYKTLHTKYYHTNELKSLTRTRNSLIETRSNTLVQITNALDIVFPEFKAHFSTRLGLTALYILKKYKTPEKISKLTKNQFQTISNKSMGKFTYPKFLKLKDLAKNTIGIKSNSITTVMIIHIDLFHSINTNIEILENEIKKIMILTNCKMITIPGISLMSAATIFGEVMDFNNFSNPAKLIAFSGFDIAIYQSGESLSYGKLVKRGSSLLRKTIWNLVLGSIRLIPEITEYYHKKRAEGKHRNVIFSAISRKLLRIIYHLETNNVSYDKNKIR

SEQ ID NO: 53148 - protein, 328 aa, unidentified
MSYVGVDISKDSFVVAFSSASKSKTITYQNDDKGIEKFINTLDKEQHHCVMEATGNYGVNLLYHLCEQEIKVSLINPKQSNFLSKMKLSTAKTDNKDARLLVEYGEKMNPEVYKMPSDKIILLKQKQTVLTHLIKQRTASKNQLKSLELLNKKDNLAIDMLKNNIDNLDKLIDNLEKDIVSITEEEFEKQVQLLTSIKGIGKKVATTLVIITNGFSFFENPKQLSRYIGICPTYQQSGKSLNYNGHINRNGHSTLRGQLFIASWSAAKYNSSCKALFERLREEGKPWKLAQIAVCNKLIRQAFAVIKSGVAYIDGHVPTLSVPMQTAI

SEQ ID NO: 53149 - protein, 462 aa, unidentified
MTVPKKKGNRKNAAPLPASLPAIRPMIAGLDVGSSQHWVCGPARDDGTPNVRVFGTTTDQLNELAAWLAEQGVESVAMESTSVYWIPIYELLESRGIEVLLVNARQLHNVPGRKTDFSDCQWLQLLHSCGLLRGSFRPGEAITRLRALQRQLANLVAERTRCVQWMQKALDQMNVQVHRAVADLTGATGMAIVRAIVGGERDPARLAMHRDPRCRKSAEEIARYLTGNWREEHLFNLASALRLFDALETEIAAYDAQLLKEIESLQPPERQEDPVPPHPNPAKEKAIKARGEQQARTTLWRFAGVDLTRVDGISAGAAQIVLTEVGPNLAAFPSEDHFVSWLRLCPRTPISGGKPLKKRRNGLGANRIAGVLRMAATSLQRSKTALGASFRRVARHKGGAVAVFATARQLARLIYRMLRYGHDYVDIGEKAYDHRFHTRRLAALTETAKSLGYTLVPNIAAG

SEQ ID NO: 53150 - protein, 407 aa, unidentified
MFCGIDWAEAHHDVAIVDPEGRLVARQRISDDAAGFAVLVELLAAHGDTPTDPIPVAIETSRGLLVACLRTTGRLVFAINPLAVARYRQRHSVARKKSDHGDALVLANILRTDLAAHRPLPADSELVRAIAVLARAQQDAVWDRTLAHNKLRSVLREFYPAILAAVAGKRGGLLRPEARMILAAAPTPTAAARLTHAQLRSLLTRAGRRRDLDGEARRLHAVLRASYLHQPPLVEEAMGRQALALLRQLEAACTSAEELAATTIQQFNKHPDAELLTSHPGLGALTGARVLAEVGDDRSRFADARAVKAYAGAAPVTRASGKSHQVSHRRVKNQRLAATGYSWAFSALTASPGARAHYDRRRAAGDPHVAAQRNLFNRLLGCLHHCLQTRTRYDEQAAFPSQAATAA

SEQ ID NO: 53151 - protein, 433 aa, unidentified
MIPIVYPRCAGLDVHKKFVVACRLSVDGQGKARQELRKFGTMTGELQELAVWLVEGGVTHVAMESTGVYWQPIYHILEEHFEIFLVNAQAVKRMPGRKTDMKDAEWLATLLQHGLLQPSFIPPREQRELRDLTRYRTSLMQERARFTNRLQKVLEDANLKLSSVATDLQGVTAQAILRALVAGQEDPKLLAELARGTLRKKRGELERAMVGRMTQHHRFLLAQLLAQVDFLDEQIALLDERMQALLAEQPPFEEAVGLLDTIPGVNRQLAILIVSEMGVDMSRFPTDRHLTAWAGVAPGNNETGGKQRSGRARKGNRHLTTGLVLGAHAASHQKNTYLRALFYRLAARRGKQRAAVAVGRTILQMAYYMLKRHEGYRELGAGYLDQLDRERTAKRLVKRLVALGYEVKVLEPKALHEEDMERKSTDPPLPLAA

SEQ ID NO: 53152 - protein, 332 aa, unidentified
MKETAICVVDEAGDRIWDAKSRTDPDAIAAVLARRAAGAAKIGIETGPMTMWLWHALAARELPVVCLHARHAAAGLKLQMNKTDRNDAFGLARLVRSGWYRPVAVRSMETHRLRALLITRDQLVGLSTALINKIRGFAKTFGILIGPGKGGTFKRQVRATLSDDPVVAALFESLLAMLARLREQQHTNAKQLGRVARQSGVCRLMMTVPGVGPLSAVSFMTTIEDPHRFRRSQDVGAYLGLTPRRYQSGEVDINGRMSKCGDRLTRKLLLEAANVMLSRTSQALALKDWAAAVGRRSGFWKARVALARKLAVILHRMWIEGRGFEPKVTAMA

SEQ ID NO: 53153 - protein, 371 aa, unidentified
MKEHIMVGCDLHDKNMLLKIAVGRGKADKRLFGNTLGGRRAMVADLKKRSASAGGAEVIFAYEASCQGFGLYDEVTEAGHECHVLAPTLIARSVRHRRSKTDEKDADRILEILRAHVLAGIDLPSVWVPDLQTREDREVVRARLDVADKLARLKAQVRMLLKRNGVRKPSKLGKGWTGAYGAWLLGLTAARSELSHGARVGLASLLRQMRAVEEEIQSLGMEVAALSRKPRYAKPAFMMTLEKGVGQLTAMVFLTEMGDLSRFSNRKQVGCFLGLAPSANESGETSDRKGHITHQGPYRVRKVLCQAVWARVRTDLAAAEAYDRIVSRNPKHKKIAVVAMMRRLAVRLWHVGLETQRASGCFDQNELDAVA

SEQ ID NO: 53154 - protein, 408 aa, unidentified
MNPLFVGIDVSSKNNVAYLMKPDGSKHSSFSVQNNLGGAKLLSERIVSALGSMQLERVVIGLEATSIYGDSLVYALREDGRLGRFQRKIHVLNPKQVRKFKEAYSDLPKNDWVDAFVIADHLRFGRINREVYMDDYRYKALQTLTRARFDVIQNLTREKQRFANYLFLKCSGMAQDKDIQNTSATTIALMEHFETVDDLANADLEELTAFITETGRGKFADPDGTAKAVGAAAKGSYRLPKTVNDTVNQAMAVSIASMRALKGQVKVLDKAIEQQFEIIPNTLTSIPGIGKVYSAGIIAEIGDIHRFDSQASVAKYAGLVWNRSQSGDFEAEHSRMIKSGNRYLRYYLLEAANSVRRCDSEFRRYYDLKFKEVNKYQHKRALALTARKLVRLVFRLLKDNRLYIPPEG

SEQ ID NO: 53155 - protein, 392 aa, unidentified
MVVSVGIDVSKDKHDCFIVSSEGEVLADAFIIPNTMDGFHYLLQRIRHCTAPQDKIKVGLEATGHYSYNLLGFLLDNGLTTYVLNPLRTNLYRKSLSLRKTKTDRVDARTIASMLLSDAGLKPYTDTAYHNEELKSLTRYRFDKVKERAKLKSSIARLVCILFPELEKLVPSLHIASVYALLEEFPGAKQVANTHLTRLKALLETASNGHYKRDMALEIRNAAKNSIGSQMPAKSLELQHTIRLIRKLDREIDEIEEQIQSIMDELHSPITTIPGLGFRMAAMILAEVGDFTRFDSPDKLLAYAGMSPSTYQSGQLKNCYPHMEKRGSRYLRYALYNATKYVCHWDPTFADYLAKKRAEGKHYNIAISHAAKKLVRLIFAMEKSRQPYCSAA

SEQ ID NO: 53156 - protein, 332 aa, unidentified
MKKKLIILGIDVSKATLDCYIHGSAGKHFVVDNNSKGFVVLLETVLKSTKCKKKDLLICFENTGKYSKMLSVFLHTQEIPFAMVPALEIKKSLGITRGKNDKVDAQRIALYAHQKKDQLIPTVLPGEKIDRIKSLLSLREKLIKHRTAYKNGLSDLNDCYQEGETTFLRETQQRMIAVLDKEIEAVEKEVETIIKQDPSMKKNFELILSVKGIGEIVGFYLIAFTANFTSFINARSFACYCGIAPFAYSSGKVIGKSKVHPFANKQLKSLLSLAATSAIQYSAECRIYYHKRVDSGKNKMSTINIVRNKLLSRVFAVIKRGTPYVDLLKFVA

SEQ ID NO: 53157 - protein, 417 aa, unidentified
MTVDGEEREQMIFVGVDWAEAHHDVFVEDERGKRLAGGRLPEGVEGIARFHEMVGAHAAEPAEVVIGMETDRGLFVSALLAAGYLVYAVNPMSTSRYRDRHSTSGAKSDPGDAKVLADMVRTDRHNHRPVAGDSEVAEAIKVLARAHQSMIWSRGRQSNFLRSTLREFYPATLVAFDDLTSGDALEVLRIAPTPELGKGLSRSKIAAALRRGGRQRRIDQRAIEIQDALRSPQLVGSDVVAAAMGASVGATVAVIATMNAQITQLATELDAGFEQHPDAEVVRSLPGLGTILSARVLGEFGDAPNRYADAKSRKNYAGTSPITRASGTKRTVLARYVRNKRLADAIYQWAFASLSASPGARAFYDRRRAAGDTHHAALRALGNRLVGILHGCLVHQCNYDEHTAWAHRLDLPITKAA

SEQ ID NO: 53158 - protein, 349 aa, unidentified
MLAERNLKMKKSLYCGVDLHSSNAVYVITDLNGKVVLRKRLPNNLPTILSTLEPFREALVVVAVESTYNWYWLVDGLMEASYPVKLANPAAINQYNGIKLADDLTDAEFIATLARLDILPTGYIYPKKERPVRDLLRRRTLLVKQRTAIRLSLQNMYMRQAALSLNWLKIRKMPVEQRSEVLNDQDYLLFITQTQIDLIEQLDVHIKQYEDKALTMAALKPEYELLLTMPGVGMILGLTIMLETGEIGRFDHAGNYTSYCRCVRANKISNGKVKGRNNGKNGNPHLAWALVEVVHHAICCCPKARQFYNRKKSKRNGALATKALAAKWSKAAYYIMKRQKPFDLTRVFG

SEQ ID NO: 53159 - protein, 410 aa, unidentified
MEVLVSRGCGLDVHQATVVACLLTGEAGKLPRKQVKTFSTMTSGLIELRDWLAAADCTAVAMEATGVYWKPVYNILEGHFELIVANARHIKAVPGRKTDVKDAEWIADLLRHGLLQPSYVPPPELRELRSLLRYRVKLVNARSAERNRIIKLLESANIKLSGVISDPFGVSGRLMLNALIVGAATPEEMAEFAQKRMRSKLPLLKLALDGRMEAHHRQLLSIQLDRLDRFDRDLKQMDAKLEAKLKPYARQMELLDDIPGIDWVVGATIIAEMGIKMGQWPTVGHLTSWAGLCPGQNESAGKRGKTSIRPGNPYLRSALVEAALAATREKDCYFREKYYRLKARRGHKRAVVAVAHKLLVAIYHVLSSDTPYRELGADYLERLEPERLKLNLVRRLERLGFQVKLEPRRA

SEQ ID NO: 53160 - protein, 321 aa, unidentified
MNKFIQTSADQTFVGIDVAKSSLAVFIDSTNDHLECLNQPKDLRKLARRLKKLEPTLIVLEATGGYETPAAVVFSEFGLPFAVVFPKRVRQFALGLGIIAKTDDIDAQTIAYYDRIADIQAKPLLSDELRSLNDLTTRRQQLIEMRIAEQNRFDVSHPSIQKNIKKHLCRLASQIIAIEGEIDASIKNDQTLQEKDGLLQSVPGVGKVLSSTLLTQLPELGILSNKEISALVGVAPFAKESGTSKGKRFCQGGRNSIRKVLYMATISASRFNPLIKQFYEHLLERGKLKKVALIACSRKLMTILNAMVRNNSNWNPKLESI

SEQ ID NO: 53161 - protein, 344 aa, unidentified
MEHFAGLDVSVKETSVCIVDDTGKIVREVKVASEPEALLHVLGNPAYRFKRIGLEAGPLSQWLFSALAEAGLPAICVETRHMRAVLKAQINKTDRNDARGMAQMMRAGLYRSVHVKTLRSQKLRMLLTHRKLLQSKAIAIDNDLRGTLRNFGLKVGMVGTVKFETRIRELVANLPDLAVLVEPLLVVRRVLREQLGILHRRLLAIVREDDVCRRLMTVPGVGPVVALTYRATVDIPARFKNSKAVGAVFGLTPAQHQSGESDRPGGISRCGDEMMRVMLYEAAQSMLVRSAKWSWLKAWAMQIARRRGMKKAIVALARRLAVIMHRIWVDGAEFRWSRQEAAAA

SEQ ID NO: 53162 - protein, 382 aa, unidentified
MKKVTRFIGLDVHAQTIAVAVAESGRDGEVRGMGTIPNRPEAVRKLVQRLGGAKSLRVCYEAGPTGFALYWQLVELGVDCEVIAPTLVPEKAGDRVKTDRRDALKLARCFRAGELTKIWVPDQDHEALRDLVRAREAAKKDKLRARHRMSKFLLRVGRRPPDGTTAWSTRIMERMRGLTFEQPARTATMADYLGELDHMTERVRRLEKALDDVVEKAPAVLQAVIDGLQALRGIAKLTATSLAIEVGNFSRFEHPKYLMGYAGITPSEYSTGTSQRRGAITKTGNSNLRRLIVEAAWSYRHRPAKGPALRTRQREIPSHLNEIGWKAQHRLCRRFAALQAKGKPSTKIVTAIGRELLGFVWAIATAVEAEHATQPNESRRAA

SEQ ID NO: 53163 - protein, 343 aa, unidentified
MKLSRVGVDLAKNVYQLHGVDRSGRAVWKRRLKRHQWFKVLLDTAGPECEIGMEACAGAHHWGRELQSRGYTVKLIPPQFVKPYVKSNKSDAKDAEAICEAMSRPNMRFVTVKRVEQQDIQATHRIRAELITQRTAKANQIRGLVAEYGLVAPKHLSSLRAAIPCWLEDAENGLTGNFRALLQGVWTDLLLLDDRVGEMDKLIKRLAENNEDCVRLQQLRGIGPMIATALVAAVGDARQYRKGRQMAAAIGITPKQHSSGDRERLLGISKRGDVYLRTLMIHGARAVVARAKHKDDRLSRWVTNIANKKHPNVAAVALANKTARMAWAMLRNETDYDPDFALR

SEQ ID NO: 53164 - protein, 346 aa, unidentified
MDYFVGIDASLETVNVCIVDRDGSVLLEQKVDAEPQEIVALLKRFGHPLKRIGLEAGPTSSWLFSELRAAGYPALCLECRHVKAGLSAMRNKTDRNDARGIAHLVRLGWFRLVHVKSEEAQQIRMLLVNRNLLLGKLQDIENSVRGSLKVFGLRLGKVTKRSFENRALELVEDHPRLAAITLPLLRVRRVLLEEFCRLDRMALKIARNDAVCRRLMSVPGVGVIVALTYRTGVDAPERFTRSRDVGAHFGLTPRRYSSGQVDYDGHISRCGDEMVRTALYQAAHVLMHHGRWSGLRGWAMRIAKRSGAKLAKVALARKLAVVLHRMWIDGTEFRWTNRELTPAAAL

SEQ ID NO: 53165 - protein, 351 aa, unidentified
MENPTTIAIDLSKNVFEIAVERQGRVCQRKRLNRRQTITFLSQCPRATVLMETCGSSHYWGRLAQGFGHTVKLLPAQRVAKNRIGNKTDRRDTGAILRSGTDERVVPVPVKTVEQQTICALHRVRAALMKTRTARLNTVRGLLREFGVTIAKGAERVLPAVREALSESPSTVPEPLHAALLSLMAEAEELEKRSRQVENQLKALSRAVPLVERLEEIPGIGLLNATAFSAMVGSFPRFKSGRKFASSLGLTPKESSSGKRRWLGSISKAGDSYLRTLLIGGARSMLLGAHRTKRPHRLQAWALEVEKRRGRNRAAVAVANKLARIIWAVSTRGVPFKPTFDIQNAPNTVPA

SEQ ID NO: 53166 - protein, 352 aa, unidentified
MNPTTVAVDLAKNVFELAMADEHWRVVGRERLTRSQFERWFANREVKLVVMEACGSSHHWARTFRARGIEVRLLPAQYVRAYVKRNKTDAADAVALLEAVRASDIKPVAVKSVEQQGLQALHRTRSAWMSTRTRRINTLRGFCREFGLVVPEGAVRGIAQIARYLADEHSGLPAILRGSMRLLLEEIRLMEARIGQLEQELSALARQSPACQVLTSVPGIGLLTSTAMVAAVSDPKSFESGRRYASFLGLTPREFSSGDQRYLGRISKRGDRYIRMLLTHGARSILHSATVARRAGRQVDKLKTWALAVQARTNHNKATCALANKLARIAWAVWVKHEKYRGESAPAITPSI

SEQ ID NO: 53167 - protein, 382 aa, unidentified
MRFIGLDVHRTFAEVAVVTNGQVHSAGRIPTTTTGLEAFAKTLTREDHVVLEATGNTYAIARALAPHVGRVVISNPLRTRAIAAAKIKTDKVDARVLAQLLAADFLPEVWMPDETTYALRRHVARRAQLLRQRTRLKNQIHAVLHRNLIPPCPATDLFGQRGRAWLRGQELPVDEGTAVAAYLRALTVPGIDMAVAAGLLAAVGDIRRFATAPKLVGYVGLDPRVRQSGLQPARHGPITKQGRAHARGLLVEAAWAASRTPGPLRAFFRRICTRRGPQVAAVATARKLVVLVWHMLTKEQDYLWARPSLTAHKLRRLELRAGAPARRGRRRGPAYAYNLHELRERERALTVQGERAYQRLVAHWQPGGPKGTGAGATTGERR

SEQ ID NO: 53168 - protein, 350 aa, unidentified
MMIIGCDFHTRYQQIAMMDTETGELVERRLEHEDGEAREFYASLPKPSRVGMEATGYAQWFERMLAELGHELWIGHASEIRAGVVRKQKTDARDAAHLLRLLVENRFPRIWIPSPAERDTRQLLRHRYKLVCFRVSVKNQLHGLAMSQGVCRKKRLFTAQGREELEKLSLGPWASRRRQELLAMLDHLNPAIEELDRAVQQAANSQPEAVRLMTHPGVGPVTALAFVLTLGPVARFQRSKQVASYLGLNPKERSSGGKQHTYSISKQGNTMMRWLLVEAAQTAVRFDPELQRLYQRLKFRRGGSVAKVAVARKLAVKLYWMLRVPAGDAQMAPMQGSPTATLVPHVGSTF

SEQ ID NO: 53169 - protein, 350 aa, unidentified
MSAKFNSEIAVIGIDIGKNSFHIVGLDRRGAIMLRQKWSRGQVETRLANLPPCLVGMEACVGAHHLSRKLTSLGHDARLMPAKYVRPYSKGQKNDFRDAEAIAEAVQRPTMKFVATKTAEQLDLQALHRVRERLVSQRTGITNQIRAFLLERGVAVRQGSRFLRAELPRILATRYDALSPRMVRMLEDLAGDWRRLDERIEGLSSEIEILARQDVGCERLMSVPGIGPIISSAMVAAIGGGDAFTKGRDFAAWLGLVPKQISTGDRTILGKISKRGNRYLRVLFVQAAWVVLIKPKSWDRHGLKPWLEAAKKRLHHNVLAIALANKLARIAWSVLAHGRAFEDGPLRPDR

SEQ ID NO: 53170 - protein, 436 aa, unidentified
MRLKDYGRKPKLRKEFVNNPKLLIVGVDIGRSSHSACFGTNSTVSSKKFDFKNSRNGFKKFEFNIRKMCKTAKCNQILVGMEPSGLYWYGLYERLKKCGFSVCLANCMAVKNNRKTMHDGSSKTDPKDAYSIYDLLTQGKFFLPVERDPELAAAYRLMRKHMFLKKRISRLRNQIRGALHLSFPELNDVIKDLTLPTSLRFLQSNPTPESMMRNGKKRFMKKWQPRKRCGQWRPDKFNLIYEQAKLSIGLKDPQRIDEFEIKTMAKDLEDAVTKAQMWLDKAIELVCQRDDFELLMSMPRIGKPTATALLTAIGNIDEFAYGKQLVKLAGLDIRLYESGTSIKKRPRVTHIGSGYMRHWLYHYAMRLVAFEPDFQCLFERRKKNSPGKGAGQRALVAICDKILRIIYRMLKDQVKYSPEKDKIVAAYYQQQSKMAA

SEQ ID NO: 53171 - protein, 424 aa, unidentified
MLKIVYPICCGVDVHKTFFVATLITTEGIQPKYKKRRFSTFNNQILAFKDWLLENNCRDVCMESTGKYYIPVYNLLEDSINVVVANPKWVRAVKGCKDDEKDSKWIGDLFRLGLVPGSFIPGKDIRILREYTRYRFKLVSCKASEKNRYQNVFTVCNVALDAVVSDMFGVSASSITDYLVSSDTFNPVHCVSLLKRSLKSKADDVVASIEGFQMTDAQKTRARFVKDHYNYLVAHIQALDDRVKELVAPFEGEIKLLCTSPGIDRNSATTVISEIGIDMSQFGSSKRLCCWGGLTPGNNQSAGKKKSVRINRAGVYLKPTLVQIAHAAVKDKENPYYRIKYEQISKRRGKKRAIIAIARMILTAIYHMLSTGEVWNPCDLQQVDMPPVLREKELNKSLRRAANLLAAHGIVSLDDILIPETNSA

SEQ ID NO: 53172 - protein, 350 aa, unidentified
MVVVGADVHKRTHTFVAVDEVGRRLGEKVVEATTVGHRQAVRWARAQFGVELVWAIEDCRHLSARLERDLLAADQKVVRVPPKLMALTRKSARTRGKSDPIDALAVARAYLREPDLPVASHDEVSRELKLLIDRREDLVGQRTSTINRLLWRVHELDLSRSPKPGSLDLAKHRRLLGDWLADQPGLVAELARDELADITRLTDTINALATRIGERVRAMAPVLLPLPGCGELTAAKIIGETAGVARFKSEAAFARHSGVAPIPVWSGNTAGRVRMTRSGNRQLNAALHRIAITQIRLDGLGRTYYHHRRAEGDSSAEALRCLKRRLARVVFNHLHTDQKTRPKPRQLAAA

SEQ ID NO: 53173 - protein, 344 aa, unidentified
MGEVSTIGLDVAKSVFQVHGVDVAGAVVIRKRVSRAKVLEYFGELPPCLVGIEACPSAHHWGRELQALGHTVRLIPPSYVKAYLKRSKNDANDAAAICEAVTRPSMRFVPIKTKEQQTALMLHRTRQLLVRQRTMLSNALRGHLAELGVVSAKSRNGTAELLRIIAGGADSRVSPAVRGILEVLARQYGAIGTEIASIDKSIMALHRGCEASRRLAEIPGIGPVSATALVAEIGDWKTFSSGRCLAAWIGLVPKQHTTGGKDRLGSITKQGNRYLRWLLIVGAMAVIRYARKHGTQKRPWLGRLMERRPTKVAAVALANKIARMAWAIMVRGERYKEPKLLLAA

SEQ ID NO: 53174 - protein, 404 aa, unidentified
MGRAAEVMAPSSSTRTDGGCPVAQVNDLSRSLTAFDPISTLVVVVEMSKASWLVSGVVPGVERQPLKKLEPDATALLRLIERWRSAGWPISRIALAYEAGRDGFWLARWLIARGVEAHVIHSASVAVSRDRKRAKTDRLDAAMLMRVFLGWLRGERGHCGMVVIPTMEEEAARRPSRERESLVNERSRITNRMKSALARLGIRGFKPHLRKAPERLAGLRTAEGAGLPVNVIEEFRRDMARLALVREQISSIEKTRAERLERAPDTGPHAMVRLLARVIGIGIETADMLVREILSRKLRDRRAVARYAGLTGSPDESGLKRREKGLAKAGNARVRRGLIQLAWRFLMFQKDSALARWYRTRTEGPSGARKTTMIVALARKLLIALWRLVTTGEVPDGVELRPAA

SEQ ID NO: 53175 - protein, 413 aa, unidentified
MTTTSPPLRFVALDIHRKYLVVGAVDPHQQVVLTPRRFGFEAFSVWATTHLGPSDAVVLEATSNAWLLYDQLEPLVGSVTVAHPLAVKLIAAARVKTDSRDTIKLAHLLAANLVPAVWVPPVHVRELRALVSHRKRLVNQRTQVRNRLHAVLHRHNLTLPPGKPFAAHQQQWWLALDLSSSEKLRVQQDLSLLHSLEELVGAVEAELGRLSTCDPWVKQVPFLVQLPGLGVLSVMSILAPIGDITRFPSAKKLVGYAGLGASVHDSGETHQGGHITKEGRRDLRGVMVEAAWVAVEHHPHWQAQFERLTRRIGKQKAIVAIARKLLVAVWHVLTEQEADTNAQAQAVARKLMNWITHHGVIPGQHRDRLLLLYQHLDELGLSEELEEIDYYGTTYRLSVRQKLLREAQKSKSS

SEQ ID NO: 53176 - protein, 346 aa, unidentified
MKDVQIIGVDLGKNSCSLVGLEHAGQVVLRRRVRRDGLTALLAKLPSAVVAMEACCGAHHLGRLLVAQGREVRLMSPEYVRPYVKAQKNDDRDAEAIAEAATRPTMRFVALKSEAQLDVQVLHRVRDRLVGQRTSLMNQTRSILLERGLVVAQGRRALLDALQAVEEQGEASKLSGRVRLLLADLLDQWHALDSRIAALDEEFTEMARNDPAARRLATIPGVGVMNATALVAAVGDGRTFSRGRDLAAWLGLVPRQATTGGKPKLLGITKRGSKYLRKLIIQGARAALPSLARSPTPLGAWLRGLLARAHGNKVVVALAAKLIRVAWALLRHGTSWSWALSQLATA

SEQ ID NO: 53177 - protein, 369 aa, unidentified
MEKDTIYVALDDSKRKLVIAILRPGATEPQEQEIPKDPPHIQRLFRRLRREGPVQACYEAGVSGYDLYRQITACDVTCQVIAPALTPRRPGQRIKTDRRDARKLVRLLRAGELTAIHVPDEAEEATRDLVRCREAVRRDVVRWRHRLLKLLDRHGRLWVAEKNWTQRHWTWIRAQHFELAALQRAFEATVFALEQALARQAELDKEIEALAATAPYRDPVGWLRCFRGIGTLSAMVLLAEIVDFQRFRRPRELMAYLGLVPSEYSSGETQRRGGLTKAGNTHARRVLIEAAWHYRHRPTVGRALASRSQAQPDEVVGQAWRAQQRLHRRYRHLIAHGKRPPVAVAAIARELVGFLWAAMTRREARAHVA

SEQ ID NO: 53178 - protein, 411 aa, unidentified
MDVVHARCAGLDVHKATVVAGVRMPSPRCGERCGETMTFATTTRGLRELREWLIAHGVTHVALESTGVYWRPVYAVLEGVVEMILVNARHVKMVPGRKTDVRDCEWLAQLLECGLLRGSFVPPAGVRDLRDLTRLRKTLIRERSQHVNRVAKTLELAQLKLGCVVTDIMGKTGRAILQALSTGIDDPVRLADCAQGNLRKKRAALREALVGRLTPHYAFLLQQHLSLIDALDVHIATLDARIAEAMAPFAEAATLVQSMPGIAARAAQAIIAETGIDMSQFPTAAHFASWARLCPGNNESAGKRRPTTTGKGATWLRATLQEAAWAAVRSRKSYYRALYHRLRARRGPKKAIVAVQHAMVVALWHMLKHRVSHRDLGADYFDRQNTDRIRRHHVRRLERLGYDVVLVEKAA

SEQ ID NO: 53179 - protein, 366 aa, unidentified
MLARGTKDKEHAMSQKIDTSIAVVGIDIGKNSFHIVGLDARGAIVLRQKWSRGQIEARFANMPPCLIGMEACVGAHHLSRKLKALGHDARLMPAKYVRPYSKGQKNDFRDAEAIAEAVQRPTMKFVATKTADQLDLQALHRVRERLVSQRTGIINQIRAFLLERGVAVRQGLRFLRAGLAQILATRTDVLSPRMVHLIEDLAGDWRRLDERIEGLSADIETLVQHDPACQRLMTVPGVGPIISSAMVAAIGRGEVFSKGRDFGAWLGLVPKQTSTGDRTILGRISKRGNRYLRVLFVQAAWVVLIRPKNWERYGLKPWIEAAKKRLHRNVLAIALANKLARIAWSVLAHGRNFEARKIDEAAAQSA

SEQ ID NO: 53180 - protein, 338 aa, unidentified
MFFIGVDPHKTSHTAAVLDAHEHLVSEVRVGADRSQRARLMAFAAGFEPRCWAIEGATGTGALLAQQLVAAGETVLDVPPALSARVRLLDNARSDKTDAHDARSAAVVALRHSKLRTVGLEDHSALLRLLAKRHHDLVAHRTRAVCRLHTVLCLLVAGGLPKGLSAARAARELRRIRPTDQVGIERRRLAGELLAEVRRGDADLIELKARIAVAVTASSTTVTDVVGVGPIMAAYLIGYSGDVRRFPTAGHYARYNATAPIEASSGPNPRHRLNPRGNRQLNHALHIVAVTQVRNDTPGRAYYLRKQAEGKTRKEAMRALKRRISDAVYRQLLTDTPR

SEQ ID NO: 53181 - protein, 359 aa, unidentified
MNATTVGVDLAKNVFVACVADGVGRVVETREFNRAGFLAWLPTLPHGTIVAMEACGGAHCWGRTMQALGLEPRLMAAEFVRPYRKRQAVKNDRADAAAIVAALLAPGMRFIPVKTEAQQQRLAWHSLRLGWIEERTALLNRIRGLLAEFGMVVDTGALRLRRKLAEHEFDTAQPAPIRHLIQGVRDQFDALDLRIAECDRQIAAQQADDAAARRARELPGVGMLTADAVVASVGDATMFHNGRQFAAWLGLTPSQYSSGGKPKLGRITRRGDDYLRTLLVQGARSVLAAALRKARNTPEALTRLQQWIVTLNGRIGYHKTLVAIANKHARQLWAVLAKGEGYNPEAWHQWHDSVEQPAS

SEQ ID NO: 53182 - protein, 413 aa, unidentified
MHYKQKHIYVGLDLHKAHHTAVIIDCWNTKLDEIQIENKPNSFDDLLKWVKKHCKKGMTPVYGLEDTGGNGRALAVHLVEKKQIVKEVNSALSYNERKSYATTQKSDSWDAYCIAKVLLSRLDELPDANPQDIYWTIGQLVARRNALVKHASSLKNQLHQQLSYHFPSYKKFFCDIDGKAALAFWEEYPAPHHLETVGEEELATYLRKASHNTCSTRKAEGILELVKKDGETKRNYQESRDFLIVNMVQDMKRSRELIKETEAQLRQVMPQLDYKLESMDGIDVVTASQLVAEIGDINRFSKADKLARFAGIAPVRFSSGGKGKDQASGQGNRVLNSIFHNLAVQQIQVAKGSNKKQRNPLMHEFYQRKLAEGKTKKQALICVMRRLVNIIYSMMKNKTEYRMVTPLTDRQAG

SEQ ID NO: 53183 - protein, 341 aa, unidentified
MNVKTIGIDLAKNVFQIHGVDEHGKRLFNKQLRRAQMASFFANIPPCLIGMEACASAHFWANKLISMGHNVKLMAPQFVKPYVKTNKHDAADAEAICEAVTRPNMRFVPVKTAEQQAVLALHRSRQSFIKQRTAQANQIRGLLAEFGIVVPRGIQQLQRRLPELVEDADNPLPVLFRTQLSLLQHHMAYLFDVIATLDKQIEQCYRQNALCQRIGKIPGIGPVTASALIATIGKANNFESGRQLAAWLGLVPRQHSSGGKQVLLGISKRGDTYLRTLLIHGARAVLQSAKHKQDAVSSWANQLMARRNNNIASVALANKNARTVWALLAKEREYCAPIISA

SEQ ID NO: 53184 - protein, 393 aa, unidentified
MAVADGGRARSAGRVATAVEDLELFAASLAADDRVVLEATGNALAIAKLIAPHVAEVVLARAKQVRAISHARIKTDKFDARVLAELLAADLIPRVWIGDERVRALRRLVSRRRGLVKRRTQVKNEISAVLPRNLKGRPPMSDLFGRQGRVWLALQELPADERLTVEGGLRQLDFLGEELAQIERLVAAEALGDPEVRRLLTIPGVDVTTAVTLIAVIGDVSRFPSARRLVGYLGLHPRIRQSGAAPARHGRLSKEGSAAARHVLVAAAWTAARSPGPLHAFAARTAARRGRNVATVAVARKLCVLCWCLLTRGEDYAFQRPSLVRRKLRRLELRAGAPRAKSGPRPDPVWNKDADAHERRLAEQAERAYERLVADWTASRRKAGAGATVGRAS

SEQ ID NO: 53185 - protein, 353 aa, unidentified
METAYDGRQVVGMDLHRRRSVLVRMTEDGQRLGVARITNSPAGLCRVIAQAGASPRVVLEGTYGWYWAADTLAAAGAEVHLAHPVGVKAFTYRRVKNDERDAADLADLLRMGRLPEAWIAPPGVRELRELTRYRHKLVGLRTSCRNQVHGVLGKLGVPVTCSDVFGVAGSVWLDELRLPQPYAGKVTSLRQLAGELTTEITMLSEVIADLLAGHRDYQVIQQLPGIGPALAAVIVAEIGEVRRFGSAAQLCSWAGLTPRHRESDTKITRGHVTKQGSRLLRWALIEAVQHVPAGSLPGTVKQRIIARRGKQAKNIAKVAAARRLLTLVYYGMRDGQVRCLSQNPAGSPPARAA

SEQ ID NO: 53186 - protein, 367 aa, unidentified
MKKISTVGARQTRNFREQQLTIGLDLGDRSSWYCVLDEGGEVLLEQRLGTTPKAMKEVFGEMARSRIALETGMHSPWVSRLLSELGHEVIVAHARNVRLIGESRRKDDRFDARTLARLARIDPQLLAPVQHRSARAQAHLMVIRARAGLVRARTSLINTARGLTKSYGERLRGCSPRNLNAEKARQLSPELQAALEPLLAAIESLSERIYEYNQQIAKIARESYPQVARLQQVKGVGTLIALTYMLTLEDPQRFRKSRDVGCYVGLQPGRRNSGQSEPQLHISKEGDAYLRTLLVQGAHHILGPFGADSDLRRWGLKLAERGGKNGKKRAVIATARKLAVLLHRLWVSGEAYEPLRNSRPVRLPAAA

SEQ ID NO: 53187 - protein, 400 aa, unidentified
MDKAHQFSGFLGIDVSKETFDASCINTEGERLFSLSTSMNREGFEDLIEELSSLSLPVESVLMGIESTACYHVNLYSFLVSLGYSVIGMNPLLISNFVKLQLRKTQTDKKDAYVIAQFLLLHRDSLSQTLISSDVSELRDLSRQRESLVDQMSSIKSDIKRLLAITFPELEQMAGVFTKSMLRLLCHYPSAASMKQAKRSKIAKILIPGSYGKQTRASVERILKAAEGSIGTSSPTKEIILRQKASLLMQLEEHLQELTEMLIELCRARIQQDMDILTSMRGIGKKSAMNFLIEMGGDIKQFQTHQKLIAMAGLDPALYQSGKIDRKGKISKRGNRHLRRVIWLMATKVIQFNERFKQYYLKRIKDGLPYKMAVLATAHKLIRVMFAMLTHRTSFNPKIN

SEQ ID NO: 53188 - protein, 555 aa, unidentified
MATDEVGRQLGEKTVKATTAGHATAIMWAREQFGLELIWGIEDCRNMSARLERDLLAAGQQVVRVPTKLMAQTRKSARSRGKSDPIDALAVARAVLRETDLPLATHDETSRELKLLTDRRDVLVAQRTSAINRLRWLVHELDPERAPAARSLDAAKHQQALRTWLDTQPGLVAELARAELTDIIRLTGEINTLAQRISARVHQVAPALLEIPGCAELTAAKIFGEAAGVTRFKSEAAFACHAAVAPIPVWSGNTAGQMRLSRSGNRQLNAALHRIALTQIRMTDSRGQAYYQRLQDAGKTKRAALRCLKRRLARTVFQALRTVHQPSSEHTQPAAACHRSYCSSHLGEPPRLTDMTQKTRIQPLPPKRAGLLIRALYRIAKRRFGEVPEPFTVTAHHRRLLIANVVHEALLQRASRKLPPSVRELAVFWTARSIGCSWCVDFGAMLQRLDGLDVDRLTDIDNYATSSKFSDDERAAIAYAEAMTADPHSVTDEQVADLRARFGEAGVIELTYQIGVENMRARMNSALGITEQGFNSGDACRVPWAAPDVPSAESR

SEQ ID NO: 53189 - protein, 402 aa, unidentified
MFYSVGIDVSMGKSTIAIISTDGEVISEPFEIEHTKSGFNLVLEKIKDIPKDNVKFVMESTGNYCKSLLKIITDNGYFVTVENPLTIKKYCDINIRKVKTDKKDALKIACYGSERWHKLIRYTPSDEIYSELRFLSRQYDEQMSLKVMKKIHLSGLIEVTFPGLKKIFNGDSLYMLMLDVYKKYYHPSLVLSKSKSSFIKDVEKISKKTGHRIGTRVAEEMYSLANECIPSSPCNESTQLAVSNCVLLLQNLEEITNNIIAKMDELARQLPEFEIVSNMSGVGNKIRARLIAEIGDVRRFKNSNCLIAYAGIDVPPFQSGQFVATNRRITKRGNKHLRKVGYETMKSLKTVKPTRDNAVYLFILKKENEGKGSITAKIAGLNKFLRIYYARVMEVYKNLENA

SEQ ID NO: 53190 - protein, 345 aa, unidentified
MSAAYEGRQVVGIDLHRRRSVIVRMTEDGTPLETVQIVNSPESLAMVMARAGESPEVVLEAAYGWYWAADTLAAGGANVHLAHPLGVKAFSYRRVKNDVRDATDLADLLRMGRLPEAWIAPPATRELRELVRHRAKLVGLRTTLKCQVHAALASCGVNVPMSDVFGLSGHELLERVALPKVFRARVDSALRLIEALEFEIGLFAKLIRGRLDRDPGYRAVQTIPGVGQTLAAVFVAEIGDVTRFSRPEQLASWAGLTPKHHESDTTVHRGRITKQGSRLVRWAAVEGVQRAGKHTRLGMTRDRVAARRGHNIGVVAAARELVVCVYYGLRDGHIRRLHPAPARAA

SEQ ID NO: 53191 - protein, 366 aa, unidentified
MLHKLNSAATLIQRTTTEAPRDHMYYIGLDVHKKTISYCVKDVAGHVHREGKIRSTRRELDAWIKTLPQPRLIAMEATIFTGWIYDHLLPYAEKVKVAHPLMLRAIAAAKKKNDRIDAGKIADCLRCDFLPECHMASTEIRDRRRVLRYRNLVVKQMVQMKNRFSGLLMETGVSYNKQRLHKVGYFGELMSTNEDISQAVRPLLNLSRGMIRRSGKLEYDLISSLERDPLLRERLRRLRTVPGVGSITALTWALEIGDYTRFSSNKQAISYCGLCGDERSSADKVMRMPLFKQRNKHIQRVLIEAAKLVPRESPKLALIRDRELQRGNPNRATLAVARKMVCYMMAVERRQQDFLPAEEFKCTAAA

SEQ ID NO: 53192 - protein, 414 aa, unidentified
MKQQEVAAWIGLDWADKKHSIHLQVREGKREHRMLEQKPDVIHEWVAELRQRFQGQRVAIAIEQRKGAVVHALMMYDFIVLYPINPKALARYREAFRTSGAKDDPSDSELLLDLVSKHGDKLRAWVPDTVEARKLQLLCEQRRKIVNHRVALTNRITSLLKQYFPQALDWVGDVASIQACDFLANWPTLSAVQHARKETLRKFYRQHNCRKTSVIDERLLQISNAVPLTNDPAIIEPLSLSVQTYAVQLRSLIRAVQQFDKYIAETFAQHPDHDVFDSFPGAGQVCAPRLAAAFGTDRSRWQSAVEMQSHSGIAPVTERSGDSKWIHHRLACPKFMKQTFHEFSDQSIRFSKWARAQYDELRTRGKDHHAALRALAYKWIRILFRCWKDCKPYSEEKYLAAIRRRGSPLAEKIA

SEQ ID NO: 53193 - protein, 342 aa, unidentified
MGEVTIIGVDLAKNVFQVHGAAADGSVVFRKKLSRPQFARFMADQPPCLVAMEACASAHHWAREMARHGHEVRLIAPHYVKPFLKRQKNDAADAEAIVEAALRPTMRFVEPKTADQQARAVAFRTREQLVKQRTEAVNALRSHLYEFGHVAPEGIGYLSRLAKVVDDPDTGVPDLARDICRMLLEQIAQLTERIDALKARIAAMSQEAEMPRKLQTMPGVGPITALAVETFAPPMEQFRRGRDFAAWLGLVPRQHSSGGKQKLGKTSKMGQRDIRRLLVIGATAVIRWASRRGAPKGSWLARMLERKPVPVVATALANKMARGIWAMLTRGESYRGPVLIGA

SEQ ID NO: 53194 - protein, 366 aa, unidentified
MDAIYIGVDFHSRQQTICYLKTETGELVIRELKHQDKEQVRAFYQQFQGHVIVGLEASGYSPWFEAMIEELGHQVWLGDATEIRRRARWRQKSDRRDAELIWDLMVHNEFPLLHQPAPQSREILRMLRYRQKLIKVRTMSKNSLQAIALQAGLAKGSRLFTKDGQAEFQATAMSPALQWQRDHWFELLKPLNEQLLETMVWFKAQSKADPVIARLRTHPGIGLLTALCIWHTLQPVSRFRNQRKVVAYAGFDPMVRSSAERAIYLGISKAGSRMLRYLLVEAVHTAIRYDDDLKRFYKRVAERRGRPKAKVAAARKLLIRAYIMLRDEIAYAEFRRRAVAVGLPDEVKGQQKVPEVLIGQSTSPGA

SEQ ID NO: 53195 - protein, 412 aa, unidentified
MNAAGIDVSKGKSMVAVLRPFNQMVAKPFEVRHTGSELKQLADYLKGLDGETRVIMEHTGRYYEQIAQYLHDAGLYVSAVNPKLIKNYGTGNTLRHIKTDKADAKKIAKYGLDRWTELREYTPMDTIRYQLKTLNRQCGLYTKTKTMMKNNLIALLDQTYPGVNALFNSPVREDGTQKWVDFAASFWHVDCVRSMSQTAFTERYRKWCKQHRYNFNGDKAAEIHAEAQDQIAILPKDAVTRLMIRQAIDALNAVSATLEKLKAEMLALASQLPEFPVVMNMRGVGDSLGPKLMAEIGDVTRFARRSAITSFAGVDPGADQSGGHEAKSVPTSKSGPPELRKALFLVMDCLIQTKPQDDPVYLFMDKKRSEGKPYLVYMTAGANKFLRIYYGRVKEYLDKLEEPSSTDPTQPS

SEQ ID NO: 53196 - protein, 420 aa, unidentified
MVYLERGYNLKELPWSKTVSNSFLFKEACMILVGVDVAKDKHDCYIMTSEGEVLFKSFTIANNMEGFNQLYEKILSVIDNFDNVKIGLEATGHYSYNILGYLLDKGLTPYVINPLHSNLYRKSLSLRKTKTDKVDSRIVASMLMSDVSLKPYSNTLYHNEELKSLTRYRFTKVQERAKLKISISRLVTILFPELEKLVPTLQMNSIYALLYEFPSAHAISKAHLTRLTNLLNTTSKGHYTKDKAVLIREAAKNSIGSNMPAKSLELKHTIKLIKELTSEINEIEEEIKIIMNKINSPILTIPRICLSTGAQILAEIGDFKNFSSPDKLLAFAGLSPSTYQSGNMYSSNAKMEKRGSKYLRFALFNAAIYVSYWEPTFSQYLKKKRVEGKHYYVAISHVVKKLVRLIFHLEKTNERYSTVV

SEQ ID NO: 53197 - protein, 372 aa, unidentified
MCILDEQGKKTEEKFGVTTREIKRLGSVMRSHFVSEVCMESTGIYWIPVWRLLENDFQLRLVNAQFLKQLPGRKSDVKDAEWIATVLLKELVRDSFVPDGNIQSLRQYGRRINEINKDLVRCQQRIDMILQRCNIRLSNYVSNVDSKSYRKVVDALIKGESSSCELVKLVHGRTINRFSKSIIEDALEGDVKQSDRDLLEQYTQMLDLYQLQKQQCVDSMIQKCRELYPKAFSILLGICGIDKLSAAIIISEIGDNMKLFATAAALVSWAGLRPRNDESAGKIHSRKITHGNKYLRKALMECAWGASRNIGSVFYCRFWHLKEMKKHHNAIIVAIARQLLTIIWTLLSKEEKFDNQYHLKKNIPSITSIKVG

SEQ ID NO: 53198 - protein, 338 aa, unidentified
MPLYAAIDLHSNNSVLCVLDETDRIVFAKRLPNDLAAIEKALLGCPGEIVGVAIESTYNWYWLVDGLQDAGFTVHLVNTCAVKQYDGLKHSGDFEDARHLAHLLRLGILPTGYIYPKEERALRDLLRKRSQLVRQRTSQILSMQNLTARNLGAHASGNEIKRWQDEDIEAMPLLPEQILALKANLAVMDCMDEQIRLLERVILAQARPRADYQALNTVPGIGKALALTIALESGDMNRFASPGNFASYARTVDSRRESNGKKKGSGNTKCGNKHLAWAFIEAAHFAIRFDETIKRWYQKKCAKTLQVVAIKAVAHKLARACFHVMKSGAPFDAARAFG

SEQ ID NO: 53199 - protein, 341 aa, unidentified
MSIVGAFDVHRRQLTFEYLDTVTGELKRGRVMPADRPHLRAWLSRFAGQRDVQFALEGCTGWRYVVEELHAAGITPHLAEPADTAALRGKKRHAKTDKTDTRHLRVHLMAGDLPECWIPPQHVLEARATARLYKDLVDERGGWHQRVAATLFHHGVPAAVSVAKPEGRAAAEQAFLSPAGRQATETGLRQIDRLTAELEPLRRQLDMLSRRQPGCAALRAAHFGIGAVTSVAIWAELGDVRRFANSDDVVRHTGLDITVYSSDGKRSAGHLSRQGPPLLRWALYEAAKCAARPAAPDYGYYTAARDDRGGGRATLSVARKLARRCYHTLRELGEEAMAPAA

SEQ ID NO: 53200 - protein, 398 aa, unidentified
MKGQDTMIYVGIDAASQKHDFFIQRDTGEVFSKKAISIKNDIDGLKKLHNSIKDFVESTKDSNVRIGLESTGHYCKNILLYLIKAGYQVSLINPILTNMDRKASSIRKTKNDKIDAEAICRFLDKNRFDFKPYTLLSYHIDALKSLTRQRFTIVKQQTSQKLIFQRLVNVIFPEFLSLFSSDYTESVLNILYTYPTPKKLARAHESSINKLLHHRCNVSASKIIETAKSSIGQSEDYLGFELQHTIDMIRFYQSQIEMYNKQIEVELNETEYGKIITSIPGVGIITGAMIISEIGDINNFKSSDQLLAFAGLDPSVYQSGEFEASHTKISKRGSKYLRWAIHQVSSGIWKWDKTFNDYYSKKIQEGKHHYVAIGHIDKKLVRIIFSLLKNKSLFIPQK

SEQ ID NO: 53201 - protein, 354 aa, unidentified
MSQKLDISPAVVGIDIGKNSFHIVGQNQRGAIVLRQKWSRGQVEARLANLPPCLIGMEACVGAHHLSRKLQMLGHDARLMPAKYVRPYSKGQKNDFRDAEAIAEAVQRPTMKFVATKTADQLDLQALHRVRDRLVGQRTGVINQIRAFLLERGIAVRQGLRSLRSELPGILATRTDVLLPRMLRIIEDLAGDWRRLDERIEGLSSEIETLARQDKACERLMTVPGIGPIISSAMVAAIGTGDVFSKGRDFGAWLGLVPKQISTGDRTILGKISKRGNRYLRALFVQAAWVVLVRVKCWERYGLKSWIEAAKKRLHHNVLAIALANKLARIAWAVLNKGRAFECVKTEETASLAA

SEQ ID NO: 53202 - protein, 261 aa, unidentified
MNSSQIQTSVNIGVDVGKANLDIALHPSGQFYSIPNSEAHIRRFIKILKNYDIERIVVEATGRHEHALVQASNQAGLPIIVVNPISVRRYAQAIGVLAKTDRIDAQVIAKYAATLKPEFRPIPDKTSKKIRDLLARRAQLMEMSTMEKNRLQIMPKPLHRSIKSLLRMLQNQIEAVTRQIEQEVAKVGHWRTKMEVMTSIPGVGKVLAYTLLSELPELGSLNRKEIAALVGVAPINRDSGKLNGKRRIRGGRHRVRTVMFA

SEQ ID NO: 53203 - protein, 418 aa, unidentified
MSKSSLVCAAIADLDKHARHYLPGQASDLGLVEDESVERMTFSNSWKGILSLTQWMENIGVTVAVMESTGIYWCAAYTAIEKTGVKAVLANPRQVKNVSEHKTDLKDCVWLAVLLRAGFVRPSYVPKGIIKDLRDATRMRARLMKDLARTKNRCHRVLDTVLVDLGLSDAFGKGARITLLKALQREYEGLTEDQQKSFENVTEVQKLLVCDLVENMGVLERRVERYNSAIARLVKKLREEEKDEDIRLLITVPGMALNSAAVVKAEIGSVERFDSPERLCSYLGLAPRVYQSGPVNRMGGIVKASNKHARTSMYLVAQMCAQIGPGELRQFHERIKRKRCHRVATIALARRLMVVIWRMLKDGVSFKNAYDRGLTKRKEERYKRELRRLKKIKSGYGTTEFLEMVQGLMKSEALTLFR

SEQ ID NO: 53204 - protein, 400 aa, unidentified
MHLTANISVPQKNFIAIDLHSDNAVICVRRNALNKAGELVGKNIWCGRVSIRDGLDSFVKALLPYCQDFDHVAVVESTYNWYCLADVFEERGWLLRIADPSTVSQANLKSSDDRTDAQYLAERLRVGSLKHYLPLSYSSRALWDLCRYRMAMVQDCASLKIKLINLYRNQLSKNLRVPDLLDRCRNHMQSNYRFDPDILEKFKDPNIRLRVAFEVSRIAMLEEMIEECNAEIQKQCKDQELVKLCKTIPGCGPVLSAVICTDIATMQRFKSAGDFVSYCRLCSTSKLSNGKSKGLGNAKNGNAYLSWAFTEVAQHASRKPVIREILQRLLRKYGGLRVKAIRTLAAKIARVTFYALKNKQPFNATKCFGIELTKSIKKKLAHKPLSKDDSVVLPTVAGQA

SEQ ID NO: 53205 - protein, 344 aa, unidentified
MSEAFIIGLDIAKYVFHAHGVDERGRAIFSKRISRKKLLDFFAAQPSCTVALEACGGAHHWARQLSQLGHEVRLIPPAYVKPFVKRQKNDAIDAEAICEAAQRPSMRFVAVKSEQQQAAGLVFRTRDLLVRQRTQLINAIRGHLTEFGWIAPKGPSHVAMLAGLIEEEEMAGSLPEAARAMLRLMLDLLADLDGKIADLDKEIARRAREDEVSRRLMTVPGIGPISATAIAALAPPAETFAKGRDFAAWLGLTPLQRSTGGKHKLGSTSKMGERTLRRLLIIGSSAVVLQASKRGAPKGSWLEQMLARKPRMLVTVALANKTARIIWALLVKKENYRAPVVAKA

SEQ ID NO: 53206 - protein, 340 aa, unidentified
MKRYLGVDLHRNCFTVCTLGEDGSNELKKWSIHSLKEFAQHLQATDAVAVEATGNARHFCQALKERGCRLVVVNPHQFQVISRSVKKTDAHDAKTLAEFLAKDMLPEVRMKEDLPAEMASLLSTRDKLVKLRTTLKNKINNLLAARGILLPKESLSTEKGLEQARQADVGELARVELMVLVEQIRHLNQGIAKLEATIKKQGPKLPGYENLKSIKGIGDIGGSTLLSTIGDIHDFANEGKLAAYFGIVPRVSNSNETERSGRITKRGNKLGRTALVQCSLIAMRYSPYLASYYARIKAARGTGKAIIALARKFLGIIYKTLKNGWVFEDFPQFLLAPAGG

SEQ ID NO: 53207 - protein, 472 aa, unidentified
MRESSMPPLRRHRTRKAVARGSGLPASLQAVHLNAAGIDIGSAEHYVAVPEDRDPQPVRRFACFTADLERLAEWLEQCGIDTVAMESTGVYWIPLFQILETRGFEVKLVNARHVKTVPGRKSDVQDCQWLQQLHTFGLLAGSFRPDDQTCVLRSYLRQRDTLIRDCAAHIQRMQKALTQMNIHLHQVLSDITGATGMRILRAILAGERDPVQLAAMKDPRVRSSREQIAKALHGDYRAEHLFALQQSLELHDTYRKMIAECDGHIAHCLAGFDARVDLAEHPLGPPKHGHRTPRGNAVGFDLRAHLYRIAGVDFTRIDGFDALTVQTILSEVGLDPSRFPSEKHFASWLALCPDNRVTGGVVKHTKSRKVISRVATALRRAAQSAANSRSALGGFYRRLRARLGPAKAITATAHKLARIFYRMWKYREPYHPISLAHYETKYRERTLASLRKRAAALGFELVQSPAVSGVVS

SEQ ID NO: 53208 - protein, 339 aa, unidentified
MELQAPQYVGIDLHRRRSVIVRKDPAGVPIETVQIVNDPVALAEVVARAGDAPEVVLEATYGWYWAADVLAEVGANVHLAHPLGNNWGNRRVKNDERDAADLVDLLRLGRLAEAYIAPPELRELRELVRHRAKMVAVRSGLKAQVHAVLAKEGVTVAVSNLFGVGGRALLAEVPLADAYRLRVDSLVDLIDSFGAEIDRFAELVAELLADHPGYWAVQAIPGVGPILAAIFVAEIGDIDRFAGPAQLSSWAGLTPRHRESDTHVNRGHITKQGSRLVRWAAVEAVGRQRGATVVAVHAHRVAERRGNNAIGRVAGARKLLTLVYYGLRDGEIRCLAETG

SEQ ID NO: 53209 - protein, 337 aa, unidentified
MKRYVGVDLHRTQFVVCTRWENGEQEIRQWRIGELPRFVKQLCEEDQIAVEAMGTTAHFYDAVVGRVARVVVVNPHQFKVISESVKKTDRHDAQALALYLEKDLLPEVRMKPKQNRELMHLAETRDLLVKQRSALKGKINNLLAMQGIELKREALSSKIALERILVLPVSGMVKVELRILVEQIRSLSESIAELDERLEEEGQQLPGYENLTSIKGIGSLSATVLLTVIGKISDFADENKLAAYLGLVPKIANSNESERSGRITKQGNKLARTALVQCGLVAKRYSPYLQRFYERIKQRRGGGKAKIALARKLVKIVYDTLKNQWVFENFPSFTLAA

SEQ ID NO: 53210 - protein, 374 aa, unidentified
MSEYSTVFGIDSHARTTTVCAIVVETGETATRTFPGVSPYAEIASWMSSFPGPRMGWYEAGCTGFTPARMLSGGDTRVAPIATHSMPTSPEARARKTDRTDAARLARAGLAGQLSEVWVPDPGVEGLRDACHLLEDLSRARAAARLRVDSLLLRHGVVWDERTARGALRKQWGAEHWAWLRSVRLGEPASQRALGLLLAEARHAQDAYDEALEAAAQLCAASPLAPVVAALQHVKGCGFVTALSFAAEVGDFSRFRSGRRVTSYFGLAPAERSSGGRRRLCGISRSGCAMVRTLLTEAAWRHAGADGALRKRGPEGVPPEVAEHARSGSRRLTARRRSMLERGVAACKANAATAAEMARWLWAVGLEAQRAARA

SEQ ID NO: 53211 - protein, 375 aa, unidentified
MEHHSEAFVALDTAKLRNAVAIADAGRNGEIRYLGEFDNTEAATRQLVTKLASKHARLTFCYEAGPTGYGLYRLIKSIGHDCIVVAPSLIPSKPGDRVKTNRRDAVNLVKLLRAGELTAVWVPDERHEAMRDLVRARDAAVKDYRIKRQNVSSLLLRLGRHYPGKKTWGRSHINWLTSLKLGHREQRIAFEEMLLAVRQVRERIERLEQAMREAVADWTLAPVVEAVQALRGIDMVGAVAFLAELGDLLRFENPRRLMAYLGLTPSERSTGESVKRGGITKAGNTRARRLLIEAAWSYRFPPRVSKDMQTRIGAAPRTAREIAWKAQMRLCGRFRTLTRKGKRSTIVVTAIARELSAFIWAINREVVGSHATANQ

SEQ ID NO: 53212 - protein, 357 aa, unidentified
MNNVAGIDVSKGKSMVSVLRPFGEVVAKPFSIGHTGSELKELADYLKSLDGETRVVMEHTGRYYEPVARFLHDEGVFVSAVNPKLIKDYGNNTLRKVKTDKADSRKIARYGIDNWAELRQHTPMDTIRMQLKTLNRQQSLYTKTKTMMKNNLIALLDQTYPGVNALFDSPVREDGSQKWVDFATTFWHVDCVRNMSLTAFAERYRKWCKRHGYNFSQSKAVEVHAGAQDLIAMLPRDALTKTMVRQAIDALNAISASMERLKAEMQALAAQLPEYPVVMAMHGVGDSLGPQLMAELGDVTRFTHRNAITAFAGVDPGADQSGTHEAKSTRVSKKRGAGAAPRLIPGYGLPTENTAPG

SEQ ID NO: 53213 - protein, 341 aa, unidentified
MEKFIRTAIDLGKNYFQVHGLESEGGRSISRKVKRSKMHEFYSQIEPCRVGMEACGSAHYWARQLTAMGHEVVLIPPAYIKPYVKRGKNDVVDAAAICEAMSRPDMRFVPIKSADQQAVLMLHKTRELLVKQRTMAVNALRGHLAEFGIVAAKGIGRVDELLALAKADAALPHIAGAAVACMAQHLEGLDLSIETVDEEIAKAHKQNPISRLLDEIPGIGTLIASATAASVPDPGVFKSGRDFAAWLGLTPRQNSSGGKEKLGAITKQGNRYIRKMLVTGATSVLRVAGKRKGALADWINAMRARKPERLVAVALANKLARICWAIMTTGEGFRTDTYVKA

SEQ ID NO: 53214 - protein, 356 aa, unidentified
MNNRKYIGMDVHQASISIAVSDAAGKVLMECIIETKAATVLEFIQGLRGSLWVTFEEGTSAAWLYDLLKPHVTKVVVCDPRKNALLKAGNKNDRVDARKLGELLRAELLTPVYHGESGVRTLRELSRGYLAVSKDLTRVMNRLKAIYRSWAIPCAGQQVYSPRHRAAWLEKLREAGVRRRAEQTYQQLDFLMEIRKETRKELLAESRKHPARKLLEQIPRLGPIRVALLIALIQTPHRFRTKRQLWNYCGLGLRTRSSGEYRYTGGHLRHARKPPALRGLNVNHNHDLKNLFKSAATQAGTCKDDPLGEFYQNLLVSGMEPPMARLTLARKIAAIALKIWKKGERFDPAKLKQQAA

SEQ ID NO: 53215 - protein, 349 aa, unidentified
MIIIGVDFHPEFQQIAWVDTETGELQERRLQHREEGENFYRELAGRTVQVRVGMEASGHARWFERLMGELQFELWIGDAAEIRTKRVRKQKTDRQDAQLILKLMLKDDFPRIWVPSWENRDLRQLLWHRHRMVQARTRIMNQLQAVALNEGLRCKKRLWRTKRPQLESFQLAPWASRRRHDLLELLDRLNPTIAELSQAVEQEVERSPEAQRLATHPGVGPLTALAFVLIIGKAERFQCGKQVASYLGLVPAEESSGNQRRLGHITKQGSSMLRFLLVEAAQVTVRSLPEWRSQYFHLMMRRGRKIAKVAMARRLAVRLYWMMRQGSEYQRSSKFGSYAGQPGNRHGVQ

SEQ ID NO: 53216 - protein, 421 aa, unidentified
MKQQTPEAFAAFVGLDWADAKHDVCLQAAGTEHREFLSLAHSPEEMNAWVQTLRTRFNGQPVAVCLELKKGPIVSALRHYDCLVLFPVHPLTVARYREAFTPSRAKDDPTDAELQVALLLKHRDKLKPLQPQSPAMRALTQLVEHRRRLVGDKVRCTHRFTRARKNYVPQVLQWFPEKDTAIFCDFLSRWPPLKAAQLARRSTLEGFFRAHHVRSADVIDTRLQAIKSAMALTTDDGVITPNVLLVQALVAQLRVTLQAIADFDTAIAQRAQEHPDFPLFDALPGAGAVFAPRLLVAFGEQRERCTSADERQKYAGIAPVTERRGKKSWGHWRLQCPTFLRQTFVEWAAESTRHAFWAQVSYQQQRDKGKAHQAAVRALACKWLRILFRGWQEHTPYDESVSLQALKRRRAPLLHNLAKGA

SEQ ID NO: 53217 - protein, 355 aa, unidentified
MNSLGIDVGKKICRAALKDERGDVIREFFFSNNNEGISTLIQSVSHYGKCTAVVESTGNMWIRLHDTLEENEIDTILANPYKTKIIAEAKIKSDKLDARILADLLRADLVYESYVPTKEFREKRSLVRHRISLVRNRTMLENKVHSLLDKYDYKSQLTDVFGKSGIIWLKTLDVSTIDRLIMNTTLAAIENINLQIETISKELAKYGWDSDDVKILLSMTGIDVFSAMLIATEIVDVKRFCTPWKLVSYAGLAPSTRESSGKTKTGRISKQGSPWLRWILVQCAMTAVRYDQRLKSFYERLKSRKGSAKAIVATAKEILVIIWYMLTRRELYRHMNKDRYEQKLSRLKKIKESAV

SEQ ID NO: 53218 - protein, 312 aa, unidentified
MAKPVSQITLGIDVAKDELVIADWDTGTVTTITNEPLEIQRWIRSLPGPIRLAIEPTSHYHLALADKAQAAGHKVYLVNPRQLAHYREAVGERHKSDPQDALLLARYLAREASELRLYEPQSDTGRELWTLLTRRATAVQSCKRVQQSFRGTQISIKALTSEYQKVLKRIDRRMEALIEKPGWKQAYQHCLSIPGIGPANAIALVTAFHRGAFSGQDAFVAYLGMDVRIRESGSYKGKRKLTKKGPAEIRRLLYCAAMAGRCYKPFDQYHQRQIEKGLPKIAANCILARKLARLAFTLMSRQESFKKEGLAY

SEQ ID NO: 53219 - protein, 345 aa, unidentified
MPIVGGLDIHRKQITFDYLDTVTGEVRRGQITPAGRAHLRAWLARFDGRHDVAFAVEGCTGWRYVAWELAAAGVAAHLAEPADTAAARGRKRHAKTDKTDSRHLRTLLAEGRLPECWIPPAQVLEYRALLETYHDLRRERTAWAQRIHAVLFHQGAPQLGDGALRSEQGLAALREASAACLSAAGQLQIAIALDMIAALEARLDMLRRQLLAAARHLTGAKVLATRLYGVGPVTALALTCWLGGAGRFSSSRKAVRFTGLDVTVWSSDRKGPPGRLSRQGPPVLRWAVYEAGKTHARSSAPDHAYYAAVKDRKNSKRAALSEARKIVRQACHILTELGDDAFTAA

SEQ ID NO: 53220 - protein, 343 aa, unidentified
MEAKRYIGIDLHRDCFTACVRLESGREYLKKWKLEDMPKFADKLRPTDQVAVEMTGNTRLFHDQVAPLVDRVVAVNPTQFKVITHSVKKTDPNDARLLALYLAKDLLPEVRMKDKTQAQIASLTQTRDTMVKLRTALKNKVNNLCSAYGVNLNRESLASEKGLRAVGQMPFDPLVNLELKIIVDQIRSLNRSIAELEEMIGKEGQKLEGHKNLTSIKGIGKLSGGILLSIIGDIGDFADEGKLASYFGIVPRVSNSNETEHSGRITKRGTKLGRTTLIQCALIAQRYSPYLKTYYEKMKARRGAGKAIVALARKFLGIIYRTLKNQWVFEDFPNFVLAEQATA

SEQ ID NO: 53221 - protein, 431 aa, unidentified
MGNRENRRLDEITAGTLIIGVDVAKAVQWARFVDDRGREIGKAVQFENNRQGFETILAEIRLRCNNKFLQRPFTKVIIGMEPTGHYWKTLANYLMQKGLRVVGVNPFHTKKAKELDDNSPTKNDKKDALTIARLVKDGRFFDPYLPQNVYAELRGLTNARVSIIKRGNAVKNTITAILDEYFPEIWTVFKHPLKGKASRQILKTCPFPAMILALGEIGVLAEVKKAVKKTVGIKKVLQLIAVAKQSIGVPYGQEAAKLRLGWLLDELEQNERQLEQMEAAMKEMLEATGYAAQMLSIKGIGVVTAASFPGEIGDPLRFQNARQIANYAGYNLVEDSSGKNKSGTCISKRGRSQLRSVLYLMAYTAVGTNPEMKQLYRYLLTRKVNPLKKKQALVVVSKKIISVIFNLLKKQQTYHPELVFGSARQEMLLAA

SEQ ID NO: 53222 - protein, 318 aa, unidentified
MNTNTLQNINVGVDTGKSQLDIYIRPLDIYFTVPNNEKGIKEAIRTITKHRPRRVVIEATGRLEMPFIFACDKAKLSYVIANPLHVKRFAGAIGRRAKNDRLDAALIAHFGEAIQPKLTQLKSENIRLMSDLVTRRNQLLSMQTMEKNRQQILPQSLASSIKPILTALKNQIAKVEEKISKLIDTCPEYQAKNEILQSMPGIGKIASASIISNVPELGFITNKQASSLIGVAPITRESGRLKGKRMIQGGRAQVRTVLYMAMMSAIQCNPVFKATYERLLAAGKPKKVAIVACMRKMVVILNSMLRDGVMWNKDSAKN

SEQ ID NO: 53223 - protein, 328 aa, unidentified
MVALRCVGIDVSADEITVALEGRAEPVTLANDAEGHARLLRLLARKSRRVRVCLEATGIYHLDLALALHRARGIEVMVVNPAAARDFSRALLLRSKTDRVDAGVLLEFARRMPFEAWQPPAAEILDLRAIVRRIGALTVARTQERNRLHAAGRTAELTSAIAWDIEAHLEHLAQSLERLQQQALELVQAHAELQRRFERLVSVRGIATTSALRILAELAVLPGDMSARQWVAHAGLDPRTEDSGTSLHKPARISKTGNRHLRAALYMPAMVAVREEPSVRGFYQKRIAGGLKPIQALVAVERKLLHAIHGMWKTNTNFVGKSFYAMNA

SEQ ID NO: 53224 - protein, 323 aa, unidentified
MTTPNPILVAGIDVGKAKLDVHIAEGSLEHQFHNDKCGRRALRNWLLKRAVTRAVLEPTGRYHRNLHQCLCDAGIETVVVNPLRSRRFAEALGLFAKNDRVEATMLARFGQLGGLEATLPPPRNLTLLSDLLAVRRKLVDQLGALRKLGAELAPEAASCPAASLTALQADIASCEQRMLACIAADPALSRRSAIIESVPGCGPVTAACLCAEMPELGTLDRRQVAALLGLAPFDRDSGQLRGGRSIRGGRSKPRHMLYMTAVAAIRWKPGSKACYQRLTGRGKPPKVALVAVMRKLASLLNTLLREDRMWQAEPPSRQLEAAA

SEQ ID NO: 53225 - protein, 351 aa, unidentified
MSQKTNAVAVRTIGIDTGKNTFHLIGLDQQGTIVLREKLARGRIGRRLTNASPCLIGIEAGLATHYVARELLALGHDVRQVPPAYAKPFRQGHKNDFRDAYAIAEAVLRPSTRCVPVKTDDQLDLQALHRVRSRLVGQRTAVINQIRSFLLERGIAVRQGPRFLRQQLPEILAKRIDVLSPRMIGMIEDLAGDWRRLDERVERVTEEIEQLAHGSESCRQLMTVPGIGPLIASAMVAAIANGAAFAKGRDFAAWLGIVPKQRSTGDRTILGHISKRGNRYLRTLFIQGARVILLRPANWARHSFGPWLTAAAKRLHHNVLATALANKLARIAWTVLAQRRNYETRVVTEAA

SEQ ID NO: 53226 - protein, 343 aa, unidentified
MQDVATVGLDIAKQVFQAHGADASGETLFNTQIKRENVLEFFSKLKPCLIGMESCGTSYYWARQLLEFGHDVRLIHTSYVKPFVKRGKTDANDAEAINVALTQKTMRFVPVKTLNQQAAITIFRTRSLFVSQRTQLVNALRGHLAEAGLVAAKGIQNYSKLLKLMESAADTVLPTVMKQALTDICDQIHRLNDLVTKLDKEIERRVRHDENACRLLTIPGVGPKTAMCVIATIPDIHRFPSGRHFSSWLGLTPRTHSSGGRSVLRRITKMGNSELRTILYLGGTVIMMRDKKTPIGRWAARLRARRPYKVAVIAVANRIARIIWALLTNGGVYDPTYGREASA

SEQ ID NO: 53227 - protein, 294 aa, unidentified
MAIVTVGIDLAKNVFAVHGVDETGKPVLVRPEVTRAKLLQLIANLPPCLIGMEACSGAHHWSREFAKFGHTVRMMAPKFVAPYRMSGQRSKNDAADAAAICEAVTRPNMRFVPVKSIEQQSRLFVHRARQGYVEHRTALINRIRGLLSELGIVLPLRASVIRGEAHKHLEDLPDWCNIVIGDALSELTQLDARISEYDKHIAHLAQEDEQAKQLMRLRGIGPTTASAIAATIGKGHDFTSGRQFCAWLGLVPAQYSSGGKQRLGRITKAGALRYSSRAIAKTGLDKKDATRSAT

SEQ ID NO: 53228 - protein, 452 aa, unidentified
MKKEKMALDVVNPQAAGIDVGSRSHYVAIGQRDEDVKEFGVYNEDLIALGQWLVENEVRTVAMESTGTYWQSLFTTLQSIGLEVILCNGKFTKNIKGKKTDVKDCQWIQKLHTLGLLSGSFLPDEATEQLRTYCRHRANLLEQAADTSRKMQKYLRLLNLRLDVVVKDVTGLTGLSIIDAICKGEMIPEKLASLRHGNCKKSEQEIAKALQSNGRKDLLFSLTHEYELYQIFQGKISACDKQIQKLLNEQINNDDNKRQHHIEGKVHKRINKNNPDININLLSYQYFEGVDLLAIEGVSHSTVLTLMSEVGHGINKFESAKQFTSWLRLAPNNKISGGKILSNKMPKGSNRLKIALRQAANAVGNLKDTALSNFFKRIAFRKGRASAISATARKLAVIIWNMITKKISYKTDTQYEFLDQKRKRKVMEMEKLIHKFDITPDDLGLQLNINNL

SEQ ID NO: 53229 - protein, 451 aa, unidentified
MEKKNVKMDVINPNCAGIDIGSRSHFVAIGQELSDVREFGVYADDLVSICHWLDEYSITSVAMESTGSYWQNLYVELIRHGFEVVLANGKFTKNIKGKKTDVKDARWIQKLHSIGLLTGSFLPDEQTEKLRTYCRQRENWITLGAEATHKMQKYLKLLNFRLDVVVRDVTGLTGLTIIKDICEGNLVPESLAKHRHYNCRKTEEEIAKALKGNNREDFLFGLKQEYESYNFYQKKITECEKMINQFLKQQINTDPTKKKLKAPDKKHKRVNKNAIKGIDLNQASYQYFGGVDLMSIEGVSHSTILSIISEVGPDGFKEFATAKQFTSWLRLAPNNKISGGKLLSSKTPKGSNRLKIALRNSANAIGNLKDTHLSNFFKRVCYKKGRTVAVSATARKLAVIIWNMVVKQIPYKPPIEYLFLDEKRRLGLVTRIRKQIDKFALTNADLGFTTN

SEQ ID NO: 53230 - protein, 372 aa, unidentified
MRDDIQAFVGIDTSKLRNAMAIAEGGRGGEVRYLGEFPATEAATRKLIAKFAGKYRHLTFCYEAGPTGYGLYRLIRSLDHDCIVVAPSLVPKKPGDRVKTNRRDAVSLARLSRANELTAVWVPDERHEAMRDLSRARLAAKGDLKRKRQQISSLMLRLGRCYAGKKTWGPAHMNWLRSQKLEHREHRIALEELLEGMRQENERVERLEQAIREAVPQWSLAEVVQALQTMRGIDLIAAVGVLAEVGDLLRFRHPRELMGYLGLVPSERSTGDKVNRGGITKAGNTRARRILVEAAWSYRYPPRVSRHKLPKVAAAPRRIREIAWKAQTRLCGRFRSLVRKGKPPTVAVTAIARELSAFVWAINREVMGTRRG

SEQ ID NO: 53231 - protein, 387 aa, unidentified
MAKQRARTNDPLPMEVSGENEVGIDPHKKTLTATVLDGRGGTVATASFKVSGDGHRALLEWATSFGPVRRWGIESASGLGRHTAIFLIERGHDVRDVCPTRTAEQSRKRRQGKTDKLDSLRIAREVQADPDLPVAFKRAAGDVGPDETHELLGLWHNQRRSLVKSRRQLLNEADALLHKLPEKIRAALPDDTAVRPRLKALGDRDRTVMWDPVTALRLRLLDDHAAAIAELDAREREASRELRRLTRRSGSTLHELCGIADRSDAELLVETGDPRRFAGEGGFARFNGTAPLPVSSAEGDDEPKRHRLNRGGNRHINAVLHRMAVTQLRCEPRARQIYDDARGNGHTKKEAMRILKRHLSNVVYRRMIYDLNTTRISPPIDASQAAA

SEQ ID NO: 53232 - protein, 312 aa, unidentified
MAILSFCGIDVSKDRLDVVVLPEGRFCSVSNDAAGWAELVARLHPLAVSAIGLEPSGGYERGIIRALLAAGLSVRRINPNKLRQFARARGVLAKNDRLDARLIAEYVAIMPTRVVQRDDAVERLAEIVTMRRQLCDEHVAVENQAAHLEDAMLRRLSKRRLIRLEADIRVLDKRLAEMVATNAAFAQLYALLTSMPGVGPVLAFTLIALLPELGKMSRKQIAALVGLAPYDFDSGKLRGHRSIYGGRMPIRNVLYMAALSASRYNPALRAFSNRLADANKKSKVIIVAVMRKMITTLNAMLRDNAAWQPRSA

SEQ ID NO: 53233 - protein, 356 aa, unidentified
MSYDVKYIGMDVHKEAIVIAVLNEGGKLVMESVIETKASSILQFLHGLRGELHVTWEEGTWAAWLYDLLQPQVQDIVVCNPRRNALLKEGSKSDKVDARKLAELLRSGRLRAVYHGENGLRTLRELGRSYQTIGKDLTRVMNRLKALYRGWGIPCAGTRVYAARYREEWLSKLPQAGVRRRAELLYQQLDGLQALRREVRPEFLAESRKHKAAKLLRQIPCIGPIRAARLIALMQTPHRFRSKRQLWTYSGLGIETRDSAQYRYVGGQVQRSKKPQQIRGLNQNHNHEMKEIFKSTATRASCGTGPFHDFYAALLAKGMEPEMARLTLARKIAAITLTLWKKGERFDAEQLKTQAA

SEQ ID NO: 53234 - protein, 339 aa, unidentified
MELYAGLDLHSRNTYIGIMDKDFNRVFKKRVPNHLEHILQTLDPFRDQIKGFVVESTYNWYWLVDGLMDAGYSSAHLANPSAIKQYEGLKHSDDQHDAFFLAQLLILGILPQGYIYPKKGRPVRDLARKRMFLVQHKTAHILSLQSLLQRCCAIKIRANDMRHLTVEELELWLEEEHLVLSAQANLDSINFLKQKIKQLEKAIIQKVKLNKAFKYLLTVPGIGNILAMTIMLEVGDIKRFPKVGNFTSYCRCVPSRRLSDGKSKGHGNRKNGNRYLSWAFTEAAQLGRRHNECFRRYYNRKVAQANTSLATKALGNKLARICYYIMRDQVPFREELFCH

SEQ ID NO: 53235 - protein, 482 aa, unidentified
MKHKQHEKTKKAICGPTQGNWQQMNRKQRREMTRKIQSEDISLEVIHPDAAGIDIGNESHYVAVPPQRDSQPVQRFGCTTAELKQMAAWLKQCGIRTVAMQSTGVYWIAVYDILEEAGLEVYLVNARDTKNLPGRKSDVQESQWLMKLHTYGLLRNSFRPSQEIRTMRTYWRQRNDLVQSAGRHIQRMQKTLTQMNLQLANVLSDISGVTGQAIIKAILAGERDPDKLAEFRDPRVKARKGDIARSLEGNWQEDLLFVLQQEEDGYEFCQKQMTECDQRLEHYLQQRDDRSAGASLPEEKRKERHKKRKGNKPRFDLRTGLFRMTGTDLTRIDGIDVMTATTILSEVGWDMSKWETEDHFVSWLRLCPDNRISGDKIIGKGRLPTNNRVSTALKMAASTLRTSQTYLGAQFRRLKSRLDTPVAIKAMAAKLARLVYRMLRYGMKYVDRGAEFYEAQHRERQIKHLKSKASKLGFQIIQVPAA

SEQ ID NO: 53236 - protein, 459 aa, unidentified
MPKKSSNKAKSQRSRERALLQKVHLNAAGIDIGADAHWVAVPEDRDANPVRSFGVFTRDLILLCEWLKRCQVETIVMESTGVYWIPLYQMLERKGFEVRLVNAHHVKNVPGRKTDVKDCQWLQQLHTFGMLGGSFRPQAQMCVVRSYLRLRDTLSKDCNSLVQRMQKALTEMNVQLHRVISDITGVTGMSILRAIIAGERDCLKLAQLRHPQIKSSALDIAKALEGDYCQEHLFALQTALELYDSYLLKIMACDRHVQEALSTFEPKTSAPAPELDRMRSAEKRQEALRRHHLEQMTGADLTKLPGLDLLAVERILSEIGLDMSRWPSEKHFCAWLNVAPNHRISGGQILSSKPRKNANRAAAALRLAAQSAMQSKSAIGAFIRRIKSRLGAPTAINAGAHKLARLVYRMLKFGKAYVETGQEAYEKFFKERTLRNLQRKAHQLGFQVTPITTPTVPVS

SEQ ID NO: 53237 - protein, 459 aa, unidentified
MAKQVRQKNAARKADQLEGLPPLNRNAAGIDVGSAVHYVAVPAGRDAEPVQEFGSFTADLHRMARWLQACKVDTVVMQATGVYWTALYDVLESYGFQVHVVNARHTKTLPGRKTDVLECQWLQKLHTFGLLNNSFRPAEEIRVLRSYMRQRENLVQAAGTSIQHMQKALTEMNIQLGNVISDLSGTTGMKILRDIIKGERDPRKLALHKDARIQASRAEIARSLEGTWRPELLFVLEQSLELYDTYVEKIQQCDRRIEEHLKTMEAKADPAQPVPEPRRMRRARQHEPRFDLRGQLYRISGVDLTQIDGVSVQTAQTVISEVGLDMSRWPSEKQFASWLGLCPDNRISGGKVLKRGTRHVVNRASTALRLAAWSLLRSQSALGAKFRRLRSRLGAPKAITAMAHLLARLIYRMLKFGHQYVDKGIEYYETKYRQQQLQWITKQAAALNMQLIPLTGVDG

SEQ ID NO: 53238 - protein, 453 aa, unidentified
MGKNKGKATVEQQGLPQVRMNAGGIDIGASEIWVDVGDKDDEPVRRFETFTVDLTRMAEWLKGCGIETVAMESTGVYWIPTFQILERAGIEVFLVNAKQAKNVSGRKTDMLDCQWLRLLHSYGLLPASFRPAADIAVLRSYLRHRQMLIEYAAGHIQHMQKALTQMNVQIHHVIADITGSTGIRIIRAIVAGERDRKRLAAMRDVRTKATQETIAKALEGDYRPEHIFALKQSLELFDTYQKQIQACDEEIAGHLRRMDSKANPDQLPTARREKKKRRNQSTFNVREQAFRISGVDLTEIDGISESAALALIGEIGVDMSRWKTEKHFASWLALCPNNKISGGKTLKRSTRKTANRARDILRLCAQTLMNSRSALGAFSRRMCFRLGKPKGIVATAHKLALLIYRMLTLGTRYVDIGQDRYEQEYKQRALKHLARKAKDFGFQLVPSVQTSVP

SEQ ID NO: 53239 - protein, 418 aa, unidentified
MTTTHSITPTLLAAIDISKHRHEVLIGIPGKKRRRRLTIMNTLEDFHRLITILASYELPVRIGFEATGNYHRPLAHHLGQAGFDLKLVSSVGLARTREALHNSWDKNDPKDAQVILHMLEIGAVQFFHDPLVTGIADIQELSKTHEIVSRSKTELWHRILTHYLPLYFPEAERFHRSSRSGWFLAFLEKYPSPHMISAMSREEFIKDAWQVVGRKVSKKRLLSDIYATAVGSVGLPVQPDSDAVRMFRLVLAEGRSLIRQRDEIEARAVELLSDHPDYQLLTTIPGIGPINAMTILAEAGDLRRFRHHRQFLKFCGMDLATVQSGMFRGQSRISKYGNARLRRTLWMAGQIAILQHTNSFRDKFERYIARDRHNAHLRRKAYTAIAAKMARTVHAVIKNGEPYRPFFEGVSPGGKTPL

SEQ ID NO: 53240 - protein, 411 aa, unidentified
MHNRQNYLYVGVDLHKEHHTAVIINCWQEKLGEIQFENKPSAFSKFLLEVETYVCDGITVVFGLEDVGGYGRALAKYLVDHERVVKEVNPALSFLERKSQVMIQKNDSWDAECVARILVNKFNQLPDAKPNDLFWSIQQLVSRRNALVKAQSALKNQLHIQLNHHYPSYKKFFSELDGKTALAFWQQYPSPSCLEGTNIKRLTAFLLDVSNNTCSVKKASEILRLVKEDGQTMKEYQEMRNFLVRSIVREIEFKKKEMKYIERELKQLVNLLDYQLETMPGIELVTASALIAEIGDIRRFSNAKKLARFAGIAPVYFGSGGKGKAHKSKQGNRALHALFYNLAVQQVQVAKGSKMPRNPVFHAYYQKKLKEGKTKGQALVCIMRRLVNIVYGMMKYKTAYELPVVEEKEVV

SEQ ID NO: 53241 - protein, 316 aa, unidentified
MSESTSFVGIDVSKNVLDVHVLPGGEHWQVSNDEVGCAGLVERLKPLGETVLVVMEATNVFWRMAAAALASAGVACAVVNPRQVRDFAKSMGKLAKTDALDAQVLALFAERIKPPVRALPDAQCQVAAEMLGRRAQLMGMRVAEKNRLATASAKKVRKDIEATIAFLEKRLGALDREIDTWLQSTPIDQSRVNLLQSFTGIGQNTARSLLITLPELGSLSGKQIGALAGLAPFAKDSGNKRGARHIAGGRSIVRAALYMPAITAIQHNPVIRALYQRLVQAGKHHYVAITACMRKMLVILNAMLKSNQPWKDPQNA

SEQ ID NO: 53242 - protein, 415 aa, unidentified
MQSCLFVGVDTHKRTHTAAVFSGYFSLLATITFDNSFLGFSKFLTELENISGSNTLIFGLEDSQGLGNFLAEFLLKKGFDVMDIDPVLTDRGRRRTTHKDKSDDRDACLIAKTLISKKDSLHKVTISKNSLAIRELVKYRELLVGESTRIKNRLHVLIFNQYMEISSVFPDLFSKCALAFFARYPDPFKLKGESLDSLTVLLKSNSKGRHGKKMATEILSLASTDNMPDILTDARSSIIKKHIERLSAIQEELKDILGMLSELVLQSSYDSLTSIPGVNIVTAAKIISQVVDIGRFSSPSKLAKFIGVAPVEKSSGRKIRYRKSKHGKRYLYSAIFFIALNHISRTRDGRDNNPISRAYYLKKISEGKTKKEAITCLARRLTDVIYAIMRDGSMYSFSKVESVCNNCEILETIAS

SEQ ID NO: 53243 - protein, 464 aa, unidentified
MKTRLQNQKKKKTKINLDSLPLLEPNAAGIDIAHREHWCAVPSDRCPKPVRPFGTFTADLEKMADWLQECGIKTVAMESTGVYWIPAFQVLEGRGFKVVLVNARHVKNVSGRKSDVLDCQWIQRLHSYGLLNASFRPADAMCVLRSYLRYRDDLVCARSVQCQHMQKALQQMNVQLHQVLSDVTGLSGLRIIQAILAGEGDAKKMAALADRRVQASQATIQKALRGDYRAEHLFVLQSALDLYQAYERKIHLCDEQIIAQLAQLPPRVDVAQKPLPPRKPGRSWLQDMVAGTDLREELYRCTGVDLTAIEGLGVLTAQVVISEVGLDMARWPSEKHFCSWVGLCPDNRISGGKVLSSHTPHVLNRVADALRIAAATLERSKTALGAFYRRMRARLGAASAITATAHKLARIIYRLLKHGELYVRQGMEAYENKYRERLLHNLKKTAATFGFELTPAQQLPPSVS

SEQ ID NO: 53244 - protein, 407 aa, unidentified
MGMYCGIDWAEGHHDVALVDDDGVVRANRRINTEAEGFSDLLAMLAEHVDDPTEVAVAIETDKNLMVVALRAAGITVYAINPRSVARYRERYRQAGGKSDAVDALVLANILRTDRHAHRALPTISEHALAVRALARQHQEAVWARQLTVNRLRSVLLEFYPGALQAFPNLTHQAALTILKAAPTPGDGQKLTRRRIVALLRRSGRGDRVGLAETIQAALRIPQLRQPACVEVALGHTLVGLVEIVLTMQASIAQLESELAVEFHAHPMAAILKSAPGLGPVLAARVLAEIGDDPTRFTTADGLRAFAGTAPITRASGRTRIVSARRIRNKRLANALHWWAFSAITKSAGARGHYDRRRAAGDSHNAALRNLANKLLGRMWWCLANGCLWDEMAAWPLLESERERVAA

SEQ ID NO: 53245 - protein, 256 aa, unidentified
MKMIEHCYGGIDVSKDRLDVLVLPDRRCFSVDNNAAGWSELVERLHGLSIAAVGIEPSGGYERCIIRILLAAGLSVRRINPNKLRQFARARGVLAKNDRLDAQLIAEYVSIMPTRVVQRDAGTERLAEVVTMRRQLCDEHATVENQAAQVEDVMLRRLNKRRLARLQADIHLLDRRMAEMVAADAVLAQRYELLTTMRGVGPILAFTLIALLPELGQMSRKQIAALVGLAPYDFDSGKLRGHRCIYGGRMPVRNVL

SEQ ID NO: 53246 - protein, 433 aa, unidentified
MSNFFYSPVIGIDVSADFSYTAILAPNGDIYKKSFKIQHDLNGFNHLVNEIKKVEEEFNMKTAIFMESTGVYHLSLFHYLNNYFDNTFVINPLVTKSNKNGDIRKVKNDKKDALSIATIGKFQNIKLSQQLSLDIFLLKNLVREYYKLTDTSSTFKKKLSADLRVIFPGYNTIFSDSTSKSSIELLSQYPTPQSILEAPKENIIKIFLNSSKKGIIWSENTYSKLFKVANEAKIIGLPLDGLAVKIASSITLIKTIQSEIDTLLQKINNFIQSETFPESIRANIELIDSIPGIGQLTAITIIAEIGDIDGFLKPKHLVAFFGIDSSVNQSGNFKGDDNKISKRGTRIGRRALYSVALASIRNNRNGVPINKVLLDYYQINLKGKKPKIALVAIMHKIINYIFAVLRNQTPFEQRDPKIHKQMFLENNSLNKVA

SEQ ID NO: 53247 - protein, 336 aa, unidentified
MDRQYVGIDFHRRRSVIVRMSSQGERLAVLRIANETALLAAAIAEAGPEPEVVIEATYGWYWAVDLLQSMGARVHLANPNALNWGDRRVKNDVADATDLADMLRLGRLPEAWIAPPALRELRELVRYRAKLVQLRSGLKAQVHAVMAKEGVLPTVGDMFSKSGNAELDRMGLAASYAARVRSLRELIVVYDHQIAELEKVIHDQLRHDRGYQAVQAVNGVGRTIAAILVAEIGDIHRFDSPAQLCSWAGLTPKHHESDTKTRRGAITKQGSRLLRWALIEGISRYHGGPHLAAEYARIAKRRGTNKARVAIARKTLTLVYYGLRDGEIRCLALKAA

SEQ ID NO: 53248 - protein, 430 aa, unidentified
MKSNTQNAKIEAITEKTLVLGIDVGSETHYARAFDYRGVEYSKKPFKFSNTEAGFVTFKAWVLDIKEKHGKDKVIPGMEPTGHYWFNLGKFLQDNEMKPVLVNPHHVKKSKELDDNHPTKNDRKDPKVIAGLVREGRYMIPYLPDGVYADLRTASNIRFQLQAELTRIQNRINRWFNIYFPEYKTVYGKPDAKSGILILKEAPLPEDILTLGIDGVNQIWRDAKMRAVGKARAKTLIEAAEHSVGSKEGAVSARMEIRMLLEDYESRNTRLQEVMVLIEELVKQIPMAEKLLEIKGVGIRTVSGFLAEVGDISRFNNPKELQKLAGLALVENSSGKHKGETTISRRGRKRLRYLLFEVAMSLVAKNPEFRELHNYYTTRRLNPLKKMQSLMAIAAKLIRVFYAMLTKGVDYDPKKMVSDIKRPAVYLQAA

SEQ ID NO: 53249 - protein, 332 aa, unidentified
MLDTETGELTEKVIRHEGNTVREFYASLGKPEVVGIEATGAMQWFLELLEELGIESRVGDPAKIRAAETRKQKHDRRDALLILDLLERDCFPAIWMPSSEQRDLRSLLRDRDQWVKMRARLQHTLQAIALNHALRKGSSLWSGTGQEALAKLPLPAYTCQRRNELMSLYAQLQRRIQQLDKQVEEQAQHRPQARRLMTHAGVGPVTALATDVFLGDPSRFTTANEVASYIGMIPSEHTSGKRQRLGKMSKQGNSLLRYLWTEAGMHASGKDPELKRFYRRKLIQKGMGKSRIAAARKLGIRLWIMMRDEIDYEEFCRRGKLRQIGESPCRSA

SEQ ID NO: 53250 - protein, 405 aa, unidentified
MWYVGLDWADTHHDVEVLDEAGKRVGVRRFAHSHQGLNELKQFLLNIAPEVEHLACIVETNHGLLITFLLEAGIPVYPVNPKTANQLRKAAGAKTDQIDAHLLAKIGRLELAELRRLEPDSPIVQELKTLTRDQDALIQTQTRLVNQLTACLKEYYPAALHLFAKVQQRSTLVFLQAYPTPQAAQAASVAELTATLRAGKHTNPTKAAPKIFEELHRPQLVASEVIVRAKSRLLLSLVKQLLVVIQEMASYDKAIRSLFLRHDDQELWRSLPGAGKRLAPRLLAEWGDERSRYADATSVQTLAGTAPVPFQSGKYAKAHKRFACVKPLRNALYQFAWQSTRQEPWALAYYQRKRARCGKSHSMAVRALANVWVRIMYRMWVTKTSYQTATFEAAKRAHAPRPHAA

SEQ ID NO: 53251 - protein, 431 aa, unidentified
MSDPGNDSNDSGGIRFDRFTHFGGLDWARSEHQLVVVDPTGRVVLSLRFANDAQGWALFRQKVAAFGRLAVAVETNCGPAVERLLEAGLTVYPMNPKAATRYRDRKAPAGAKDDTLDAWSFADALRTDGHGWRPLLGQDALTAELRLLCRDEIKLIEQRTALINQLRAALCEYYPAALDAFEDWTGEGPWRFVIAFPTPGELAGAGKRKWEKFLHANKLYRPQTAQRRLAAFADATKFASPNPAVTRAKSLLAVTMAKQLCLLQSQLDEYRRRIVELFHDHPDHGCFGSLPGAGAKLAPRLLSELGSNRRVFASAEALQNYAGTSPVTRQSGRSRVVAVRRACNKTLRATIHLWADLSRNTCVWAEAYYRKKRADGMAHVAAIRCLGHRWMKILWKMWQTGMPYDEALHLKNQTEHGSWVVKLLPSPEPNR

SEQ ID NO: 53252 - protein, 406 aa, unidentified
MELVPIHKRVIGLDVHQAQITACAIIEEASGETRIEQRQFGAFKRDRRELAFWAAALDPDEVVMESTGIYWKSPYAALEAVGIRATVVNARHVKQVPGRKTDIGDAQWLATLARAGLLRGSFVPPAKLRELRLIARQRQKLVGLLSSEKNRLHKVLTDAGIRLGVVVSDIHGQSARAMIKGILKGQAPNEVLALASRRLKASREELHDALQGELTASHVFVLDELLRHIEELEARIARFDARLLDELASEHNALALLQTLPGVDTIGAAMLLVEIGSDMSVFGSPDRLASWVGICPGNNESAGKRKSGRVRKGNPYVRRLLCEFAHAASRTKSAFHAKFQSLIVRRGHKRAIVALAHKMLRTIFFMLKRGDYYRDSATNYEQLCVQRNASRWIKALTRFGFIPAAA

SEQ ID NO: 53253 - protein, 315 aa, unidentified
MAAAAVYIGMDVSKATLDICASDGETWQAANDDSAMETLCTRIAALHPTLIVLEATGGYELRAAAALAAAGLPVAVVNPRQVRSYARSVGQLAKTDRIDARILARFAAAVQPEPRPLPDAETREIEALITRRRQLVSMITAEENRLHTAPSITRKEIKTHIAWLRRQLAKINETIDDSVRRSPIWRAKDDLLQSVPGIGNATARTLLAMLPELGTLKEKQIAALVGVAPLNQDSGTFRGRRRVYGGRVRVRTALYMAALVASRYNPVLKAFYARLRAAGKPAKVALVACMHKLLIIANAIIRDGRPWDALQPVII

SEQ ID NO: 53254 - protein, 421 aa, unidentified
MMTKRKPTPPEAALVAIDVAKHRNEILIEAVRGGYWRRMTILNTRADHDKLIASLQALQKPIVVGLEPTGNYHRVLAHRLIAAGFNVRLISSMALARTREALHNGWDKNDPKDAQVILHMLQIGATMVYQDPLAAGINDLQELSKTHEVVSKAKTEIWYRLLTHYLPLYFPEIERFVGNSRSDWFLAFLERFPTPGSVTALAKEDFVKAAWDVAGRKVSKARLLGDIYETACASAALPVPLDSSAIAMFRLVLAEARSLIEQRNIIEAHAHELLREQPDYLRLRQVPGIGPIHALTILAEAGDLRRFRHHRQFLKFCGLDLATHQSGQFRGQTRLSKYGNARLRRTFWLAAQVAIRQRDNSLRDCFGRHVAKDRENKDLRRKATVAVATKMARVVHALIKTGTDYRPFPQAPVPSGRTLPL

SEQ ID NO: 53255 - protein, 356 aa, unidentified
MKISRIGMDIAKNVFQLHGVGSFEQIVLKKKLKRADVLAYFRTLAVCQIGMEACGGAHHWARSLIAMGHSVLLMAPQFVKPYVKSNKNDAADAEAICEAMSRPGMRFVPVKTVEQQDIQALHRVRSELVKQRTAKGNQIRGLLAEYGLVVQKRIECLRVALPELLEDADNGLTCEFRALLDGLRLDLVGLDERVGQLDRQIVQMCRASVAAKRLQEIPGIGPVTASALIAAVGDGSGFKRGRDMAAFLGLVPRQHSSGGKEKLLGISKRGDSYLRTLLIHGARSVQRVSVNKTDPSSRWLNAVSARRHKNIAAVALANKTARMAWAVLSKGQAYRVPAQHDERIGPVLPVAANGQH

SEQ ID NO: 53256 - protein, 354 aa, unidentified
MMDKAVVGVDVSKDWLDLCVDERAERIANTAAAVAAWLDRVRPGLVAYEPTGGHERHLVSGLRQRDIPFLRVHPNEVIAFRRSRGLKAKTDRIDAGVIRAFVGDRLARRALRPSILGDDRLRELAARRRQLVAALQAERCRLDLAAVPIVRHSLEAVIAVLRQSLDALEAEIAAAIAAEAQTAKLAGLLQTIFGIGPAVAAALIADLPELGLLSAKEIAALVGLAPQTRRSGKIRYRERTGHGRPGVRRALFNAARAAIRHPSPFKDFYDRLVTRNGRPGKVALTAVMRKILVAANAVTRDGQPWAGRPDHRPAHAALGTPGRAHAKPPAHRAGRVKAAAARSAGARRASLDAA

SEQ ID NO: 53257 - protein, 340 aa, unidentified
MSEITTIGLDLAKHVFQVHGIDAQGTTFLRKRLRRGQVLAFFSRIPRCVVGLEACATAHYWARELGALGHEVRLMPAQYVKAYIKRNKHDAADAEAICEAVQRPTMRFVPVKTAEQQASQLLHRGREQLVRQRTMLVNALRAHLAEFGMVAAQGLRNVGQLIAIVRDDGDTRLPDVARQVLQVLASQIEQIETAITALERQLLAWHKTNPVSQRLASIPGIGPIIATAIATTVADPKVFRSGREFAAWLGLVPRQNSTGGKTRLGGITKRGNRYLRRLLINGASANLLRSKATKADPWVIGLRRRRPPLVVAVALANKTARIAWAVMLREKEYQPRAVAA

SEQ ID NO: 53258 - protein, 289 aa, unidentified
MGYIGIDVSKATFVVAYSADKGGKIRTFDNTTAGIKQFIGTLPKDGSIHCVMEATGNYSAMLLYLLNVAGITVSMENPLKIKNFAKAMLSTVKTDKSDARLIALYGEKMNPQPFKMQGEAILRLRQKRTVIRQLTKQITAMSNLRGSLVCLPVPDKGATHTVDETIKFLEKRRDRLQSELTELVEVEFSRQLALLTTIKGIGITLATALIITTGGFTYFQNAKQLSRYLGICPTYEQSGTSVNIRGHINRNGDAYTRGLIYVAAWNASRFNAKCGETYTRLAGFRCRCP

SEQ ID NO: 53259 - protein, 457 aa, unidentified
MNRKRTKSKVDRTMPMVHPNAAAIDVGATIHMAAVSADRTPEPVRSFGTFTTDLHRLVNWLKECGVETVVMESTSVYWIPIFELLDARGFTVFLVNARDAKHVPGRKTDVSDAQWLQRLHSYGLLRASFRPKGQIAELRAYVRQRERLLEYAASHIQHMQKALTEMNLQLHHVVADITGTTGLRIIRAILAGERDSKALAHLRDYRCHASAETIEKALTGSYRAEHLFALEQALALFDAYHEKVSACDVRIEAVLKELSIGRSRGSGSLTSSRRRTDQTNAMAFDVRAALFALLGKDITQINGLGPYLSLKLIAECGDDLSAWPSAKHFTSWLCLAPSNKISGGKVLSSRTRRSGSRASALLRLAAVTVGRTDTALGAFYRRLSARIGKAKAVTATARKIAVLFYNAVRHGMEYVDPGASFYETRYRKRVVDNLHRRAKAFGFVLHPAEPTPSVAVS

SEQ ID NO: 53260 - protein, 336 aa, unidentified
MKYYSGIDLHWDNCYITTLDEIGTLIKQQRVDNIRELLIAYFHSLPGSHIAVVESTTGWYWLNDLLEELGIELVLAHAKYLKAISYAKVKTDKVDSNTLAILLRLNLIPRAHKISKSLRDLRDTMRARLRIVHKHTSCILSANTIGVKFNHPESFSEPYQLQLSLLEEQQQMLAEHILTLEKSLHPHLIPNTDIQHLLHVPGIGKISAFTLYLEIDGIERFDSDKHFVSYCRLVPAADNSNRRTHQKSSKDGNKYLKIAFSDIAVHAIQYYPEIKSFYNKMVRRSNKTIARTIVAKELAKIVYYILKNKSPYKGFKGLPISHHKSVQWPRLSSPDA

SEQ ID NO: 53261 - protein, 343 aa, unidentified
MQFFVGIDVSLDSSSICVIDERGVIIKEGKTDSDPTAIARFVRHKGRKIEHVGLETGSLSQWLHAGLSREGFRVTVMEARHVGAAFAAMRVKTDRNDARGIAQLIRLGWFKAVHVKAPSAQETRTLLNGRRFLVDKLTGIENSMRASLRNFGLKMGHVTRSKWAARARELAVGIPALELVIESLLRVRDALRQELRTIDRQLLDEAKADPVVRMLMTAPGVGAVVALTFKSAVDDPTRFKRVRDVGPWLGLTPSRYQSGRTDIVGHITKAGDAGVRTALYEAATTVLSRVTRWSTIKNWGMRVASRSGAKKARVAIARKLAIVLLTMWRSQTPFRWSATQASA

SEQ ID NO: 53262 - protein, 488 aa, unidentified
METIAYLGIDVSKGSADFLLVNKRKEPLEEGFVLDDCSQGRKVLTQLIDGWFAGGITHLYCGVESTGGYENNWFNLLCSLAAAYDKKNKTLRVARVNPRPVKACGQAAMLRTQTDQTSALAIASYLIGFPEKVRYSPHASQSEDPVWLAARGQAGLIRMLIKQKTQLSSQLEKLLYARLGETMIYCRNGIPGWLLRLVSRYPSREHLRRAGVKKVAGIKGISHDKAQSLLGRLTADQPATPAITCHTIQATSRQILYLQTQIDDQQTFLTGQFADHPDVKLLESIKGIGLASAVRLIVEIEDYSRFDSSKALCAYFGVHPTWKESGDGHWRTGMSKQGRAQVRGILYMSSLSAIRWDPDLKKLYHRFRKEKGMNHYQAMGVVMHKLLRIVYGVLKNQTPYDRQVDRKNRREANQKQQEYQEKAAQNKTAQKTTRQRYMSQGADSTEDAPISRRAYKKRKQEASQSSLVEEHAGSPPAGTLKRVPVENI

SEQ ID NO: 53263 - protein, 355 aa, unidentified
MSHKLNSAIAVIGIDIGKNSFHAVGQDKRGEIVLRQKWSRGQVEARLANLSPCLIGMEACVGAHHLSRKLQALGHDARLMPAKYVRPYSKGQKNDFRDAEAIAEAVQRPTMRFVATKTTDQLDLQALHRVRERLVGQRTGIINQIRAFLLERGIAVRQGLRFLRAELPSILANRTDALSPRMLQIIERLADDWHRLDERIEGLSSEITALACQDRGCERLMTVPGIGPIISSAMVAAIGTGDAFSKGRDFGAWLGLVPKQISTGDRTILGSISKRGNRYLRALFVQAAWVVLVKVGPKHWERYGLKSWIEAAKKRLHHNVLAIALANKLARIAWAVLHNGRAFECVKTNATPRPA

SEQ ID NO: 53264 - protein, 409 aa, unidentified
MERQIERGCGLDVHRDTVAACVRVPGARGERAQHVRTFGTTAAELLRLRDWLGAHGVTHVAMESTGVYWKPVFYVLEDACTCLLVNAAHIKQVPGRKTDVLDCIWIAQLLEHGLLRGSFVPPVEIRELRDLTRHRKVLIQERQRAANRLHKLLQDAGIKLASVATDILGVSGRAMLEALVQGTTDPEVLADLAQGKLRKKLAALRDALAGRFRPHHAFLVGQLLAHVDYLDEAITTVSGEVEAHLAPFASHVTQLDTVPGIARRTAEVILAEIGVDMQRFPSDRHLASWAGLCPGNHESAGKHKTGKTRKGNQWLRMALIEAALAAIRTKDSALAARYRRVMRHRGHQKAVVAVAHAMLVTAYHLLIRKTTYQEPGAHYYERRQADRVRHRAVQLLERQGYRVILEPAA

SEQ ID NO: 53265 - protein, 318 aa, unidentified
MSTRHPFVGIDVAKDHLDVASRPGDAPWRVAHDRAGIAELVARLSRLRPRLVVLEATGGLETLVALELGTAGVPVAVVNPRQVRDFARATNVLAKTDRLDARVLAHFAEATRPVPRPMPDAATRELQALVSRRQDLQGMLVAERNRRSGAHPTLQAALDEHIAWLRRQVDDLDRTLDQTLRASPLWRAQDDLLQSVKGVGPVLSATLLAGLPELGTLDRHAIAALVGVAPFARESGRQAGQRHIWGGRAQIRAPLFMATLAAVRSNPVIHACYARLVDAGKPHKVALVACMRKLLTILNAMVRDGTHWQPALQTTPTP

SEQ ID NO: 53266 - protein, 486 aa, unidentified
MANRKQSTFERLSNGRLNRQQRRELARKLTAEHPGLEIVNRNVAGIDVGNESHYVAVAPGRDPQPVQEFGSWTADLERMAEWLKACGVEMVVMQSTGVYWMALYDILEARKFKVCLTNARHTKNLPGRKSDVQESQWLLKLHTYGLLRDSFHPPEEIRALRSLWRLRDRHVKEAGRAVLHMQKTMTVMNVQLSNAISDISGATGQAIIRAILNGERDPWTLAKLRDRRIKATEEEIARSLEGNWRADMLFELKQAVDAYDFIHNQIAECDQRLQTLLAALPQREVRGTEVQSETPIRESVKRKQKRKKSRADGNAPRFDLQAELKRVCGVNLTSIDGIDIMTAQTIVAELGTDFSRWKNESHFTSWLGLTPSRDISGGKIVKQESRKIKSPVAIMLRMAASSLIRSESYLGARYRSLRTRLGAGKAIKAMARYLACLVYRMFTHGQDWVDQGSKEFERKRTQRELFSLQRKAAALGYQIVAQPASA

SEQ ID NO: 53267 - protein, 342 aa, unidentified
MERVVTVGLDIAKNIFHAHGVSQDGKVVFSRKLRRAKLEAFFSTLEPCLIGIEACSTSHHWARVFTAMGHEVKLIPPSYVKPYVKSQKNDAADAEAICEAVTRPTMRFAEVKSIAQQSVLGLHRVRAQLVSHRTRIGNVIRGHLAEFGIVAPVGREGLYRLIGIIEDSADTSITDLTRVSLRHLADQYRLLQAQVLDLDRQIMKVHRANALSKRLATIPGIGPLAASALAASIGDASAFKSGRSLAAFLGLVPRQSSSGGKERLGGISKRGDGYLRWLLVAGAMAVVRYAKRHGTRRPWLVQLLARRPAKTAIVALANKMARVAWALMTSGETYREPSLKAA

SEQ ID NO: 53268 - protein, 413 aa, unidentified
MRRVIGIDIHRTFGEVVFWEDGKLQHGGRVDMTRTGLEGFGQSLRATDEVVVEATGNSMALSRVLSPFVARVIIANPLQVKAIAHAHVKTDKVDAGTLASLRAAGYLPEIWTPDVATERKRRLVARRYQVVRHRTRLKNEVHAILHAHLIPMCPHADLFGGRGRTWLGRQPLPDDERSAVDRHVRELDRLAEDLNILDREIAQGALDDLAIKRLMTITGVNLTVAAGIMAAVGDIGRFESPGKLVSYFGLNPRVRQSGLGAAHHGRISKIGRSHARAMLVEAAWAAAKAAGPLHAFFVRIRAKRGHQIAAVAVARKLAVLCWHLLTKDEDYLWARPALVANKTRAMELQAGKPQNKGNRRGPAYAYNVKTLRDQEMQIAAQAERNYARFVNRWKERPRKERREGARVPQTGKA

SEQ ID NO: 53269 - protein, 348 aa, unidentified
MKTITIGLDIAKNVFQVHGVDASGEVILGRRLRRGQVEGFFAKFLPAVIGIEACGSAHHWGRVLCSLGHDVKLMPPAYVKPYVRRNKTDGRDAEAICEAVGRPTMRFVPIKSVDAQAINALHKARHLLVRQRSMLANAFRAMLAEFGIVARQGMKGLAELMAALPGAPIPEPAQVAAAALARQWKMLDGEISALEKRILRTAKENEAARRLMEIPGIGPISASAIVAAVPDPHVFRSARSFAAWLGLTPRQNSSGEKQRSGGISKQGNRSLRQLLVLGATSYVQAAAPRGKQGQELAPAAVRDPWIASLLGRRPRKVVAVAQAAKAARTAWALLVKGERYRTPAAVLA

SEQ ID NO: 53270 - protein, 346 aa, unidentified
MTIVGCDFHPSWQQIAILDMETGEVRECKLVNGNGEAERFYRQLPCPTLIGIEACGNSQWFVDLLQQLGHEVWIGDAAHIRASYVRKQKTDRRDAAHILKLLIEGRFPRLWTPSAEQRNLRQLLIHRHKLVRIRVQVKNGLQHLMLNRGVQLKEKLWSQAGQKALRELTLAGWAAQRRKDLLSLLASLNEQIEQLDQATEKAAEENQEARLLMTHPGVGPITALAYVLTLGDVTRFKRGKQVASYLGLVPREHSSSGKQRLGSISKQGNSFLRMLLVESAQAVTRLDEGFRKQYQRRCHHMAKGVAKVAAARRLSVRLFWMLRTHTAYPEIVRIESSPGEALVGES

SEQ ID NO: 53271 - protein, 382 aa, unidentified
MDTLSNTVAAIDSEQQKAKLFVALELGQATWVVALHSPIADKISIYRIEGGDTDQLMALIEKKRVQAARRLGRAAQVVSCYEAGRDGFWLHRFLIRRGIDNRVLDSASILVDRRARRAKTDRLDARALLRVLMALVRGEEQVCRVVRVPSIAQEDERRLSRERERLLHERNSHIARIKGLLILHGVRDYRLIERDWKERLDAVRTTEGQALPARAKTEIERECRRLWLAKQMLAEVEREIEQMIAHDDAVAGKLIQVRGIGQTFASVLTHEVYYRSFDNRRQVGSYLGLVSMPWQSGSIRRDQGITRSGNARARRCAIELAWLWLRHQPGSALACWYRTRVGTLTGRMRRITLVALARKLIVALWRYLQNGIVPEGAVLKAA

SEQ ID NO: 53272 - protein, 389 aa, unidentified
MKIYVGIDIAKLNHFAAAISSDGEIIIEPFKFTNDADGFQLLVSKLESFDKNSLIIGLESTAHYGDNLVRYLVAEFYQVCVLNPIKTCQMRKNNVRKTKTDKVDTYVIAKTLMMQDNLRFVSFFDLDMMDLKALGRFRQKTIKQRTRLKIQLTTYVDQVFPEIQYFFKSGLHQHAVYALLKEAPSPKEIASMHMTHLANLLKVNSHGHFTKEQAKELRVLAQKSVGANDSAISIQITQTIQQIELLDSQLEKIEAEMTDIMKFNDSVIMTIPGIGYINGGMILGEIGDIHRFSNPNKLLAFAGLDPSVYQSGNFQAKTTRMSKRGSRVLRYALVNAAWNVVRNNATFKAYYDAKRAEGRSHYNALGHCSGKLVRVIWKMLTDEVEFNLE

SEQ ID NO: 53273 - protein, 422 aa, unidentified
MKLKYSICCGLDVHKNVIVATIVTTNKDGISEYKQKSFSTINSDIQKFHNWLIENNCYHVCMESTGKYWIPIFNYLENDIDVCLTHPKYVKAIKGKKTDKKDSKWIADLYKFDLVRCSFIPPKDFRQLRELSRYRFKLVCMKSSEKNRIQNCMTVSNVGIASVLSDPFGKTATEIISYLLEHTADSMDEKAVRKLIKKGAKSKSDEIIEAIKGYTIETDQAKKLELARGHLEYLDDMITQTEVELYVRIKPYYEFVEFVSTMPGMTELSSTIVLAETGVDMDIFDDAKHLCSWCGLSPANNESAGKKKSVRIAKAGDYLKPMMVQCALAAIKSKKQPYFAIKYGRIKKRRGHKKAIIAIARMMMVCIYHMVSEKKPFTPTDYEELMNPQNHVERVVLNENNVFAYLESLGYDSSKLVKRNDN

SEQ ID NO: 53274 - protein, 359 aa, unidentified
MASNVKVNRINFNGKMVNIGVDMHKQSWRITALVEGEVAFTGTLAKPNYDSFRKLLARFEGNCVRIAYEAGPGGFGLYDILTADGIECMVTPPSLIPTESGSRVKTDKKDSLKLAKLLESNMLKKVWVLSPEERAHRQLVRTRRQIVDHRSNVMRQIKSLLFFHSMDIPFSSRQQWTVPFIKWLHELDLDDQCLNQSLKTLVHLFDYLSVEKKRLTHEVIELAKEEKYTQRVKLLNTIPGIGTLSGMEILVELQEITRFKTSDELAAYLGLTPSQYSSGEYVRMGHITHAGNDRVRTTLVESSWILIGKDPSMRRKYENIKHRRGGKRAIIAIARILSARLRRMLLDQVPYEIGFQKAA

SEQ ID NO: 53275 - protein, 413 aa, unidentified
MGGVVGGGVGGVGGVASVASQAANVPDPAPNDERREIEESSAFQAVGERDPRRSRGNQNPNSRLNRRGPTPPSSSYLQGRINTMTDARKQDAQGTDALYVGIDVAKESFVVASEPAGIRLTLDNTVKGRSELVKALAGRSVALVVMEATGGYERGLVADLLEAGHTVVVVNPRQVRDFAKGVGKLAKTDEIDAEMLAMFARVVKPKPRSPEAPQDTRLSELVQRRQQLSRTLVSEGNRAGHAQIKEVRKSLTTVMRVLEKEIAQLDKLIGAYIQSDPEMRRKHEILDSVKGIGDQTSAVLLSHLPELGRLNREQISALVGVAPYDVQSGQWRGRSKIFGGRGLVRRALYMAILSAAQHNTIIRPFYERLLAAGKVKKVAQIACVRKLLTILNSLVKNNETWDETWAQNYAKNA

SEQ ID NO: 53276 - protein, 358 aa, unidentified
MLERSFIGLDVHARSVQAAVLDGLTGEVTSVAAPVATEKLVAWICSQPAPQAVAYEAGPTGYPLARALAGVGVRCLIAAPSRIPRAPGERVKTDRRDALKLARLLRLDELSAVRVPSLEEEAARDLVRAREDARGDLMRVRHRLSKLLLRRGIVWPDTTWTAAHLRWLAAQRFAEAPLQLVYEEALATMRATVERRDALDAAIAAEAKREPWAGVVDRLCCLRGVGTLTAFALAVELGDWRRFSGRSLAAFLGLVPSEDSSGATRRQGSITKTGNGHARRLLIEAAWQQRRPPRQSQRLRAARAAAAPAVRERAALAERRLHRRWQRFDERGKRSTVAAVAVARELAGWCWSLAVMEG

SEQ ID NO: 53277 - protein, 360 aa, unidentified
MPSLDLHRNDIVIGVDTHKDEHVAVALDGIGGRRGSHALPSTPEGYAGMFSWAQEQGRVAAFGVEGTGSYGSGLARFLRRHGATVYEVSRPPRRGARRASGKSDIVDAEHAARQVLSGEAASVPKTSDGNVEVLRLVKIARDTAVKSRTQAVIALKSALVTAPDEIRAELEGLSDFRLITACAALSEAPPSEPASAVRYVLRYLALRWLALHEEIKAHARHLTQITDETAPQLTAQFGIGFDCAAELLVAAGDNGERIRSEAAFAKLCGVCPIPASSGRTTGRHRLNRGGNRQANAALYRIVIVRLRWHQPTINYVARRTSEGRTKKEIIRCLKRYVAREVFHLLPRPAAKGARDLAQAA

SEQ ID NO: 53278 - protein, 311 aa, unidentified
MPAKTPPTYVGLDISKDQLDYCLSETEEGRCAYTPAGRAELIQKIRALPGARVVCEASGGYEKLIVAELLQADIEVCVAQPGRVRAFAYAEGLMAKTDRIDARLLRRFGEKITLRLAVPGDPAATTLRELLEHRRQTTTQLTEVSGRLPLAGPTLGKLLVKQQRFLERQIAEVEKMIEQHIDRDPDLKKKSERLQQVKGVGPVLSATVLAYVPELGQIESSQLSALFGVAPYPDDSGHHSGPRHIRGGRAQVRHVLYMAAVSAARSNPILAEFYQRLLATGKPSKVCLVAVMRKMVCLMNKLIQNPDFVLA

SEQ ID NO: 53279 - protein, 355 aa, unidentified
MEGTKYIGMDVHKDSISIAVLNSSGKLVMECVIETKAITILEFVHGLRGSLHLTFEEGTWAAWLYDLLKPHVAKLVVCDPRRNGYLKQGSKSDRNDARKLAELLHSNMLRPVYHGEHGVRSLKELARSYLTITKDQARVMTRVKAVYRSWAIPCVGKQVYGQRHRLEWLGKIEEPGVRRRAEFYYAELDALRSLRLVVLRELLLESKRHSVSTLLSQIPSIGPIRAALLIALLQTPDRFRTKRQLWAYSGLAIETHDSAENQYVNGQLQRSKKKQSIRGLNSNHNHDLKNIFKGASAVAAVKSGPFQRFYAAQISKGIRPEIARLSLARKIAAIILTVWKKGASFDASYLNPQTA

SEQ ID NO: 53280 - protein, 417 aa, unidentified
MTDGKNASPCRYVALDIHKHYSVIAAVNREGQIVLDPVRVEHEDLEARLNKELLPSDQVVIESTTNAWHIYDLLEPLVARVLVANPIRVKQIACAKVKTDIRDTLILARLLAANLVPTVWVPPVEVRNLRYLLSQRRRLVGMHTQTVNRMGSVAHRHHLNHPKGKRFIEKNTAWQQDDELSDSEKFQLELDMATGEHLDGQAKKIAEKIASLSHQDPWAECVAYLMQLPGFGVITAMTVLSAIGDITRFESSGKLSSYSGLTAGVEQSGTKNRGKGITKEGRKELRWAMVEVAQRAVKSDPYWKSRFQALERRMHRNQAIVAIAHQMLELVWHVLTHKQAYRHFSEERIAYKYLTWGWQLNEEARGGLTRQQFARYYLMRLGIGHDLKRIALNPKYPRKLATEAEVLALKPELNRTK

SEQ ID NO: 53281 - protein, 356 aa, unidentified
MSHEVKYIGMDVHKEAVVIAVVNGSGNLIMETIVETKASSILQFLHGLQGELHVTWEEGTWAAWLYDLLQPQVQEVVVCNPRRNALLKEGSKSDKVDARKLADLLRTGMLRPVYHGENGLRTLRELGRSYQTISKDLTRVMNRLKALYRGWGIPCAGTQVYAPRYREEWLGKIVQAGVRRRAELLYQQLDGLQGLRRNLRPEFVAESRKHKAAKLLRQIPCIGPIRAARLIALMQTPHRFRSKRQLWTYSGLGIETHDSAQFRFVLGQLQRSKKPQQLRGLNRNHNHEMKEIFKSAATRASCGTGPFHDFYAALLAKGMKPEMARLTLARKIAAITLTLWKKEERFDAEQLKTQAA

SEQ ID NO: 53282 - protein, 354 aa, unidentified
MNIHRVQDFVVKDKEVFVGLEDSKKTWKLAVRSDRMLIHRVSMEAKYPVLIRYLRNKFPECVIHLIYEAGFQGFNLFDRLTEDGIDCVVIPPHMVTEPKVHRVKTDKRDANRLALILENHDFKDACHVPDKERREDRQVSRTLIGIQKDIIRTRNRIHRLLDFHGIEVPLTRGRKGIRALKTCPLSEPLRMSLDILLTQLEQLWAHQISLRAALRALCRKERYRKAFEIARSIPGIGWFTGIRLILELGEDLSHFTTGKKIASFVGLTCSEYSSGETEQKGGITGMGSGFLRSTLVENSWIAIRRDPVLLAKFSRVWRASGSKKKAIVAVARMLIVRFRACVVMGTPYVMGTVR

SEQ ID NO: 53283 - protein, 401 aa, unidentified
MKRLSGGIDVGSESHHIIILDEEDNFLYNQKVAHKLNEFTENIKLFKQIEKKEGGKLSFALEGKNGYSNPLDRILLDQGFTLYNVDNLKLKRFREAFAGEWRDDERDSLMLSKMLKLKDYIDSKREKVFIKIEKPSPLTESLKLLSRHQQTLIDEKVRLVNRLRKKLLEVCPQILRLGKLKNKKIITILAKYPDFSKYKRITLKSLLKIKGIGKKGAFFLLKRLNNIEYMPGLTDIYKTIILSYAQRILELLEEIEDIDKKLDEIGNQSKEVNHLKTIPGVATKLASRLTGEIGDINRFPSEKQLAIYCGIACVDNNSGKVTKARAVYKANKICKQTLITMAGCSIRSIHQCKAYYLKKRTEGKSHNHTLRCLARQLIKVIYRMLTEDREYIVRKELKKVA

SEQ ID NO: 53284 - protein, 381 aa, unidentified
MTKIIRIGMDTSKSVFVLHGVDAAEQPVLRKKLRRRQVLESFGKLEPTKIGLEACGGAHYWARALRALGHEVVLLPPQYVKPYVKRNKNDAADAEAICEAMSRPTMRFVPVKTAEQQAALMLAGMRDQLIRRRTQLSNAIRGYAAEFGLTAAKGLSKIEPLLARIAEDTALPELARELFADYGQEYAGLQVRIAKIEAQLMAWHKGNELSRRMVDIPSIGPIGASLLAMKVTDPQAFRSGRDFAAWLGLTPKDHSTAGKTRLGVITRAGDENLRSILVAGATAVIQQVQRGRGYASPWLVELVKRKPPKLAAVALANKTARIAWKLMVSGEHYDRTRSVGRSEAPVADREERRAALCGGSAQRSSLRSRATPPQRTEMAKA

SEQ ID NO: 53285 - protein, 387 aa, unidentified
MQQPNDLSRSLAALDQDNTLIAVIEMSRSTWLVAGIVPGINRQPLKKLAADETALLQLLYRWRDEATKAGRTIDRIAVAYEAGRDGFWLARWLRGRGIEAYVIHPTSVAVSREHRRAKTDRLDTELLKRAFLGWLRGEPRHCSMAKIPTPEEEDAKRPNRERENLVGERTRIVNRMKSTLARLGLRGFKPTLRKAAERLDRLRTAEGVPLPPNTLAELRRDMARLRFVMDQIREIEAARLIRLEQHPELASHAMVRLLARVIGVGIETADMLVHEILSRNLRDRKAVARYAGLTGSPDESGARRREKGLARAGNARVRRGMIQLAWRFLMFQKNSALAQWYRMQTTDHRGTTRKTMIVALARKLLVALWQLVTTGEVPEGVVLRPAV

SEQ ID NO: 53286 - protein, 338 aa, unidentified
MDDITTIGLDLAKNVFQVHAVDQAGNVVVRKRIRRGQVLAFFSGIRTCVVGLEACATAHYWARELIALGHDARLMPPNYVKAYVKRNKHDVADAEAICEAVRRPSMRFVPLKTAEQQSALMMHRARDLLIRQRTMLVNALRGHLAEFGLIEAQGLHKVARLVAIVVDEMDGRVPEMARQVLKVIVNQLKDIQTGIAELEKQVLAWHKNNPVSQRLATIPGIGPIIATAIAATIADPNTFRSGREFAAWLGLVPRQNSTGGKARLGGISKRGDSYLRRLLVNSAHTVLLCSKAAKTDPWLTSLLGRKPRLVAAVALANKTARVAWAIMSRQETYRHAAA

SEQ ID NO: 53287 - protein, 366 aa, unidentified
MNHIAIDLGSRESQICVRNSEGLILEEQRRPTTALGKYLKTKEKGRVVLETCAEAFAIADAAREAGHDVTVVPSKLVRMLGVGDRGIKNDVRDAQNLSKVSCRLEELPSVHVPGEQSRERKAISAMRESLVEVRTKLVNTTRSWLRTQGVGVLPGGTLPTFPGRYRRHVEKKTGKPVPGYVNRVLQAIEELNPKVAEADKDLESIATQDPTCKLLMTAPGVGPVTAVRFTAAIDDVSRFQDGHGVESYLGLIPGENSSGDAKKRHMKGITKAGPPRVRWALTQAAWTAMRCRKHDPMVEWARQIEERRGKKVAVMALVRKLAGVLYAMWRDGKPYDPQHESKVKAAATQRGDTATGSGVTATPTAP

SEQ ID NO: 53288 - protein, 411 aa, unidentified
MDVYCGIDWAEDHHDIAVVDQDGKLLARRRISDDAAGLAGLLDLLAEHGDTAGDPVPVAIETPRGLLVACLRATGRPVCPVNPMAVARYRDRHSVTGKKSDHGDSVVLAHVLRTDMGMHRPLPADSELAQAIAVLARAQQDAVWDRTCAHNKLRSHLREYFPGFLAAFAAARGGIMRPEARAILAAAPTPAAAAALTLAQLRSLLAKAGRSRGIDTEATRLRDAFRTQQMRQLPLVENAMGRQAAALLRQLDAACTSAGDLEQAVVASFNQHPDAGILTSFPGLGPLTGARVLAETGDDRSRFQDAKGLKAYAGAAPITRASGKTKSVTRRKVKNNRLAAAGYTWAFSALTASPGARAHYDRRRDAGDKHAGAQRNLFGRLLGCLHHCLITGQHYDEATAFPASTKQPIAA

SEQ ID NO: 53289 - protein, 343 aa, unidentified
MEKIITVGLDLAKSIFQVHGIAENGKVLVRRTLRRSQVLPFFRSLPACLVGMEACASAHHWAREIAALGHSVRMMPPTYVKPYVKRNKTDVADAEAICEAVTRPTMRFVPVKTAEQQAASMILRTREMLMRQRSQTANALRAHMAELGIIAGTGMASIAKLLVLLRDEKDNRIPGAARFALILFAEQIELLTTRIEKLDREILVAVRKDPDARRLMSIPGVGPLIAATVRTSVLDARDFATARDFAAWTGLTPRAQSSGGKERLGAISKRGNRQLRTLLIVGATSIIKLAKRGLKVPLWIRTMLQRRPVKVVSVALANKIARTIWALLVRGGIYQVPAAMLKS

SEQ ID NO: 53290 - protein, 370 aa, unidentified
MREPTTFFVGLDVHKDSISVAYASEDRNAEVCFVGPIGTRQCDIDKLVRRLHSKASRLVFAYEAGPCGYVLHRYLTGKGLDCLVVAPSRIPKRPGDQFKTDRRDAVELARLLRSGDLTSVYVPRVEDEALRDLSRARYDAVKDLKAARLRLKSFLLRLGIHYVGRATWNDAHQRFLARVVCPTPAQQIVFQEYLHAISEIAHRLKRLEAQLREHASSWRLCPLVAAFQALRGVQDTVAITTVAELGDITRFDNPRQLAAFVGLVPSLYASGPSRRLGSITKAGNSHARRVLVEGAWAYHHPAKVSESIRKRLELLPKNIQDIAWKAQLRLCKRFRRLTARGKHPNVVVTAIARELLAFMWAIAREVKITA

SEQ ID NO: 53291 - protein, 368 aa, unidentified
MKKCITFVGLDVHKNSIDVAIADAGRNAEVRHYGTIGGGLDDLERLGKKLSSQDKELHFVYEAGPCGYDIFRYLTTKGFDCAVASPAHIPKRPADRVKTDRRDAMSLTRLHRAGELTYVFVPREDDEAMRDLTRAREDAVKALRVARQQLGGMLLRLGFRYSGKSWSIQHFRWLSDRKMPTPVQQVVFQEYINAINETNARVERLEQQIASLVPSWRMAPVVYSLQAMRGVSLIVAATMMAEIGDLTRFEHPRKLMSFLGLIPSEHSSGQKTRRGAITKTGNGHARRVLVEAAHSYRLPARVSRALLKRQEGLSLEVIELAWKCQVRLCARFRRLVAKGKNHNTVVTAIARELAAFMWAIANKTPIAA

SEQ ID NO: 53292 - protein, 347 aa, unidentified
MDHYAGIDVSLEYASMCVVEAGGKIVREGKVLSEPAALIGWFGSLGFGLSRIGLEAGPLSQWLYAAMKEAGLAVELLETRHVRDAFKAMPVKTDRNDARGIAQLMRLGWFRPVHCKSMGAQETRTLLTARKLVQSKLRDVENSLRGILRGFGLKVGKTTDRSFAGRIRELAAGHPSLETVAEALLAVRAVLLREFNGFEKQVRRMARSDAKAKLLMSTPCVGPIVALTYASAIDDPTRFKSSKQVGAHFGMTPKKYQSGETDYTGRISKIGDASVRTALYEAAHIMLTKAVKGCSELKSWAMRIARRAGMSKAKVALARRLAVIMHRMLLDGTPFNPAAKQTAAAAA

SEQ ID NO: 53293 - protein, 338 aa, unidentified
MDHYVGIDLHSNNSYTAIIDNDNKKVFKKKTKNDLRLVLHALKPYRDQGKGIVVESTYNWYWLVDGLIEEGYKIHLANPSAIKQYTGLKHSDDVTDAFHLANLLRLGILPTGYIYPKEERPVRDLLRKRTQLVHQRTLQIQSFQNLVSRNLGKSMKGTAVKKLSEDDVEHLFHDKHLVVAGKVSIATILFLAEKIKQLEKTLHKVAKLKDEYRLLMTVPGIQKILALTIMYETGPIERFAKVGNYASYCRCVGSRRLSNEKVKGKGNRKNGNKHLCWAYVEAAHHALWHYEYVERYYQRKMAKTNLIVARKTIAHKLARACYYIIRDQKEFDPTRVFV

SEQ ID NO: 53294 - protein, 363 aa, unidentified
MTIGVDVSKQTLVHCTRDGHPSSVANSAKPVKRFLCRLPAGTILAMEATGRFHRLLADTAYAMGFTVFVFNPKDVNRYAKSISPRAATDPIAARIIAEFACVRNHRPYAPVPPFVDALRNLVRTRAGLVKQRVALENQAGEHSGIATYLAQAVGSIAESIARLDKQIVEAAKDRAEYRLLLKIPGFGPVVAAYMLATLASREFMRSDAFVAFIGLDLRVRESGKLKGRRKLSKRGDPEARRLLYLAALAASQQPGPFSELRARYLERGLSKTEAAVIIARKLARVAWAIYTNQQPYDAGRVLNQPSPSHEGGQESQTPIAHPASKTLDRQIANAVLAPNRANPSLNNPKTGAHTQQPGLDTQA

SEQ ID NO: 53295 - protein, 409 aa, unidentified
MQVVHERCGGLDVHKRTVVVCVIVPEGREVRTFGTMTRELLEMVDWLLNKRVTHVAMESSGVYWRPLFNLLEGRGIELLVVNARHVKAVPGRKTDVKDAEWLADLLRHGLLKASFVPDRRQRELRELVRYRKTLVEEHARMVTRIQKVLEGANIKLSSVASNVVGKSGKAMLEQLAAGNEDAEAMAELAWSNLRSKRGQLREALIGSMGEHQRFMLKSHLRLVEEMEAEVEAVNAQLEERMRPFESQIALLDQIPGIGTTSAQQILAEIGVDMSRFPTADHLASWARVCPGLNESGGKRHPASTGAGNPWLRSTLIEVALAAVKAGRRQPNFFSARYHRLSNRRGPKRAAMAVAHSLLIAIYNMLRNGSYFVDLGPTHYDQRRRDLIANRSVRRLEELGYKVSIEEAVA

SEQ ID NO: 53296 - protein, 353 aa, unidentified
MEYASRVDFTGQPIYIGMDVHKKSWTVTILMEHLEHKTFTQPPEAAPLVSYLHRHFPSACYRAVYEAGYCGFWIPDPLVEKGIACMVTNPADVPTRDKERRRKGDRSDSRKLARALRSGQLEGIHVPTRARVEDRGLVRTRQAMVRKQTRCKNQIKSLMFLYGLPVPDAGSSWSRNFIRTLEALRFERDSGNLALKAYLTELMQLRQIIAQLNRDLRALSRTDEYREGVQLLKSIPGISTLSAMVFLTELGELSRFASFDKLCGYVGLTPDTHGSGEKQGIGDITRRCNQMLRSLLIECSWTALRKDPALALAYHCYCQRTRKTKAVVKIARKLLNRIRFVLNHRHPYVLKVA

SEQ ID NO: 53297 - protein, 381 aa, unidentified
MNATTVAVDLAKQVFAVCVGDAHGHGGKTTVFKRAEFLAWLKTLPAGTPVAMEACGTAHYWARTLLALGLVPRIMAAEFVKPYRKNQRVKNDSRDAEAILAALHAPGMRFVTPKTEAQQQRLCWHRLREGYKEERKALLNRIRGLLAELGYLAELGVAKLRRTLAQMLTPDEDGALVPEPLREMIQGVLTQLTALDARIEECSAHIARQSRIDPSVAALQKCPSIGPLIADALVATVGDARHFKNGRQFAASLGITPSQNSSGGKNRLGKITRRGDSYLRGLLIHAAGAVLNAAIRKHTAQPEKLSRLQQWMIGVYQRAGYAKAKVAIANKHARQAWAMLARGEAYNSEAWQAWQAAHGEVQAADHPQDDLPTAALAVASV

SEQ ID NO: 53298 - protein, 356 aa, unidentified
MNTPHYIGFDVHKKTISFCVKTAAGEIVEEGSVPAQRAGLRQWAAARPQPWRGALEATLFSGWIYDTLKPYGEQLEMAHPAKMKAISAGKKKSDTIDARTIADLVRCNLLPACYVAAPRIRELRRLLRYRSLVVSEAVRMKNKMAGLLMETGALYVKEKLHGKKYFASLLEELDEVPESVIDLLRTSRGALEMFESTQRRLVRELLADPELAQRVERLMTIPAVGEITALTWALEIGDPHRFRSGSEAMSYCGLTAALKSSAGKQQRGPISKQRNRWLQSTLIEAAKLAPRWNPQLAALHARELERGHRNRATLAVARKLVTYLLAVDKSGQSFQLRALSPEDGAEKEEAQKIKSA

SEQ ID NO: 53299 - protein, 428 aa, unidentified
MTTENYVAYIGIDWADRKHDIALYDCASGTWQEYIIQTRPQDLLDWVNQLRARYGEGCIAVGMEQKRGPLLYVLCQYDNLVLFPINPRTVANYRKAFQPSRAKSDPVDARLLVELMQKHPDKLELWVAGCPKTRALRQWVESRRMLVGEKVRLTNRITASLKSYFPQVLDWFEDKDTLVFCAFMEQFPSVTAAQTASPEQLTQFFCSHQAGRKSAINRRIQQIQDAGPPLTRDDAIVVPAQALTYALILLLKVVLNQLTDFNAKIATLFETLPDAELFSSLPGAGPHLAPRLLVAFGAERDRFSSAQAFMSYVGIAPVKEESGKKCWVHWRWSCPIFLRQTFVEWANQSRRFSPWSQAFYQQQKQAGKTHQKAIRALAYKWGRILWRCWQDNTPYDEEKYLAALERKKSPLIQLLGSQSKECQTLKEA

SEQ ID NO: 53300 - protein, 351 aa, unidentified
MKTQTKTASKLWIGIDFHKKTWRVHFRSDTFSGNPFSMEPDPDALHKKVETEFSGYEVEIVYECGCFGYWAHRKFVSYNWISIVVNPCDIPRISKQKFTKTDSIDARNLSKLLKAGLLRSVTVPDVEREQLRSLFRRRVHTVMYTRSIKVRLKAHLLYYGIKIPAEMDNAAWSKNFREWVRKIEWKYETGKQMMLSNIKQVEYLHYETNEISNQLRKYCREKHKKVYNLLRSVPGVGPLTAICFISEVGDISRFKNFKQLACLVGMMPTTYQSSETNRTQGLTPRALRIMRSYLVEASWQAVRIDPILREYYKKHTGKKPNDIIVKVARKLLSRMYGVLRTETEYQIGLVK

SEQ ID NO: 53301 - protein, 347 aa, unidentified
MSQPETYVGLDVSLQSTSLCVVDATGAIVWRGTCPTDAAELAAVIRKRAPSAARIGLETGQLSNWLTLSLRNRGLPVLCLDARHAKAALKMQINKTDANDAWGLAQVVRTGWFREVAVKSMDASQLRTLLVARSQLVGQRQNIANSIRGLLKGFGLVIPRGCAGPFAVNVRAVAGDNDAVMAIIEPLLTVWQTLREQIAVYDREINGRAKSDATVQRLMTVPGIGVVIALAYTAVIDDPTRFKHSSSVGAYLGLTPRRYQSGEVDVSGHISRCGDSLLRSYLFEAATVILQRYAKPSQLKDWGLKLAKRVGMRRAKVALARKLAVVLHCLWKDGTEFEFKACETIAA

SEQ ID NO: 53302 - protein, 446 aa, unidentified
MKKSFQMSIIHPHAAGVDIGAEFHVVAVPPDADAAPVRTFQSFTDDLHRMSDWLKTCHITTIAMESTGVYWLPAFEILEAAGFNVILVNARDAKNVPGRKTDVNDAQWLQKLHSFGLLRASFRPEHDISVLRSYLRQRERLTEYRAAHIQHMQKALMQMNVQLHHAVSDITGVTGLSIVRAIVSGERDPSMLIQYRDVRCKKTPEVLRQALTGNWQPEYLFALEQSVAFFDFYQEKIRECDDQIETSLLQLSTGTEEPEGVLPSARHRTKQPNQLSFDVRPLLWKITGADLTQIHGFGPYLALKFIAECGTDMNRWPDASHFTSWLCLSPGNKISGGKVLSSKTRRSSSRIAAALRLAATTIGRSDTALGAFYRRLSSRIGKAKAVTATARKLAILFYNALKYGQKYVDPGADYYEERYRNRVLDGLKRRAKSLGYSLQQDPELCV

SEQ ID NO: 53303 - protein, 355 aa, unidentified
MKRRFYIGVDVHCAFCEVAVVRESGQVVSRDRCATTIPSLLAIIEKVPRPRCLVIEEGSLADWLWRNLRDPVDEMVVCNPRRNHLIAKEGEKDDPIDAEKLAQLYRGGYIKEVHHGDSLGRSVFKQHVALHHDRVRQRVRQAQLVMGLLRRHGVFVRERHFVKVEDRGALLKRLPESRLLRNDVRLLWKAYDVAVTQEEYVRRVLVRVAKKQEVLERFVQLPGIGWVRAATLYVWLDTPFRFRSKSALWKYLGIGLERRHSGTGPENLRVPFVVNRLLKTTILGAAKSAVLQGDNAFAGQYRRWIDNGLSPRMARRNVARSLATTLWGMWKNGSAYQPGWVGVAGAASKAIEVSA

SEQ ID NO: 53304 - protein, 331 aa, unidentified
MKKVTETIGIDVSKLTLDVMVRTTNIHKQFSNNTKGFKQIITWLIKQKINLDQSLFCFEHTGWYCLMLSYFLYENNHAYCCINAIEIKRSMGLKRGKSDKADAWEIANYAWLRRDELIPSVPPAKKLIELQRMMSLREQLVKQQTASKNLLKGMIDIVLDQVNDVSIGILKENIAYLEKQIVSTEKAMNELIKQDNTMITNYKLSKTVKGVGMVLAVQMLLHTHNYTRFESSRQFAAYCGLVPYPYQSGTSIHGRNKIHPISDRKMKSLLSMSAISAIQHDKELKIYYQKRVEEGKPKMVVINIIRNKIVSRVFATVNRGTPYVEMNKFLA

SEQ ID NO: 53305 - protein, 343 aa, unidentified
MEIRTIGIDLGKTSFHVVGFGGDGRVVLRRRLSRGQLGLFFAKLPPCVVGMEACCGAHHLGRQLEAAGHAVRLIPPQFVRPFVKGQKNDYQDAEAIGEAVVRPTMRFVALKTVDQLDLQALHRVRDRLVGRRTAVINQLRAFLLERGITSRTGRQHLARLLPTLLEDVADQLTPCMRALLASLRLEWQGLERAVNEATDTIEQLAKADAACRRLVDIPGFGYLTASAMVASIGKGDMFRRGRDLAAWAGLVPRQHSTGGRPTLLGISKRGNNYLRRMLIHGARSVHRLANRSRLPLGPWLDALDRRAPTNVAVVALANKLARIAWAVLTRGEPYRPILPIPVA

SEQ ID NO: 53306 - protein, 254 aa, unidentified
MEEFPATAAGYARLLGWPGGFGTVCLAGIEGTGSYGAGLARHITAAGVRVVETVRSDRQERRRQGKSDPLDAVSAARAAQPGRARGAPRGRDGAVEAIRTLMVARRSAAGERTRAINQARALVLTGPDDLRTRFARHTPAALITGLASLRPRPGSTVGYATRIALRELGRRAQFPAGQLTRLDELIVPLVTARAPGLPALYGIGPRTAALLLIAAGDHPGRLRSEAAWAHLCGAAPIPASSGKVTRHRTPNAAR

SEQ ID NO: 53307 - protein, 366 aa, unidentified
MTNENFIFVGCDLHEKTLVLRIAVNREPAEKRTFGNTVTGRLKLIAMLKQKAEEWGGARIVFAYEASGQGFILCDQLRAAGIDCHVLAPTKIERSSKQKRNKNDDRDADRLLDIVRGHELAGTKLPAVWVPDLQTRDDRETVRTRQDLGEKQTGLKTQIQTLMKRHGMEKPEHVRGSWTKSWWQWLKAMSEIEKQGEGFRTALASLLRQLEFTVQEIQRLDGAVEQLCEKPHLKPIVDKLDAEEGVGRLTAAAYATEVGDFDRFRRRQQIGAYWGVTPASNESGEVTDRKGHITRQGSPRMRRLLCQAAWSRVRHHKLEREAYQRLVERNPKRKKIALVAAMRRLSIRLWHVGRQAQRDMKGLKTN

SEQ ID NO: 53308 - protein, 458 aa, unidentified
MSPNKSTDQGRRTMSVVHPNAAAIDVGATMHMAAVNADRTPEPVRSFGTFTTDLHRLVDWFAECGVDTVVMESTSVYWIPIFELLDARGFAVFLVNARDAKHVPGRKTDVSDAQWLQRLHSFGLLRASFRPKGQIAELRAYLRQRERLLEYGASHIQHMQKALTEMNVQLHHVVTDITGATGLRIIRAILGGERNPAVLARMRDRRCHATVETIEKALAGNYRAEHLFALEQALALYDTYQQKASACDARIEAVLKELSVRRGRKAGPLPAPRQNRSRQQNSLLFDVRAALFALLGKDLTQINGLGPYLALKLIAECGDDLSAWPSAKHFTSWLCLAPSNKISGGKVLSSRTRRSGSRAAALLRLAAATVGRTDTALGAFYRRLSARIGKAKAVTATARKIAVLFYNAVQHGMEYVDPGASSYETRYRARVIDNLHRRAKAFGFVLQPIDPTPGIAVS

SEQ ID NO: 53309 - protein, 341 aa, unidentified
MSKVTVYVGLDYHKDSIQVCVMDQSGQVLANRSCPNDVQALVLLVAFFGDQVRGAIEACTGAAELADELVARHGWDLDLAHPGSVARLKQSPDKSDYSDAKMLADLVRVGYLPRAWLAPHDVRQLRTTVRYRQQLVNQRRAAKLRVTALLREARLVEPKPRRWGGPWLSWLATAEGLGSEARFVVDCHLAELRRLDEQLLRVQLRLATVTAEDPVVARLVAMRGVGLVTAWALRAEIGRFDRFRTGKQRARYCGLSPRNASGGQRPADAGLIKAGSELLRAVLIEAAHRLIRFDPRWGELAAAMRGAGKPACAVAAAVANRWVRWLFHQVEGGAITLKTAG

SEQ ID NO: 53310 - protein, 366 aa, unidentified
MGEYIGLDVSMKETAIFIRHDGKRIWRGKCPSDPKLLVAAIRKHSPAPQRVVFEMEPLSVWFFHALTSEELPAICIDARHAKAALDMAPNKIDANDADGLAHLAEVGFFREVRVKGYDSMLVRTLIGVRIKLTRMTTDLYSQIRVDEDFRLLAPPGKGGKFEDNVRRLLIGEKELACIILSLLEVWRSLRVRAADLSLQRITSARQSKACQLLMSIPGVGMVMATSFEAAIEDPANFTKSRSAGAWLGLTTRRYQSGEVDYDGHISRRGAPHVCTLIYEAATVILTRVSAAAPGCRRNRARPLPQAETQHGRSALCRSARQKACARRLRRHSQQDGADRMGGHGAWRCLRTWACAYASGSIVQELG

SEQ ID NO: 53311 - protein, 341 aa, unidentified
MKIIGCDFHPSYQQIAMVDTETGELWEGRLEHEQGEARRFYQALVGQTVRVGIEAVGNSQWFEQMLAEMGQELWIGDAAQIRRLVVRQQKTDRRDAKHILDLMMDGRFPKLWVPSQQIRDVRQLLRHRQKLVEMRTQVKNQLQHLALNQGVRRKRRLWSEQGRAVLEQLPLQGWTARRRSDLLVMLDQLQKQVGELDGAVRAEAEQRPEVRLLMTHPGVGPVVGLAYVLTIGPPARFDRGKKVASYLGLIPREHSSGDRQNFGPISKQGNSMMRTLLVEAAQTAARFDEELRRAYGRLKAKKHSAPAKVMVARKLAVRMYWMLRENKSYAELYARRPVARM

SEQ ID NO: 53312 - protein, 310 aa, unidentified
MSEERFVGIDVAKAYLDVCVLPEGESWRAANDEAGIAALTERLVALAPQSVLLEATGGLQQDVVAALVDAGLAVQVLNPRQVRDFARATGRLAKTDKIDAAVLALFGQAVRPAPRMLPDRESQALKALVKRRREIQEMLTAEKIRRHTATSRVLLSIDAHIEWLKRLLKDVDDDLDKTIRSSPVWREKDDLLRSVPGIGKVVSLVLVSGLPELGRAARRQLSALVGVAPFNRDSGLMRGRRTIWGGRADVRVALYQAALVATQHNTLIKAFYQRLLQAGKPKKVALVACMRKLLGILNAMLRSGERWQPA

SEQ ID NO: 53313 - protein, 404 aa, unidentified
MYYVGIDVAKEKHYVCILDNTNEFAVKPFWIYSDVLGLRELLKRLANLSLNNDDFIIGVESTGAFSENLYEYITDADYKVILLNSYQTAKYRDFSTMKKIKNDAIDAYIIAELLSSNKYKESHISSDDYHSLKVLGRLKRSLDDKIKTIKREISTVMATVNPEITLVFKNIFTKTALEIIKVYPTAVELQKATPKKLTKLFRHIKGNNFNDEKAKYLIELAKSSIYGGRANESRALMIRTNIKILELLSQEKQEIEAQIATLIESGISKELDAPIENLKSIPGISDKTIAAILGECGDLRRFTSAKALIGYLGLYPTQYQSGNSISVGTLAKRGIPIAKHALYMAAVSSVLHNQELKKIFRDKVSAGKSKKEALIIISKKLATMMYSIFKYNQPYDAKRVLISK

SEQ ID NO: 53314 - protein, 355 aa, unidentified
MDSVKYIGMDVHKESISIAVRNGAGKIVMESLIETKASMILQFIDGLRGDVHVTFEEGTSAAWLYDLLKPQVTKLVVCDPRKNASMREGNQNDKIDARRLAELLRLNHLSPVYHGEHGLRSLKELVRSYLTITKDLVRVMTRVKAIYRSWAIPCTGKQVYAPRHRAEWLGKIGEPGVRRRAEFYYQQLDALRTVRQEVRRELLAEAKKHKAWKLLCQIPSIGPIRAAVLLGILQTPHRFRSKRQLWTYSGFGIETQSSADHRSVDGQLQRVKKQISIRGLNRNCNHDLKNLFKGAAIVASSKPGPFQEFYTALLTKGIRPEMARLTLARKIATIVLIVWKRGVSFDAQYLEPQTA

SEQ ID NO: 53315 - protein, 313 aa, unidentified
MSKKVQKKEISSIWIDVSKDKNNICIAFTNKEIPIEFVIENNTSWFKVLKEKLSKYNTLKSLFVIESTGSYHLPLCFYLYEKWYTVKLINPLITKKYTRANIRKCKTDKSDARLLSQIWIIETLETFEPNKEEISLKRKTRMLEKLLKQRQSLSLSIKDYEEDFWKNGMKKWAFFTQIKKLFKQLEKTIKDIEKEITEAWKWFEHFEKISEVKWVSGISTSIVLWFIWNKNFESKKSLVAFAWLDVWVKLSGTSVHWKWRISKRWSSLLRKTLIHISWGLMMHNEYFKKVAENYREKWKHYYEILIIIAGSIY

SEQ ID NO: 53316 - protein, 344 aa, unidentified
MAKANTLTVGIDLGDQFSQVCVLDEEGEVVEESKIRTTKETFRKWLGGMEEFLAVMEVGTHSPWVSRLLRSMGQECLVANPASLHRSGRKKSDKIDAEKLARWARSDPGMLEAVQHPGADIQADMAVIHSRRALVETRTKLINRTRGLVKSWGARLPRCDADYFGERAAPHVPPDLKTAVDPLLETIASLTGRIKLLEEQIETLAMEKYGEATRRLTQVKGVGTITALSYVLTVRQPERFPKSRQVGPYLGLTPRLDQSGESEIEHRISKAGNVYMRLLLVQAAHHVLERGPDTDIKRWGLRKAEGGKRAKRRAVVAVARKLAVLLHHLWQSGEDYQPLRQTAA

SEQ ID NO: 53317 - protein, 343 aa, unidentified
MNQLYHYIGLDIHKRTVAFCEKRADGKKVVSGTFHTDHPSVLQWVSERRSPWIGGMEATLFTGHLYDVLKPHAVDLLVGDPQKIKSISTAKHKNDAVDAETLSNLLRADLFPECYMASTDVRALRRQLRFRNFLVRQSVNMKNRYTGILMETGVTYDSKRIHGKRYFEELLGSLDEVPNSVRELLRTSRVGLEMFQGAQKKLINALITHDDLCERVMRLMTIPGVGEITALTWALEIDNPRRFSNLKKAQSYCGLCSGQNESGGKSRNGPLSKQRNANLQTCLIEASKLAPRWNVQLKAVHTNSLAQDKRRNRATCAVARKLVAFLMAVDKSGVDFEDRTPVR

SEQ ID NO: 53318 - protein, 410 aa, unidentified
MGYETLIQRAHVMTRKNTLKSLPTDTDFRVVGLDLAKSDVSVAAIPVDDNTLSLVDRMTYADLLDWAGKISPTLFAMEPCNGYSLLCLQLENLGHEIKVISGWTVSMWINTHLSGQKTDLNDAIALARLAVSDAELTPIRHKSITEIRIQTVQAVRQQLMSQRSRSIVSFKALAQQWGIPCAAGHRNLKKLRESIEAKVDLITRPVANAMLFLLDAVKSLDRQIGQLNQTLQELVMSDERGRLLQSVLVVGTQISARVITVVGNIERFNSPRSLVAYVGVAPRNFITGHKNLTKKKHGNCPDLSHKDQGKIRRRGDKLLRSLFIQGAACLYMQFCKDQLPECLLKRWILKQLAIQKPYGKLIVSLAAKLIRIVWAVLTYREKFNIQKAGMTRSMWSEMALETPLNKEVPA

SEQ ID NO: 53319 - protein, 367 aa, unidentified
MKQSSKIFVGMDVHKDSIDITLAEQGGEVRRFGEVGGERAALLKAVRKLTSRGGELVFVYEAGPCGFWIQREIAALGHACWVVSPSLIPQRPGNHVKTDRRDSENLARLARAGELTAVHVPDVRDEAIRDLVRARDDAVIAQRRARQQLKALLLRNDIRYVGKTSWTSAHLRWLSELKLPQPAQQIAFQEYVDAITVATGRIERFEQAMRDEVLTWRFAPAVAALQAMRGIQFVHAMTLVAELGDLTRFTSPRQLMAYLGLVPSEDSSGPRRRQGSITKAGNTYARRALVEAAWAYRHPARLTRIIALRQDALPKQACDIAWKAQLRLCAKYRRLRARRVLETKIIVALARELSGFVWAIGQHVKPQ

SEQ ID NO: 53320 - protein, 335 aa, unidentified
MEITTIGLDLAKHVFQAHGVTADGSIVLKKRLRRGQVHAFFAGLRPCLVGMEACATAHFWARELRALGHDVRLMPAQYVKAYLRRGKNDAADAAAICEAVTRPSMRFVPVKGEAQQAGLMLHRVRDLLVRQRTQLINAIRGHLAEFGIIEAQGPWHVPRLLATMEEARLPELARGLVRLLASQLDEVERRIGEIDAQIMAWHKADPVSQRLATIPGIGPLAATAISATVPDPAVFRSGREFAAWLGLVPRQNSTGGKTRLGRTSRQGDAYIRRLLVIGAQSALWCSKATKASPWIQALLVKRPRLVVAVALANKTARTAWAIMARQTTYRAAAAV

SEQ ID NO: 53321 - protein, 379 aa, unidentified
MSKNKIRFVGMDVHADTIAIAVAEPDGEVRSLGNIPNRPESIRKIMAKLGPANAVKCCYEAGPTGYVLYWRLTQMGVACEVIAPSLIPQKAGDRVKTDRRDAEKLARCYRAGELTAVWVPDAAHEALRDLVRAREAAKKDQLRHRHRLGKFLLRHGKRPGNAGTPWTQKYLNRIRIDVHFGEAALEATVEHYLHEVEHAGERILKLEKAIDEAVAKAPAAIRTVIDALQALRGVAQTTAVTVVCELGSVSRFQNPRQLMGYSGLAPREHSSGNRIQRGAITKTGNAHLRRVLVESAWTYQHRPNVQGRVLRRQKALALSEEAKKIAWKAQQRLHKRYTTMAARGKHKGQIVTALARELLGFMWAIAVETESQFELTKAA

SEQ ID NO: 53322 - protein, 347 aa, unidentified
MGYFAGLDVSLEETAICIVDGAGHIVREARAVSEPEVLVAFFKASGMEMERVGLEACSLTAWLHVGLTEAGIPAICIEARQAKAAMGAMPNKTDRNDARGIAQIMRTGWYRAVHVKSPSCRSWRALLTARRMVLNKRRDVENAIRALLREVGPKVGTPSRKDFPARVRALAADDPVLASLAESLLAVVEVMTREVERLTKRVIDEVRVEPTCRRLMTVPGVGPLTALAFRATIDQPDRFRRSRDVGAHLGLTPRRYQSGETDVQGRISRCGDELARTALYEAAHSLLIRSTKWSALRAWGINVAKRRGMARARVAVARKLAVILHRMWADGSEFRWGKQAVASTAAA

SEQ ID NO: 53323 - protein, 345 aa, unidentified
MEHTIIAVDLAKSVFQVAVSRRPGHVDEERRLARGRFLAFFVQQPPATVLMEACGSAHYWARQLEPLGHTMRLLPAHDVHRYVRRNKTDRTDTKGLLEANRNDEIHPVPVKTIEQQAIASLHRLRSAWLAARTARLNTVRGVLREFGVVIPLGAHQVVPHVRTLLEAVEDTSAVPLVLRSALAEACDEIEGLETHMHGVDGQLAALARQLPDVELLQSVPGVGVLTATALVALVGNIRRFPTGRHFASYLGVTPREESSGLRRRLGAISKQGDVYVRMLIIHGARSFLWRAKGCATPDRLQRWALTAQQRRGHNVAAVAVANKLARIVWAVWTQQRPFAAEHRTA

SEQ ID NO: 53324 - protein, 350 aa, unidentified
MAGFVSTTLLERHQRFEACPALAFENSREGFRALVERIQSLAPLEHCFILMEKTGHYHLALQQYLQECDLPVYTIHVQTRSAGMLKTDKRDALGLANTLYNQLQLGIQVADETHLVRRAEPPTAASAQLKGLIRHRYELVRESTQRKNKLTAICDEIFPELTTVLKDPNLPTALTLHEKFPTPHAIATASLMALQEARGYTRTLPDSKLLELQRLAAGSIGTKDVIRQRGLVLEQGQLITELRLLQEHIGQLESEIKTIVAQAREGKILLSMGIGQIQAATIIATIGSILNFPNAGTLKSYFGWAPMREQTGTTFDRSHLTSRGSRTMRQMMFLIVASITRQETEWAYLC

SEQ ID NO: 53325 - protein, 408 aa, unidentified
MGRAAEVVAPSSSIRTDGGYPVAQVNDLSRSLTAFDPISTLVVVVEMSKASWLVSGAVPGVERQPLKKLEPDATALLRLIERWRNEAVRAGRPISRIALAYEAGRDGFWLARWLIARGIEAHVIHSASVAVSRERKRAKTDRLDAAMLMRVFLGWLRGERGHCGMVAIPTMEEEDARRPSRERECLVNERSRITNRMKSALARLGVRGFKPHLRKAPERLAGLRTAEGTGLPMNIIEEFRRDMARLALVREQISSIEKTRAERLERAPDTGPHAMVRLLARVIGIGIETADMLVREVLSRKLRDRRAVARYAGLTGSPDESGLKRREKGLAKAGNARVRRGLIQLAWRFLMFQKDSALARWYRTRTEGPSGARKTTMIVALARKLLIALWRLVTTGEVPDGVKLRPAL

SEQ ID NO: 53326 - protein, 321 aa, unidentified
METVEFAQVVTRGCGLDVHKKTVVATIDGKGLKRSTREFGTFTSSLTKLKDWLLENGITHVAMESTGVYWKPVYHVLEPSGIKVWIVNARHVKYVPGHKTDKKDSAWLCKLLLAGLLKPSYIPPKEQRELRDLTRYRKKLIQDIASNKNRIIRILEDCNVKLSSVLSDTSGVTGTKLINKLCEGKPITMADIDAVYHKNIEASKEELWEACNGIVEEHHIYLLQTIRENNRHIEHLIDELNQQIKKSLSPYDNALERLREIPGLSRKTVEDLIAEIGLDMSVFPTENHLSSWVGVSPGNNESAGKKKVDEPHTETNKPKPY

SEQ ID NO: 53327 - protein, 466 aa, unidentified
MGLKKYTNINNIQGKKGSQFSSQLRGMDLERVLIVPIDAAKYYQKALLCNYYGDVLERPFFFGVNQDGLNLLCSKIEDARKEIQAERIFIGIESTAHYYEDIVYELGRRGYGVTIINPATTYEERASALNWSKTDDLDLYAIAHALIQNKGMENKLPEGAYRKLMKLTRARRSEVQKRALVRIQIRTLMDHIWRDYQGFVEVENNKPKRRLIFSDFWGKSSLFFMEHFPHPSKLLEFGEERVWEIAKENKLRIKETHIQTLLYVAEKSINKAMEDVSAELLLLRLAIQDLRRLDENVAILEKEIEKVLLHTDGRLLLTVPGIGVVTAAEFYSELGDISQYDNAGQLIKKAGTNPIIIQSGGTQGFYGRISKQGNKHLRFMVYTVGKSLAQHNKDLRPYYEKLKARGKHARKAFIALGNKFIKIAFSMLKHKKPYESKQLDYRIYNEVKKKLLYTKMNTYLNIAFAA

SEQ ID NO: 53328 - protein, 342 aa, unidentified
MKDMMIGVDLAKNVFQVHGALRTGEVQFRKKLTRKQFPAFMAKQDPCLVIFEACGGAHYWACEMEALGHEVKLIAPQYARPFVKRQKNDAADAEAIVIAARQPEMRFVAPKTVEQQSRAAVFRGRERLVHQRTADVNALRGLLYEHGHVFPAGIRHLDRITALVKDETTDLPALIREECQDLLAQIAEKTARITARTAKLKTLAAQSDRARRLQTMPGVGPLTAVAVEAFGPDMAQFKTGRDFAAWLGLVPKQHTSGGKQRLGRMTKAGQADIRRLLIIGAMSRLGWLGQRRITEGSWLSRMLARKPKMLVAIALANKMARQVWAMLTKNEDYKDPAPAVAA

SEQ ID NO: 53329 - protein, 348 aa, unidentified
MTHSTITTVGLDIAKNVIQVHAVDAKGTPIIRKSLKRHQVLPFFANLPPCLIGIEACGGAHDWARRLMALGHTVKLMAPQFVKPYVKANKHDAADAEAICEAVTRPTMRFVPVKTPEQQALLALHRARQGFVTARTAQANQIRGLLAEFGLVMPKGMAALKQRLPDILEDAENGLPDACRELMQTLSAHLNELHRQGEAITQRIAMAHQANPLSRRLAQIPGIGPVIATALLAAIGDIREFASGRQLAAWLGLVPKQSSTGGKTRLLGISKRGDTYLRTRLIHGARSALSAAQRSKEPGATWVTRLADRRHPNIAAVALANKNARIAFALLAHDRDYQPGHSPVRATA

SEQ ID NO: 53330 - protein, 496 aa, unidentified
MQMPLTKAEQAAELAERNKPSKNQLKKIRKDEKKKRKKAIKQGKRKGRKLPKKTASFNSLKQINLDAAGLDIGAFEIYACVPEGRDKKNVQIYKTFTADLNDLADWLGQCGIKTVAMESTGVYWIPIYEILDNRGFDVNLINARQIKNVPGKKTDIIDCQWIQQLHTYGLLSSSFRPEEDMCALRSLVRQREMLVKYRSFHIQHIQKNMEMMNIKLCSVLKDITGKTGMNIIRAIVNGERDTVKLAQFRDPRCFSSEDEIAKSLEGNYKSEHLFGLKQALQLYDDYTGHVNSCDLEIERNYSAFKIRKGDSDLAPLPKKPIKSKKNKPHFDLRSDLYQVCGVDLTMIDGIDVLTAQKVISEIGLDMGKWETVKHFASWLGLCPCNKVSGGRVLGKGSKKVANRASLALRVAARSLHGSKSALGAFYRRMRAKHGPMKANLAAAHKMARIIYFMMKRKTPYEDPGEKYYQKKYKNRVLKNLKAKAASMGFNLEPIEA

SEQ ID NO: 53331 - protein, 377 aa, unidentified
MKRILRIGMDVHSTNYTLCAMEPVIGENDRIFVNIQVTPDYKNILMFIENLKQKLGVDNEYDIQCGYEAGCLGYSLYNQLTAVGVKCVILAPTTMLTQQGQRVKTDTRDALMIAQCLAYGGYHAVYIPAEEDDSVKEYLRMRDDHKLALKKIKQQINAFCLRHGYHFPNTKWTIAHWKWLKNLELKDMYRESLNEYMASYEEQEAKIERFDQRIEELASQEAYQEKVKKLECFLGIKTHTALSLIVETGDFERFAKGNTYAAFLGLAPGECSSGEKINRTGITKAGNSHLRLLLIESAGGICKGAIGHKSKSLRARQNGNTAEVIAYADKANARLRSRYYKFIRHGKARNVAVAAVARELACFVWGMMTDNISLKAA

SEQ ID NO: 53332 - protein, 359 aa, unidentified
MREQRNKISFRGQKIYVGIDVHLKSWSVTVLSETSVLKKFSQHPSPEALYGFLTRSYPGAEYHSVYEAGFCGFWIHERLTALGIDNIVVNPADVPTKSSEKLRKTDTVDSGKLARSLRANELKGIYTPDSVSLEMRSLIRLKNSITKDTTRQKNRLKSQLRYLGIEIPQEFLTPFSNWSKRFFAWLKEIETLTPSGRQALDIHIRHLEELRRQKLEMTRALRTLAKTDRFREPLRLIMSVPGFGQATGMAFLSEICDITRFRNAEQLAAYIGMIPMCHSCGEKDGTGDITIRKHAVMRCNLIEAAWVAVRQDPAMNLFYTEQCKRMPKSKAIVKVARKLVNRLFFVLKHQTEYVNSIVS

SEQ ID NO: 53333 - protein, 408 aa, unidentified
MEVLYPRCAGLDVHKDVIVACVRCVSEPTHHEVRSFDSTTRGLLELADWLALHACTHVAMEATGVYWKPVWHILEGNFELVLANAQHIRNVPGRKTDVNDATWIADLLAHGLVRSSFVPPAAIQELRDLTRTRKQLVREISQHSLCIQKVLEDANLKLGSVLSDVLGRSGRAMLKAIVAGESDPQRLAALAQGTARKKTAELREALRGHITVHHRTMLKLHLDVINALERTLSELDAAVGKSLTPIQQRVRLLITMPGVSDLTAQVLLAEIGVDMTRFPDAGHLVSWAGLCPRNDESAGKRRSTRVRKSGTWLKTALVTAAWAAVRVKTSYLHAQFLRIKARRGAKKAILAVAASMLTAAYYMLRDGVAYHDLGSDHFTRHDTSKTICRLLKRLADLGCNVDHLAHAT

SEQ ID NO: 53334 - protein, 335 aa, unidentified
MQIYGIDLAKEKFDVSFLRMSSKNNVVTPVHHVVRNTENGIKAFLKGLPSDSVLVAEHTGVYGERLLKMCTEMNVKIAYVGGHVIHTYKSGPDRGKTDEQDCNVLREFGERFTDKLVYTTFPEEDIYELRQLSRQRTMLVEERKRIMTADKTEDCRPFRSEAVKRSMQHIVDLLDEEIKNMERDMLTVIRKHDKISNSYDIITSVNGVGLVTAVELIVKTRNFTTITTAKQYSAYAGTAPYEKSSGKMNQGAHVSKWGNRRSKTLLYICAECARMHNKEMKLYYERRTIIDKKAHHYVLNAIANKLLRLIFSLIYKNEKYNPCYIQRDPRSLNIN

SEQ ID NO: 53335 - protein, 337 aa, unidentified
MNEAITIEVDLAKSVFQLHGVDHNGKSVLRRQLRRSQMLEFFQKQPGSLIGLEACASAHYWARELGKFGHDVRLMQPSYVKGYVKRGKTDAADAEAICEAVSRPSMRFVPVKSEETQGQLVTHKTREFLVRQQTQIVNAIRAHLGEFGIVIPKGIQNVGRVIEACDSAKLPTAARKALNLLADKLIDTQKKIAELTTDIRADATSNEAAQRLQTIPGVGPIAASAFVATLPDIADFKSARDLSAWLGLTPKPHSTGGKERLGRISKMGNKYLRRLLYLGAMAQVSARRRGEPGDDWLWKIIQRTKPKQAAIALANRMARRIYALLKHGTEYQANYAR

SEQ ID NO: 53336 - protein, 345 aa, unidentified
MEITTIGLDVAKNVFQVHGINAAGEVLVRKTLRRAQLLPFFAKLSPCLVGIEACGTSHHWARELVGLGHKVRLMPPAYVKPYVKRGKNDAADAEAICEAVTRPTMRFVAVKSREQQSALSLHRARSLLVGQRTQLVNMIRATLAEFGIAIPEGVEKALSMGRQIVDREIDLGLPTEATMVVAMLSQQTLDTHVRLREIDKALTALQRSDDVARRLSTIPGIGPIGATALSASVTDPHQFKSGRQFAAWLGLTPLQNSTGGKERLGRITKMGDKYLRQLLVIGATALVRYAKSKPQTADPRLLALLARKPARVATVAMANKMARIVWALMTRGQTYQAHHASALAG

SEQ ID NO: 53337 - protein, 335 aa, unidentified
MFNCIGLDISKKLIAVHIPINKADIEIENNIKSIKALYSKLKKLYKKEINDLVFIFEPTGSYSFALTKFCNEKNIKCFIVNPKQFSNYAKALGKRNKTDLIDAQVLSQAIYLAKEDEIKVPYVNAVVEEMKELISYYKFISKKTTKTINHLEAITSKDGNTYMINDLKKSIKEYKKKEVEILSKIKNIISSDDKLLKGFTNIKSIYGIGEIGAIVLLHLFIKYPKANQRQIASLAGLDPIEKTSGTSVHKKSKISKAGSRVYRGSLFMGVLTAIRFDENFKSFFERLKSNGKHTTLAQIAVMRKMIIIAHSLYKNDKQYDVEFYKRSCGAQQRAS

SEQ ID NO: 53338 - protein, 415 aa, unidentified
MSDRKRWYAGVDWASESHHVRLIDEQGHDVGEKIFKHAGEGLAEMAAWLLATSGGAEPGQIDVAIEVPHGPVVETLIERGFAVWVLNPKQMDRFRDRYSMAGAKDDSRDSLVMASALRTDPHCFRRLAATDPIIVELREWSRIAEDLGGERIGLTNRMRQQLWRYFPAFLDLEADLSAPWLIELWQAVPTPDKARRIREASIAAILKRNRIRRLAAAQVLEILRQRPLAVAAGTTEAARAHIVTLVARLQLINRQLAQAHHQLDTLTAKLGAAEETEPGQIKQRDADILASLPGIGRIVLATLLAEATDALQRRDYSALRSLTGVAPVTRRSGKSCFVVRRHACHRRLANAVYHWARIATQHDRTSRAKYAALRSRGHSHGRALRSVADRLLNVACSMLKSGTTFKPALAIQNDP

SEQ ID NO: 53339 - protein, 393 aa, unidentified
MYLVGIDIGKLKHSFCLLEKETGEILVEPVFFENNRDGFNVLLSSFKHLPQKDILIGMEDTGHYNLALLKFLLDRNYQVALINPVATNLTRKMQGGISKNDKLDTLTICDVLSSNQRVKSYRISKYSSFDLYEQKLLTREHHNLKEEENQLSNRLQKCIDVVFPEFNSLFKSKYGIVYMNILKEFGSADAIAHADIRTIRKCFDTGRGKHISLTAEELKEAARNSIGFPSSSEATQIKHLVARIELIKEQIAEIDKKIEEFSIQNNSPILSIPGISHFSGTSILAELGDIHNYSKPSQIIKFAGVAPLTYESSQFTAQHTAITKKGCKYLRKTLYQIITPVIQYNPVFRKFYLLKIAQGKGHRCAQGHCVRKLMRVIYHLLSTGTQFDPALLR

SEQ ID NO: 53340 - protein, 340 aa, unidentified
MEITTVGIDLAKSVFQVHAVDQHGKVVLRKQLKRGQMAEFFANLPVCLIGMEACGSAHYWARKLQALGHTVKLMAPQFVKPYVKTNKHDVADAEAICEAVRRPNMRFVPVKNVEQQAVLALHRVRQGWVKARTAQANQIRGLLSEFGFVVPQGIGHITSRVPAILDEAMDELPGAFKELVLRLLEHFKDLDRQVREMEHQIEHWHRANALSRKLEKIPGIGPITASALVASVGDAKNFANGRQLAAWLGLVPKQHSSGGKTNLQGISKRGDTYLRTLLIHGARAVIRQIERKTNVQGWLGKLLGRRNKNVAAVALANKNARIAWALLAHDRNFRSDYVAA

SEQ ID NO: 53341 - protein, 368 aa, unidentified
MFTERTGVGLDVHARSVAAAAIDTVTGEVIERRLGGDYGSVVDLARRLEAGHGPLRITYEAGPTGFGLARDLAAAGLTVQVAAPSRLLRPAGQRVKTDRTDAMLLARLTINDDIVAVRVPTMSQESARDLVRARDDARADLMRARHRLSKMMLRRGWVYPGRTTWGPAHDAWLRRIRANDVPALGSGAAAAFDDAYDAVAHALARRDRLDEAITALAADSEFTATTTRLSCLRGISTLTGFALAVEIGDWNRFTGATIASYLGLVPCEHSSGQTRSQGGITKTGNTHARRLLIESAWQHKPAWRPGPTLRAAWAKAPAVVAERADRGNRRLHRRWTALAARHKRHAVANTAIARELAGWCWSLATMDA

SEQ ID NO: 53342 - protein, 419 aa, unidentified
MVENGITKARNHSRQRGNIMRVVFGIDVSKASSEVAILVNGEKVHGYTIPNDAIGFNRLLGDLKTVHQPEIVFEATGVYSRRLQAFFEDNSYTYTRLNPLESKKQLDSLRVRKTDKIDAEKLAMSQFILNRKPSYVQEALYQELRDLSRFYQNLTEDIVCAKNRLHKVLQITFPELENILSAPTGEQYWNLVITFPCNSFVLESDDATLTAIIRQSTAKRISEKRVTYLVDKLTKLANQSYCAVKKTSPVIEEVKYYAGELLRLSEHRQGVVEEMVTLAQSLPEYEILLSIPGIAETTATSIIGELGDIRRFHSANQINAFIGIDLRHYESGNFLAKEHITKRGNPYARKILFKCIHNIASASHTNPCHIADFYEKRKRQSQVTSTKPHTIASIHRLIRTMYYLITHNKLYDYTSIQNR

SEQ ID NO: 53343 - protein, 372 aa, unidentified
MLYAGVDVSKDRVSVAVLTSGGTKLTGGEFDITTEGLRLLELTLKHLKDEISMAIEQTGTYSMPVILYLMERVEGLRIYLVDGLNFSRFIKLEGRKKQDKADAVSLAEYLRRELPARLITDKDIKAYGLKVLISEREHLLKVKNQIENRLRQLIETIFPDSKTLTKQVFWSEIRKGRAILDWKRLTDKAEVLSTILRERKIWLEIVHSLEETEREINAFLRAYYPEDLEILKSFGFSEATIAYFISVYVDVERFKDVKAFKSYMGLGLRIYQSGKKEKNVVNSYTNKYIRKLLYMYVIQAVRERSNHRRVKDYYLRQVEKSGSKKKAIIKTAGKVTEWVYYCLKHKEPFKWEANYETQQKDLSQVNSGQAED

SEQ ID NO: 53344 - protein, 461 aa, unidentified
MNDKEHTRREDFRQLKNEIRGSKEYLIVGIYIAKDRHHAFFGTATGNTLLKRLVFDNTQEGFEKLLVHAEAVKAEHTLEKTVFGLEPTADYHKPLGEFLIKGSHEVVLVSGVAVKRNRELLDGRWDKHDTKDAANVADLISQGKCLFYNYPSLPLRELRALMSLKRRLKKQEHGIKARIRNHLLAQYFPELDRYYGQSESNGLAVVRWCLNPSMLAAMDYAHFVQLVAPHTQSLAPQERLRSIWQTAGESIGCEAGDALGFEAEVMVEELEHIRALIRATDEKIEEICLQFPEYHSLLTIPGFGPDVSSKVLAAIGNPFRFTTGAQVLKMAGLDLSADRSGKGSESATPVLSKKGKADLRYALYQAALIASIRNTYFMRYYTHTLRVREKEKGIKTKMQVKLAAKLLIIVYPVKCEAYFTGAWTLMKRKEAFNTPEAYKSCVSHDRVTTLPMFGGRARVRT

SEQ ID NO: 53345 - protein, 376 aa, unidentified
MPSENTVHVAIELAVSSWLVAARLPGAEKVRLHRIEGGDTAALLALIAELRSSASRKLGGIAGVACCFEAGRDGFWLQRLLAAHGIAAHVLEPTSVLVNRRARRAKTDRLDAEGMLRVLAAWLGGDRQVCSMVRVPTPEEEDAKRPHREREHLVQEKLRLVNRIEALLFTQGIRVRPSLRSWERDLAELRTGDGRALPPLLRAELDRLRRRLVLILELIRETEAERAEALAAAADDAMAQKITALQRIRGVGANFAAVLGREVFYRSFANRRQLASYVGIAPTPHQSGGTDRDRSISRAGNARARTTLIQLAWLWLRYQPGSALATWFRERVGALQGRTRRIAIVAMARRLLVALWRYVETGVMPDGAAVRAEATA

SEQ ID NO: 53346 - protein, 342 aa, unidentified
MEHTTIAVDLAKSVFQVAVSHRAGSVDDERRLPRDRFLAFFAQQPPATIVLEACGSAHDWARQLQPLGHAVRLLPPHDVRPYVRRNKTDRTDAKGLLEAHRNEDIHAVPVKTIEHQAIASLHRLRSTWLATRTSRLNTIRGLLREFGIFIPVGATRVVPQVRALLQDLTAVPIALQTTLAAACDEIAGLEENMHAVERQLAALATTLPDVELLQTVPGVGLLTATALVALVADMCRFPSGRHFASFLGLTPREDSSALRRRLGAITKQGDVYVRMLLTHGARSVVWHAKAATHPTPLQQWAAETERRRGRNVAAVAVANKLARIVWAVWRHQRPFGAEHRAG

SEQ ID NO: 53347 - protein, 370 aa, unidentified
MKEPITSYIGLDIHKESIAMAIADADRAAPRFIGTINPSPAELCKAMRRVSAKESTLVVYEAGPCGYGWVRYLRKQGWACEVIAPSRITRKPSEKRIKTDRRDALLLARESRSGNLTSIVVPDERDEAIRDLVRAREDARAARHRVRLQIQAMMLRHGRHYQGKKSWSQAHDRHLSTIRFEHPAQEITFNEYRQAAEEACDRVERITQELRVQCKDWRMNPVVEALMCLKGFDFVAAVIFVAEMGDLTRFAHPRALMAYLGLVPSEFSSGNSRRQGEITKSGNKHARRILVEAAWNNRFKAQVARSLEVRQEGQPKIIRDISWKAQLRLSKRWRSLSMGRKLAQNKICVAIARELAGFIWDVARHVKVNP

SEQ ID NO: 53348 - protein, 403 aa, unidentified
MAYDFVIGMDVGKYFHHACVLDPQGRQVLSKRINQHEGSLRKLFGKFLANDAEVLVVVDQPNNIGRLTVAVAQDMGADIRYLPGLAMRQLSRIHVGNSKTDVRDAYVIAHAGLNLPDALRSVDRVEEVFTQPKVLNGIDEDLARAYTRQINQMRSALVGTYPAFEHVLRGQMIHRKWILHLLAKYGGPTKIRRVGKARLTAFARGHRARNPEPVIDAMLAAIHGQTVSIAGAEYAELGVAMSAKDALAKLEHRKEIEAQVVLKLIQDIPQTEILLSMPGIGPRSAAQILMTVGDMSDFPDAAHLASYAGLSPRTNQSGTSIMSNSPNRAGNKKLKNALWQSSFASIRFHERSRQFYERKRKEGKRHNAAVVALARRRLNALFSMMRNGEHYRDIPTIQEAAAA

SEQ ID NO: 53349 - protein, 319 aa, unidentified
MDDNFIGFDVSKSFFDLAYLKSKDQWFCKQLDYDSKGLAQMIKAIPVNSVCVMEATGPYYLRLANYLYEKGFKVCVVNPLVIRRYSQMLLKRTKTDKADAKLIAMYGKLHQPKLWKPSEESIQRIRHINSVLESLIKNKTQWSNKIEAAKQDSNFDKLSLKIMREMLTLIGRRINKLEEELDQIVEEHYQEESVILKSIPGIGKRTSIMLIALTGGFTKFESYRQFSSYIGLCPRIYESGTSVRGKARICKIGLSRIRQLLYMCAMTAKESNKACKDLFERLVEKGKSKKLALIAVANKLIRQAFGCIKNMSIYNAEFC

SEQ ID NO: 53350 - protein, 352 aa, unidentified
MIVLGADTHKRSHSIAAVAATTGELLDELTVQVGQRGFDALLRWARALDGERVWALEDCRHVSGSFERFLIGRGERVLRIPTHLSAGARKSARQRGKSDPIDAIGVARVALQEGLESFPVAHLDGPELDLRLLVDHRERLVRQRVALNSTLQWHLHDLWPELELPGSSLFYGRWAPRVARRLARAEQTMRVRIARDELRRIRELSQAIKTLEREIAALVTEIAPQLLAEPGFGPLTAAKLVGEIAGAQRFATPAKLARAAGVAPIPASSGNTQRQRLDQGGNRQINAALHRVIVTRARCHPETRDYIARRQAEGKTTREAIRCLKRYLARHVWRLLQPPHPGQGTPPSPSIS

SEQ ID NO: 53351 - protein, 428 aa, unidentified
MTHSEIKTTEFAAYIGIDWADQKHDICLREAGSNRIESLQIDHKPDSISNWVSELRQRFQGRSIAIALEQKRGALLYSLMLYEFIILYPVNPHALASYREAFKTSGAKDDPVDADLLREMVYLHHDKLHPWTPDDPLTRELSLLVEYRRRLVDDKTRLTNRLRALLKQYFPQALDWAGELDTLRALEFLTRWPQLEAVQVATPEQVRDFYRKYYRLGEKLPERLAEISAAQPLTRDKAVNNASITMVKGLLETLRGLIAAIEAFDQRIETCFEQHSDKDIFNSLPGAGAILAPRLLAAFGADRARYQSAKEIQCFSGIAPVTERSGKTKFVRRRLACPKFVRQSFHEFAKSSINWSAWARAYYDQQRRRGNKHNEAIRSLAYKWARIIYRCWQDHKPYDESVYIAKLELRGSPLAKLIPTAAEQAEAS

SEQ ID NO: 53352 - protein, 422 aa, unidentified
MFKIFRKNCCGLDVHKTWIYACIGITDENGRTEYKQARFSSFTKGLRELAEWLAEHRCEEVCIESAGKYWIPVFNILERTCRVTLAHPKYTKPLKGNKTDRKDAKWICDLFMCNMIRPSFIPPPDIRNLRDLMRYRVKLTNMLTGEKNRAQNCLTVSNMKLDDVFSDVFGKSSMSITKYILDHPGEQFDVTPFVDRRCKTPIDEIQAAVDGSVSQEQAAKLREILRHIDELELHKLNIESEILRLIEPYLHQLELIHSVPGFSANPMTAIAILSEIGADMSVFPTAKHLSSWAGCCPRNDQSGGKRKSTRISRAGVYIKPLLVQVANAIVRSDKHPECVERYRRLKARRGHKKAIIAICRMLLTAIRNILKKMEPYSPLGFSLSNARHIEKNLFLTKSQGLHLLRLRGYIIIDDFDVIPATT

SEQ ID NO: 53353 - protein, 417 aa, unidentified
MKSAPSVLPEEPANGLTCGIDWARDDHAVAVVDARGREVHRCVIDHSAAGLRALLGMLGKRGISEVAIERPDGPVVEALLKAGITVVVISPNQVKNLRGRYGLAGNKDDRFDAFVLADTLRTDRARLRPLIPGQPATLALRRACRARKDLVSHRVGVANQLREHLKRVFPGAVGLFAELDSPISLAFLARFDCQDRADWLSPKRMAAWLASAGYCGRVGPAVLHARLTAAPRGATGEHGTAETHVTRALLAVLVTLNEQIKALAAQISEQLALHPDQHMFTSLPRSGRVRAARLLAETGDCRARFPTPESLACLARVAPSTRQSGKIRAVGFRWACDKQLRDAVTDFAGDSRRASPWAAKLYDDAIKRGHDHPHAVRILARAWLFVIWHCWQDGLAYDPARHKALQRILAEQKPKAA

SEQ ID NO: 53354 - protein, 461 aa, unidentified
MPVPSASSVHAHETFVCVHPNAAGLDIGADEIYACVPPDRDPQAVRAFATFTTDLHALADWLAQCGIDTVAMESTGIYWVPIYEILEARGMQVYLVNAQSLKIPPGRKSDWKDCQWIQRLHLLGLLQASFRPDGEMTVLRTYLRHRAELIQHRAPHILHIQKALHQMNIQLDRVLTDITGVTGMAIIRAIVAGERDAVVLAQLRNPACKSSEEKLAKAMQGTWRAEYLFMIEQSLAVYDFYTQHIAACAAVIERYYATLKPRFVSEDGPPPTDLPRAKPHSKSKNAPAFHARAELARVVGVDLVAVTGLSAATVQTIISEIGTDMSKFPTAKHFGSWLGLAPHNDISGGKVLRSKTRKVVNRAAQAFRQAAQSVARSDSAFGAYFRRMRARLGPQQATVATAYKIARTVYTMLKEHKPFDEMGAEAYDQQYRERELKHLQRKAAKFGLQLTPQQPSAPVGN

SEQ ID NO: 53355 - protein, 412 aa, unidentified
MLDSSEVESTAADGVFIGLDWGNAHHQLCVLDAAGRMLDQGNFAHDVVGASELTDRLTRHGPVHGIAIERSEGLLVETLQGQGHRLFCMSPKMSARARERYRLAPTKSDAFDAFVLADSLRHEHRHWRPLATPSPVLAELRALTRDRERLIQNQRDVENQLRAIVLTFHPGVLHLFSSLDRDITLAFLRDYPTPTHAARVGTARMAAFCARHGYSGRTRPELLVERLRANLLSASAGTTAGKAFSTALFVDQLELLNIQLRAITKRIRERLVEHADAAIFLSFPGMGEVTAAIMLAEMGEDRARFPNPGVLLAESGTAPVTRSSGRSRQVTFRYAANKRMRHAIDWWAFVAVRENEWARDAYQHARARGQLHNRALRGIGARWTRILWRCWQDGTTYDPALHLKDQPAGITA

SEQ ID NO: 53356 - protein, 353 aa, unidentified
MAIVADQYDFVIGVDTHAASHTLALITAGTGAVGQQAQFPTSPSGLRRAVDWIERHTHQSPTLIVIDGAGSYGATFTEQLSAAGLTVAEAPDVAATTRRRRGKSDAVDAVAMAQAARSLDINELCWPRAGGDRTALRVLTVAREQMSGERTRAVNALTALLRTVDLGIDARRALTTTTIATVAAWRTRSDNATLAVCRVEAIRLARRIRALDAELAANHTALHEAVTAQAPQLLALPGVGAVVAATVLLAWSHPGRVRSEAAFAALAGASPLPASSGNTTRYRLNRGGDRRLNRALYTVALVRMGHDPRTRDYVNRRTREGRTKREIMRSLKRYISRQLFRTLNGAHPATSTT

SEQ ID NO: 53357 - protein, 357 aa, unidentified
MKIVGCDLHAKQQAIAMVDTETGEFTEKTLAHEGNQVREFYAALAGRVAVGIEATGAMQWFLQLMEEFGIECRVGHPAKIRAKETRKQKHDRRDARLELELLIEDRFPTIWMPSTEQRDLRTLLRDRHQWVKMRTRVQNTLQAIALNHALRYGRALWSPAGQKALQALALSRYTSQRRDELLHLYVQLQKRIQELDWQVEEEAKQRPQTLRLLTHPGVGPITALATEVFLGDPSRFANGKNVASYIGMIPCEHTSGKRQRLGKLTKEGNSLLRFLWTEATIHAVRKDPELKRFYRRKLIQKGMGKARIAAAHKLGIRLWIMLRDQIDYKEFCRRGQQRQCGEAHAGMPNYNSGPALQ

SEQ ID NO: 53358 - protein, 385 aa, unidentified
MSQFSGTPRAALDYDSTIIGALELSEKKWLLAVQLPGVSRHSRHVLAACGDGLVSFVERLKARCAAAGRKVARVILTHEAGRDGFWLARFLAGLSIEVHIIQPSSLPVDRRARRAKTDIIDVEMLLRTLMAWLRGEPRVCSMVPIPSEADEEARRAYREREDLTGERRSIVNKIDGILATLGIKGYKALRRDRREQLNWARQPDGDPIPQKARARIERLLDRLDLVLNLIEQVESARDAVLEKDAPADEAERMIRSLTNLRSIGPDFATLLVREAFVRQFRNRRALGGYVGLGGTPFSSGGSEREQGIGKDGNRRVRAAMVELAWMWLRWQPDSALSVWFRARVGAMGGRIRKIMIVALARKLLVALWRYVKDGVIPEGAKLKAA

SEQ ID NO: 53359 - protein, 371 aa, unidentified
MDERIKFFVGLDVHGDSIAMSVCEAGREPGRFVSTLTPDVQALLKTLSKYGAARQVSVVYEAGPTGYGLYRALIDRGYRCEIIAPSLTPRRPGERIKTDRRDSLRLAELSRAGELKAIWVPDQAHEALRNLWRAREDAVNLRLQARQQLKAFLLRQGRRYPGKTSWNKTHQRWIAEQHFDHPADYIALAEYQLAVQAAQDRVQRLTTALEHAIEGWRQEPTVAALRALRGIDTVSAIGLVCEIGDIARFGSARQLMGYLGLVPSEHSSGNSVRRGSITKTGNAHARRLLTEAAWNYRFPARMSQALRDRSATLSPGIRTHAWKAQVRLCSRFAHLSARGVQANKVCVAVARELTGFIWAIARQSLPDNTHQ

SEQ ID NO: 53360 - protein, 350 aa, unidentified
MHKASICIAVLNADGKLVMESVVETSAATILDFLKALRGHVEVTFEEGTHATWLYDVLKRTKAKVIVCDPRKNRLLHEGNKSDKVDARKMAQLLRAGLLSPVYHGEHGVRDLKELVRSYEYLVEDSTRVMNRIKAIFRGRAIACAGADVYKPRQREEWLERLPEPGVRARAARLYCELDHLTGLRREARQEMLAESRRHEACKILRQVPTLGTVRIAQLISAVSTPHRFRSKRQFWSYCGLAVRTRSSADHHFVGGDLRRSAKATTRGLTQDHNRTLKYVFKGAALTASRCEPFKSHYAELLARGLRPELARVTVARKIAAVTLAVWKKGEAFDADKLIKHASSADSTVG

SEQ ID NO: 53361 - protein, 432 aa, unidentified
MKHNQSSKQNQRISRISETTLVIGTDIAKHNHVARAFNYRGIELGTRCLFQNDENGLLNLLAWAESIQQEHGLTDVLLGVEPTGHYWFPLFHFLKRRGVEVVLVNPHHVKKSKELDDNSPTKNDIKDAKVVAKLVIDGRYTQPQLPEGVYADLRVLMNQRDRLCGDLNRVKGRIHNWLDRFFPEYRQVFKDWEGKASLITLAHLPLPQDVVAAGETTVVAIWKKNGVKRAVGPKRAELLYRKARKSIGLTEGATAAKHELAMYLEQYAMLCRQIEELMEHVAALVEQIPGACHMMSIPCIGLVTVAGFLAEVGDLSGYDHSQQIVRHAGLSLRENSSGLHKGETTISKRGRCRLRALLYRAALTMVAKNPEFRALHLYFTTRRDNPLKKKQSMIAISSKLIRVMFELGRKQKDYDASKVLGPHREAQFQTAA

SEQ ID NO: 53362 - protein, 370 aa, unidentified
MSVRRILAKTINTDLEYEAIGIDLAKNCVSVALLTTDGEVVCIDRLDYSELGKSAQVLCPTTFAMEPCTEMNYLVQKLEAWGHRCLVIGGKNVQNYVENHYSGQKTDLNDAQALAFLAQDKQLRTIKAKDIEQQKYASLTTLREQYIKQYRQTIVSLKGICQAWGLNISKGISGKAQLKDLIENHAAFPEELRESLVDMVTHAQTTQKVLNKITKTLEVLAKNDKVCQLIQTIPGLGTICSCRLRATIGDIKRFKNPKDFPAYYGLVPRSIATGHNEKKGKITHRGDRTMRSLMVQGAGCVIRLATCGKLKSKQLTKWILKKQKEKMPWGKLVCAVAAKLLRIVRAILISSKPYNPKIAGVAKCSLSKGS

SEQ ID NO: 53363 - protein, 387 aa, unidentified
MWEQRHSFGTRTSAIDAVDGSPHRHVSAIEVIAAGAVAVLGERSMEAITTVGLDIAKSVFQVHGVDAAGVVVVRRQLKRRHVLAFFQKLAPCLVGIEACATSHHWSREIAALGHTVRLMPPAYVKPYVKRQKNDAADAEAICEAVTRANMRFVETKTREQQACLMLHRTRHLFIKQQTSVINSIRAHLAEFGIVARVGRNGVEELLRIAAGPGDARVPEAARMCIAALGVQLRILKAQILEFDRRIIAWHRSNETSKRLDQIPGVGPALATALVASVPDPKAFRSGRHFSAWIGLVPRQHSSGGKDRLGSISKQGDRYLRGLFTAGALAVIRYAKIHGIGHRPWLTTLLARRPTKVAAIALANKLARMAWAMMAKGERYKEPAALAA

SEQ ID NO: 53364 - protein, 330 aa, unidentified
MTTNPPRSAFTHIVAFEVSKEKLVVHTLPDNEQWTIDNKPQAVRRLIKAEIKRNRKKQLGQMLVICEATGGYERHVLDGALEMGLSVHRAHGTRVRHFGHYRGLLAKTDPIDAHLIAQYGLKTENIRLYSPPPPDTAALRALHARRTEIQQMLIAETSRLDHAQHKSVLKSLKAHIASLEAAFATIEAEIAQLVEENETLGKKVALMRTVIGIGPVSAMILLAHLPDIGRLTKGQVARLAGLAPINDDSGKKRGARHVEAGRTAIRRALYMAAGVAMRTNPVLKAFADRLRGKGYPFKYVVTAVMRKLVVILNAILRDGQPWKGAQTACG

SEQ ID NO: 53365 - protein, 433 aa, unidentified
MEDVREEPLFVQRAAGLDIAKAEVEVTIRVPSDTSAGRRQQETRTFGTTRRQLLDLADWLRSWGVTKVGMEATSDYWKPVFFLLESRGFDCDLYNAAQVKALPGRPKTDRADSIWLAKITERGMIASSFVPPEPIRRLRTHTRYRRHLTQARTAEKQRVEKLLEDGHLKLSSVISDIHGVSGRDMLDALAAGQRDPHALAAMARGKMRGKIRRLEEALECSFFTDEHAAVLAMMLQVIDHYTAQISQLTATIEELAGPYLPQIEQPGAVPGIGMICAQDIIAEIGTDMAVFPTAAHLVSRAKWSPQVRQSAGKRKGSNATGRGNPYLGAALGEAGISAGNTQSFLGARYRKLTRRMPRKKALVATGNSMLTIVHALLSDPAAVYTDLGADYYEQRMHARRQARNHVKSLERLGYKVIIEALSPDTGQPLTAAG

SEQ ID NO: 53366 - protein, 349 aa, unidentified
MILVGCDLHTRKQQVALLNTDTGELWDQELSHDGDAIERFYATLPPPVTVGIESTGYSLWFHALLQRLGHTLLVGEAAKIRAMVVRKIKTDRRDARHLRDLLKDDRFPVVWIPDPATRDLRALIKHRLRLVRIRTMVKNGLHAIALNQRLALGPSLWSRAGLAQLHALVLPPHTRRRRDDSLELLQWLNGHIHELDLHVATAAAADPDARRLMTHPGVGPLTALATVLVLGPVGRFPNSKHVVSYIGLAPAVSASADKYRLGHISKQGSALLRWVLGQAAPLATRGDAALKRIYFAVLRRRGRPKAKVALARRLLIRLYVMLRDQIDYDEFCRRGRTQRPGLEPARIPM

SEQ ID NO: 53367 - protein, 341 aa, unidentified
MNSLSVIGLDIAKHVFQIHGVDETGAVLVRRQLRRTDLPRYFAKLAPCLIGIEACSTAHYWGRQLRAFGHDVRLIPPQYVKPYVKRNKTDAADAEAICEAVTRPSMRFVGIKSTNQQAVLTLHRVRDQLVRQRTMVINALRGHMAEFGVVEARGIAGAKRLAEIVWDEDDDRLPDIARRALDVLVAQLCDVMEKIDILKQELLAWHKQNEVSLRLAKIPGIGPITATALVAAVPDASVFTSARQFAAWLGLVPRQHSTGGKPRLGGISKRGDGYLRRLLVTGATAALFRSKETRTRPWVNELLKRRPAKVVAVALANKTARTAWALMNSGAIYRAPKSAKA

SEQ ID NO: 53368 - protein, 372 aa, unidentified
MKSIVYVGMDVHKATFSLCALSGEAGEILAETQCASEPRLVKQFIDHLTEECAPDTEFLTGYEAGCLGYSLYKSLQSLGIPCVIMAPSTMYSSSKNKMVKNDHMDAKMIARNLAANTYHPVYVPDEQDEDVREYLRLRKAVKKQLTRVKQQLAALFLRHGLKCESSANKWTQAYMTWARTLPVSDVLRDVIDEELLQISELEEKIARYDQTIEQFSHNERYEEPVQALTCMKGVALTTAMTLHVEISDFKRFKTAPAFMSYAGLNPSEHSSGEHSFKGGITKQGNSVVRTTLIEAAQALVKGRAGYKSKALRARQAGQDAVVISYADKASLHLLRKFERLLAQGKAYNVAITAVARALAGYVWGMETGNINY

SEQ ID NO: 53369 - protein, 343 aa, unidentified
MKHYSGLDVSVKETSVCLVDETGKVCREVKVPTHPEDLARVLKDPLWRLERVGLEAGPLSQWLFNGLAEAGLPVVCIETRHAKAFLKAQVNKSDRNDARGIAQMMRVNLFRPVHVKTLMSQKRRALLTARKLLQEKVIAIESDIRSLLRNFGLKVGVVGAARFAERIHELVDGAPDLAEIVEPLLAARQALREHYGALHRKLLAIVRNDEVCRRLMTIPGVGPIVSLAFVSTIDAPGRFRNSKAVGPMLGLTPVLHQSGDTSRIGRISLCGDGMMRTLLYEAAQTMLTRTTQWSWLRAWALKVVIRRGMQRAIVALARRLAVVMHRMWSDGTELRWAKDARAT

SEQ ID NO: 53370 - protein, 338 aa, unidentified
MTKDTMIGVDLAKNVFQLHGASMTGQMQFRKKLSRQAFFKFMAEQPPAVVVMEACGSAHYWAREVIRLGHDVKLIAPHYVRPFVKRQKNDAADAEAIVIAAQRPEMRFVEAKSVEQQSRAILFRARERLVHQRTELVNALRACLYEYGHVVPQGIQQIKRIEEILDAPNSDLPALMREECRDLLEQIAEKTRRIDARAGKIKALAAEADTARRLQTIPGVGPLTALAVEAFAPPMENFRCGRDFAAWLGLVPRQFSSGGKERLGRISKAGQSDIRRLLIIGAMSRLNWLGRKSIPEGSWLARMAARKPRMIVAIALANKMARTVWAMLTKKQDYRVPA

SEQ ID NO: 53371 - protein, 468 aa, unidentified
MPSHPTHKKRHLDDLTCVHPNAAGLDIGSAEIVVAVPADRDPQAVRVFQTFTPDLYALLAWLLACGIDTVAMESTGVFWIPIYELLEQHGITPYLVNARHVKTVPGRKSDWNDAQWLQKLHALGLLQASFRPDAEIRTLRTLVRYRTELIERRAPHINHMIQALKHMNIQLNLVLTDITGVTGLGLLRAIIAGERDPQRLAQFRQAGCKHSEAEIAKALTGSWDDAQLFVLAQAVDLFDYYTAKIAECDTKLEQQYQAMESRHEKDAALPDLPPAKPDSKSKNALTFNARAQIARVIGVDLVAVMGISAITAQTIISEIGTDMERFPSVKHFCSWLGLAPHNDISGGKVLRSRTMKVRNRANQAFRQAAQSVAQSDSSFGAYYRAMRARLGPKQAIVATAHKIARTVYYLLKTGEPYREESAAEYDTKRQERELKHLARRAQKLGYTLTAVPAPAPESHPEPGGEGSF

SEQ ID NO: 53372 - protein, 412 aa, unidentified
MQTLIERGCGMDVHQATVVACLLMVRRDGKVQKQMRTFGTTTREQGGLREWLLSEGCTHVAMESTGVYWKPIYAILEGALEIVVANAQPIKKVPGRKTDVKDAEWIADLLCHGLLRSSFVPPKPIRELRDLMRYRRKLVESQAAERNRLLKVLETANIKLANVATDVFGMSGRLMLRALIAGKATPQEMAELAKGLLRKKIPELELALEGKLEQHHRFLLELQLQRLEAAEKDLAVLEQRIRQMLEPYAAQLALLDEIPGVDWTLAAVIIAELGVDMSVFGSVSQLASWAGVCPGNNESAGKRKSSRIPSGNVYLKSGLVEAANAAARAKGTYLRDKFFRLKARRGYKRAVVAIAHKILVAIDHMLSQQVSYNDWGDLYLDKLNKHHLTRNLVHRLERLGYTVTLTLEQKAA

SEQ ID NO: 53373 - protein, 343 aa, unidentified
MQAVTTIGLDIAKSVFQVHGVDAAGNVIVRRQLKRRYVLPFFQKLPPCLVGIEACASSHHWSRELQALGHKVRLMPPAYVKPYVKRHKNDAADAEAICEAVTRANMRFVATKTPEQQSCLMLHRTRHLFIRQQTAVINAIRAHLAEFGIVAPVGRNGVEDLLNIVADCGDKRLPDVARACIAALGAQLRMLKARILEFDRLIVAWHRSNEASKRLDDIPGVGPALATALVASVADPKAFRSGRDFSAWIGLVPRQHSSGGKDKLGSISKQGDRYLRSLFTAGALAVIRYAKIHGTKHRPWLTALLARRPTKVAAIALANKIARMAWAMMARGDRYKEPVALAA

SEQ ID NO: 53374 - protein, 350 aa, unidentified
MLYTSVDYHRSFSYLTTMNEKGEIITQKRLPSNREIVDFLKSFGESMEIAIEATPSWYWLYDELEEEGFRVKLSHPLKTKAIASAKVKTDKVDSATLAHLLRSNLLPLSYVPEKPVRLNRELLRYRASLVKIQTGVKNKIHTILAKNNVSHSYSDLFGKEGMAFLHSLALPENYKIALEGYLTVLDVVRREIRLASKKVEQLAEGDRDAMLLMTIPGMGYYSALLTKSEIGDVKRFRSAKQLCAYAGLVPSTYASGNVCFHGHITKQGSRWLRWILIEAAIHAVKRPGVLRHFYFRVERKKGGQIAKVAAARKLLEWIYHILRDSRTYQEMEKIADLLGRGELGNPSGSE

SEQ ID NO: 53375 - protein, 353 aa, unidentified
MDRYIGLDVHSSSCTLAVVGPSGKRLGSQVVETNAGALIEVLRGIPKQRHICMEEGTLSEWLHEVLEPHVEELVVTGVGKKSRGPKSDKLDAFGLAEQLRIGSIETRVYKGRGQFGRLGNLARAYGFLVGDTVRVKNRLRSVLRSRGVGYGAGRSVYSKRDRDQWLGALPEATKPLAAQLYEEHDALVALREKAEKTMLAAAKKHREWHVLRTCPGLGPIRVAELLPVVVTPYRFRSRSGFWAYCGLGIVMRSSSDWVRTQTGEWVKVQVQQTRGLNRNFNHTLKRIFKGAATTVICRAEDGPLYRHYESLLDGGTKPNLAKLTIARQIASIMLALWRTGERYDPTKLEEATK

SEQ ID NO: 53376 - protein, 409 aa, unidentified
MDLTAMHKRVIALDVHQARITACAVVEHDDGQVEVTKREFGAFKRDRRALVQWSLQIRPEVVVMESTGVYWKSPFAALEAVGIVAWVVNARHVKAVPGRKTDMADAQWLATLARAGLLRASFIPPLDFRQLRLVARQRQKLVGMCSAEKNRLHKVLVDAGIRLNVLVSDIHGASARAMVKALIAGRPMHEVLDLQGRLRASREDLCEALGTEQFSATHRFVAEEIMQHIEQIEARIARMDQYLLRGLEAWQPQLKLLQTIPGIDINGAAMLLVEIGADMGVFGSAERLASWVGICPGNNESAGKRKSGKIRKGNAWVRRLLCEFAQAAARTRCALKAKFESLAIRKGHKKAVVALAHKMLRTVYAMLASGAHYQDKSVDYEALSVAKNAPRWIKMLTKHGFMPKPVPAT

SEQ ID NO: 53377 - protein, 360 aa, unidentified
MLQHRAPVESTTTVIVGVDTHKHVHVAVAISPLGVRLADCSVSADRAGYTALVAWARSLGVVDAFGIEGTGSYGVGLASHVRRNAIKVVEVSHCDRRKRRNNGKSDTIDAEVAARSVLAGLATAVPKTADGAAEMVRQIKVARDTAVKARSAAIITLKTLIVNAPSELRETLEPLTDRKLIDRCARLLPGAITDTTASTKHALRAIAARWLALASEIRTHDEALDPITATAAPTLREAFGIGADSAAEMMIVAGDNPTRVRSEAAFAKLCGACPIPASSGVTHRHRLFRGGHRQANAALYRIVTVRMRWHEPTLAYVARRVAEGLSKKDIIRCLKRFVAREIYHALIEDHRARVAASAAA

SEQ ID NO: 53378 - protein, 441 aa, unidentified
MPRYVGLDLHKELIEACFIDEQGKHLHRCRVAVTRESIEMFAAKWLQPSDQVVMEATTNTWEVAELIRPRVAKVAIANPLKVKVIAEAKTKTDKVDAGVLAQLLRCNFLPEVWIPDQPIRLLREMCAHRAALTADQTRIKNRIQSLLAQRLIPVPLRVLFNGSGRNWLSKLELATQDRARIDSYLRVLDQIESEETSLRKASTQLSYDKEQIRLLMTLPGLGAAGAQALYAALGDWHRFKDGAHAASYLGLTPSTRQSADHCYHGSITKAGNSLARWLLTQAARQVAQHPGPLGVFFRRIEKRKSYNVAVVATARKLVMIGFLMLKNNEPYRYSLPGPTQRKLSAFRIEATGNRRPKSRLRLPMQRRQPGTRVQSIPPLDEVYQSENLPPITKADALPAAERRMLQRMGIADLPETLQVVQTRTYRSRKTAQCSSPEKADK

SEQ ID NO: 53379 - protein, 364 aa, unidentified
MIVIGTDTHKRTHTCGAVFAGTGQLAGELTAPARKAGFAELLDWGRRLDPERIWAIEDCRHVSGSLERFLVDAGEQVVRVPPKLMGESRRGERAAGKSDPIDALAVARAALREGPDTLPTAHLDEAALDLKLLLDHREDLVRARSEDQQRLRWHLHDLWPDFELPAGCLDRVLWLDRVARKLSRAEQGARVRVCRELVRAVRGRTRRASELEREIGAMVKAQAPQLLDLPGCGVLSAAKLLAETAGAGRFASDAKLARQAGVAPIPASSGSRVRHRLDRGGNRQLNCALHRIAVTQGRVHPPAREYLAKKQAEGKSRIEAIRCLKRHLARRVWRLLIDSEIDCSLTTTVDSQRGSLSPQIAVAA

SEQ ID NO: 53380 - protein, 372 aa, unidentified
MNYNTVYVGMDVHKESFTFCAYTIDAEKGSHFQRTEADYKNVLKYLEFLRTVYGNDANFICGYEAGCLGYTLYHQLIEHHVNCVILAPTTMLEQCSRRRIKTDRRDAEIIAKCLAQHNYSPVHIPTATDEETKEFLRMRDDHKLALKKVKQQILAFCLRHNYRYDGNSHWTAAHIKWLKSLKPEALYKEILDEYLLTYTTLSDKLERLDKRIEELASKDEYRESVKKLCCFIGIKTHTALSVLIEVGDFQRFASAQKFASYLGLVPGEDSSGDEQTRLGITKAGNRHVRMLLTEASQCYARGQIGFKSKELKSRQAGNSPQVIAYADKANERLRRRYYKMVLGKSKKHNVAKTAIARELACFMWGMMTEHIA

SEQ ID NO: 53381 - protein, 386 aa, unidentified
MQMPNDLSQSRIVLKQDSTLIAVIEMSLSSWLVAGIVPGVERQPLKKLAVDESALLKLLHRWREEAEKAGRRIERIAVAFEAGRDGFWLARWLKARSIEAHVIHAASVGVSREHRRAKTDRLDTELLKRAFLGWLRGERDHCKMVDIPTIKDEDAKRPNRERENLVSEQSRIINRMKAALIRLGIRGFNPKLKRATARLDGLRTPEDEPIPPNTLAELRRDMERRRLVRDQIRQIEEARLERLDHAPGDGPHAMVRLLARVIGVGIETADMLVHEVLSRNMRDRRAVARYAGLTGSPDESGRKRREKGLARSGNARVRRGMIQLAWRFLLHQKDSALTRWFRARTENARGTRKPMIVAMARKLLIALWRLVREGVVPDGVVLRPAQ

SEQ ID NO: 53382 - protein, 443 aa, unidentified
MGDGSWVGVDLHARSAVAGVLDGRSGGLRTERVPAASGPLLEWLLGLPRPVRVAYEAGPTGFGLARACARAGIVCLVAAPGKIPRAAAARVKTDRRDAERLARLLRLGELTAVRVPDELEEAARDLVRAREDARADLMRVRHRLSKLLLRHELLWQRSAWTREHDRWLAGLRFEGPLAVCFDESYGGVLAAKARRERLDRAIAELAVTAPYADVVARLCCLRGVSTLTALALTVELGDWHRFGPSSLGAFLGLVPSEQTSGQQRRQGPITKTGNGHARRLLVEAAWHQRRPLRPSLALTGRRAGQPAAVRAEAEAVARRLHRRWWDLERRGKRRTIVAVAVARELAGQLLEAGHDAVDGHDQGEGEGEESAPAHSARSDPRHYYEQPTGRCSTLDSGTAPDRTPGHAVPTRAYQSDRPVDTSRRALPAQRKRPRTRGPPSPAT

SEQ ID NO: 53383 - protein, 418 aa, unidentified
MGSRVGSDSNVRAGSRRGRCVLRLICRPGLGARADAYRSGGVTCWEPVVEARRCLVRRPGRSVSSRSVAQREDTTMGTQIIGGVDTHLDVHVAAVLDEHGGLLGTASFATTPDGYDALGEWLSSFGEVALVGVEGTGSYGAGLTRRLRAAGMKVVEVDRPNRQRRRRAGKSDTHDAVSAARAAFAGDALGAPKLRQGNVEAIRVLRLARTSACRDRTKALNQMRALVTTAPDELRTQLRGLTIPKLLRTAAGFRPAGRADVISANRLALKTLARRALALAAEIQALDELLAPLVAETAPEMIERVGVGTDTAGALLVAAGENSSRIRNERSFARLCGAAPLDASSGKQQRHRLSRAGDRQANSALWRIVITRLSYDPSTRRYLRRRCAQGKTKAEAIRCLKRYVAPEPYAYLPHQTLD

SEQ ID NO: 53384 - protein, 379 aa, unidentified
MTQISVSTTSEHSIYAALELSKNSWLLAIQAPGRDNPSLHPIKGGDADGLMAKLDAARARVAKVTGQTPTVALCYEAGYDGFWLARFLEQRGIECRVMEPASLQVNRRARRVKTDRIDVENILHTLIAWCGGDRHVCSMVVVPSVEEEDVRRSHRERDRLVRERTAHINRIKGLLFGQGIRGINVKKDYKTLAPAALITGDGRPLPERLGREITREIARLAQVQAQIAEIEIERDLASTSCAATERKRHDLLRLKGIGPTFSAILAREVYYRRFANRRQVASYIGLAPSPYDSGEGRRSQGISKAGNSLARYSLIQAAWLWIRHQPNSALTQWFHHRTEGQGKRVRCIMIVALARKLAIALWRYVELGLIPQGATLSAR

SEQ ID NO: 53385 - protein, 359 aa, unidentified
MRGQRNEISFRGQKIYIGIDVHLKSWSVTVLSETSVLKKFSQHPSPEALHGFLARSYPGAEYHSVYEAGFCGFWIHERLTALGIDNIVVNPGDVPTKSSEKLRKSDAVDSSKLARSLRANELKGIYTPDSASLEMRSLIRLKNSITKDTTRQKNRIKSQLRYLGIGIPQEFLEPFSNWSKRFIAWLKEVETLTPSGRQALDIQIRHLEELRRQKLEMTRALRTLAKTDRFREPLRLIMTVPGFGQATGMAFLSEICDITRFRNAEQLAAYIGMIPMCHSSGEKDGTGDITVRRNAVMRCNLIEAAWVAVRQDPAMNLFFTEQCKRMPKSKAIVKVARKLVNRLYFVLKHQTDYVNSVMS

SEQ ID NO: 53386 - protein, 334 aa, unidentified
MPCQSSYIGVDASSDYLDFDGLPGQSRRRLSNTPESHAAVAALLIASCRDDRDAVVVLEASGGCERGLHRVLVEAGVPAAIVNPQQVREFARSQGLRAKTDRVDAHAIRKFGEVRRPRPTALPDPVRAELIELLNYRDQIVAEIAARTLQRGHLTSAFVIKQAEAALERLRRDAEMLERVIEATVASDPELTRRAGLLTSFPGAGPLVAAVLVADMPELGTLNERQVASLAGVAPFACDSGKMRGVREIAGGRPKVRRALFHVARVGLRWNPVLKALYERLTARGKPGKVALVACMRKAVVILNAILKSGQPWDSDCGIKKKVAGQAAGNALAH

SEQ ID NO: 53387 - protein, 403 aa, unidentified
MITFFAGLDWASQTHAVCIIDAHGAVFERFDIDHTAAGLAELRRHLVAAGSPPVAIERPSGLVVDTLMEAGFTVIPIHPNAVKATRPRYRSHGAKSDASDAYLLADLLRTDGHRFKPLAPQGEEIRALRALVRGRDDLVATRVQLANQLRSLLDSFWPGAVAIFADVDSPIALAFVERYPTPESASRLGPKRMAAFCAQHAYCGRRTAEELLARLHHAPITDTGELEADAKGELARSLARTLTRLVEQIRLLTSRIEHHVASLDDGQIIMSFPRAGRICAAQILAELGSVRERFDSDAQLAAEAGVAPVTYQSGKSKSVTFRWACNHRLRAALTCLADNSRHASAWANRVYTAARSRGCDHPHAIRILARAWVRILWRAWTDRKPYDPAQHQGARLAFESTQG

SEQ ID NO: 53388 - protein, 452 aa, unidentified
MAKPKKRRHRKLDRSLPEMRPNAGGIDMGATEIFAAVPADRDSESVRSFPSFTQDLHELADWLQRCRVDTVAMESTGVYWIPLFQILEARGIEVHLVNAQHVHHVPGRKSDVLDCQWLQYLHSVGLLKASFRPEHAVCEIRSLMRHRQNLVEMACVHVQHMHKSLDQMNLQIHHVISDITGVTGLAIVDAIIAGITNPKELAKLRDYRIKASIETVTKSLVGDYRPEHIFTLKQSLTAYRYYQQLIADCDQEIQQRIQAFDTKDDGPTAAAAVDSSNSTTATPSSFDLHSHLERIFGVDLTRIPGFECLRIQTIFSELGADLSKFPTDDGFCSWLNLCPKDGSSAGRRIRGPKVKTKNRVAQAFRLAAQSLHHSQSYLGDYYRSQRARHGAVKATKNTAHKLARIFYHLVTTRQPYDETVFAKLEARSHKRRLHKLQSLAKQMGYSLVEANA

SEQ ID NO: 53389 - protein, 418 aa, unidentified
MEAIVESCCGLDVHQATVVACLLVGKPGKKPRKDVRTFGTVTAELVRLREWLEAEGCTQVGMESTGVYWMPVYTILEEAFKLVVGNATHIKQVPGRKTDVKDSEWIADLLRHGLIRPSFVPPKPLRELRDLLRYRRKLVESTTSERNRMLKLLEMGNIKLSTVVTDVFGVSGRSMLQALLDGQQTPEQMAKLARGRMKGKLLQLTAALDGRMEEHHRFLLKMQLERLEEVEADIARLDQRIDEKLEPYREVHTRLMQIPGVDRIGAAVLIAEMGVDMSVFPSVRHCAAWAGVCPGNNESAGKRKGQPARKGNVHLTTALVQAAVSASHAKGTYLKDKYWRLKAKRGPKRAAMAIAHKILIAAYHMLSRGVDYKELGPAFLDQRSADVTKHGLVKRLERLGYQVTLQPIEPQPQPTVAA

SEQ ID NO: 53390 - protein, 416 aa, unidentified
MDTKQRKYDLVKGVLVVGVDTGKRRHVAALRAPGRSVEKRVPFDNDRKGFQRLAEEVDQYRERMKLTRVVLGVEPTGHYWLPLAYWWEENQGPVVLVNPMHTKRAKELEDNSPLKNDPKDAAVISWLISDAKYRECHLPRGIFATLQNLVQQRARCGNDEGRLVNQLHQTVEHIFPELEQAFSSFRVKSCREMLLRYADPEVVAQMRAEDLGKQLREWSRGKLGEERAEKIIGLARESVGLREGKAAINSEVQRLVRRLALVGEERKDLEDKIKNCLPEVPGAALLLSVPDFGVWTVAAILAQTGDLRNYEHPDQVIKLSGLNLYEISSGQHKGRVRITKRGQAAFRKILYMAALRACRRRGALHSYYESLVGRGLAPTSALVAIMRKLLRVTWTLVKKSQRFDRERLIPAPAKAA

SEQ ID NO: 53391 - protein, 405 aa, unidentified
MDAAIPSRVAGLDWASRLHAVCVLDRDGQVRARFDVPHTGTELRGLTRRLVRLGVGQVAIERPDGPVVEALLAAGLEVVVIPGRQVKALRGRYGTAGNKDDRFDAYVLADALRTDGHRLVPLVPDASETTALRVVSRARKSLVATRVALANELRANLEVAFPGAATLFSEVDSPIALAFLRRFPSVTQAAWLTEARLAAFLRRMGYPGRKAAAELLGRLADAPAGLTGPEGEARAMVTLGLVAALDTVRAQIDELEGEIVERLGTHADAAIFTALPRSGRVRAAALLAEIGDCRARFPDAESLTCLAGAAPSTRRSGKHKKVVFRFACDKKLRAAVMDFAGDSRHDNPWAAHVYQQARARGHRHAHAVRILARAWLRVIWRCWQDHTPYDPARHGSYQRLIAQQA

SEQ ID NO: 53392 - protein, 370 aa, unidentified
MASVASGAGLVYLGMDTSINEIVVAVLGPGEDAPAVVERIFNDEASVRRLVGRFPDRGLLRACYEAGPGGYELHRLLTSMGVACEVVAPALVPREPGRRVKTDRRDSLRLALSLRAGQLTAVRVPSPAEEAVRDLVRARADAVDDRRRTQQRLTALLSRHGRVWRNTKWTAAHLDWAAKQVFDEPALNRALAGCLAGLAAREAELGAWDAELARWAQAEPWAEPVRRLGAYRGIAALTGLTLAAEVLDWRRFPTARAFMSFAGLTPAEYSSGQRTRRGHITKAGPQAVRTALVEAAWAYRHRPAIGAGLKRRQAGAAPATLARSWAAQHRVHATYRKLAARGKPAGTAAVAAGRELAGFVWAEMTDQPAR

SEQ ID NO: 53393 - protein, 331 aa, unidentified
MKFLETAGIDVSKDTIDATLHVKKCSKQFKNNTTGFRSFIRWAQKQSGLSINQIQICFEHTGLYSLKLATFLSNNEIKFSMVPALEIKKSLGIARGKNDQLDARRIAEYAYLRREKLAFYNVPSINIIKLQALTTLRAHMVKNKSGYQSSLQGLKTFFNQKDNENIYKTIQSEISGLNKKIKKIESEILQVIRREESLYHLYNLITSVKGVGLILAANFLVITNCFTKFETSRQFACYSGIAPFEKQSGTSLKSKSKVSHFANKRMKTLLNLAASSAIQCDPELKAYYNHRIETGKSRMSTLNIVRNKIGYRVFAVVKRGTPYVPLHLHAA

SEQ ID NO: 53394 - protein, 319 aa, unidentified
MTRNLGQFECYVGVDVSEGRLDVCLLPGGERAAFSRDRRGVARLVAWLASQARLLVVVEATGGLERVLTVALEQVGIAVAVVNPRQVRDFARAAGLLAKTDRLDAYALALYGERMCPVPRPPRSAAGHALAALVLRRRQLAQLVEAERNRARRSEEPAVLASIEALLGWLRTALAQLEDQIATHLARTPVWQERAALLASVPGVGRVTVSTLLALLPELGALDRRAVAALVGVAPFARDSGLMKGRRTIWGGRAPVRAVLYMAALVAVRHNPALRAFYDRLVAAGKAKKLALTAAMRKLLTILNALLRDRQPWRAPQSA

SEQ ID NO: 53395 - protein, 349 aa, unidentified
MWIIGCDFHPGWQQVAWLDLETGETGEAKLEHANGEAERWYRTLPVPSLIGLEATGNCEWFVELLQQLGHEVWIGDAAKIRASYVRKQKNDRRDAEHILTLLREKRFPRLWRPTAEQRDVRQLLIHRHKLVEMRARVKNALQHLAMNRGMQKKSRLWSQAGQRAFRELALPGWAGCRRQDLLELLVYLDKKLAPLDRAAEELSQVDEVACLLRTQPGVGPITALAFAVTIGDASRFQRGKQVASYVGLIPREHSSGGKQRLGGISKQGNRFLRSLLVEAAQSAVRCDESLRRSYLHRCHSKPKGVAKVAAARKLAVRLYWMMRTRTAYPEIVPIESSPRVPRDRSTAAD

SEQ ID NO: 53396 - protein, 421 aa, unidentified
MLKPAQDNDEIITRVAALDIGKAEVMCCVRVPDPDRPGRRVQEVRPCSTMTRSILLLADRLTKLGVTRVVMESTADYWKPVFYLLEAAGLDTWLVNAKDVKHLPGRPKTDRLDAVWLCKIAERQMIRPSFVPPPPIRQLRDLTRYRRDLVEARTAEKQRVEKLLEDACLKLSVVASDLFGVSGRAMMAALVEGQRDPAALAGMARASMRRKLPQLEEALTGYFTDHHAFLLRTMLARVDAITADIERVEARVEELVVPFAQAVDRLDEITGIGRAAAHVIIAEIGTDMTRFPTPGHLCSWARFAPGVCESAGRKKPAGTGHGNPYLARVLGEAAVAASHTHTFLGERYRRIARRSGAKKAIVAVGRSMLVIIWHLLSDPDARFHDLGPEFYPRHTNTQRKVRNHVSQLTALGYRVTLEPAA

SEQ ID NO: 53397 - protein, 354 aa, unidentified
MSQKLNTAIAVIGIDIGKNSFHVVGLDKRGAIVLQEKVSRGQLERRLANIPPCLIGMEACVGAHHLSRRLKGLGHDARLMPAKYVRPYSKGQKNDFRDAEAIAEAVQRPTMRFVATKTAEQLDLQALHRVRERLVSQRTGVINQIRAFLLERGVAVRQGLRFLRAELPDLLATRTEALSPRMTRVIEDLAGDWRRLDERIESLSTEIAALAHQDAACNRLMTVPGVGPIISSAMVAAIGTGDVFSKGRDFGAWLGLVPKQISTGDRTILGKISRRGNRYLRVLFVQAAWVVLIRPKSWERYGLKPWIEAAKKRLHHNVLAIALANKLARIAWAVLNKERNFECNSMDKMASRPA

SEQ ID NO: 53398 - protein, 354 aa, unidentified
MKYFAGLDVSLEETAICVVDETGQIMKEARAASEPEALDALLLNLGLPLERLGLEACSLTAWLHGELKAAGWPAICIESRQAKAAMGAMPNKTDRNDARAIAQIMRTGWFRAVHVKTSTCRSWRSLLVARRTVLNEMRSIENVVRAIMRETGLKLGTPARTDFVVRARELIEDEHGLARMVEPLLEILGTMLREFARLTKQVLDIVRDEPICRRLMSAPGVGPLTALAFRATIDQPERFRKSRDVGAHLGLTPRRYQSGETDIQGRISRCGDELARTALYEAAHSLLVRSKKWSVLRAWGMKIAKRRGMARARVAIARKLATILHRMWVDGAEFRFGSEKAAAAGASKMIAATA

SEQ ID NO: 53399 - protein, 335 aa, unidentified
MGIDLHRRRSVIVRMTTDGDPLECIRISNDVERLSTVMARAGEAPEVVLEATYGWYWAVDALQELGAHVHLAHPLGVKAFEYRRVKNDERDARDLADLLRMGRLPEAWIAPPATRELRELVRHRAKLVGIRSNCKAQIHAVLAKCGIQISMTDLFGLAGTELLGRLELPKPYAARIASLRRIITALDFEIDAFAGQVRGRLARDPGFVAVQSIPGVGPILGAVFVAEVGDVHRFARAEELTCWAGLTPKHHESDKHVHRGRITKQGSRLVRWAAIESVQILPKTSVVGRIRDRVGDRRGRNIGVVAAARVQLEFVFYALRDHRVRALQGTRPVAA

SEQ ID NO: 53400 - protein, 339 aa, unidentified
MLIIGCDFHPGFQQAAIFDNQTGEMVERRLQHREEAEQFYGSLRGQTVRVGMEACGHYPWFERLLERLGMELWIGDAAKIRASEVRKQKTDRRDAEQLLRLLREDRFPRIWVPSLEERDVRQLLVHRHKQVQARTRSKNQLQALMLSQGVQKKRKLWTAEGRAELEKLELLPYAAVRRQRLLAALEQQEAEIAALNRQVEEEVKRRPAAVRLMTHPGVGPVTALAMVLTLGPAERFENARQVGSYFGLIPSEHSSGGRQQLGRISKQGSSFLRFLLVEAGQTAARYDAELGRFYRRLAVRKHRALAKVAVARKLAMRLYLMLREDWDYAQLCKAVCRQA

SEQ ID NO: 53401 - protein, 377 aa, unidentified
MSKLRYVGLDVHAETIAVAVAEPTGEVRSVGQIPNRPEAVRRLVKKLGAPEQLRACYEAGPTGSGLYWQLTALGVACEVVAPTLVPVKAGDRVKTDRRDAEKLARCYRAGDLTAVWMPDPAHEALRDLVRAREAAQQDQLRARHRLGKFFLRHGQRPPLPMKAWTQKYLGWVKTAVHFAQPAQEATLLDYVHEVDHAAGRVERLEQAIDAVVRTTPAPLGTVIGALQALRGIAQVAAVTIACAVGTFTRFRKATPLMGYAGVVACEAASGARTWRGGITKTGNAHLRRIVVEAAWAYRHRPALGSALKQRQVGVSAAVQAMAWKAQHRLHDRYRTLLGRGKAKQLAVTAVGRELLGCIWAIGVHVEQQARASQPRAA

SEQ ID NO: 53402 - protein, 344 aa, unidentified
MDNHTQYSGFAGVDLAKKVMQIHFVSGDGEITDKQVKRAEFLDFFRNRSKCLIGMEACGASQDWARKLETMGHEVHLMSPKAVKPFVSDQKNDYNDAIGIYKAMFNGVRRVPVKSTEIRDLQTLRRIRSQVTKDRVKEINHVRGLLAEYGIVMGKSITAFNKGISSALESLKERGDVSPLVAEELRTTVESIKTKIERQKKLDREIEQLARGCKNYENFLKTPGVGPFTAAMLCVLLCDPDIFANGRKFAAYIGLAPRSRGSGGKYFVTSIPLKFNCDSESRAVFVECAQAIARYKNKSPWVEDILRRKPKKVALIAIANKLARQVWAMANKGENFKQMAILTA

SEQ ID NO: 53403 - protein, 341 aa, unidentified
MDSNKLSQSRGKGKSRKLQDYDHYLALDWSKKIMAIAHKTRRSHEPRIFERESNLAELKKYIESLQGTKILAIEETTTAQWLYVELREMVDKILFCDPYRNRLLSDGPKTDKIDAGKLCLLLRAGLLKEVYHSASELYELRQLISAYEDVVKTGVRFQNQKKSFEQGHFEQGVHASFILEHIESHLHQYRIIKKQYEEKFGEICSKNKLLKNLIKVTGIKEIGAVKILAIVVDARRFPCVGNYYSYCGLVKHEKLSGQRSYGRRRPRFNHTLKAVYKVAAMAALSGTDNPMRKYYDVLLERGVAEHDARNALARYIARVTYGMLKTGTPYRPYVRSKKQAA

SEQ ID NO: 53404 - protein, 470 aa, unidentified
MQDVQDEPLFCERVAGLDIAKAEVEVTIRVPSDTTAGRRQQETRTFGTTRRELESLGDWLACWGVTRIGMEATGDYWKPVFFLLESRGFDCHLYNAAQVKALPGRPKTDRADSIWLARITERGSVCSSFVPPEPIRALRTHTRYRRHLTQARTAEKQRVEKLLEDGHLKLSSIISDIHGVSGREMLNAIAAGQRDPRVLAQLARGTMRAKIKRLEEALDCAFFTGEHAAVLAMMLATIDHYTTQIDNLTAKIKVLAEPYLHQIRQLDEIDGVGPVCAQDIIAEIGTDMTVFPTAPHLVSWAKWSPQVKQSAGKRKGSNATGRGNPYLSAALGEVSISAGRTQSFLGAKYRRLARRMPKKKALVATGNSALTIIHALLSDPAARYTDLGPDYYEQRMHARRQARNHVRSLERLGRVAPVHCCTGAPSGPCMRVVPAHGPGKPQGRFRCRALARCHRPAAARSAVVGGSWRV

SEQ ID NO: 53405 - protein, 336 aa, unidentified
MTIIRIGLDTSKHVFQIHGVDENEKPVLRRQLRRSEVEKFFAQLPPTRIGIEACGASHHWARLLRGLGHAVLLMPPQYIKGYVKRGKNDAIDAEAICEAMSRPTMRFVPVKTAEQQAALTMLGVRDLLIKQRTMLINALRGHAAEFGVTAAKGPNKIVELLQRLATGEGVPALAREMLGMLASQLEAVNGKLKAIEARLMAWHRQDPTSQCLATIPGVGPIAGVSFALKIPDARAFRSARHFAAWIGITPRENSTAGKHRPGKISHEGDESLRRLLVLGATAVIQRAKRGRASPWLLGLLARKPKKLAAVALANKMARVIWAMMISGEVYRRPQEA

SEQ ID NO: 53406 - protein, 449 aa, unidentified
MAKTKKRKHRKLERSLLVMRPNAGGIDIGATEIFVAVPADRDMETVRSFPSFTQDLHALADWLRQCRVDTVAMESTGVYWIPLFQILEARGIEVHLVNAQHVHHVPGRKSDVLDCQWLQYLHSVGLLRASFRPEQAVCEIRSLMRHRENLVQMACVHVQHMQKSLDQMNLQIHHVISDITGVTGLAIVDAIVAGNTNPEELAKLRDYRIKASVETVTKSLVGDYRAEHIFTLKQSLNAYRYYQQLIIDCDQEVQQRIGSFETKDGGSGSTGDACDSNSTTGTFDLRGHFERIFGVDLTAIPGFDVLRVQTIFSELGADLSDFPTPASFSSWLNLCPKDGTSAGRKIRGPKIKTKNRVTQVFRMAGQSLHNNKSFLGDFYRGQRARFGAIKAVKNAGHKLSRIVYHVITTRQPYDETVFAKLEARHQQRRFRKLQNVAKQMGYSLVATPA

SEQ ID NO: 53407 - protein, 429 aa, unidentified
MNSSTQNAKIKSITEKTLIVGIDIGSETHYARAFDWRNYEYSKKPFAFNNDEEGFKAFSSWMNEIAEKHDKDTVIPGMEPTGHYWLNLGAYLQEQGMKPVHVNPHHVKKSKELDDNNPNKNDRKDPKTIAALVNEGRFSYPYIPTGIYAEIRSLSNLRIQTQEEISRIKNRIARWFSIYFPEMKDVYKKPDAKSGMMVIKKAPLPADIKELGVDGVNQIWRDAKLKGAGLKRAKTLVEVAERSIGNTEAPGSARIEIRMLLSDYEVYSKRMDDLMTEIEKKLSEIPYIDKLLEINGVGIKTVSCFVAEVGDISRFDNPKQLQKLAGYAIVSNDSGKHNGESRISHRGRKRLRYALYEAAISVIGKNPEFKSIHEYYLTRTKNPLKKMQSVIAIACKLIRVFYMILTKGVDYDGQKMLNDIVRPEIAAAE

SEQ ID NO: 53408 - protein, 354 aa, unidentified
MIIIGVDFHPEFQQVASVDTDTGEFQEKRLAHREEAENFYRDLAAVGQKVRVGMEASGHARWFERLLAELQFELWIGDAAEIRTKRVRKQKTDRQDAQLILRLLLEDRFPQIWVPSWENRDLRQLLWHRHRMVQARTRIMNQLQAVALNEGLRCKKRLWREPGRQQLESFRLAPWASRRRRDLLELMDRLNPTITELTQAIEQEVEKCPAAQRLRTHPGVGALTALAFVLIIGRVDRFQCGKQVASYLGLVPLEESSGNRRRLGHITKQGSSMMRFLLVEAAQVTVRSVPEWRSKYLHLMMRRGRKTAKVAMARRLAVRLYWMMRQGWDYPQWVKFGSHAGQPGHRDGVPLNTE

SEQ ID NO: 53409 - protein, 338 aa, unidentified
MKLFGAIDLHSNNNVTVLIDERDEVVYRKRLPNDLRLIIEQLSPYQSTLEGIVVESTYNWYWLVDGLMEKEHRLHLANTAAIQQYEGLKYTDDDSDARWLAHLLRLGVLPQGYIYPKEERAVRDLLRKRSQLVHHKTANLLSIQNLYTRNTGSSLSANRIKKLTPEQVDGLFTLGDVALAVKANLSVMRCLEAEIKSLEQVVKERVKLKPAFRYLLTVSGIGQTLALTIMLETGDIRRFPRVGNFASYCRCVGSEKISNGKRKGKGNTKNGNKYLSWAFVEAANFAIRYEPLIARFYQRKKAKTHGVVAIKAVAHKLSRACYYVMRDEVPFDVGRAFA

SEQ ID NO: 53410 - protein, 395 aa, unidentified
MFIVGIDIAKRSHEAIIIAEDGQVVRKAFSFRNNCTGYNLLLEQVRRLTLVKSQIVFAMESTAHYWLALYARLLKDGYAVMVLNPIQSHSLRELYIRKAKTDARDSLIIADLVRFGRCKASNVPQDKILALRELCRSRAYLVDMAADLKRKLIALLDRIFPEYESLFDSVFSKASIAVLSKYSTPQKVKNANLRKLTDLLMESSNGHFGEWKAHQLKEAACSSFGIDDSGGVYSTLLGMFLEQILSLTAQADSLEKQISVFFQEFNNPLTSIPGVGTVLAATILSEIGDITRFSSADKLLAYAGLDPSVKQSGEFKSNQNRMSKRGSPYLRRAIWSASTVAVHRDPMFQTYYEKKISEGLHYMNVIGHVSRKMTAVIFAVLRDGQPYQPILQSAG

SEQ ID NO: 53411 - protein, 403 aa, unidentified
MIYVGIDVAKDKHDCHIVRENGEILLDNFSFPNSKEGFDRLDGILRQTSEKIKDEIKIGLEYTGHYSQNLLAHLKEEKYEVIALNPLQVNLYRKTKSFRNTKTDKSDARFIAKVTAETEITPKKNGLRHIATMKSLSRYRYRLLKTIQSLKNRYRRVLEIVFPEFEHLFNLRNMSTVDVLAKYSSPREILSAGKDSLERNLNKLSHGHYGKKADELLQAAEDSIGTTNLSDAFELKHLAKQISFLSKELEILEDKLASLLGKTNTPILSIPGIGVATGAAILSEIGNIKNFDNPAKLLAFAGCEPAVYQSGKFLLPHGSMVKNGSKYLRNAIFQATKAAYVSDPFMRAYVNKKREEGKHFFVALTHGMKKMTRIIFAVLRSGKPYTPPRILAEDAEKEYIPLT

SEQ ID NO: 53412 - protein, 355 aa, unidentified
MSQEKYIGMDVHQATISVAVMDAGGKLIMEGLLETKAATIVEFVRGLHGPLSLTFEEGTSAAWLHDLLKPQVDRLVVCDPRKAALLKEGNKSDRIDARKLAELLRTNQLKPVYHEEHGVRTLKELGRSYLTLTKDVTRGMNRIKALYRSWAIPCSGTTVYAPRHRAEWLAKIVEPGVRLRAERLYQQLDLLQPVRQQARHDLLVESHQHPAVKLLRQIPAIGPIRAALLVALLQTPHRFRTKRQLWAYSGFAVETHDSGEYRYVRGKMQRNRERITVRGLRDNYNKGLKNLFKGAAISASTRPGPLHDFYVALIAKGMRPTMARLTLARKMITITLTIWKKGVSFDPQQLHRQAA

SEQ ID NO: 53413 - protein, 402 aa, unidentified
MNAVGIDVSKGKSMVAIMRPFGEIVSTPFEIKHTSSDINSLVKLIKSIEGESRIVMEHTGRYYEVLAHQLSEANLFVSAINPKLIKDFDNDSLRKVKTDKADSVKIARYALDKWQNLKQYSVMDELRNQLKTMNRQFGFYMKHKTAMKNNLIGILDQTYPGVNTYFDSPARSDGSQKWVDFASTYWHVDCVRKMSINAFIDHYENWCKRKKYNFSKSKAEEIYGKAKELVPVLPKDDITKLIIKQAVDQLNSASITVESLRTLMNETASKLPEYPVVMAMKGVGTSLGPQLMAEIGDVSRFTHKGAITAFAGVDPGINESGSYEQKSVPTSKRGSSDLRKTLFQVMDVLIKTHPQDDPVYQFLDKKRAQKKPYYVYMTAGANKFLRIYYGRVKEYLASLPES

SEQ ID NO: 53414 - protein, 383 aa, unidentified
MPSENTVHVAIELSSSSWLVAVRLPGGEKSRLHRMESGDTTGLLALLGELGQRASTKLGRVVDVACCFEAGRDGFWLHRLLTVNGVAAYVLEPTSILVNRRARRAKTDRLDAEGMLRVLATWLGGDRQVCSMVRVPTPEQEDAKRPHREREHLVRERLRVENRIEALLFTQGIRKRPSLRSWERDMAELRTADGRALPPLLRAELDRLRRRLVLALELIRDLEAERAAALAIAMEATAADNAMALKITALQRIRGIGENFSAVLVREVLYRSFANRRQLASYVGIAPMPYQSGGMDRDRSISRAGNPRARTTLIQLAWLWLRYQPGSVLAAWFRERVGTLAGRTRRIAIVAMARKLLIALWRYVETGVLPEGIEIRAEAVATA

SEQ ID NO: 53415 - protein, 400 aa, unidentified
MFVGWDWASTTHDITIIDATGALVDRWAPPHTEQGLTQTITRLARHGHPADLPVAIERPSGLVVDRLLAAGHPVVPIHAAAFHAARPRWGAASAKSDPGDSYKLADYLRTDGHRLRRLQPLDDATRHLQALIRLREDHIKAKTAASNQLNALLDAAWPGAAAIFSRLASDIALAFLQAYPTPQAAARLSQARLAAFCRRHSYRGGRSPAELLQRLWAAPTPPVGLDPETLTELVNAQVRLLRTLLATIADLDRAIGAALLGHTKAKLLAPMPYIGEINLGQIVAEVGPILDRASSAEHAIAECGAAPVTRASGKTRTVGFRWAANRHARTALHAFADNSRHGSPWAARLYADARRRGKRHPHAIRILARAWLRVMWACWHTNTAYNPTKHRAEQRLAAGT

SEQ ID NO: 53416 - protein, 442 aa, unidentified
MSGHRALLLGRCVSLHGLTCWAEVTTLEACLTITCGIDWAEAHHDVALVDEAGKLVAKRRISDDVQGYRRLLELLAEAGDSADEPIPVAIETARGLLIACLRTSGRKVYSINPMAVARYRERHTVARAKSDHADAVALANILRTDADAHRPLPADSELVQAIAVLARAQQDAAWNRAQLSNQLRSHLKQYFPAALAAFQVRGVGLDSREARAVLAVAPGPAAAAKLSTARLASVLRTAGRQRNIDAWAQRLRAIFTGEYLHQMPAVEQAMGRQTAALIMQLDAACRAADDLAAAAAAAFAEHPDAEILTSFPGIGPVTGARVLGEIGDDRARFRDARGLKSYAGSAPITVASGKSLIVRNRKVKNQRLAAAGYVWIFGALPTPEIKEHYDRRRAAGDRHAAAMRNLFNRLLGCLHHCLQTGQTFDMDKAFPLPEPRLEPAAA

SEQ ID NO: 53417 - protein, 315 aa, unidentified
MEAERWVGIDVSKARLDVALGVAGELLWVANDARGIASLVARLVELAPELVVLEASGGLQTALVAELGAAPLPVVVVNPRQVRDFARATGQLAKTDALDARMLALFAERIRPQVRPLPGEQELELKALVARRRELVEMITAERNRLDRAPKLLHKEISAHIRWLESRLKDRDRDLDQMLRSSPLWREREDLLRAVPGVGPVLCATLLADLPELGALSRHQIAKLVGVAPLNCDSGTMRGRRAVWGGRAQVRAALYMATLAAVRCNPALKTFYLRLRSAGKPAKVALTAAMRKLLTVLNAMLKHHTHWSPQCPHIN

SEQ ID NO: 53418 - protein, 327 aa, unidentified
MTASVSFDNHIFIGIDVSGASFEAAWHRGGSTQYENRPDAIAAFVARLGGEKQIIRIAVEPTGGYEKPLVKALRGAGLPVEMVHTSRFDAYRKLVGVKAKSDTSDARLLAAYAAAPAEVRGRKADYVEIPQDAVREHLAELAVRRDQLKRMIHAESCRLATVRSNDVREQIAAHLEALREAGRKLHVAMMQLVRERTELRNAKQLLRSIKSIGDKTALASLALVPELGLISNKAASALIGVAPFVRKSGTMNAPAHIHGGRAAVRNAFYMAAVTASRHNPVLAPFYERLIAAGKPPKVALVAVMRRLVVYANAVLRSGQPWKAAQTP

SEQ ID NO: 53419 - protein, 418 aa, unidentified
MNSNKKGGYDYKFKLGGNNMISVGVDVSKGKSAICIIKPYGEVLEKPYELEHTKIGLRKLADLIFKYDEEVRVVLEATGAYHLPVLNYLQRYGIFVSVINPLVMKKYSSISIRKGKTDKMDAIKIANYGIDNWTRLACYQASGETYEELNTLTRQYSQYVSMKIKSKITLVNLLDKTMPRITKLLKNAENTNKDKLNAFTKEFWHYDNITKSTEKQFIVRYLKWAKREGYHQNDAKAKAIYNLASQGIPTLSSNYHSTKMIVLEAVRVLREISKTLSIILTQMQSLSKGLKEYSIVREMGGVGEKLAPRIIGCIGDARRFHSAKALIAYAGIDAPPYQSGAFDGTKRHISKRGSAYLRKTGYEIMKSVKVVKPTDDAAVYQFILKKEAEGKPKKVAKIAGLNKFLRIYYARVNEVYNT

SEQ ID NO: 53420 - protein, 400 aa, unidentified
MLSIGIDVSKGKSTVCGMKPGGEIVYAPFEVQHTREGMLELVSLLRSSSEEVRAVLESTGSYHCPVVAALLENGIFVSVVNSLRMKRFCSQSIRKVKTDRIDAMQIALYGLAYWQELQPARLPEDTYRELQLLARQYYQMTSLLIKAKVDFNAICDQVLPGMQELMSDHAGRHKLSDFVLRYRHTTHILEMGETRFRKDYCKWAEKKGYRNCERMAALIFATAQNGIPVLPNAPSTQIVITEAIRVLHTVEASRDAILTQMQALAKTLPEYSLVREMPCIGDTLAPRLIAEIGDVRRFHSKRALIAYAGIDAPPYQSGKFCANNRHISKRGNRYLRKTGYEVMQSYVMHKPANDPIFTFIEKKRGEGKSGKLAMVAGLNKFLRVYYGKVTELYRSLPAIE

SEQ ID NO: 53421 - protein, 340 aa, unidentified
MEHYAGIDVSLDSVSMCIVDAHGKILKEAKVACEPEALIAWLAEHGTPMARIGLEAGPLSQWLFAGLKAAGLPVELLETRHVRAAFKAMPVKTDRTDARGIAQLMRLGWFRPVHCKSLPAQEVRALLTTRTLLRAKRHDVEMSLRGVLRGFGLKVGPTTPKTFESRVRDLVAQHDTLQTIADALLKARAVLEQEFKALEKRLSALARSNAPTRQLMTTPGVGAIVALTFASAIDDPARFRSSRRVGAHFGLTPRKHQSGQTDVTGRISRIGDQGVRVALYEAANVILTRAVKGSDLKSWALGVARRAGMRKAKVALARKLAVVLHRMLADGTTFMASTAA

SEQ ID NO: 53422 - protein, 361 aa, unidentified
MTASNIVGVDPHRKTFTATVLDARGGELGHAHFPNTREGHDAGLAWAAGFGPADRWGVEGGSGLGRHLAEFLVEAGCDVRDVPPHKTSVRGRGRHEGKTDRLDSHRVAAETQTNPRLARAFKHAVSAAPDSLRDRIALWHNARTSLTKVRVQLLGELDALVHDLPEDLRTKLRPAKTVSARVNSLSRLDTTGVTDPTVALRLRLIGHRVAMLRDVLEQDKAATAELTALVDATNTTLTELVGIASRAAAEIIVEVGDIRRFTEAGFARFNGTAPIPASSGEGENAPVRHRLSRGGNRRLNATIYRIAMIQLRYEPRARQIHDQARAHGHTRREAMRVLKRHLSDAIYRTMLRDVRRAADLT

SEQ ID NO: 53423 - protein, 407 aa, unidentified
MTVAQMPEPEPVPEAVVGGADTHADTVHVALITVLGQDLADRQFPTTPAGYRAAVEFLYSRGPITRVGIEGTSSYGVGLCRAARAGGLQVLEVNHTTRAERRRQGKSDPLDAYRAAHAVLSGRATSAAKTEDIDGLRALRTARRSAVKARTAAANQIHQLLITAPDPIRDKFRRLSGKTLVKTLAQCRPAPYNPVTYAVLIGLKTIAQRHQYLDGQISYLTEAITAVVATINPGLLAAHGVGPDTAAQLLITAGGNPDRLFSEASFAALCGTAPVPASSGKITRYRLSRGGDRGANNALHHIAVVRMSSHRPTRAYLTRQRATGRSTPEILRMLKRAIAREMFKYLTHRVTVPAIDDLRASRQAKNITLTRAAAHFGLRPTALARIENGTKRDDTLATANRHWLHAA

SEQ ID NO: 53424 - protein, 388 aa, unidentified
MRFIGIDIGAENHFVAILDEMGVTTRKVTSFTESAEGYAKLRELIGAPEDALIAMEATGHYWQNIFAFLAAEGFQVALLNPLRTHRFAGEDLRRAKTDALDALGIARFAQQKRPVPTPLPDEATLELRELMRLRDRLVQDLGDRVRQLHRAVDLTFPEFSQHVADLASFKATALLFAYPTGSSFRSARTREIAAIKYDGRRTIGEELATKLSEAAKVSVGRHAGAPYQLQVRYACEDIAVLRERLKRLDGDIHDSLKRHEVGKLLTTIDGVGVNTAARMVAEVDLCAFRGGALSAFVGVAPSVNQSGKRQPRRGSLCPIGHAKLRAKLWMPTLRAVRCNAWLRAFYAGLVARGKPKKLALIAAMRKLLTAILSVARSRQPFVPRLAPI

SEQ ID NO: 53425 - protein, 344 aa, unidentified
MSEVIIIGLDIAKHVFHAHGADERGRAVFSKRISRGKLLDFFAAQPSCTVALEACGGAHHWARQLIQLGHEVRMIPPAYVRPFVKRQKNDAIDAEAICEAAQRPSMRFVAVKSEQQQAAGLVFRTRDLLVRQRTQLINAIRGHLTEYGWIAPKGPSHVAMLADMIEEEEMASSLPEATHAMFRLMLDLLAGLNGKITDLDKEIARRAREDEVSRRLMTVPGIGPITATAIAALAPPVETFAKGRDFAAWLGLTPLQRSTGGKQKLGATSKMGERTLRRLLIIGSSAVVQQASKRGAPKGSWLEQMLVRKPRMLVTVALANKMARIVWALLIKQENYRAPVTAKA

SEQ ID NO: 53426 - protein, 321 aa, unidentified
MEAVWVGIDVSQEWLDVVIWPGPASFRVANEATAVASLAARLRTLNPRVVVLEATGGLEVLAASEVHAAGLPVAVVNPRQVREFARSLGTLGKTDRLDALVLAQFAQASESNGRLTPLRLADEAEAELKALVGRRRQLLGMLVAATNRRARAPKLVRKSIVQHIKGLKRAVAEVEQELQQVLASSPAAQAKATLLSAVPGGGPQLSFTLLAELPELGQLGRRQIAALVGVAPYPYESGKFKGRRTIWGGRAHVRTMLYMAALSAVRFNPPLRAHYQALLARGKAKKLALVACMRKLLITLNAILRDATPWNPNQLDFQHSR

SEQ ID NO: 53427 - protein, 424 aa, unidentified
MNLTQNDRLKQVTSDTLIVGVDVGSQTHFCRAFDWRGFELSRRVFKFSNTGMGFLTFLRWTEEIMNKTEMKKVIVGCEPTGCYWLTFQKFLQDHDVQLVTVNPFTVNRSMELDDNSPEKSDLKDPKTIALLVKDGRFSTSYLPSGVYAEIREASVCRDQIMKQHVRLSNQIQGWLQKFFPEYFECYADWNSTSGLMLLREAPLPQDILKIGAGGINQIWRDAKVRAAGIKRAQTLVEAAQNSVGLEAGEAARLEIWVLVNDYILKAEQLKRLDEYLEEKVKEVPNVEKLLAIKGVGMSTVIGFIAEVGDIGRFTDPKQIQKLAGLEIVKKSSGKKKGQPRISKRGRRKLRRTMYESAKALMLWNPAFQDVFLYYRNRTKNPLGGMQAKIAVACKAIRVFYVVLQTGCDFDEEKFRKDIIRPEAA

SEQ ID NO: 53428 - protein, 355 aa, unidentified
MKYYTSTTEYNCGIDLHARQMYVCVMDRQGKKLVHCNVKDNDFDYFLKLIKPYRHDLTVCAECMFGWYWLADACQAEGLPFILAHALYLHLIHGGKNKNDRIDSEKLAHLLRSNLIPPAYVYPAAKRPLRALLRQRIFYVWRRAELLHRIHSHQLAHNRTPAKQTRRSRDFWEEQLLRAENHPLRQIALKHDLAMIRHFDQQIFQLEEELNRQTKRVACREYTLLKTLPGVGESLGLTILYEIGDIGRFPSVKDFLSYCRLVKGTVASAGKIKGLRGAKLGNPYLRWAFGEAAVIAKRDHYQLKPLAQRLEARMNGNKFKANTVLAIKLARAAYFMLKNKTVFDPERLTAALARN

SEQ ID NO: 53429 - protein, 347 aa, unidentified
MRFYTHQHKFYCGIDLHARSMYVCIINQDGEILVHRNLPARPDRFLKAIEPYRDDLVVAVECMFTWYWLADLCAEHRITFVLGHALYMKAIHGGKSKNDRIDARKIGALLRGGMIPTAYVYPATMRSTRDLLRRRMHLMRKRAELLSHIQNTNSQYNLPEIGKKIAYKTNRGGVAERFPDPSAQKSVEVDLMLIDFYDKLLTDLELYIVRTAKEHDANVFYRLRSVYGIGKILALVILYEIHDINRFPRVQDFVSYCRLVKCARESAGKRHGTSGKKIGNAHLKWAFSEAAVLFLRNNPDGQKYLQKLERKHGKGKALTILAHKLARVVYFMLKRKTAFDMKTFLDR

SEQ ID NO: 53430 - protein, 318 aa, unidentified
MPKSIQVGIDVAKETFDVGLGVGGELCQFTNDAQGHERLLSRLKDFEVSLIVMEATGGYERALVCAVQAAGYEVAVVNPRQARDFAKAMGYLEKTDRIDAGMLTQFAQTLDCHPKRATFVTALLDAERTALAALVGRRRQLVDMLTAERDRLAMSHQAARRSITAIIKALQRQLDDIEAKMAAHVTKHHADLAELLSSAKGIGPNTVAALIAELPELGRLSNRRISKLVGVAPLNRDSGVQRGRRTIFGGRAALRRALYMPTLVATTHNPVIRVFYQRLIAAGKPKKVAIVAAMRKLLTILNAMVRSGKRWDPSLHTA

SEQ ID NO: 53431 - protein, 370 aa, unidentified
MENIIYIGMDVHKESFSLCALHGTTGEIVGEARCASNVSLVKKFVEKLKTKYGEDIKIKAGYEAGCLGYSLHNLLEQNGIDCDILAPTTMYSSSKNKMVKNDRFDAKMIALNLANGTYKEVYVPEEEDVAVKEYIRMLGDFKTSLKKIKQQIKAFLLRHGYIYEGKSSWTIAYMKWLKNLDLQGLFKETLDEYLLQYDVLVDKIERFSLRVEELSHSERYEEPVGKLRCLKGIDTTSAMTVHVEIADFTRFPTAKAFMAYVGLTPSESSSGEKISRSSITKQGNSTVRSTLVECANSLVKGTIGLKSKRVKARQKDQRSDVISYADRAVERLQRKYHRMMYQGKPRNVAITAIARELGCFIWGLETGNIH

SEQ ID NO: 53432 - protein, 356 aa, unidentified
MFPILAERLAERVDAVIGVDTHTDTHTAVVLTAVGTVLAEITVPATNDGAAVLLAWAQQQSSTLGTGRRAWALDGARCHGVGLLRVLRAADEYVLEAPKPAAGRRRRGGKSDTLDAVHAARGVLAADHVATPRADGDREALRLLHVCRRHYSDTRTATINLFKSVILTADDDLRTQMRGLSTLRQVQHATTLTTTSGSGSGLDRLRRTHLAALAEQILTLDRLLKANLAEIRTLVDKLCPTLLDQPGIGPVTAAIALTAWSHPGRFRNEAAFASLAGVSPVPASSGRITRHRLNRGGDRTLNAALHTIAKTRQRCHQPTKDYTNRRTTEGHTPAEITRSLKRYIARQIWRTLEATT

SEQ ID NO: 53433 - protein, 355 aa, unidentified
MSMLTGRIEAVIGVDTHKQQHTAALLDALGGQRGLLTIVSDGGGYRQLLEWARRLEPGRRVWAVEGTGSFGAGLTSYLLEAGEWVCEVDRPDKPARKRGAKSDQIDAVRAARQALQEEHLAQPRRRGQREAIRVLKLGRQQAVDVHSEAVVQLKSLVVSAPEQLRAQLRGLNAEQLVKTCARLRLNSRQSLEWTATVAALRTLARRAESAAKDVEELSQSLAELVAAAAPQLLAEKGVGTVVAAQLLCAWSHPGRLRSEAAFAMLAGAAPIPTSSGQKERYRLNRSGDREVNCALRTVVITRMACDARTQAYFERRRAQGKSDREIQRCLKRYLARRLFHVMDGHRSASQTNVRS

SEQ ID NO: 53434 - protein, 365 aa, unidentified
MGKLAKVESFFKNVNLTNDDEVFVGVDVHKKSYHVALFLNDTPAIDFRMSAEPKQLNKKLQPMSCSIKDIVYESGPTGYGLARHLRKSKLPANVVATSKIPRPVGAEDKTDRLDSRKLAEYSAKGLLRPVSIPTCRQEADRQLYRMRHRQARQFGKVKNQIKSFLLMHGIEEPDGLGNWTIASVEDLRNICLIDTLRLSLDELLSDYDYFNNRIKVLNKMLVENLDKGLLGQRIALLKSHPGVGPVVACQFATELFHYRDFGSTRQLYKYLGLSPLISQSGERSSSGSINKAANGRLRGNLIQGAWSWVLKDVEAKKCFWRICDNCGGLKQKAIVAMARKLAGHLWAMLMNDRPYDKNLAKSRVN

SEQ ID NO: 53435 - protein, 419 aa, unidentified
MHSLARNLSLIKPDTLCAGVDLERKENQVVVINGRAQRLGQFRFSHDEAGYSRLHERLSKLVQRHGASGVVVGMEPTNYYWKLLAADLERRQIPYRLVNAYTVRKHREGDQIDRAKDDLRDAEVIANLLREGKFTQSQLLHGPHAALRQYAVSLTRLEGDMRRRRTIIHHSAVQLFPELGRVFRKFSGVTALALLRRHAAACVMREMPLTAFLASVRQQHGPRRLATAKLCQAHALAATSIGLQEGVEALQLDLAVQVELLEQLEVRREQLEQALLGTFRTLPEAPCLLSVPRLGARSAALILAEIGDPGAFSNAQQLVKLAGVQPTPDTSGQRRSGQTPMSHKGRPRLRTVLYLSCLRMIQKGGIFAQEYAHLCVRTPHPLEKMAAIGVLMNKLLRILWALMHQRTLYRGDMPISERL

SEQ ID NO: 53436 - protein, 369 aa, unidentified
MNDLVKYVGLDVHKDTIAIAVAEADKRDEVREHGEISNTPAALKKLLGKLGGPGVELQICYEAGPCGYGIQRQVTSAGHNCAVVAPSLIPRRPGDRIKTDRRDAAMLARLHRAGELTAVWVPDIAHEAIRDLVRARLAAVRSLRHARQQLSGFLLRYGHHYNRSAWTQMHRRWLSGLSFAEEAHHIVLEDYIATVDAAQDRRDRLTAQIEKRLVDWTLGPVVQALQALRGMALVAAATVVAELGDISRFSKAEQFMSYLGLVPSEHSRGSRRRQGGITKAGNGAARRMLIEAAWSYRFPARISREQLLRQELLTAPIRAIAWKAQERLCFQYRKLSRAGKPITIVTTAIARQLAGFVWAIAHEVCTPTA

SEQ ID NO: 53437 - protein, 406 aa, unidentified
MHAVIERCCGLDIHQASVVACILIQEGRTVRKEIRTFSTMTRDLETLRDWLVAQGVTHVAMESTGVYWKPVHAILYGSFELIVANAHHIRHVPGRKTDVKDAEWIAELVRHGLITASFVPPPAIAELRDLTRYRRKVVESQATERNRTLKLLESANIKLSAVATDVFGVSGMAMLKALIAGDATPADMANFAKGRLRRKLEPLAQALDGRLTETHRFLLKLQVNRLEEMERDIMALDQIIAEKAKPYSQQIGLLIQIPGVDRQIALVIIAEMGVDLSHWPTAQKLAAWAGICPGNHESAGKARSGQTRKGNLYLKSALFLAGTTAARTRGSYLKDLKARRGAKRAAMAIAHKILIAAYHMLTEGTDYIELGEAYLDKLAEKRITRGLVRRLTNLGYKVTLEQQQAA

SEQ ID NO: 53438 - protein, 356 aa, unidentified
MRYYKDIKDFVKSKRVFSGIDVHHNHWDLCFICDGEVIEKIRLPVDYARLKYLLKMSYSSAREIFLVYEAGFSGFWLYRKLTSDGYSCIVTPPHRIPKSGNKVKTDRRDAETLASYLSAGLLKSVYVPPKDIESDRRVVRRRAQLVKKQTRSKNQIKSFLHLHGLKHPDSIKTHWSNRYLSWLESLCFENDSDSFIFSQLIRSYRYIRDDLASVTRYLRQLSSSEKYRENFKRVTSLRGVGLITGMTFLLELYNLSRFKNASCFSSFLGLTPSQYSSGDHVRLGHITRQGNAHLRRVLVESAWTVIRHDPHLRDKYARIRARGTNGKKAIVAVARSLAVRLRRCLLDETQYVIGVC

SEQ ID NO: 53439 - protein, 427 aa, unidentified
MDNKKLSKIERFRQFKKQIRGSGEFLIVGIDIAKIKHHAFLGTANGKTVLKGLIIENTASGFEHLLTQVQFYMDRDGFKKVVFGVEPTSVYHKPLAEFLIEQGYLVVYVTNEAIKKNRSLLDGRWDKNDTKDSANVGDLISQAKCHFYDLPDMNLRDLRSLLLFRKRLRKQLHSCRVRIRNNLVAQYFPELDRLWNKSEAENLAIVRWCLSPYKIHHLAFEDFFQMVTTRNKGIRQYDHLFKIWQMAPNSIGCRPGTALELEAKLLVESVEWIRKQIAEVETRIKNLGQSFVEYEYLLTIPGFGPYVSAMVLAAIGNPSRFESASQVIRLAGLDLNANRSGQKSHTAVPVISKKGKADLRYALYQAALIASSLTTHFRAYYHKLLDGRQREPGIRTKMRVKLAAKLLVIAWTLMKKKQPFDPGYISA

SEQ ID NO: 53440 - protein, 366 aa, unidentified
MKKISTMQAFSSEILKEQKLTIGLDQGDRWSFYCVLDEAGKIILEQKVATTPQAMKQTFEKIPRSLMALETGTHSPWVSRLLRELGHQVIVAHAQKVQLITKSNRKDDRHDARTLARLARIDPELLGPVRHRSAKAQIHLTVIRARAELVSARTALVNAARGLVKSFGERLPKCGTYQVNEKLAEGVSAELRDVLAPLLREVESLNERIKEYDERMEKIAKQVYPEVALLQQVKGVGTQIALTYVLTIEDPYRFPKSRQVGCFLGLRPGRRNSGESEPQKKISKEGDRYLRTMMVQGAHYILGPFGEDSDLRRWGLKLAERGGKNAKKRAVVAVARKLAVLLHRLWVSGEVYEPLRNSQKAMRAVA

SEQ ID NO: 53441 - protein, 405 aa, unidentified
MHPTLTIFAGIDWATGSHAVCVIDEHGTVLERYEVEHSGAGLRGLVGRLRASQVSGVTIERPDGPVIDVLLDADLRVVVIASRHVKALRTRYGLSGNKDDHADAYILADVLRTDGHRLRPLLPDAPATLALRTSVRARKDLVHARVRLVAQLRAHLALVFAGVVGLFDRLDSPIAEAFLTRFPSAERAAWLSPRRFEVWLARRGYAGKRGGAEFHARLIAAPAGVSGEGASALAAVTLGYVRAITTLREQIAELETHIAEQLADHPDGAIFTSLPRSGSVRAATLLAEIGDCRERFPTPEALACLAGAAPSTRQSGQHHAVTFRYACDKKLRDALIDFAADSRFGNDWAADIYGRAIARGKRHPHAVRILARAWVYVIWRCWQDRVPYDPERHQALQRVTLAKAA

SEQ ID NO: 53442 - protein, 344 aa, unidentified
MTAVMIGVDPHKGSHTATALDATEHELACLRVRAGRRQVEQLLAWATPFEARTWAIESANGLGYLLAQQLVAAGEVVLDVPATLAARVRVLSSGQSNKNDPNDARSVAIAAMHAPMLAAVPVEDHRTVLRLMAKNHTDLARWRNKICCRLHALVAELVAGGISKEVVVSDAFALLESIHPEGVAAIERHRLAGQLADELVHVDDQLKLAKANIRTAVAASGTTLTDIFGVGPVVAAMLIGYTGDPCRFPTSGHYAAYTGTAPIEFSSAGRVVHRLSRRGNRRLNHALHIVAVTQIRHAHSPGRGYYDRKRAQGKTPREALRSLKRRLSDIVWRQLVDDARRAAD

SEQ ID NO: 53443 - protein, 371 aa, unidentified
MLSQKIVYVGLDVDDTAFHGMGIIRETGEYFEFKSKPDHGVLLKKLKEVFKERYEIRLCYEACYIGYSLCRFLQKYGVHCDVIAPSLIPIKTGTRVKTDRLDAAKLAEYYAKDLLTPIYIPNEKDEEVRDILRSRNFLVKQRKMLKTHILSACTRYNIKFQEETGKKTKWTDQHISWLKTKVKTLNRPIGQIDIETLLAQYASLSESIEKLDTAISQIAESELYKKSKDALNTFRGIDTLSAMTIISEIGDIRRFGHPRQLTSYAGLDIAEYSSGGKERKKGITKTGNKHIRTILTESCQTASKPAILSKRIKQSRKGQPQAVLDIADRCMHRLHKKATRMLYAGKHKNKIKTACAREMLGFIWEALRLAA

SEQ ID NO: 53444 - protein, 340 aa, unidentified
MTVTTIGLDLAKSVFQAHGVDESGATVLVKRLHRKQMLPFFSKLPPCLIGVEACGTAHYWARTLATMGHEVRLIPPSYVKPYVKRGKSDALDAEAICEAVQRPTMRFVPVKTVEQQAILMAHRARSLLVRQRTMAANALRAHLAEFGYVTNPGIAHLAKLIDQVLADKNALPSYACTALEILIRQIMALSNDVAVLDQQIVTWHAENEASRRLAAIPGIGVITATAIAATVSDPEQFRSGRQFAAWLGLTPQQHSTGGKTKLGGISKQGDRYLRRLLVIGATAVMRHTKDRTTPMANWIRKLLEKKPFRVVSVALANKLARIAWVVLTRKEAYRPYALTA

SEQ ID NO: 53445 - protein, 399 aa, unidentified
MLAVGIDISKSKSVAAILNQDGSMHTSPFEFHHTQPELDAFIKYILNSNQSATILMENTGHYHYPVLKAFQEAGLPVCMVNAYQIKKFGDMDLRKAKTDKKDAVRIARYALEKSYSLVPYTSMEQKYEDLRFLARQYNQRMLTLKTNKVFLLNLLDETMPGITNILPLTTRTPETSLSVLFINRFKSYDRIKKMGKSRFLDAFEKIARKSRNRQTKTYGLAIYEAALRNITTRGENEYILAAQDQCLELVCESQKAADSIILKMQTLAETLPEYAVLRSMAGVGDRLGPLILAEIGDIRRFHSGKALNAYAGNDAPPYQSGTFESHNRHISKRGNAALRKYCFEVMQALKLTQPQDDPVYLFLLKKEQEGKPYNVAKMAGVNKFLRIYYARAMETLKQQ

SEQ ID NO: 53446 - protein, 399 aa, unidentified
MIKDHEQVDIFIGVDVGKSNHHAVAIDRKGKKLLDRALPQDEAKLQAIIRSVAGKGRVLLVVDQPSTIGALPVAVAQAEGIMVGYLPGLAMRRIADLHPGEAKTDARDAAIIAEAARTLPHTLRSIVLADEQAAELSMLCGFDDDLAKQATATSNRIRGLLTQVHPALERVVGKHLDHPAMAELLIKYPSPEKLRKAGQPRVATLLSRHAPRAGKGWAAEVFTALGEQTVVVAGTGAAGIVLPQLAAMLKQLRTAREELLTQVEALVEAHPLHEVLTSMPAVGVRTEARIITEVAGKEFQSAGHLASYAGLAPVTWRSGTSIRGDHPSKKGNKNLKRAFFLSAFAALKDPLSRAYYDKKRAEGKRHNQALIALARRRCDVLFAMLRDGTFYEAPATTAA

SEQ ID NO: 53447 - protein, 349 aa, unidentified
MLADELDYVVGVDTHLDEHVLAVVVAPAGAVVAQRSVQTSARGYAAAVRFAEEHANGARVWAIEGAGHYGAGLARHLSGRGETVLEVGRGPRDERRLRGKDDPLDATRAARAALSSETPALPRSGQHREALRLLLIARRSAVDVRREALVQLRSVIVTAPDRLRDELRRLPVQRLLDRCSRLRRSTRATPDELAVRLVLRTLARRIEAATVEADELEHEILAHVRALAPQLLDEAGVGPIVAAQLLVAWSHPGRVRSEAAFARLAGVAPLPASSGQTTRHRLSRGGDRQLNRALHTVVLHRRQHDPATKAYIARRVAEGKSRRDATRLLKRYLARHLYRILDQRTQLIA

SEQ ID NO: 53448 - protein, 348 aa, unidentified
MAHFVGLDVSVKETSVCVVDDAGKVILEQKVPTEPADIIALLTSLGVSYGRIGIEAGPLSQWLVNALTAAELPVICVETRHMKALLTAQQINKTDRNDARGIAQMMRVGLFKPVHVKTLVAQEQRMLLTSRKLLQRKLLDVESDLRGTLRNFGLRVGVVSGSRYEARVRELVAAFPRLAAIAEPLLSVRRMMRQQFAVLHKMLLDTVRGDPVCRRLMTAPGVGAVVALTYRATVDQPQRFVHSRAVGAHVGLTPKRYQSGEIDYDGGVSKCGDALLRTMLYEAAHSLLTHSGKWSWLKAWGVRVAQRRGMRRAIVAVARRLAVVLHRMWVDGSEFRWRKDSASVPAVT

SEQ ID NO: 53449 - protein, 338 aa, unidentified
MKNTRIPSNTPAFFLGIDVGKPDLFCHIIGPDQTLSQRFNNTPEGICILLKWLLSVATPLQFAACLEQTGHYGRAISHALADAGLAAVYLVNPRQIKAYGEQQLRRNKSDTADARLIASFLQSEHSKLLPWTKPSADILQIKELSRYAESITQDNASLKTRCEMTTNKPILRSLRRRIKAQEKEIADIRLRIDKLVEGNEALLRQRELLASVPGIGDVTCQILLAELPDLELFSNARQLAAWAGVTPRHFVSGTSGRSTTPITKIGSAHLRRALFMPAMNARVFNPLLKTFADKLKENGKKPKQIIVAVMRKLLHQIYGILKSDTPYNPEKRGLQTAL

SEQ ID NO: 53450 - protein, 426 aa, unidentified
MTDCFAVHVGIDWGSDHHDVCIADADGQPLATLTIEHSSSGIAHLLDTLATYSLGEFDHIRVAIETPRGPVVEALVERGCQVFACNPRQLDRFRDRYTMAGKKDDPFDARILSDLVRTDRHLLRQVRLDDPLIIELRELERLSSALGQDLTRQTNRLRDQLYRVLPQLLTISPGADEAWVWDLLELASTPERLARLRTTSIAGVLKRHRIRRITADELKAALTAPRLQVAAGVVEAASAHMRAVLPICRVLLEQRRTCERRVEELLEQLKGPHAQTEGQHRDAAIIDSLPGVGRVVLAAMLAEASQAIAERDQGRLRAEMGVAPVTRRSGKSMVHTMRYACNRRLKHAAYWWGMAAIVKDPLSRARYRAARARGHRHGRAIRCVVESLIRVMMGMLRDGTRYDAERRGAQRQPRRDSGGSPVQIPA

SEQ ID NO: 53451 - protein, 314 aa, unidentified
MAMHATRPVIGIDTAKEELVIQHDDEKRHLAVDNTAAAIRQWLAGLPEGCDIAIEATSTYHMEVTERAHAKGHHVYVVDGYRLKNYREGVGGRAKTDLTDAQLLARYLRKEKDELRRWAPPPKAYRTLQSLLRRRAALVKARTALRQSLSAEPLLKAALATLLKQIDRIDRLIQKRLREAVHAAGLRDQVQRCQAIDGIGELTATALVMAFLRGDFQNSDAFVAFLGLDVRVRDSGKLKGKRRLTKQGDTEVRRLLHCSAMSGARHPTWKTFYQRYQDRGLKTTQALVILARKLARVAFALMKHQESYCPARLS

SEQ ID NO: 53452 - protein, 400 aa, unidentified
MENIYVGIDVSKKKFDACIKNDQNVVLMKARTYDQSKDGMERFIKDLKEISNQNNVLIGLEASGIYHRNLMHYLLKHNFGVREFNPLEISALRKGRIRKTKTDKIDAEVIADAVRWDVKTNTERYLTDEEYLKMKEMSSIYNRVVSKITDLKIELHLALSSLCPGYDSLFRNILSSTSVEILKRSMKQTRLFQISEKEIRKILDKNYSNDTDTTKLARDIKDTFNSSTCPDYAKEALVTDVKFILMQYHTLKKQKQQIEKKIKRSVNKINPESLSIPGVGEITCSIILGSLGNVKRFRDGKAITGYAGLDPIVTQSGKSVNRTGHISKRGNKYLRTALINAALVGIRSNPVLRDRYHHLRDKGKSHLVALVACARKLLLIIYSVEKNGKRFYVPSYIQDQ

SEQ ID NO: 53453 - protein, 404 aa, unidentified
MGVAARTLLLLSGLKIVNTLCKLWSEKHGRFTLGKVRSLRTTFLQGANSMTSAKYIGRDVHKETISIAVMNSMGKLLMESIIETKAGTILQFFAGLRGDLHVTCEEGTWAAWLYDLLKAHVTEMIVCNPRKNALLKDRNKSDRIDARKLAELLRLNYLKPVYHGEHGLRMLKELSRTYLAISKDLVRVMNRLKALYRGWGIACSGRSVYAASYREAWLKKIIEPGVRLRAEYFYQQLDTLLRLRREVRRNLLIESRKHSATKMLSQIPTIGPIRSAHLVALIQTPHRFRTKRQLWAYSGLAVETHDSAQFRYVDGQLFRSRKPQQLRGLNEDHNHDLKNIFKGAAQKATVGAGPFREFYERLLAKGIKPSMARLTVARKIAAITLAVWKKGVRFDPEQLKLQAA

SEQ ID NO: 53454 - protein, 368 aa, unidentified
MKGPIVSIDVSKGKSDYQAFKNLNVKYTGSRSIKRTKEGFDEIVNLVREMEKKLETEVCVVYEATGVYHRVLKKVLEDNNIKQFIINPLLSAKTRKNDSLRSPKTDKLDPKSIAKTYYSHSLHNSHKPETIYHELRELSRYYEDILVHIRKDKVSFRAQLDVVFPGYDTLFDDLYSPVSLTIIEKYPHPEMLQKKKINTVSKVIQSKTCHRQATSDTMADKAIEYSKTIYSGCDKDDIEVLILQRFIKKLKEDMAEAERTIGEMIKLAQELPDFSIIKSIPGIGDNLAARIIAELGDMTRFKKKNELVALAGLDPRISESGKNDGDHMHITKKGNKRLRCLLYLAVTCSIRLKRDDNSIKDFYIKKKQ

SEQ ID NO: 53455 - protein, 413 aa, unidentified
MSVTDVPEPPRPTAGVDWAKDDHAVSVVGPDGEQTHRFSITHDAAGLRSMIKRLLGAGVAEVGIERPDGPVVDALRAAGLVVYVIPPGQLRNLRSRYGSAGNKDDRFDAYVLADVVRTDRRRLRPLLVDTPATTALRQSVRARRDLVVHRVAVANQLRAHLQICFPGAVGLFRDIDSEITLRFLERFPTPERAAWLSVKRLTAWLASIGYCGRTPPETLYQRLTTAPAAATGADADTAAAVTAAFVAVLRTLTTQIEALAARISEQLDLHPDQAIFTSLPRSGRVRAARLLAEIGDARGRFPTADSLACLAGVAPSTRQSGKVEVVSFRWGADRQLRDAICDFAGDSRHANPWAADLYRRARARGHDHPHAVRVLARAWVDIIWACWSTHSPYDPERHRALQRILNQDQPAAA

SEQ ID NO: 53456 - protein, 348 aa, unidentified
MLADQLDYIVGVDPHRDSHALAVVQVVSGVVVFEATVVASSDGYAQALKLAERHAPGRRAFAVEGTGSFGAGLTRFLSVRGEQVLEVGRVRRERRSGGKTDALDAVRAARSVLAQERPATPRAGGERQALQALVAAREGAVNAKRAGLCQLRDLLITTPEPLRSELRPLTRARLLQRLAATRPDGRRDPELRGSLLALRSIARRVLQLTAEERELAREIETITRKLAPQLLDQPGVGPHAAAQLVLSWSHRGRIGSEAAFARLAGAAPIPASSGQTIRYRLDRSGDRKLNRALHMILVTRKRSHPATIAYIERRLQEGKTRREANRCLKRYLARSLYRLLEHGAPLAT

SEQ ID NO: 53457 - protein, 320 aa, unidentified
MMTQDQLVVAGIDVAKDKIDACIRTVTERKTCPATAAGRRSLIVWLRKHRVGKAVMEASGGYERIWAKALRQAGLEVRIVDPKRVRHFAESAGRLAKNDKIDAEMICWFAETFSEAPSQVDNPAQEEIKALVKGRQSLIDVRARLEMQKEHDAPALLRKARARLLRKLADEIAAIETVIAAMIKAMPDFARRAEIIQSVPGFAEGTAMALLGGLPELGQVSDEVAAALMGVAPYDDDSGKRRGERCIKGGRRWVRNALYMPCVGAATLNNPVFKAFYERLTAKGKPPKVAIVACMRKLIIILNTMIARDETWDPKKYRVA

SEQ ID NO: 53458 - protein, 432 aa, unidentified
MAPDLLRKELFSMKVVYSTCCGVDVHKTFLVATIIKTTKGVQPSYQKKRFSTFNSDIRHFKQWLLDNSCFDVCMESTGKYWIPVFNLLEDKINVTIANPKWVKAVKGNKDDTKDSKWIGDLFRLGLVPGSFIPCKDIRILREYTRYRFKLTCCKRSEKNRFQNAFTVCNVALDAVVTDMFGKSASSITDYLITSDEFDPETCKSFLQKSLKKKADSIIESIEGYQMTSSQKERMLIIRSHLDFVQQSIDSLDSKLDELIAPYENAVSLLCTIPGVDRTSAITIISEIGTDMSQFISSKRLCCWAGLTPGNNESAGKKKSTKITRAGVYLKPALVQCAHAAVKSSTSPYYKNKYERISKRRGKKRAIIAIARMILTAIYQMLSNGETWNPCDLYKIDMSQEMQDKQKTKAIKQALKLLVSEGVISPESASVAI

SEQ ID NO: 53459 - protein, 341 aa, unidentified
MQITTIGLDIAKNVFQVHGIDGDEKVVVRKQLRRNQVIGFFRDLPPCLVGLEACATSHYWARELARLGHEVRLMPAKDVKAYIKRNKNDAADAAAICEAVRRPTMRFVQVKSADQQAHLMQHRARDLLMHQRTQLINALRSHLAELGIIAPQGREGVKELLAIIANEADTQLPNDARASLIVLAAQLQALQTTIGAIEKRIVVQHRANKESKRIQTVPGIGVIGASAIAATVPNPKIFRSGRDFAAWIGLVPRQMSTGGKPKLGPISKQGDRYLRRLLVVGAVSVLRRAKLHPGKFPWITQMLARRPFKVVAVALANKMARVAWALMVSGKTCRAAWFAAA

SEQ ID NO: 53460 - protein, 340 aa, unidentified
MPKYIRIGVDIAKNSFQVHALESEDCSATKRKLSRSGIVKFLAEVEPCAIGMEACGSAHYWARRFRAMGHEVKLTPPIYVKPYVKRGKNDAADAAAICEAMSRPNMRFVAVKSEDQQATLMAHKTRELLIKQRTMSVNALRGHLAEFGVIAAKGISHVEELVERAAAADLPAMVQATLGVLLAQLRSLDAATDELERAIVANHRRDPVSRLAASVPGVGALAASAILASAPDSQAFKSGRDFAAWLGATPKQNSTGGKEKFGSITKQGNRYIRRLLVLGAISVLRAAPKRKGALCDWLAALRARKPAKVVAVALANKLARIVWAIITTGEAFRTSIYAKA

SEQ ID NO: 53461 - protein, 316 aa, unidentified
MLYVGIDVAKNKHDVTALNVPGKTVLKPLTFSNNKAGFELLDLSLRQLNQDCLIALENTGHYAFNLLNFLHEQGYKVYTYNPLLIKKFAKSLSLRKTKTDKKDAHGIALKLLSDPNREQFQHDNRQVELKILARHIHRLKKKQSDWKVQYTRCLDIIFPELDKIVGKHSEYTYQLLTRYPNPQKRLEAGFDKLIEIKRLTASKIQDILSVAPHSIGTTSPAREFEIIENIKHYKRLIDKAKKCVNDLMAEFNSVITTVTGIGNRLGAVILAEIQNIHAFDNPAQLQAFAGLDSSIYQSGQIDLAGRMVKRGSPHLR

SEQ ID NO: 53462 - protein, 357 aa, unidentified
MKVTTIGIDLAKDVFGLHGVDGQGRVAFKKRLVRSRLLEFMSQLPRCLVGLEACSSAHYWARKIERLGHRVRLMSPRFVKPYRKSDKNDANDAEAICEAVTRASMRFVPIKSEAQHEVQALHRVREQLLKSRTALVNQVRGLLAEHGIVAPQGIARARRLLLEILADPERHGLSGLFRETLQEIAERLRFFDERVGAYDDRIERVFKEDERCRRLAKIEGVGPLVATAVVAAVGNASEFKSGRELSAWVGLVPRQHSSGNRSQLLGISKRGDRYLRTILIHGARAALRRADHKRDQRSRWAMRIKLARGYNKAAVALANKNARIIWALLTRGENYRPPAISVASPTADRISLTQVQA

SEQ ID NO: 53463 - protein, 310 aa, unidentified
MDAIVIGIDVSKDKLDVHVLPAAQAFAVARNGAGIEELAARLAALAPAVVAIEATGGFETIVAAGLAGAGLPVVVVNPAQIRAYAKAIKQRAKTDPIDAAVIAKFARATRPEVRPLPDEATRQLADLVARRRQIVEMMAAEGQRGRRVDHKRVARSIARVKKTLEAELAELGQEIGDQVRGSPLWREKEDLLVSVPGVGPVVARTLLAELPELGRLERREIAALAGLAPFTRQSGRWRGRSFIGGGRATVRTVLFLAAMTAARHNPTLKAFRDRLVAAGKPKMVALIATARKLLTILNAIIRDNRPWQNA

SEQ ID NO: 53464 - protein, 359 aa, unidentified
MREQRNKISFRGQKIYVGIDVHLKSWSVTVLSETSVLKKFSQHPSPEALYGFLTRSYPGAEYRSVYEAGFCGFWIHERLTALGIDNIVVNPADVPTKSSEKLRKSDAVDSGKLARSLRANELKGIYTPDSVSLEMRSLIRLKNSITKDTTRQKNRLKSQLRYLGIEIPQEFLTPFSNWSKRFFAWLKEIETLTPSGRQALDIHIRHLEELRRQKLEMTRALRTLAKTDRFREPLRLIMSIPGFGQATGMAFLSEICDITRFRNAEQLAAYIGMIPMCHSSGEKDGTGDITVRKHAVMRCNLIEAAWVAIRQDPAMNLFYTEQCKRMPKSKAIVKVARKLVNRLFFVLKHQTEYVNSIVS

SEQ ID NO: 53465 - protein, 411 aa, unidentified
MEIVYSRCCGLDVHKETVVACLLIREGGKVRREVRTFRAMTSDLLTLHDWLMAHEVTHVAMESTGVYWKPVFNLLEGSFTVLLVNAAHIKAVPGRKTDVKDCEWITDLLSHGLLKGSFIPPEPIRDLRDLTRYRKSLTDERAREVNRLQKLLESANIKLSSVASDVMGVSGRGMLEFLLEGKTDPETLADLARGKLRKKLPLLREALHGRFRPHHRFLLEQILSHIDFLDEAIESVSKEVENRIAPFLKEIELLKTMTGVKQRVAENMISEIGVDMSPFPTHRHAAAWGGMCPANHESAGKRKAGKTRKGDRWLKRFLIEAAWSVSRAQGTYLCALYHRIARRRGKKKAAGAVAHAILVIAYHILKDKVPYHDLGSDHFDRLNRTYIQRHLVKRLEGLGYKVTIEPLQLAT

SEQ ID NO: 53466 - protein, 296 aa, unidentified
MLIIGCDFHPRYQQIAMMHTETGELVERRLEHENGEARAFYASLPKPVLVGMEAPGYAQWFERMLAEFGHELWIGHASEIRAGVVRKQKTDARDAQHLLRLLLEKRFPRIWIPSPAERDARQLLRHRYKLVCFRVSVKNQLHGLAMSQGVCRKKKLFTAQGREELEKLSLGPWGSCRRQELLGMLDQLNPVIDELDRAVRQEAESRADAARLMIHPGVGPVTALAFVLTLGPVARFRRSKQVVSYLGLNPKERSSGDKQHTYAISKQGRRNAVDLARGRAVNFSESRREPHKFGQR

SEQ ID NO: 53467 - protein, 354 aa, unidentified
MRNSSNAQQGLTVGVDLGDKYSHVCVLDAHGEIVEESRIATTREALERRFAGMAPAAMAIEAGTHSNWVYDLLTSLGHDVVVANPRKLRAITANERKSDQMDARMLARLRRADSQLLSPVVPRAEHMRRDLGVMRARAALVQARTMLVNHVRGVAKSSGSRLRKCSAESLHKAELPADLVSVLAPLLQVLERLTEQVHVYDQHIAKLSKESYPQTSLLRQVQGVGPLTALCFTLTIGDAGRFKNARAAGAYAGLTPRRDQSGDRDPELRITKCGDEMLRTLLVQCAHRILGPFGPDCDLRRFGLKLAERGGKNAKRRAIVATARKLSVLLLALMRSGEVYEPLRNSPAARRASA

SEQ ID NO: 53468 - protein, 345 aa, unidentified
MKITTVGIDLAKNVFQVHGIDERGKAVLKKQLTRDKMAAYFANLPPCLIGMEACGSAHHWARKLQVFGHTVRLMAPQFVKPYVKTNKNDAADAEAICEAVARPNMRFVPIKDIEQQSALALHRVRQGFVKARTAQANQIRGLLGEFGLIIPQGIANIAKRVPELIEDATNELTGTFRRLIDRLMNHLKELDKQVKEIEMQIITWHRANDDSCRLEKIPGIGPITASALIATIGDARNFEDGRQVAAWLGLVPRQHSSGGKPTLLGISKRGDSYLRTLLIHGARAVIYAAQRKTQKSDNWLSRLLARRNLNVAAVALANKNARIVWALLAKNREFRSDCTTETAAA

SEQ ID NO: 53469 - protein, 347 aa, unidentified
MITIGIDPHKATHTAAAVSELGQKLAEITIAGDETGQRELLLWAHGFGEEIRFALEDCRHVNGRLERFLLASGEPVLRVGPRLMAGARKGARTRGKSDAIDALAIARAALREEAELHPASHDEAARELKLLVDHRDALVSERTGLASRLRWHLHDLEAGLEPPARALDQASTRRGLAQRLARREQTVQVRICRDLLGRIGDLTKRERQLASEIGERVKRYCPQLLEVPGVARLTAGKLIGEIAGADRFKSDAQLAHFAGCAPIPASSGRTERYRFDRHGNRQLNAAFYRIALTQARVHPGARAYLAKKRAEGKSSAEALRCLKRLLVRVVWTTLRASCEQQVALSQS

SEQ ID NO: 53470 - protein, 424 aa, unidentified
MKVTYQTCCGVDVHKSFLVATIVKTTGGIEPSYQKKRFSTFNNSILEFKQWLLDNDCHDVCMESTGKYWVPVFNLLEDEINVVIANPKWVKAVKGNKDDAKDSKWIGDLFRLGLVKGSYIPCKKVRILREYTRYRYKLVSCRSSEKNRYQNALTVCNVALDSVVSDIFGKSSTSIIDYLLEQSGTSINHEAIASKLLRSLKSKEDAVIESVEGYQMTDAQKYRVRLVRAHMDYITAEINDVDKMIENIISSNPDFENAVQFLCTIPGVKRDSAITIISEIGTDMSQFGGSKRLCCWAGLTPGSNESAGKKKSVRITRAGVYLKPALVQCAHAAVKSDKSPYYKKKYESLVKRRGKKRAIIAIARMILTAIYQMLSTGEQWNPSDLYKIDMPVALVEKQKAKAIKQAKKLLQREGILPPDEPLAS

SEQ ID NO: 53471 - protein, 447 aa, unidentified
MKKVFIGIDVGKFKNSISIVDSEGNSIVKKGLSIENDYYGFAKLEEKIDLIMNNYGFTYEDCIAGVESTGHYWFNLRDYLKDIGIETVMIKTDSVKHRRALEEGQKGKNDTLDARVIASCLRNGNYVYIRDNERELRALQKLTRMRNDISDEVVALKNKIHRCIDICNPVFFKIFENLNSKTGVALIKLYPSPQDIINVELDNIKKELGEIVDKPNMRMVSLYKEECEIWSGLIKEPSYAEKVEMIAYIDKFLLQNESKEHLDKQIKEIAKNIIPLYSEFEEIKGIPLIQLISVLSEIGDIRNFKNTRSILAFLGLSLKGNASGKYIGERKINKAGSRIVRKHLFNIMDTLVKHNEYFRIAYCYYKSYNHKNPTKKRSMQIAVMCKFVRVMYGMLKYNTPFDYKEMLKGYYFGDCNIKVFKEEFEGEKRSKKIENYKLAYSIFINYS

SEQ ID NO: 53472 - protein, 345 aa, unidentified
MTKTSQATISTIGIDIGKNSFHVIGFDERGAIVLRQKLSRSQVAVRFANLPRCLIGMEACVGSHHLSRRLQALGHDVRIMPALYVKPFLKGQKNDFRDAEAIAEAVQRPTMRFVQTKTLEQLDLQALHRLRTRLVRQRTAVINQIRAFLLERGFAVRQGLNPLRQALPEILAKPSDELSPRMIHMIEGLSADWRHFDGRIDNLTGEIEAIVNGDDNCQRLMTIPGVGPLTASAMVSAVGDGAAFKRGRDFGAWLGLVPRQMSTGDRTILGGISKRGNKHLRTLFIQGAWVVLMRSKNWHKYSFGNWLEAASKRLHRCVLVVALANKLARIAWSVLNRGRAYDANL

SEQ ID NO: 53473 - protein, 360 aa, unidentified
MRLYNQPHRFYCGIDLHARTMSLDILDQAGQVVLATTIPCEPRTFLDAIAPFRDDLVVCCECLFCWYWLADLCAKETIAFVLGHALYMRLIHGGKTKNDPLDAHKIAVLLRGGMIPQAYVYPKGMRETRDLLRRRNYLVHKRAETITHLQNTNSQYNLPPFGKKLGYAANRAELQVAQRFADPSVKKTAEIDLALLDHYDTLIGDVELYLTRTARVDDPQAFARLQSIPGVGKVLALVLLYEIHEIGRFQSAGQFLSYARLVRCCHESAGKKQTTGGKRQKIGNAHLRWAFGEAACLFLRASPRAKQWKQRQQKKRGEGKALAILAAKLGRAVYHLLRKGLVFDEDRFWGSKAAAAPASR

SEQ ID NO: 53474 - protein, 355 aa, unidentified
MNTTKYIGIDVHQATSVFAIRDNQGKLIGEAVLETKPAAIIDFLKGQRGTVCATFEEGTYANWLYDVIHPHVAKLVVCDPRKNKLGENKTDKIDARKLAELLRLNALTAVYHGQDSTRSLKDLARSYVNLQQDSTRVMNRVKAIYRGRGIPCRGTSIYEPKNRKEWLEKLLKDKGAQLRAKRLFEQLEFLEPLCVEAQKDLVREGRKHQSYKILRRIPGLGPIRVSLILAFVMTPHRFRNKRQFWTYAGFSVVRRGSAEYEITQGELKRSKRKPLPKGLNNNYNRVLKNVFKGAALSAAYRGQFKQLFDNRVADGKAPNLVLLTLARKIASITLALWKKGERFDIKRHRLSEQTT

SEQ ID NO: 53475 - protein, 343 aa, unidentified
MQTITTIGLDIAKSVFQVHGIDAEGEVVLRRQLKRRYVVAFFQRLPPCLVGIEACASSHHWSRELQALGHTVRLMPPAYVKPYVKRHKNDATDAEAICEAVSRPNMRFVATKTPEQQSCLTLHRTRHLFIRQQTSVINVIRAHLAEFGIVAPVGRNGVEQLLEVAADASDKRLPDVARACVAALGAQLRMLRAQILQFDRMIMAWHRSSEASRRLDNIPGIGPVLATALVASVADPKMFRSGRDFSAWIGLVPKQNSSGGKDRLGHISKRGDRYLRSLFTTGALAVIRYAKIHGTRHRPWLTALLARRPTKVAAIALANKIARMAWAIMARGERYREPVALAA

SEQ ID NO: 53476 - protein, 332 aa, unidentified
MKSVHIGVDVSKEKLDVYVPAAKEGARPTTMEVDNNAKGFRKLRELARKAKATVCVEPTGGYELELIAFMHKFGVAVAYTDALRVRQFARADGNLSKNDAIDAALISRFADKIGVRTLEKQDVDAVELKRKTKFRQTLTDARTAMICRLETEIDADMKAMLREQVKHLDKLIARAEKSCLETVARNEPMDTLRKRFVQVGGVGDVTAIAILAGLPEIGKLPDAKLNRLVGIAPEEKQSGTREWQRKIWGGRKDVRNALYMATTASLLWNAKLGAYYHKKRAEGHPHKWAMVPTMRKLLSLLNRIARDPNFVPAPEPETTKRNATAWRKRKAA

SEQ ID NO: 53477 - protein, 463 aa, unidentified
MKRKGNAKATRSGMAMVHPNAAAIDIGATMHMAAVGADRTSDPVRNFGTFTGDLRRLADWFAECGVKTVVMESTSVYWIPIFELLDERGFEVFLVNARDAKHVPGRKTDVSDAQWLQRLHSYGLLRASFRPKGEIAELRAYLRQRERLLDTAASQIQHMQKAMTEMNLQLHHVVADITGATGMRIIRAIISGERNPSVLASMRDKRCHSSVETIEKALTGHYRAEHLFVLEQAVALYDVYQQKVAACDVQIESVMNALSSVRSRQEGATADRSVSPKPHRNRTANEPAFDIGGSLHTLLGKDLTRIDGVGPYLALKLVSECGDDLSAWPSAKHFTSWLSLAPNNKISGGKVLSSRTKRSGSRVASLLRLAAVSVGRTETALGAFYRRLSSRVGKAKAITATARKIAVLFYNAMRHGMNYVDPGASYYETRYRERVVKNLHRRAKALGYIMLAADAPTAVPAVS

SEQ ID NO: 53478 - protein, 369 aa, unidentified
MKQHSEVFVGLDAAKEHHAVAVAEEGRKGEVRYLGEIDTDAAAVRKLVARLEKRHGKLHFCYEAGPTGYGLYRQLIAMGHACTVVAPSLIPRKPGDRIKTNRRDAVQLARLLRAGELTAVWVPDEAHEAVRELIRSREAAVDDLRRKRQAISSMMLRYGRNYPGKTTWTKQHKQWLQGQKFDHTAQHLVLQDMILAAQHAQERLAQVEDVIAEFLPCWSLAPMVQALQSLRGIRLVTAATIMAEIGDLRRFATAGQFMSYLGLVPGEHSTGEQVRRLGITKAGNVRVRRALVESAWTYRHLPKTSQQKSYVHESVAPAIRDIALKAQTRLCARYRALSNRGKKLTVAVTAIARELAGFIWAIGQAMHTA

SEQ ID NO: 53479 - protein, 414 aa, unidentified
MELLHERCAALDIGKKDLKACVRTPSPTRKRSRRQEIRTFATTTNALLELRDWLLGERVSLVVMEATGDYWRGAFYLLEDDLNVILVNAAHAKGLPGRKTDVSDAAWLCQLGECGLLRASFVPPEPIRQLRDLTRYRTTLTTERTREAQRLEKELEDAGIKLSSVATDILGVSGRAMLTALIDGERDPRVLAELARARMRPKIPHLVQALTGNFGDHHAFLCRLHLQRIDSLSAAIGELSARIEEQMRPFARQLQQLATIPGVGQSIAEVIVAETGADMSRFPSAGHLASWAGVCPGHHESAGRRRSGKTRHGNRWLVGALGTAAMAAARTKDTTYLGARYQRLAHRLGKKKAIVAVEHSILTAVWHMLTNDVDYTDLGGDYFARLDPQRAMRRIVRQANILGFTVRFDPIQAA

SEQ ID NO: 53480 - protein, 331 aa, unidentified
MFPVGIDVSKKNLDLCMLYDGIKGRIKTRNIQNNRHSVENILRWLRLQHCSPEDVHVVMEATGVYHERLATELHDAGFRVSLANPHRSREFARGMGIMTKTDKVDAYMLACYAFLKKPHRWEPPAPEIRYLGALLRRRDVLLGDALREENRLEKYLSTDTPADIISSCRRMAQLLREEVSNIERQIKAHIKASPALRRDYTLLTSIKSVGPQLGMHMLVVLRSHNFVSAEQAAAFLGVVPIEKRSGTSVRRRPRMSKIGPPQLRAKLYMSALCGKIYNKRMRNIYDEMCLRGKPKMVAIGALMRKLVHWCYGVLKTGTVFNDEGLKQVLST

SEQ ID NO: 53481 - protein, 340 aa, unidentified
MHKWSEEVFLGCGIDVSAAQLVVALEGEGSRGLQRSFPNRASGHQALILWLQNRGTRIRVCLEATGLYSLDLALALHRATGIEVAVLNPKKVNRFAATLCRNKTDPADAQVLAEYARRMPTQSWHPPQAAALELRAITRHIAALTQQHTQQSNRLHALSASSASSRCVQQDLKRSLRDLERRTEKMRRAALALIAQDTELRPRFALLLSMPGIGEVSSLNLLGELALLAPTLSVRQWVAHSGLDPAHHDSGTSVHKRARISRAGNRYLRRALYMPALVAARHDPHLRAFYQTLLARHKAKLQALMAVARKMLHAIFGMFRGLTEYDGARLFPVLELAVPA

SEQ ID NO: 53482 - protein, 341 aa, unidentified
MNNVTTLGIDLAKTVFQLHGIDARGHVLIRKQVRRGELLATIARLPPCLIGMEACASAHYWARKFRSLGHDVRLMSPQYVKPYVKAQKNDLRDAEGICEAVGRPTMRFVPPKSLEQQDLQSAHRVRQGWMRERTALVNRIRGLLGEYGFVIARSPGAVKRALPSLLEDAENELTVTARGLLARLLAHLRDLEQQVTDLERTIDDLGSQHDTVKRLRTIPGIGPLTAIALVAATGDAKVFKNGRQMAAWLGLVPRQFSSGGKIKLLGIGQRGDKYLRCLLVHGARSVMLYAERQRKPAQEWLNTLRERRGKYRACVAQANKTARIAWAVMTSGEAFRPAVAT

SEQ ID NO: 53483 - protein, 393 aa, unidentified
MGKPEHIRLEEFRQFRKEIRGSKEYLIVGIDVAKEKHHAFFGTATDHTLWKRWLFDNSQDGFQKLLLQTHFLQVKHGLPQVVFGLEPTANYHKPLGEHLIRQDHQVVLVSGVAVKRNRELLDGRWDKHDTKDAANVADLISQGKCLFYEQPDAKLRDLRTLLALKRKLKRQEQSWRVRIRNGLLAQYCPELDSSFSRRIAPGKEGDLLLALRQASSIGCAAHPEMAFEAAVMIEQLQQIRKVLKAIQKRIQKLCLRFPEYRFLLSIPGFGPEVSSQVLGAIGDPSRFQNGKQVLKLAGLDLSSDRSGKRSATPVLSKRGKANLRYALYQAALIASTRNRAFLAYYTQKLRGRAQEPGIRTKMRVKLAAKLLLIAWTLMKRKEAFDPQRLTSQI

SEQ ID NO: 53484 - protein, 452 aa, unidentified
MIAVDPHKASNTAAVLDPVTKTVIESARFANSADGYGQLARFAARWEQRRWAVEGCHGAGRSLAQRLVADGEKVLDVPAKLAARVRVYSRGHGRKTDKDDAVSVGLAALDGTGITPVTRDDALVSLRLLCDRREELTAQRTQAVCRLHRLLAELTPGGMRRELSANKAQALLGRIRPADDVSQVRVHIARDHLADIRALDARIKYIGTQIAALVTASGTGLTRLYGIGPVIAGRIVAEVGDVARFATKDTFASYNGTAPIDVSSGDQIRHRLSRAGNRRINHALHMMAVTQIRNRGSQGRAYYERKRLEGKTGKKRSGASSGGCPTWCTTSSPPTGGAQSESADHLRPAGQRRLPAPHRPAAISRPGHDPRPDPARPQRLHRTRLARRPAHRHRDPRRQRHPARRPPRPGRNHQLRPHPRRTLNREEPIRRCETSGVGRYLRHVLYSALSAA

SEQ ID NO: 53485 - protein, 355 aa, unidentified
MAQNYKKDFNGQNIFVGIDVHLKTWSVSIALPSGYLKTHTQKASAKELFEHLNKNYPNGTYHVVYESGFSGFSTYYEFMELGVDCIVVHAADVPTTQKEKVTKSDPVDSRKLARSLMSGELEGIYVHSKESLDDRALIRHRTTLLKLMGGTKSRIKHLLYNNGVSYPDEFSQKSKHWNRRFISWLQHDVQLLSDTRVTLDLLIEELLYFRARILDVNRKIRVLANTDKYRRQYENLISVPGIGAIISMCLLTEIDDISRFSNQRQFASFLGIVPVMKASGDDCYVGEKTFRGNKALGPKIIEAAWITIKHDGELAAKFGQLCLRGMKRNKAIVRIARKLSNRIFSILKNDKEYIC

SEQ ID NO: 53486 - protein, 340 aa, unidentified
MGEIGTIGLDLAKHVFQVHGVDAKGAAVLRKQLRRGQVLAFFSKLPPCVVGLEACATAHYWARELGALGHEVRLMPAQYVKAYIKRNKNDAADAEAICEAVVRPTMRFVPTKTAEQQAARLLHRGRERLVRQRTALVNALRAHLAEFGVIAPQGLRNVGKLIAIVRNEEDARLPDAGRQVLQVLAAQIEQLETAVAALEKQLMAWHNSNPVSQRLATIPGIGPIIATAIAATVVEPSGFRSGREFAAWLGLVPRQNSTGGKNRLGGISKRGNQYLRRLLINGASANLLRSKATNADPWVIGLRRRRPSLVVAVALANKTARIAWAVMHRQEGYQRAAAAA

SEQ ID NO: 53487 - protein, 357 aa, unidentified
MEYCGIDAHSKSSTVCVLDAKGEKLMMKKTESSREGIAAAIGQFDTNMPIIVEACSASRPVIVNLREIGFENIIVVNPVATNQMRARGKKTDYADALALAELARLGLFEAWRVYIPGDWAQSMRDRLYSREFAIKVRVMAVNRVKAIFRREGKPSPSLKGLVGWEGIEESLPKYSEEFAFLRRLRDICVSHELDLTRKIKGELKKHIQHELVMSVPNVGPLTAAVLLACIEDISRFKSSRMLCSYFGIVPGVFQSGETTKMGPITKRGNHLARKFLAQAAHHSRYASSVFNPVYRDICKNKSMQIAVMTVARKIVTCVYAVMKHNEPFEAEKMGLVKIDKEVKFVRSYERAINLQAV

SEQ ID NO: 53488 - protein, 417 aa, unidentified
MTTKAQKIKRVNKDSMLVSLDIGKTSHFGYFRAPDGQDIRPFEFKNNRDGFLQFWHRLCRFKNQHGLTQVMVGFESTGPYAEPLIHFIKQKPVQLVQINPTHSKRLKELTGNSPNKTDRKDPKVIADVMMLGHYLTVVLPQGAAAQLRRLTHARERAIKQRTATLNQLQDLVFIIFPEFCGLFKSFSCKTSLHLLSHYPTPEALGTLDLQQLSRTMRRVSRGRFNHQHAQRLLQAANASVGIREASQSITEEIRHLVEQLHTLDGFVQQLEQKMHLYLDQIPFSTLLLSMPGIGLITVAGLIGEVGDFRNFATRSEIIKMAGLDLFEISSGKHQGRRHISKRGRPLMRKLLYFAAINTVKKNGIMHAPYTRMVERGMPKIKALVAISRKLLAVMFALVRDQSMFIKDYNAKSYKLAA

SEQ ID NO: 53489 - protein, 412 aa, unidentified
MTAIDQFAAHVGLDWADKKHDVCVQFKNGERIFHVIKHTPEALDIWLNELHQKVKGRIAIALKLKKGPVVYALQKYPFVTVFPVHALSLARYRQTFWPSGAKDDPQDAELALELMLRYPQKIKAIEPDNADIRLLLQLVEQRRQLVEDKRRFVNRIINTLKQYYPQPLEWFSHRGSLLLCELIIRWPSLQQLKRARRGTIRNFLNTKGGRAMALTEQRVASIDNAIPLTTDPSVIEANALMATALATQIKVVSEIIKTYDERIETLFDTLPDAGLFKSLPGMGPCMGPRMLAALGDNRDRFNSAEEIQNYAGIAPVTERSGQKSWVHWRWQCAKFVRQTFVEWAAKTVNSSYWARLYYQGLREKGKSHQSAIRALAFKWIRIIYRCWKTRTQYDETKYLLALEARHSPLLKP

SEQ ID NO: 53490 - protein, 409 aa, unidentified
MRYYVGVDWADQTHAVWVVDESGTQITARTVPHTAEGFVEWGRELDEWRVQGIERWAAIERPDGRVVDFLLDHGVVVYPVNPKALNRARDRFRQSGAKSDPFDARVLADFLRTDHLHLQALQPSSDAAQELKLLTEDCQRHIRQQTRLVNQLTTTLKAYYPRALEVAELTTALAREFLHAYPTPEALTVLTARQWQRWARGRRVSEARIGALWAVLQPPQLPVPAHVVRAKARLMQSLVEQLTPVVVAVAQYRKTIDDFFARMPAAQWARTLPIGTHGITAPTLWARLGDAPGRWESFRHLQAQAGAVPVTKRSGKQRVVHFRFACDKALRHVVDQVAFLSLLSSDWARAYYDQQRARGHGHRQALRALGAKWLKIIFVMWHRQVPYDEQYHLATMTRQQLRQRQTKIA

SEQ ID NO: 53491 - protein, 344 aa, unidentified
MPTIDYIGFDIHKKTISFCVKARDGTILEEGTIPALRNKLLAWAKARPRPWMGAMEATLFTGWIYDLLKPFAQALQVAHPPMLKAIAAAKKKNDKVDARMIADLLRCNLLPECYMAPVAIRDLRRMLRYRNLVVRQTTRMKNRIAGLLMETGTAYNKERLHGKAYFSELLGSLQEVPRSVVELLQLSRGQVEFFAAIQRRLLKGLREHPELSQRVMRLESIPGVGEILALSWALEVGEVDRLPSIAQAVSYCGLTSAQHSSAGKEQRGPISKQRNRHLQTILIEAAKLAPRYNPQLAAVHQRELQRGNRNRATLAVARKLVAYLMAVDRSGQPFQMRASGKEAA

SEQ ID NO: 53492 - protein, 353 aa, unidentified
MEFTMIARSDAACFVGIDLHKDTLTACTIVAKDREVAYRKISCVAREKVREFLANPTVSSVLAIETVGFYRWLWMEAEPIVDQVVLADARGCRALAGRRIKTDREDALNVAELLMTGRLPMAWAPPGNIQRVRNLTRHRVGLSRDHAKTLHRVKSIMNRLNRPGPARMDAAGLQRYLLASVDRIEADDLTVLWQHQRRLVEVEQDRSAIDRRIIDLMRADGFRRLRTILESIPGVGLVVSATAIAEIGDFSRFPDSKAIGRYAGLTPTGYASADKNRLGRICKTGSPDLRWALQQAAWTAIRCDPDIKKTWLKISKTAGKKAAAVAIARKILVLMWTLVRKDELYKAREPVAA

SEQ ID NO: 53493 - protein, 460 aa, unidentified
MPLGRTPRKQRLDELACVHPNAAGLDIGSEEIVVAVPPARDPQPVRLFQTFTPDLHALLAWLLECGITTVAMESTGVYWIAIYELLEQAGITCYLVNAQHVKIVPGRKSDWNDAQWLQKLHMLGLLQASFRPDAEIRSLRLLARHRAELIRHRAPHILHMQQALKLMNIQLSEVLSDITGLTGQAIVRAIVAGERDPAKLAELRHPGCKHTEAEIIKALTGTWHAAQIFILEQNLQLYDFYTAQLSACDREMERYYQAMESRHDKDAPLPDLPKAKPGSRSKNEPNFNVRAQLARIVGVDLVGVMGLSASSAQTIITEIGTDMTRFPTVKHFCAWLGLAPRNDISGGKVLRSRTLKVRSRANQAFRQAAESVARSQSSFGRYFRAMRARLGPEQAIVATAHKIARVVYHLLTTKEPYREECAEEAERKRHERELKQLARRAQKLGYTLNPLAAPPSAPSP

SEQ ID NO: 53494 - protein, 359 aa, unidentified
MQTQRKELNFEGQNIFVGLDVHLKSWTVSIFTENLHYKTFNQPPKAELLSEYLKLNFPNGSYFSTYEAGFCGFWAHFKLKELGIQNIVVNPVDVPTTQKEQMRKSDPIDSNKLGRSLRSNELRGIYIPRPETLEDRTLIRVRFAIVRDMVRLKQRIKSLLNLYGIEYPDELKNTNTHWSKRFINWLKTVHLQYSTGTDALNILIIEAEQHRLILFDATKKIRTLSKSEHYSKNIELITSVPGVGLITGMMLLAEIEDINRFNNSDKLAGLIGVVPNCHSSGEKEKKGEMTSRGQYFMRKGLIESSWVAACKDPALSLSYNTYCKRMEPNKAITKIARKLVNRIYSVLKNQQRYELGIVK

SEQ ID NO: 53495 - protein, 376 aa, unidentified
MAVYWFYGNRHRAKASFSLHADSNLEQLTGTFDSVLLQVREQEPSLDFFYFITMNKFQQITDQRTFIGIDVAKETLALFIDSTDQPIECLNQAKPLRKLAKQFKKLQPTLIVLEATGGYENLAVSIFQKCELPVAVVFPKRVRQFALGLGLIAKTDEIDAKTIAYYGRTANIQPQPALPQHVTDLQALTTRRTQLLEIKVAEQNRLATAPQLMKKDIKKHLDFLEMQIQSLATQIEQQIKSQVDLADKDQILQSVPGVGKVLSSTLLSKLPELGTLSNNEISALVGVAPFPHESGKYKGKRFCRGGRNCIRKILYMATLSAARCNPVITKFYEHLLEKGKLKKVALIACARKLMTFLNSMVKNNSAWNPKVTQVSA

SEQ ID NO: 53496 - protein, 335 aa, unidentified
MNSAKKIVGIDVGKEKLDICYPNGKKETIRNIKSCRTKVIKKAAQLGAFIAFEATGPYEEPLADECLARGVKAVRLDAWGTRKFAESQGRIEKTDAIDCEMIRDYAASLKDEKLHFIKQRSEAQKRLKKSVRTRKNLLKARAIIANQFEDDLDPETARHLKSALNSLDKNIAKVEAECDAAIASDERLKELDRRFREVKGVGPCLSRTVLAQCPDIGDFNSKSIAKMCGNAPLDHESCTIKGKAKPRRGRSDLKKALYMAAVSASRNNHILREFYQRLVANGKVRKVALTAVARRIAILLNTIAKHPDFAPEKDPKDIAKATGRTQGRGRPRKAV

SEQ ID NO: 53497 - protein, 412 aa, unidentified
MMTAEPAGVTGGVDTHADVHVAAAVCSTSHRLLGVAEFETTPVGYVATYDWLASFGPIDAVGIEGTGSYGAGLARFLAERGVELVEVTRPDRQARRAQGKSDPVDAEAAARAVLSGRETGSPKHRNGLIEAIRLHLLVYDAVVRERTAMRNRLHAVVTSAPAQIRQEVDQISESARILTLSRWRVRAGDDVVAVACRQVLRELARHIHSLDEQADAARARLDELTGEAAPAVRDMHGVGAVTAAQLLTAVGDNPDRIRSEAALAKLCGVAPLQASSGKTHRHRLNRGGNRTANHALWRIGMVRRNSEPRTQAYFERRRAEGRSDREIMRCVKRFIVRELYQALTRPTAAVPTGTQLRELRHQAGLTQQQLADQLDVTPRTISRIEHGQLRTPDLRHRIHDLLTPANIPQLAA

SEQ ID NO: 53498 - protein, 357 aa, unidentified
MEGFHYLLQRIRHCTAPQDKIKVGLEATGHYSYNLLGFLLDNGLTTYVLNPLRTNLYRKSLSLRKTKTDRVDARTIASMLLSDAGLKPYTDTAYHNEELKSLTRYRFDKVKERAKLKSSIARLVCILFPELEKLVPSLHIASVYALLEEFPGAKQVANTHLTRLKALLETASNGHYKRDMALEIRNAAKNSIGSQMPAKSLELQHTIRLIRELDREIDEIEEQIQSIMDELHSPITTIPGLGFRMAAMILAEVGDFTRFDSPDKLLAYAGMSPSTYQSGQLKNCYPHMEKRGSRYLRYALYNATKYVCHWDPAFADYLAKKRAEGKHYNIAISHAAKKLVRLIFAMEKSRQPYCSAA

SEQ ID NO: 53499 - protein, 343 aa, unidentified
MKLRTITIDLAKNVFQVCGVNEHIKPQFNKKLQRNKLLDFMRQQEPTKVVMEACYSSHYWGREMTKLGHDVKLIPAQHVTPFVRGNKNDHNDAFAIAEACERPYIRFVPVKTEQQQEIACLHRIRERLVKNKTALSNQVRGLLSEFGAVFPCGHAALVVGLNSVIDGSNYSALLQGTMRDMRIEYHAIIKRVRHIESQLHIFVDESESGKILLSIPGIGYINASAFLAAIDKGQAFNNPREFAVWLGLTPRQHASGNVSKMGGITKRGDRYLRKQLIHGARSLVSRAAKSSDPLSLWATKLRVTKPFNKVAVAVAHRLARLIWILLTRQERYRAEPASLEVSA

SEQ ID NO: 53500 - protein, 422 aa, unidentified
MLQETHDTEELIERIAALDIGKAELTCCVRVPSADQPGKRSQEVMTYKTMTRSLLVLADRLAELGVTRVVMEATSDYWKSPFYLLEAHGFEVWLVNAKDVKHLPGRPKTDRLDAVWLCKVAERQMLRPSFVPPPAIRQLRDLTRYRVDLIGVRTAEKNRVEKLLEDAQIKLSVVASDIFGVSGRAMLAALVAGERDPKVLAQLARQRLRAKLSLLEEAFYGRFSDHHAFLLTTMLDRIDQTSAAIATLEAKIEQQIVPFQAAVDQLDEITGVGRAAAQVLIAEIGVDMGRFPTPGHLVSWARFAPGVKESAGKKKGKASTGRGNPYLARVLGEAAVAAGRTDTFLGERYRRIARRRGAKRAVVAVGRSILIIVWHLLSDPEVRFHDLGPGFYDTRIDADRKRRNHVRQLEALGYKVTLEPAA

SEQ ID NO: 53501 - protein, 366 aa, unidentified
MNYKLKAAPAARRVKSQKAPSAKRIIIGVDVHLRSYYAARKVDNAAVGAVAKFGSQQEFELYVERQRQQAEEVVVLYEAGPLGYVLYRALKAQGVQCYVCAADSTLQKHTRRKTNQIDARTLASNLFNYLNGNERAVRLVRIPSQEQERARLISRQCDGLVEERKRLGAKGNALLLSQGYGVSKNWWRPKAFARLSQGLEAWVLELLKVWLPLLRQLDELIARAKAGLVSRAKGPRPKGAGAQSLVQLGAELLDWNLYSSKRKIGSLAGMVPSEWSTGTGQRLGSITKVGVPAIRRNVIEMVWRFKRFQPQYGPIQKWKAILEAAHWSLKKKAVVAIGRQLIVDLWRLQTGRASAQELKLIMVGGD

SEQ ID NO: 53502 - protein, 403 aa, unidentified
MYAVGIDVSKCRSTVAVLEPLGKTVAKPFEVRHTKSGMNDLVNYLNTLGGECRIVLEHTGRYYEPVVRWLSGAGLFVSAVNPKLIKDFDNNSLRRVKTDKADARKIGRFALDKWHKLRQYTAMDNIRTQLKIMNHQMSFYQKQQTAYKNNLIALMDETYPGANKFFTSPKRADGSEKWVDFIEKFWHADCVCNLSLKSFTEKYQKWCKKHGYNFQPDKPAEIYNASKELIPILAKDDMTKLFVQQAVTQLNAISKAVEELRQQMDSLASQLPEYPVVMSMFGVGTTLGPQLIAEIGDVHKFTKRSQLTAFAGVDPGVNESGDYAQKSVHTSKHGSPYLRRTLFLIMEVLIKNQPEDDPVYRFMAKKRDEGKPYYVYMTAGANKFLRIYFGKVKEYLNNLPPEE

SEQ ID NO: 53503 - protein, 343 aa, unidentified
MQTVTTIGLDIAKSVFQVHGVDGAGQVVIRRQLKRRYVLAFFQKLSPCLVGVEACASSHHWSRELQALGHTVRLIPPAYVKPYVKRQKNDAADAEAICEAVTRANMRFVPTKTPEQQSGLVLHRARHLFIRQQTAVINSIRAHLAEFGIVAPVGRQGVEELLNVVADPNDKRVPEIARACLSAIGAQLRRIKEQILEFDRLIRVWHRSNEMSMRLDEAPGIGPVLATAVVATVADPKSFRSGRNFSAWIGIVPKQHSSGGKNRLGNISKQGDRYLRGLFVAGALSVIRYAKIHGIKHRPWLTALLARRPTKVAAIALANKIARMVWAMMVKGERYKEPVALAR

SEQ ID NO: 53504 - protein, 343 aa, unidentified
MDQYIGLDVSLKETAISIRQDGKRIWRGKCASDPKLVAEMIRKHAPHARRVVFETGPLSTWFYHELTKEGLPAICIEARHAQKVLNETLNKTDANDADGLAHLAEAGFYKAVRVKAFDSMLTRTLVAARNQLLSISTQLSNQIRGVMKTFGLIVAQGKGRVFDNNVRQLLDGNDGLAMIILPLLEAWRGIRMRAADLGRQLVAAARESQATKRLMTIPGIGAVTAVSYVAAIEGPDNFKTSRSVGAWLGLTTRRYQSGEVDYDGHISRRGDPHLRGLLYEAATVILTRTSARNESRLKSWGLKLRERLGFKRAAVAVARKLAVIMHSMLKTGDVFNRLASATA

SEQ ID NO: 53505 - protein, 350 aa, unidentified
MEYIAFDAHKHYTVASVERPTGEVLRETRLAHHRGVIRDFLQQWTPGSPVAVETVGNWYWLVDEIEEAGMVPRLVHARKAKLMSGMINKTDKLDVRGLNRLQRTGTLPTVWIPHAEIRDQRDLPRTRMVLVRARTRLKNRIHATLAKYALTVTDVSDLFGKQGRIILSDKLTQLPPHSRFSTEHLLEQLKALDAHIAEFEVRIRKVFKKKPALEWVISLPGVGLILGIVILLEVGDIHRFPDAEHLAAYAGTTPRVSGTGGKIRFGRLRTDVNHYLKWAYTEAAEVICQHRADWSHRHVSQLYTRVRHRKNHQKAIGAVARHLAEATYWILTKRESYQEPKRRSDASMKA

SEQ ID NO: 53506 - protein, 311 aa, unidentified
MTEDFVVVGIDVSKACLDVAVTPLEQSWSCPNEAGAYVALRERLQQVSPALIVIEATGGLEAAVVADLASYALPVVVVNPRQVRDFARSLGQLAKTDRLDAWVLAEFGRRIQPPIRPLKDDAQQELAELLARRRQIIDMLTAEKNRLARARRAVRRDIKSHITFLQRRLKDTDGQLRQAIADSPLWRARDDLLQSAPGIGPTTVLSLIADLPELGRLTHRQLSALVGLAPYNRDSGRYRGQRHISGGRKRVRSALYMAALSAIRCDAAIRAFYQRLRLAGKPFKVAITACMRKLITVLNAMVKHQLPWHAA

SEQ ID NO: 53507 - protein, 402 aa, unidentified
MNCVGIDVSKGKSMIAVMRPFGEVVVSPFEVRHTASELSELARLLKNLDGETRVVMESTGNYHAPVAWLLHGAGFYVSVVNAILVHDYGNNSLRRGKTDKKDAVKLANYGLDHWLTLPRYVPEEDTRLMLKTCYRQYQQYSKVQTMLKNNLISLLDTAFPDANRLFTSPPRADGSEKWVDFVATFWHCECVCGLSKKAFTAKYQKWCRKHGYNFSQDKALDIYASACGRFGVMPKTNTAKLLVEQAISQLQTTSAALAALKQEMQSLAASLPEYPVVMGMFGVGPTLGPQLIAEIGDVRRFHSKKALVAFAGIDAPPYQSGQIDVRSRSISKRGSASLRRTLFLVMGVLLQCAPMDEPVYQFMNKKRSEGKPYRVYMMASANKFLRIYYASVKAYLDSLEHD

SEQ ID NO: 53508 - protein, 393 aa, unidentified
MQNCLAIDVAKGKSMVSLISSCGEVLIDPYEINHSINDFTNLLNRINKLKLDNVSVIMESTGIYHKPIERFFFENKFKVYTINALYSKMYKRNLRKTKTDKLDCISLAELFFTTEFKQYMKQDDLYLNMNALSRQYFALSDLCTNIKNRYKNLIYLCFPEYEIIFKGEMIYSNIALNFIEKYPHADIISNTRINALQNFFKKNNFRYWKRKANIIKEYALKSYPSVNMNDESVPNLSQLARLINDYQKEIDTIKYKLVFLAKKSKYFESINSIFGIGEFTTSILIAELGDINRFNNIKELTAYCGLDPSIKQSGRSIDIHGPISKSGNKYLRKILFVSCLNIVRLSPKCHIENDIEIYYRKKRNEGKHHYAATIACTTKLLRKILALCKQLDI

SEQ ID NO: 53509 - protein, 346 aa, unidentified
MLVIGCDFHPGWQQVCWVDTMTGETEEKKLVHGSGEAERFYRQLSGPALIGMESTGNHQWFLEMVTAAGHELWVGDAAKIRASDVRQQKHDRRDAALLLKLLLDGRFPRIWVPSSEQKDLRQLLLHRHKLVRVRAQVKNELQHLALNQGVQRKQRLWSAAGQKVLNELALRPWGSRRREDLLKLLAMLDQQIAPLDLAVEQAAQENSQAKLLQSQPGVGPVTSLAFVLTMGDVSRFRRGKQVASYLGLIPREYSSGGHQRLGSISKQGNRFMRMLLVEAAQIAVRYDPGMRNEYLHRCHSKAKGVAKVAAARKLAIRLYWMLRTQKPYPQIVRIESSSRVALVGES

SEQ ID NO: 53510 - protein, 349 aa, unidentified
MTIFCGIDWVEDHHDIAIIDAAGTQLAKRRIGDDAAGYASLLQLLAEHGETADELAPVAIETGRGLLVACLAAGGRDVYVVNAMAAARYRERTAVARAKSDAGDALMLANILRTDRHAHRPMPHDSDLVRAIAVLARAGQDAAWSTQQIANQLRSVLREYFPAALRAFQIKHVGLASAEARTILAAAPTPPTAARLTKARLRTLLKQAGRQRKVEVWVERLQGIFRDAALHHSPRVEDAFGQQARALLLQLNAAVRATEGLLAAAEAAFLEHPDAEIIISFPGLGTVTGARVLAELGDDRDRFTNPWALKAYAGAAPVTRASGKVRLVMHRRVKNDRLAAAGYTWPSPR

SEQ ID NO: 53511 - protein, 347 aa, unidentified
MDHYAGIDVSLEASSVCVVDGAGKILREAKIASEPAALIGWFASLGLDLARIGLEAGPLSQWLYAAMKEAGLAVELLETRHVRTALQTMPVKTDRNDARGIAQLMRLGWFRPVHCKSMAAQETRALLTARKLVQSKLYDIEMSLRGILRGFGLKVGPTTPKRFARRVEELVAGHSTLEVIAKALLSAHAALLRELDMFEKLVRAMARRDKRARLMMSAPGVGAIVALTYVSAIDDPARFSSSKRVGPHFGLTPRKYQSGETDVTGRITKIGDAGVRTALYEAANVILTRPVKGAGLKSWAMKLARRAGMKKAKVALARKLAVILHRMWIDGTAFDARKAAFAGVAAA

SEQ ID NO: 53512 - protein, 312 aa, unidentified
MDAMVIGIDVSKDWLDVAVRPTGESFALKRITAGIEDLVERLKDLSPALVAIEATGGFEAVVAAALAGAGLPVVVVNPAQVRAFAVALGKRAKTDPIDAAVIAHFAEATKPQLRQLPDEKTRFLADLIARRRQIVEMLAAESQRARRISDHRLTRSITRLRKALEEELAELERLIADHMRRSTVWVEKEKLLASVPGVGKTIARTLIAELPELGSLDRRQIAALVGLAPWTRQSGQWRGKSFIGGGRKTVRSALFVGAMVAARYNPQLKQFRDKLVAAGKPKLLALVAVARKLITILNAILRDRRPWHPNPA

SEQ ID NO: 53513 - protein, 428 aa, unidentified
MEIKDRTRLEEFRQLKKEIRGSERHLIVGIDIAKDKHHAYFGTATGKTLLRRLVFENHKDGFEKLVTYVDAEKTKNALESVVFGLEPTANYHKPLAQYLIERSLTVVLVSPQAVKNNRQSLDGRWDKNDTKDSANVADLISQGKCLYYDYPCIELRDLRNLLSLKRRLKKQEHGAKVRIRNHLLALYFPEFDRYYARAGSEGLAIVKWCLDPSRIAGLEYDEFAHLVAPRIKTLGQAKRLKAIWELAVDSIGCEAGQAMDFEAKLMVEDLNQVKDSIGAVDDHVEEICLGFPEYNCLLTIPGFGPDVSAKVLGAIGSPFRFDNGKQVLKLAGYDLSASRSGNSSDRAVPVISKKGKASLRYALYQAAFVASTKDRRFIIYYTNKLRGREREKGIKTKMRVKLAAKMLIIAWTLMKNKEPFNPEYLNID

SEQ ID NO: 53514 - protein, 372 aa, unidentified
MKKNNTVKQSPKKALARETGPITIGLDLGDQTSRYCVLDKRGEVVQEGSVATTKKGLEQIFGSRKRCRIALEVGTHSPWVSRLLSGLGHEAIVANARQVKLISQSSRKDDRLDAQTLARLARVDPQLLRPIRHRSERAQMDLMQIRVRAALVEARTKLINAARGLAKALGERVPPCDAAHLDVERLEGLPAKLQAVLQPLLEEVESLSEQIQACDKRIEQIARSEYPETKLLRQVSGVGPLIALTFVLTVDDAERFQKSRDVGCYVGLRPKRSESGESQPQLGISKEGDIYLRKLLVQGAHCILNRRGPDTDLKRWGLKLAERGGKNAKKRAIVAVARKLAIVLHRLWVTGEVYEPLRNSQAQEAAKKKAAA

SEQ ID NO: 53515 - protein, 315 aa, unidentified
MNKKLNHLGIDIGKRKCRAALKDDKGKILDEFFFGNNSDGISDLINRIYDHGTKECNAVLESTGNMWMRIHDTLEDNGIDTILANTYKTKIIAQAKIKSDKLDARILSDLLRTGLIYESYVPIKEFRDKRSLVRHRIVLSRTRTKLANKIHAILDKYEYRTELTDIFGIHGIQWLKTLSVSPIDRIIIDTTLSSIESIDNQIQIVSKEIARYAWQDNKDVKILLSITGIDIFSAMLISTEIVDIHRFSTPWKLVSYAGLAPSMRESSGKIKTGRITKQGSPLLRWILVQCALSAIRHDQHMRTFYERIKQRKGHG

SEQ ID NO: 53516 - protein, 387 aa, unidentified
MSQTVAAPIPAAVDHERTLVLAIEVSNKSWVIAAQVPGLPHTKAKRTIDPEAEALLAAIAAYRARAAATGRSIERVIAVYEAGWSGFWLARWLMRHGVEVYVVQPSSVPVDRRIRRAKSDGIDSELLLRTLLAWLRGEPRVCSMAPVPDEADEDARRCVRERSELISERIGLTNRIGAILATLGVSDYNPLLRNRGRRLAELRTALGEPLPANAHAKLKRLLARLELVLTQIAELERERDAVVETEASDGASKMIQQLTALRGIGVQSATVLVREAFVRRFANGKALGSYAGLASSPYSSGGMDREQGIGKAGNRRVRTVMVELAWLWTRYQPGAAQVCWFRERVASTGRRVRKIMVVALARKLLIALWRFVIDGVLPEGAVLKPAA

SEQ ID NO: 53517 - protein, 367 aa, unidentified
MKKVSTRAAVQSRNISQQKLTIGLDLGDRNSWYCVLDEAGQIQREERVRTNAKALQEVFGAMARSRVAVEIGTHSPWISRLLSELGHEVIVANARKVRLITESRKKDDRLDAQTLARLARLDPKLLYPVKHRSVQAQADLTLIRARAGLVRARTGLANAARGLAKSYGERLRGCNVRNMNPEKAERLSPELQAALEPLLNAIESLSERIVEYNQRIENLAEKSYPQVALLKQIKGVGTLIALTYMLTLEDPHRFRQSRDAGSYLGLQPGRRNSGRSEPQMHISKEGDPYLRTLLVQGAQHILGPFGVDCDLRRWGLKLAERGGKSGKKRAIIATARKLAVLLHHLWISGEAYDPLHNSQQKALPAAA

SEQ ID NO: 53518 - protein, 357 aa, unidentified
MKMVAAKNRRSVVGKDVYVGIDVHKESWQVTVRTGGEEIFNGRIPGQYQSLKKLFERYQGCRMKVAYEAGPFGFWLSDKLVADGIEVLVVPPSLIPTESGNRVKTDKRDSRKLARLLESNMLKRVYVLTPEEREHRDLLRTRRQIVDHRNDVARQIKSKLLFYGIASPFTASTRWSLKYIEWLKVLRCDTDYLRESFNLLIDLYEYLTRQIVRINKKVALLCRDKKYRDRIKLLCTAPGIGRLTAIEILVELQDITRFESAEELAAYIGLTPSEYSTGERTRQGRITRCGNKRVRTYLVESTWMLITKDPALRLKYLRLKSTRGGKRATIAIARKLLIRIRRMLLDNVPYRMTAMAA

SEQ ID NO: 53519 - protein, 366 aa, unidentified
MKKNSTVTTKRNKIFKQPKLTIGLDLGDRSSHYCILDEAGKVILEHNLPTTPKGIHQVFSRIPRSRIALETGTHSPWVSRQFSQMGHEVIVAHARNVRLIGESRRKDDRLDARTLARLARIDPGLLGPVRHRSAKAQIHLTVIRARAALVSTRTALVNAARGLTKSYGERLRKCGTGQMNREIAQGLSQELREALDPLLREIESLNERIAEYDRRIEQIATEVHPEVARLKQVKGVGTLIALTYVLTLDDPHRFRRSRDAGCFLGLRPGRRNSGQSEPQLHISKEGDRYLRTLMVQGAHYILGPFGQDSDLRRWGLKLAERGGNNAKKRAVVAVARKLAVLLHKLWVSGEVYEPLRNNHKVVSAVA

SEQ ID NO: 53520 - protein, 336 aa, unidentified
MFQLGIDVSKKTLDLCLLREGVKGSVKTRKLQNDINAVNAVIAWLSKQHCKPEDVHIIMEATGIYHESLAYGLHKAGGRISLANPHRAREFARGMGMLTKNDRVDAYMLACYGALKAPEPWLPPPEEVRHLSALLRRRDALVADSTREKNRLEKYLATDTPSVIAESVEAMIGQLNAEIKRLDRLIRSHLNQHPELKKDFDLLTSIKSVGYQLGLNMLVILRSHDFATAEQAAAFLGVVPVEKYSGTSVRGCPKLSKIGPPEIRAKLYLASLCGLRFNPLMKAMYERLCLRGKGKMCAIGALMRKLVHWCYGVLKTQKPFDVGYLSSYARSACKAA

SEQ ID NO: 53521 - protein, 481 aa, unidentified
MSKPTQHSKKPGEKKTAAGQGKRSRKKKGMCLEDRPILEPNAAGIDIGAREIFVAVPPDRDADPVRVFSTFTEDLEEMAKWLVSCGVTTAAMESTGVYWIPAYDVLEQHGVKPCLVDAHGMKNVPGRRTDWHECQWIQFLHSVGLLRAAFRPDGEVCTVRSLMRHRSDLVQMTNQHIQHIHKALTQMNVQIHHVIDDITGVTGLAIVDAIVDGQRNPLQLAKLRDPRIKASEETIVKSLQGTWRPEHLFTLKQSRQMYRHYQDQIAACDEEIEKLLVAFQPRVDPAEKPLPPDRKKRKRGRQKKNAKTKHGFDLRTESYKIFGVDLTQIPGLMAMVLTLFSEVGRDMSRWKTAGQFVSWLALCPDNDITGGRVAWRGMRRVHNRAGELFRMAAYSLHHDKSPLGDYLRRMKSKLGPTGATTATAHKIAIIFYTMVKKQVEYDATLWAERDTQREKRFEAKLKRQAQQLGYKLVPIEEKPAA

SEQ ID NO: 53522 - protein, 340 aa, unidentified
MKPVAGVDTHLDTFDLVATDPIDRVLATGHYPNTPVGWADAAREAQRFGITTVGIEGASGYGAPLARYLSGAGFTVLDVPTRVTAAGRTTEAAGKNDLIDARIVARAVLAGKANQWADTPELETMRVLSHRRESLVKDQTRDINQLRALLIDLDPPRAAQLPRLRSTKAFNELAKVDPQNNPNRKVIAQLIRDLAIDCGRRLGQIRTLERQLKTHMPEVGNHLIDTIAGCGVVTAAIFLAEIAGTDGFATEAKFAKWCGAAPLDASSGRQQHHRLNRGGNRQVNRALHICIMTQLTQDGEAATYIARRQQQGLTRRSAIRACKRHLARRIWKTIHQHQLT

SEQ ID NO: 53523 - protein, 337 aa, unidentified
MSNITLIGIDLGKSTFHVVGRDASEHTQLRTSFSRTQLLRFIAQLPPCLIAFEACGGAHWLSRACERHGHQVKLIPPQYVKPYVKGNKNDFIDADAIAEAATRPGMRFVQPKSEAAQVIAVCHRLREGFVTERTAVMSRIGAILLEFGLSLPVGHSVMKQLFCWIGKQEIELPHALYAELMIAHEHYLLLHERIAEQDRKIAQWVKQDDACQRVKTIPGVGDMIASQLVMEVGNAQQFNNGREMAAWLGLVPKQHSTGGKSRLLGISKRGNKRLRCLFVHGARAVMAHRGAGEKPFDKWLMKLCQSKPFNVACVALANKLVRIAWAVLSQKTVFKAL

SEQ ID NO: 53524 - protein, 312 aa, unidentified
MTSEKFVGIDVSKRGLEVQVHGEAESRKFGNDPDGIRSLLEQMKALQPVLIVFEATGGYERRAAKALSEAGLAVAVVNPTRVRRFAEALGILAKTDKIDAKVIAHFASVVCPAPNGQHSDLEEQLAACVERRRQLLVELAAEKNRLATCPACMRENIEEHIAWLEEHVDSLEAEIHSCIMQKPEWQTRAEIIDSVPGVGPVTATTLIAELPELGQLNRQKIVALAGLAPFNKDSGPKKGKRKIFGGRSGIRRPLFMATLSATKFNPVIRAFYESLLKRGKEKKVALIACMRKLLVIINAMVRKGEAWRVSPA

SEQ ID NO: 53525 - protein, 393 aa, unidentified
MRSVGLDLGVRHIAICEVVRGEVVARTTVHSLKELEGRLGPGTPRAQVAFEACREGWHVHDMMEQWGHEAHMLDTTRVRQIGVGHHGRKNDAIDAEAIAKALDAGRIPIAHLLSPARRALRAKLSVRGELVDMRARQVTLLRGLARAKGVRLPSSSTAIFLRVLDQAELDDETRSLMAPLVATLTTAEEQLGNVDEELAQIAKADPAIQLCATVPGIAVIVAATFVSVIDEAKRFRNAHAVSAYLGLVPGETTTGGKQRLGGITKQGNSHARRMLVEAAWQILRTEKPDEPLYRWASHIAETRGKRIAIVALARKMSGILWAIWRDGTVYDAEFAARKSAAGLTAAAENTAHRVQALAHVARKIHARERTAKRAKALVLARTPRTHASKGVAM

SEQ ID NO: 53526 - protein, 468 aa, unidentified
MGHNRSRSRQPGRNKAKHPSLLKRINRNAAGIDCGSEAHYVAVPPERDAEPVRSFKTFTADLHRLADWLEACKIKTVAMESTGVYWIPIFEILEEHGFEVVLVNSRHIKNVPGRKTDVLDCQWIQELHSVGLLRGSFRPAAEIASLRAYLRHRGKLVEGAASHIQRMQKVLVQMNLQLHNVISDIAGVTGMRILRDIVAGVTDPMALAAHRDYRCRASLEEIAASLTGNYRAEHLFVLRQNLELFDTFQRQIQTCDGEIEPLLRTLAAKQRRPKAPVPSPRCKPKFCDNEPRFEIRDPLYRLAGADLTQIDSIGPYTALKLIAEIGTDMSRWPTPGHFTSWLTLAPKNKITGGRLISSRTQPSANRAATVLRMCAMVVGRTSTALGAYYRRIAYRIGKPKAITATARKLAILVYRTLQGELDYADPGASAYEEQHRQRTLRTVRNRARKLGFGLVNLETGELIHEPVS

SEQ ID NO: 53527 - protein, 433 aa, unidentified
MPTEFAALVAIDWADQKHVWALQKAGSSERKTGTIDHTPEALEVWASELRLRFGGQPVAVALEQSRGPLVFTLTKYDHLVIFPVHPTTLANYRKSFRPSGVKDDPSDARLLLDILTLHHDQLRRLNPDTPETRTLQFLVEERRKLVQEKTRYSNRITAHLKMYFPQVLHWFDVGSTMAADFLERWPSLEQLQRARPASIERFFLDHHSRDRERIAQRLEQIRKAVPMTLDAAVLTACRTAIVAWAALLKQVLTAIALYDEKIDELARVHPDYALMNSFPGAGSALAPRLIAAMGSQRERYRTAQEVQCYSGIAPVVASSGQQRWVHWRWACPKFLRQTFHEWALHSIAYCPWAREYYEQQRAKGKRHNTVIRALAFKWIRVLFRCWKERKPYDEAIYQRALDARRPQTQFAAPAVELQWKNVAGFLKIAIKEA

SEQ ID NO: 53528 - protein, 428 aa, unidentified
MNEEDGTRLEEFRQFRKEIRGSGEYLLVGIDIAKEKHYAFFGTAQGKTLLRRLVFENNLEGFRKLLAQARRLRDQNGLRRMVFGMEPTGNYHKPLGEHLIECQHLVVLVSGVAACENRKTLDGRWDTNDARDAANVADLMSQGKCLFYEYPVGPLQELRNLLSLRRRFKRVEHGYQVRIRNHLLAKYFPELDRYYKGSSPTDLAIVRWCLDPSVIAGLEYKRFAEMVSSRRGWYSQEKRLQTIWKLAVESVGCEAGEAVEFEAKVMVEGLKQLRESMGQIEEKIQEICSQFSEYECLLSIPGFGRDVASKVLGAVGNPHRFQNGRQVLKLAGFDLCAKRSGKSSESAVPVISRRGKADLRNGLYQAALIASIKNPGFMAYYTEKLRGREREPGIKFKMRVKLAAKLLLIAWTLMKKKESYNPDYLVTE

SEQ ID NO: 53529 - protein, 392 aa, unidentified
MIYVGIDVAKDKHDCFAMNSDGEILIEKMTIQNNFDGFKYLFNSISQFNESFENIKVGLEATGHYSNNILNFLTSKGFNVYVINPLQTNLYRKGQSLRKTKTDKLDARFIATMLITENLKSYSNLSYHISELKSLVRHRFRLVQERSKFKTSLSRLITLVFPELEKIVWSTSQNSVLYLLNELPSVNDISKCNLKHLTSILEKYSKGKYSRDKAIEIRELARKSIGTNSRSLSFELKQIIQTVLFLQSQIDDIDKELKTLVNELNSPIMSIPGISYVSAAFILAEIGDINNFDSPAKLQAFAGLDPSTYQSGKYTAAHSVMVKRGSKYLRWALLNATRLVCMRDKTFNDYKNSKLAEGKHYFVALSHTSKKLIRVIYYLLKTNKSYQLQKVA

SEQ ID NO: 53530 - protein, 347 aa, unidentified
MESTVNLPVVGMDIAKNVFQLHWVDAPTGQIKRRTLKRDRVLTFFANREVSLIAMEACGGAHHWARTLQEQGHQVKLLPAGQVRPFVPRDKTDATDAQGIWVAAQQRHIHAVAVKSVSQQAALSLHRLRHQLMKVRTMQTNLLRSQLLEFGLTLPVGYRPLLAQIDQALVRAQAQLPDYYIVTLQEQVRRILDLQADMDAIEQRIIQQAKDNAATQAIMAIPGVGPLSATAVVASMAQPESFSSARQFAAWLGLTPRQTGTGGKVRQLGISKRGDRYLRTLLMHGARAVIARSTPTSWIARLLARRPYCVVVAALANKLARTIWAVLVKGKPFDPAKWNPETAALVV

SEQ ID NO: 53531 - protein, 326 aa, unidentified
MSDSSNIIEVIGADISLREIVLAWARSQRPCLSIANNRKAIVAWLKQLPAGCVIGMEATGRLHHLLADLAVKHGHSVYVLNPKHVASYAKGVGQRGKTDPMDAAVIARYVDRERDGLHAYTIPSALQRTLRDLITQRASVVRHGVALKQSIQATGTARNSALKRAHKAALKSLNALLTEINNELKRAIAANDALETKRKQLQSITGIGFVNSAALTHRFDRTPFANSDAVVAAYGLDPRPKDSGNHLGKRRLTKQGNSEDRRLIYLAAQSASKTKLFNPIYRSLLARGLSTTAAIVILARKLLRIAFAIWTYGKPFNPIKVGKRAC

SEQ ID NO: 53532 - protein, 323 aa, unidentified
MQGKVSPERSACDRVYVGVDVCKEWLDVYLHPVDLSLRVANTPTGLKRLKRELARHAIACVAVEATGKFHRLTQRHLHAAGIPVAVVNPLRSRLFCEASGQLAKTDAIDARLLAVMAESLNLRVTPPTPEIVEDLQELVRARAAAVADRTALINQRAAARLGAVKAELGRRIRALEGSIARLEQEIEATIARDLALARRFEILLSIPGVGPVAAAGLLADLAEMGTRSGKEIASLSGLAPVACDSGEAKGQRHIRGGRAHVRTAIYFAALSAARYNPHLARVYRRLLAAGKKPKVALTAVMRKLVVLANALLRDNRIWQANPA

SEQ ID NO: 53533 - protein, 321 aa, unidentified
MYKYNQIFGVDISKDVFDVMSSQGKHLQFENSSKGFNQLTKHLTKKDLIVMEATGYYHYCLAQYLYDLGYIVSVVNPLAVKRFVQMKLSKIKTDKSDALAICQYASLNEVPIFTSRDSNQAECLQLMSLIEIYLKQSTALKNKLHGEKTLGIPSKTVYHSINRSLKLIQKEVQLLENKLLELVKEHQHKQLTLLKSIPGMGTKTSIILIVLTDGFTKFDNAKQLCSYAGTTPTIRLSGTSVRGKSRISKMGNQKLRNLLFLCAFSACKYNKACRELYERIVAKGKSKKLALIAVINKLLKQAFAVAKSGLPYDENYVSNLS

SEQ ID NO: 53534 - protein, 399 aa, unidentified
MKTTDRTAAAIGLDVHRRFSTVTARNAEGKIAWRQRLEHEDRDDLREHLDTWPRGIPVILESSFGWEWMCEELEQAGVDPQLASSRKVAAWRNARGMAKSNRTDADLLSELGRQTDRWWQVWLAPREVRDRREWMRYRMSLVGLQTGLKNRVHAILHRHGILHDFADLFAAPGRRMLTRLVNDAENPGLRESGRATLKGYLQLLDQLRRQIAAVTRSIYRQLRATPQAKRLQGLPGVGPILAHTILAEVGDFARFRSAKHLASYSLLAPRAFDSGEETEEAPKGRHVGHIGRRTLKWAWIEAAHGAVRRSGRFREVFDRYTDGGKRNRNRGYILVGHELCRTAYAISKKETEYRDDPPARPGSSKKGAASRQRDQRRRAKSQNSRPGTGQPEPAMVAVG

SEQ ID NO: 53535 - protein, 305 aa, unidentified
MDVSKDWLDTHVVPGGAAGRFRNDAAGIAELAAWCQANGVELVVMEASGGYERLPFLLLWELGVACGMVNARSVRRFAEAMGFLEKTDRIDAAVIARYGEVKRLQPTQPPSAAQQRLKALVARLSQVTGDLTVQKQRKSATTDAETIASLDEVIIVFKRQSRRLEGEIASLIDDDPQWACLDQAFRSLKGVASRTVARLMAELPEIGVLSNKAIAKLAGLAPIANDSGKRSGRRPVRGGRAGPRSILFLIARIVARYDPHLGAFHQRLQAAGKEKMVIRIALARKLLVILNAKARDARKEFANAT

SEQ ID NO: 53536 - protein, 400 aa, unidentified
MLLFFEVITMIFVGIDVAKDTHYAAVSDDSGAVLVKPFAFQNNAEGFCLLLKKLSEFDRSKLLIGLESTGIYSENLICFLYESGFRLAVINPIQTATLRKTAIRKTKTDKVDTMLIIKSLMVNSYRLYSQRDADSLKLKTLCRFRQNLKKSKARLKIQLAGYVNLVFPEFGKFFKSGIHIAASYALLKKYSSPKEIAALRTSTLCTLLSKASHGRFGKDTAEALKSLALSSVGVKNPYISIQIAQTIAQIELLEQQINDLNSAIEEAMESLNSVLMTVPGIGAVNAACILGEIGDIKRFSKPCKLLAYAGLDPTVRQSGQFTAKSTRMSKRGSALLRFALINSAWQLTLNDTTFKAYYDLKCSQGLNHYGALGHVAHKLTRVIFKLLTSDTPFIPAKLVA

SEQ ID NO: 53537 - protein, 311 aa, unidentified
MTKQVVGIDVGKEKLDVGLSGQKGVRVWANDEAGREELSEWVVAQKVELVVVEASGGYEAAIVSELVERGQAVAVVNPTRVRAFARAEGILAKTDKIDAGVIARFGATMKPEPRARRDLNQLELNQWVTRRRQLVLMVTAEKNRLQTADSSVRANITKHITWLQTEIEALEQQINQAIAANPRWSETAKRVESTPGIGSVTSSTLVADLPELGQLNRQQIAALVGIAPFNHDSGKRRGQRRIFGGRASVRSVLYMATLSAIRHNPVIKSFYDRLIAKGKIKKVALTACMRKLLVILNAMVKNGQDWSPTIS

SEQ ID NO: 53538 - protein, 387 aa, unidentified
MPQQNDLSRSLVALEQDATLIAVIEMGQSSWLVAGIVPGIDRQPLKKLAPDRDGLLQLLYRWRKEAIKAGRTIKRIAVAYEAGRDGFWLARWLCAQGIEAYVIHPSSVPVSREHRRAKTDRLDSELLKRAFLGWLRGEPKHCSMAAIPTIEDEDARRPSRERESLVKECTRIVNRVRAALARLGIRGFRPTLAQASKQLETLRTPEGSAVPANTLAELRRDMARLSFVKQQIKEIETARAKRLEQTHGERRTAMVRLLARVVGVGIESADLLVQEIFSRELRDRKAVARYAGLTGAPDESGQKRRERGLAKTGNARVRRSMIELAWGHLLHQKDSPLADWYRRRTADARGGTRKTMIVALARKFLITLWRLVTTGEAPAGLRLRPAA

SEQ ID NO: 53539 - protein, 347 aa, unidentified
MNISVVGIDLAKNVFQLCALGTNGSVVWNRKVTRSKFAAMLADLPKSALIAMEACSSSNYWGRYLTERGYRVALIPAQHVKPFAKRQKNDANDALAICEAATRPGIHFVSVKTIEQQDIKTLRTIRRRVVQQRTATGNQIRALAGEYGVVFPIGLRRLISAVPAALEDAENGLSIIARALLSQSLHRLHEMDRLVTDLTTQIGQLCKQLPSYSALQSIPGMGPLVSAALISEIGDGRQFKNGRQMAAWLGLVPRQYSSGGKLVLGSITKHGNNDLRVLLVHGARAVVRFAQRRSDPLGEWLRGLIARRGRHRAIVALANKLVRIAWSVLATQKRFDVALAFAPMRAA

SEQ ID NO: 53540 - protein, 453 aa, unidentified
MARRNVQVIPKPGKARAALTITHPNAAGIDIGSAAHFVAVPPDRDEQPVREFASFTVDLNAIADWLTACGVDTVAMESTGVYWIALFELLESRGFTVFLVNARHVKNVSGRKSDVLDCQWLQQLMTYGLLSGAFRPVEQVCVLRALYRQRGMLLRSQGRHVQHMQKALTQMNIQLTNVLSDIVGESGQKILRAIVAGERDGQVLGAMKNVRVRASVDEIAKSLQGNWRAEHLFALKQALGAFDFVGTQLAECDAEIELQLQRLQAHDGDPAKGKKRGRARNAPRFDLRTQLFRMCGVDLTRIDGIDVTTALAVVSEVGADMSRFPSVRHFTSWLGLCPGTKITGGKVMSGKTKRVVNRAAQALRLAAAALRSSKSALGAYFRRMCSRMDKPKAVTATAHKLARLIYTMLTKGQEYTDQGQEYFEERYRERVLRALSQRAAKLGMQMVPIAQPV

SEQ ID NO: 53541 - protein, 421 aa, unidentified
MSKRRYKSVEFKQVDWNLLQDRIEGERLVLAVDVAKEDFVATLMQTEQAALVTFKWRHPEFTAEVVERMVWLGQDKRLEAVMEPSGTYGDALAWQLRQGGVALYRVSPKRVHDAAEVYDGVPSLHDAKAAYLIGRLHLQGVSQRWREPSAERREMTAVLTRLNLYKDRRQAARNRLEAHSSRHWPESPCLLDLGSATLSALIGVYGDAEAIKNDAQGAEALMRRVGGAQLSEEKIQALLASAHRSVGVPCLAEERELLQWLAAEMSETRKQVHRIEREIEHLVDRGPTLMSMGAVIGKVSAAVLVAALGSPQDYPDAASYIKAIGLNLKERSSGKHKGQLKITKRGPSVARFYLYFAALRLIAHDPVVKRWFVHKTNRPGALKNKTVVELMRKLAKALWHIARGAVFDVNKLFNIQAVVSF

SEQ ID NO: 53542 - protein, 351 aa, unidentified
MKNYVGLDVSMKTTFICIVNEEKKIVFEAEVETDPSMIFSEIQKTGLTIEKCAIESSSLSRWLEQELLKKGLTTICVDARKMSRVLSININKTDKNDARLIAEALRCGFYTEVYSKSQEHVELNILMGSRRTLIETATKLKNTIRGHLKAFGIRLGTANNQKFSEIVIEAIKTRTGAVQVGVNGLLASFQHTIGQIQILETKIEALAREDEDVKLLTTIPGVGVITAYTFISSLGDPKRFKNSRAVGAYLGMTPTQYSSGETKKQGRVSKCGDPEVRALLNECAFVILYATKSWSCLKAWGQKIKKKRGHKKAVMAIGRKLAVLMHRMLITRKAFEHGSVKDKQETMQKVC

SEQ ID NO: 53543 - protein, 412 aa, unidentified
MEGETVIAGVDTHKDVHVLCLLDGLGRKIWSGSFGADPEGYDRLAEAIGDPGSCAVVGVEGTASYGAGLTRRLVELGYNVVEVLRPKRDKARPGEGKSDPLDAERAARKAASGRGCSVPKSQDGWVEAVRQLYVARRLAVATSTSCVACAKSMLTTAPGALRERFRGRERPRDLMPLLARGRKAGDALEESVLASLRSVAAVWKEARSQVESLDERIRALLEANAPALLGVEGCGTTTAAALVVAAGDNPGRLRGEAAFSMMCGASPIPASSGKTDRHRLNRGGNRQANWALYEIAIKRMAYDERTRRYVARRTSEGKSRREAVRCLKRYIAREVYRVLMDPNPDGAAPEGPELAKMRKAMRVTQKKAAAELGLSAATLGHLERGKRRSTKLERRYYELLCELERALPQTAS

SEQ ID NO: 53544 - protein, 326 aa, unidentified
MSTILGIDVSKDKLDLVLLSEEGKFHKVIGNDPAGFKRLDKWLISRHADRVHVCLEATGQYGDEVSEYLYGQGHDVSVVNPARIKRYGESKLHRNKTDKADAELIAEFCLKEKPVLWEPLSPDLKHLRALVRRLRDLQANYQQEESRLSSGEKDAWVIQDLTVHTEYLKASIEAIEAEIQNFTNQTPGLKEKQELLVSIPGVGKKTSARLLGELGEISRFENAPQLAAYAGLNPKGFSSGSSVHKKTRISKQGRSELRACLYMPAIVAMTHNPVIRALKERLQERKLPNMAIVAACMRKLLHIVYGVLKSQMPFDPEYDRQFNYST

SEQ ID NO: 53545 - protein, 478 aa, unidentified
MRAERLWHTRKEKKEWARRLQSHDPGLEVIHPQAAGIDIGNASHYVAVRPDRDPEPVRRFGCFTADLYRLAEWLKSCGVTTVAMQSTGVYWIPLYDILEERGFEVYLVNARHTKNLPGRKSDVQECQWLLKLHTYGLLNNSFQPVSQIRMLRTYWRQRAEQVQAAATCIQRMQKALTQMNVQLANVISDLSGLTGQLIVRAILAGERDPKKLAELRDRRVQASPEDVAKSLEGNWRPELLFLLKQEVDIYDSYRKRIDECDEELKKQLGSFASATLAASAPLTAEAEGEAQEKKAKRKKPKPAKNAPRFNLKEELYRVTGVDLTRIDGIDVMTAQTIVAEVGLDMSRWKTEAHFASWLGLCPDNRITGDKIIGRGTRRVVNRAATALRMAANALLRTQTYLGAQYRRLRTKLGAPKAITAMAHRLARLVYRMMKYGQRYVDKGAEYYEHKYRNQQLQFLRKKAAQYGFLLTEVQAQIA

SEQ ID NO: 53546 - protein, 322 aa, unidentified
MSEPILGVDIAKKKFDVALLVNGKLKHKVFTNDQGGFAELTAWLTKQGVDHVHVCMEASSTYGDELAIYMHDAGHTVSIVNPARIKGFAQSELMRTKNDKVDAGLIARFCLAMHPDPWTPAPPEIRQLQALVRRVDALINMRTQELDRLGTAQDTIEHSIREHIAYLDKQIDALKQQVAALIKNDPDLKIKRDLLKSIPGIGEATIAAILAELPVFERCDRVQKVVAFIGLAPRQFISGSSLKGKPRLSKVGNARLRKVLFMPALVSIQCNPVIQAFYHRLKGKEKNGKVIVCAIMRKLVHLIFGILKSGKPFDPNYAPYCA

SEQ ID NO: 53547 - protein, 337 aa, unidentified
MEYFAGLDVSMEETHVCVVDRDGKVILETRTPTAPKTIAAALAKGPTVERVLFETGRMAPTLFHGLTALGMPVVCVESRQAYQALRSMVTHKTDRNDARGLAHLARAGFFKPVHVKSLPSHAVRALLIARKKLVGQRVTLENQIRGLAVAFGVRLPRGLSSGFAEKAMAAGCGIPGLDGAMRGLLAARDAILKAIVAINADMKSLERSSAACRRLMTIPGVGRLTALAFVAAIDDLDRFRRSRDVGAYLGLVPRRYQSGEIDYTGSISKCGDGRLRTLLYEAANVMLTRYRGSLALKTWALDIARRSTMRKARVALARRLAVIMFAMLKHGAEFEPA

SEQ ID NO: 53548 - protein, 355 aa, unidentified
MDKIKTNFAGQTVYVGMDIHKVSWNLGIHLNDMFVKNVHQKPNPTMMANYLKQHYPNARYKAAYEAGKFGFWIQRQLTSLGIECLVVNPADIPKSQKDTLQKTDPRDARNIGLRLQTGVLHSIHIPDEQQEADRVLFRHRKRIWKDLTRCKNRIKGCLAFSGIDIPERYDNASWCNNFIVWLQQLDCIQKSRRTALNYMVAQMQFLRKELLKISNDVRAMMREQRYKTNYYLLRTIPGIGPLTAASILVEIGDVKRFETFYHLNSFVGLLPMEHSSGDNESKGILSVRKHRQLRSDLVESAWTAKRTDPAMALYFQEQIKRKDSKIVIIKIARKLLSRIRYVLINQTSYEYGIVK

SEQ ID NO: 53549 - protein, 402 aa, unidentified
MKKSSRMSVIHPHAAGVDIGAEFHVVAVPPDADAAPVRTFQSFTGDLHRMSGWLKTCHITTIAMESTGVYWLPAFEIPEAAGFNVILVNARDAKNVPGRKTDVNDAQWLQKLHSFGLLRASFRPEHDISVLRSYLRQRERLTEYRAAHIQHMQKALMQMNVQLHHAVSDITGVTGLSIVRAIVSGERDPSVLIQYRDVRCKKTPEVLQQALTGNWQPEHLFAPEQSVAFFDFYQEKIRECDDQIETSLLQLSTGTEEPEGVLPSARHRTKQPNQLSFDVRPLLWKITGADLTQIHGFGPYLALKFVAECGTDMNRWPDASHFTSWLCLSPGNKISGGKVLSSKTRRSSSRIAAALRLAATTIGRSDTALGAFYRRLSSRIGKAKAVTATARKLAILFYNALK

SEQ ID NO: 53550 - protein, 312 aa, unidentified
MDAIVVGIDVSKDRLDVAVRPTGESFVFKRTGVGIEDLIVRLEALSPKMVAIEATGGFEAVVAAGLAGAGLPVVVVNPAQVRAFAQALGKRAKTDPIDAAVIAHFAEATKPKLRHMPDEMTRHLAGLVARRRQIVEMIAAEGQRARRMSDKRLIKSIARLRKALEKELSALDVLIGDQIRGSPVWAEKEDLLASVPGVGKTIARTLIADLPELGSLNRRQIAALVGLAPWTRQSGQWRGKSFIGGGRKSVRNSLFVGAMVAARYNPQLKSFRDKLVAAGKPKLIALVAVARKLITVLNAILQDRRSWQQISA

SEQ ID NO: 53551 - protein, 390 aa, unidentified
MIYVGIDVAKDKHDCCILGPDTEELFQVFTIRNNSDGYGELFHKIESVSKDKSQIKIGLEATGHYSYNILGSLLDHGYHTFVINPLHTNLYRKGQSLRKTKTDKVDARSIAEMLVTDKTLKPYTGTSYHSEELKSLTRYRFELVKERAKLKTSVSRLVNILFPELESLVPTLHMNSVYRLLQELPGAYFIASSNLTHLKALLADASKGHYGREKTIEIRETAKSSIGSLMPAKSMELRQTIHRIDTLTSDIKEVEQSIQKIMDECGSPITTIPGIKYRMGAMILAEIGDFTRFSNADQVLAYAGLSPSTYQSGKLISSYARMEKRGSKYLRYALFNAAIYVSGWDERFRLYLSKKRAEGKHYYVAISHVIKKLVRTIFRMEITHTSYQPL

SEQ ID NO: 53552 - protein, 430 aa, unidentified
MLSKYVGRQTSSIENDITKTRNHSRQRGNIMRAVFGIDVSKASSEVAILVNGEKVHGYTMSNDALGFARLLGDLRTVHKPEIIFEATGVYSRRLQTFLEDNGYAYTRLNPLEAKKQLDSLRVRKTDQIDAEKLAQSQFVLNRKPTYVQEEVYQELRDLSRFYQNLTEDIVRAKNRLHKVLQVTFPEIETVLSKPTGEQYWNLVTAFPCKDFVLELSKDELLESIRQSTSKRISDKRVAYLAEKLTALANQSYCAVKKTSPILEEVRYYGKELLRLSEQRQTVLDQMVELAQPLPEYDILLSIPGIAETTATSIIGELGDIRRFQSANKINAFIGIDLRHYESGNFLAKEHITKRGNPYARKILFKCIHNIASASHTNPCHIADFYEKRKRQSQTTSTKPHTIASIHRLIRTMYYLITHNKLYDYRSTQNQ

SEQ ID NO: 53553 - protein, 362 aa, unidentified
MNYVGVDIHKRYSVLCAVDEQGCRLREGRVEGNAADGFARFFSGLSGPSKAVVEASWNWGVIHDKLEELEQVEEVVLAHPYKTRLIADAQIKTDRLDAYALSTLLRGNLVARAHIPRRLTRARKNQLRQRLYWARLRTMLRNKIHALLDRQRDLELPQCSDIFGVRGLGFLRRLKLSEPDATLLQEQLALHDLIGQQMKAQEKRIAAEFGSEAMHRRLMSVPGIGATLAAVIACEIDAIERFTNADRLCAYAGVVPTTHNSGGKVAHGRLLPFCNKWLRWALVEASWVAIGCSPYFGTLYKAHRARGKKANHVILIVARRMCRIIWQLLHDQRDYEKRSLSSRVNFPGCSALALTVNPATAP

SEQ ID NO: 53554 - protein, 328 aa, unidentified
MYFIGCDVSKATLDAAWFNETRGNWVEQHKIPNSRGGWRSVLKHMLTACECEAGEICLVVEATGVYHRRLADLAYGTGVRVVITNPGRAAEHARSNNRLNKNDRLDARGLQQYGRQLDNAHDYVPDSPEIQALRAILSRLRQLDKDLRRERNRLEKCAFIAASQVLAASIRRQIRQLSQEHQLVQGQIDRLISECHPLRHIQALLMSIKGVGKITSQWLLPLLYREQFASARQLAAFLGLTPVHRTSGTSLRKSGRLSGRGDRYLRSRLYMPAVCARRHDPAMAAFYDQLIRRGKKPKQALTAIMRKLVHVAYGVVKNDQPYRCPVPA

SEQ ID NO: 53555 - protein, 347 aa, unidentified
MGQYIGIDLHKAKSFVTRLNGRGRVLEQVELPHATGALQQYLERVPPDTRIAVEATGNWMWLYELIEERHPDLVLAHPLKTKAIASARIKTDKIDATTLAQLLRADLVPAAYIPPRAVRDTREILRYRASLVRLRTQVKNKIAAILSKTGLQTPTKTACGVKSRRFLATAVVRPCYRLGLDGYLRLLEALTAEIHTVTQRVEAQAQADPQAQLLRTMPGIGAYSALLIVSEIGDVHRFPDSRHLCSYAGLVPSVHASGGKTRLGRLTKQGSCWLRWILVELSLHAINGAPQFRQLYYRVAKKHGGNTGRVAVARAMLKTIYAMLTHQEAFRPMGQGSTGQRPRVMAG

SEQ ID NO: 53556 - protein, 312 aa, unidentified
MEAKFVGIDVSKATLDVDCLPVITPLQFSNDASGIAGLVKWLVGSGVERIVLEATGGYEVAAASALAAAGLPVVVVNPKRVRDFAKAQGILAKTDRLDARVLALFAQQIAPPVRALADAAQRDLAELLDRRHQLVVMRTQEQARMATVLPVARSDVKQHIAWLDKRIRKHEGVLLKRLRANDIWDAKVRLLDTVPGIGPVNLFTLVGRLPELGTLNRQQIAALVGVAPFNDDSGKRRGQRYIRGGRADVRCALYMATLAAKLWNPVIAQMYDRLIAKGKPFKVAMTACMRKLLTILNAILKTEKPWEDRLAT

SEQ ID NO: 53557 - protein, 368 aa, unidentified
MIVIGVDTHKRTHTFAWVDASTGTIGGERTIVATDAGALEALRFVQGLDGQRVWAIEDCRHVSGRLERSLIAFGERVIRIPPAMTAASRRVQRRPGKSDPIDATAVAVAALREGVERFPAAFLDEQAMEIRLLHDHRDQLIVERTRLVNRLRWHLLAVDPELEASLQPRAFEQARVRARVLRRLARHGDSARVRIARELLKRVSVLTRQAHDLEAELKLLTSMHSPQLLAESGCGPITAALLIGHTAGAERFPTDSSFARHAGAAPIPASSGNTTRHRLHRGGDRQLNRALHTIALSRARNDPQTRAYLARKAAEGKTRREALRCLKRHLARHFWKLLYTTESTPSPPATTSHPAVDVGAPALMICTR

SEQ ID NO: 53558 - protein, 348 aa, unidentified
MVIIGADLHKRTHTAVAIDEAGRKLGQRTVGATPEGHPELLDWSRGFGERRWALEDCRHLSRRLEADLVRSGESVVRVPPKLMAGARRGGREAGKSDPIDALAVARAALREPDLPVARLDRPERDLRLLIDHREDLVTTRTQVINRLRWHLHELGLVEPAPRSLDRGPVLEGLRTALAGQPGTVARIARELVEVVAELTHSIGALGREIDALAGQLAQSLLDLQGCGGLSAAKLIGETAGIGRFRSRAAFARHNGTAPVPVWSGNETRHRLSRGGNRQLNVVLHRIAITQIRLGGAGRVYFEHRLAAGDTKTEAIRALRRRISDEVYRRMRQDEAAQTTQRALLAAAA

SEQ ID NO: 53559 - protein, 340 aa, unidentified
MKFIGMDAHSRTSTFIVLGKSGRVLRRAKVATAESEVLGFVRSVKGEKKLTFEEGVMSQWLYLLFKDEVDELVVCQPREKEGAKTDEIDAGEIADLLRVGRLKAVYHEDSELMHLRTLVSGYEDVIEEVVRTKNRYKALYRQVAIPTKVSGFYESTEMLGLLDTDVRRYVGCTLFEQLSLLEEQRRGYLERFEENVRRYTPIKLLTSVPGIGPIRANQIVAVMVTPHRFATKYNLFAYAGLTKHVRESDGKEYGKKRARGPRMLKEAFKAAALNAIRSNTAFRRKYESMRAAGKSDRSARGAVSKMLAATVRGVWKSGKKYDDKHMEVTRRRSRDCHSGT

SEQ ID NO: 53560 - protein, 442 aa, unidentified
MEILYPYVGAVDVHKRQVTVTARTPHPGDGARWETTRTFRTFYGELLAMARWLVVERGVTHVAMESTGPYWWPVHSALREVGGPGLVIEVVNAAHVKAVPGRKTDVRDAQWLAQLMEVGLLRGSFLPPEEVRRLRDFTRYQTKLTEERSREKQRLLKVLEAAGIKLDNVASDTFGVSGRSMLEALVAGERDPVVLAGLARGVLRTKTSDLRLALAGRFTAHHGHLVALHLARIDHLDQMLTQVKQTIGRVGPDPTGGLAGTFAAQIDLLMSIPGIGERAAIAVISEIGVDMARFPTAKHLAAWAGLCPGNHESAGKRRSGRRRKGSAHVCSILVEAAFAASRTRSRIGARYHRLHRRFGGRANPGAARKAAFAVAHTLIKVIWSVLASGQPYTDLGADFYTHRVDPQAHTRKLIAQLEALSGKRIVFCDPADDPGGGQHHAA

SEQ ID NO: 53561 - protein, 391 aa, unidentified
MIYIGIDVAKDKHDCFITNSDSEVLFKAFTIFNNLDGFNDLYQKIESVMDDVTKVKVGLEATGHYSYNLLGYLIDKGLPTYVINPLHTNLYRKSLSLRQTKTDKVDARTIASMLMSDVNLKSYSDTSYHNEELKSLTRYRFDKVKERAKLKTSVSRLVCILFPELEKLVPTLHMASVYALLSEFPSAKHVATAHLTRLTNLLSESSKGRYGKDTAITFRDSARASIGSNMPAKSLELKHTIKLIQELDSEIDEIENEIKIIMDEINSPILSIPGINYRMGAMIIAEIGDFNRFDSPDKILAYAGFSPSTYQSGQLDGAYAHMEKRGSRYLRYDLYNATKYVCHWDPTFAAYLAKKRAEGKHYNVAISHAVKKLVRVIYHLEKTKQQYIKAA

SEQ ID NO: 53562 - protein, 381 aa, unidentified
MQTKGTIINFHGQNVYAGIDVHLNSWKVTIMLENVVHKTFSQDPCAKTLADYLKKNFPGADYFSAYESGFCGFSVHRELIKHGINNIIVNPADIPTKDKDKKQKEDKRDSRKIAKSLKNGDLEGIFILSTKMEELRGLVRYRKTIVKEIGRNKNRIKSYLYLNGIDIPSELSSASKYWSGKFTQWIKTIEMSTIYGKMVLQETVETVEYLRLKLLKINRELKNIFKNSEYSKQLEVIQSIPGFGLIMAITLLSELEEFSRFTNLDKLCSYVGLVPTTNSSGDNEKTGSITSRSNKSLRSSIIESAWVAARIDPSLAYSYNDLCKRMKPNEAIIRIAKKLLSRLRYLIKNETEYSYSLKNIVNIGNKNTSKLGNCCPALAAN

SEQ ID NO: 53563 - protein, 345 aa, unidentified
MDHFAGMDVSVKETSVCILDDAGKIVKEVKVASEPQALLKVLGNPAYRFKRIGLEAGPLSQWLFSALAEAELPVICVETRHMQAVLKAQINKTDRNDARGIAQMMRAGVYRPVHVKTLRSQKLRMLLTHRKLLQSKAIAIENDLRGTLRNFGLKVGMVRTARFEVRIKELVENLPDLAALVEPLLIVRRVLREQIVILHRRLLAIVRDDEVCRRLMTTPGVGPVVALTYRATVDVPARFRKSKSVGAVFGLTCSKYQSGEVDRSGAISRCGDEMMRAMLYEAAHTMLVRSTKWSWLKAWAMKIARHRGMKKAIVALARRLAVIMHRLWVDGTEFRWTREPAATAA

SEQ ID NO: 53564 - protein, 407 aa, unidentified
MSNVYCGIDWADDHHDVALVDQQGALVVSLRIGDDRSGLEQLLDVLFEYGDSAEHPIPVAIETPRGLLVAALRATGRAVYAINPLAASRYRSRRSVSNAKSDTADARLLADILRTDRDAHRALPADSELITSLVVLTRAHQDAIWDRRRLTNRLRAHLREYFTAALRAYRGTGTLGLESIPARAVLAAAPTPAAAAGLTRERLRELITSGRRTRRNIDAELDRLVTLFASHDVLRQPAQIEQAMAHQTLALLRQLDAVCASIADLATAIETAFAQHPDAPIITSFPGLSTVSGARILAELGDDRTRFASARCLKAYAGSAPITRASGRSRAVTARVVKNQRLASAGYMWAFAALHHPEVRTHYDRRRSSGERHNAALRNLFNKLIGSLYHCLQNRTAYDSSRAFATP

SEQ ID NO: 53565 - protein, 311 aa, unidentified
MNSEAYVGVDVSKVSLDVKVLPTNETLQISNNNGGINELIKRLTQIDPTLIVFESTGGLEMLAVSNLIENQLPVVVVNPRQVRDFAKATGRLAKTDAIDADTIARFARDIRPEVRPIKDEHTQLLSALNARRRQIVDMLVAEKNRLSRAPKPNKKSIQKHIQWLEKSLTDINKDIDKTIKKSPIWRENDRILQSFKGVGPVVSATLLCDLPELGTLNRKKIANLVGVAPLNCDSGHFRGRRRIKGGRANVRRKLYMAAVASLRHNPLMKDFYNRLVEAGKPPKVALTACMRKILTILNAMMRDRTYWNAIW

SEQ ID NO: 53566 - protein, 342 aa, unidentified
MGEVTIIGVDLAKNVFQVHGAAADGSVLFRKKLSRPQFIRFMAEQPPSCVAMEACASAHHWARQMTWQGHEVRLIAPHYVKPFIKRQKNDAADAEAIVEAALRPTMRFVEPKTADQQARAIAFRTREQLVKQRTETINALRSHLYEFGHVAPTGIGFVPRLAKMVEDPDTDMPQLARDICRMLLEQIAHLTERLKDLKARIETMSDEAEMPRRLRTMPGVGPITALAVETFAPPMDQFCRGRDFAAWLGLVPRQHSTGGKQRLGKTSKMGQRDIRRLLITGAMAVIRWATRRGSPKGSWLARMLERKPLSVVAVALANKMARGIWAMQTRGEDYRGPVLIGA

SEQ ID NO: 53567 - protein, 351 aa, unidentified
MVTVGIDPHKHVHVAVAVGDDGRPVGNPLTVKNDALLIITLLKWVRSITDGTATWAIEDGRGFARRLADGLLLAGQEVVWVPARLAAAHRRLHEATGAKSDPIDAAAVARAAIATPGLDRHRIDERVRELRVLVDYRADLVKRRTMAINQLKAQVHLWLDQTPGDLTRARNVNALATLISAAQLSPHVRQALADMTAEIAALSRHVGDLDAAIRKLVSPLATALLQVTGISYNSAAVLLAEIGDITRFASSAKLARYAGSAPIPVYSSDKPRHRLHRGGNRRLNSVLYTAAIVQKRRTLEAQQLLARHEPGKGSRGARRILQRHLADVIYRAMTDDQATWQHQIIRHELAA

SEQ ID NO: 53568 - protein, 341 aa, unidentified
MSTLRYFVGLDIAAETFMAAIGTTPWKLLVKAKQFANAPDGFQQFDSWLREQNCPLEQTVVCMEATGVYGEALAYYLVAHQYAVAIEPPLKVKRAFKPHGPKTDAVDSEQIAEYACRYSDELMLWQPPSELVEHLQVLLSTREQLVQQSTAHQNALRALRRKAVRIAFAEQVYEQMITETRSRTKALEQEIQRLIDQHPTAHRLLTWLVTIPGVGLLLAAHVLVLTQCGTRPFPSPKLAAHLGIAPLAHESGTSVYAHPTSRHYGPSQPRKLLHLAARSVSTHNEHFRAYYQRKVAEGKAKKLVLNNVANKLVRIICAILESQTEYDANYDGRRKPALAKN

SEQ ID NO: 53569 - protein, 350 aa, unidentified
MNVNHYIGFDVHKKSVNYCVKTADGTIIDEGRLRATHDVLRRWAGERPEPWHGAMEATLFSGWIYDTLQPFAAELQMGHPALMKAIAASKKKNDKLDARKIADIVRCNLLPACYVAPVEIRELRRMLRYRNLVVGQATRMKNKMSGLLMEVGAEYNKQRLHGKQYFTALLDTVAEVPDSVKDLLRLSRGAMETFEATQQQLLARLRKDPLLSRRVMLLESIRGVGEVTALTWALEVGDPHRFSSVAHAVSYCGLTSALVSSADKQQRGPLSKQRNAHLQTVLIEAAKLAPRWNPQLAALHARELARGNRNRATLAVARKLVAYLLAVDKSGQPFEVRNPLVAETEAQEVA

SEQ ID NO: 53570 - protein, 338 aa, unidentified
MMQKYSIFIGIDLSKRWFDVALYFKGQPGKMPHQRFIQSKEGYASFINWIKTALVQANVEGQWLCCMEHTGVYSLSLCHYLDQQAIAYVLENALRIKRSSGLRRGKSDKTDAMAIAEYAYRYQAQLSQVRPLPKEGLLKLQALLSLRSRLIKYRKGLAVASQELNGFIQIHISLSIAGYTQQVLQTIDATTKEVMNQIRQLIKQDSDLETKYQLLLSIIGIGPVIAAHLLVYTNGFTAFDKGRAFACYIGVAPFKQQSGTSLQGPDRISQIANHQLKALLSNAAMVAVRYDPQLKAFFHRQKQNGKEPGWIYNAIKNKIVHRVFAVIRRQTPYVKLDF

SEQ ID NO: 53571 - protein, 347 aa, unidentified
MPVTIGVDPHKASHTAAALDEHGHLLGQQRITATLEGYQALRQWAGQWEDRRWALEGAHGIGRALAQRLVGDGEQVLDVPAKLAARVRVLSVGHGRKSDPHDAISVAIAARSVPCLRQVGVEDQAVVLHLLTKRRQDLVAARTQTINRLHRLLMDLVPGGARRNLTAKRAAALLAAVTPAGQPALTRWELAAELVADVRQLEERIAAVEARIKTAVAQSNRTLLELFGVGPVLAARFLGEVGDVGRFPTKHHFAAHTGTAPLEASSGQVIRHRLSRAGDRKLNHALYMMAMVQVRRPSAGQAYYRRKLAEGKSPKEALRCLKRRLSDAVYRCLLADQHRQPSPVGLA

SEQ ID NO: 53572 - protein, 371 aa, unidentified
MEQPTRFIGMDVHKETIVVAVTAAGDAGKATPYGTIPNTTAALEKLVKRLRKVGTGPVKFCYEAGPCGYGVYRTLTRIGEDCLVAAPSMIPRRSGERQKNDKRDAGSLAVLHRGGLLTSVWVPDAAHEAMRDLVRARLAAVCAVRTARQQLSAFLLRHERLYAAGRRSWTGAHRGWLADQRFERPAQQIVLEECIEAVRLAEQRRDRMDAHLHAELPSWSLFPLVQRLCALRGFDVIAAAGAVAAMGDPTRFINARDFMAYLGLVPSEHSSGQRRRLGAITKTGDVHARSVLIEAAWSYRFPARITRAKLPAIEAVPETVRQIAWKAQTRLCHRYRRMLARGKPKPLAVAAVARELAGFVWAIAQLPDDVV

SEQ ID NO: 53573 - protein, 528 aa, unidentified
MHAPGVHEETVLPYKGNGSAEMTEMPLVRARDAIRRHGVSPLLSLVRESSATVVSGVSRIPFERSSRIRRFPWRCHSSTMVEQAMAMRKRENEVFPNAAGVDVGASSHWVAVPQHLAEQADCEPVREVGAMTDDLNALADWLVALGVDTVALESTGVYWIPVYEVLEQHGLTVWLVDTRQLKYVPGRKSDVQDCQWLQRLMSLGLLRAAWRPNGDVCVVRAVARQREVLLIEQASWVQRMQKALVQMNLQLTEVLSDVMGQTGQAIIRAIVAGERDPKVLARHRHSRIKASAEQITKALTGNWREEHLFVLGQALAMYDDIARHLLECDAKLRTLLAERSASCVDLGKAPRASAKARLEFDVRQALANWAGVDLTRINGLGVTAVMKLLSEIGPDLSRFASVKHFCSWLGLCPGTKISGGKVLSSTTKRSANRARQALKMAAMSLAHSDSALGAFYRRLCARMDKPRANTAVAHKLARMVYFMLTRGEAFVDQGQQHYEEQQRQRSIAALKRRAAALGFQIHPVEVAA

SEQ ID NO: 53574 - protein, 380 aa, unidentified
MTTSRAVLRSKDTTPSSALYMSFDLGDRQWHLSFGDGRSGVSRYTVAAGDTAAVADRIVKAAARFKTRPRALVHSVYEAGRDGWWFHRWLCELGVDNIVVDPASIEVNRRARRAKTDRLDADKLLAMLIRHHAGERVWGVLREPSRQAEDARREHRELERLTHERVAHSNRISALLVLHNLRPGVVIGGREWPRWWNTHRDQVPELLRAELERECERLKLVKDQVRSIEAAHRRDIAQGKQPLVEQLARLSAIGPKSAWALVKEVFGWREFSNRRELASSLGLVPTPHASGTIEREQGISKAGNRRVRSLLVELAWNWLRLQPDSELTQWFDRRFGSSGGRQRRVGIVALARRLAIALWRYLKDGEIPAGASLKLSASRV

SEQ ID NO: 53575 - protein, 318 aa, unidentified
MPESIVVGIDIAKKTFDAAMGVAGHTETFSNDDAGHDALLAQLAQRPVDLVVMEATGGLERDLACALDASGFAVAIINPRQARSFARAMGYLAKTDRIDAKALAELAQVISRHAERERFITPLPSPDQQALQALVARRRQLVAMHVAEHQRLSVCHAAAQKSIEAIILAIRAQIDDVEAELARHIQTHHADLAKRLESVRGVGPATVASLIADLPELGHLSRRQISALVGVAPFNRDSGQMRGKRAVFGGRGQIRRNLYMAALAAIRFNEVIKCFYNRLVAVGKPKKVAIVACMRKLLTILNAMVRTGKSWDGSYHLA

SEQ ID NO: 53576 - protein, 388 aa, unidentified
MSETNRRFVAIDVHKRYVMVGAVNGEQDVVLHPHRVSIDELGEWAAAHLQPKDAVVLEASTNVWPIHDLLEPLAAHIVVVHPNHVKIIAASSVKTDKRDTLALARLLAANLLSSVWVPPIHVRELRGLVNHRKQLVRQRIAAKNRLHSVLHAYNIARPDGDPFVETKRDWWESLPLSGSVKLRVGHDLALIDYLSTLIGEADAELARLSVSEPWADQVPFLIQLSGIGLITAMTILSAIGDIRRFPTAKKLAGYSGLGTRVHASGQTHYTGRITKEGRRELRTVMVEAAWAAVRHHAHWKAQFEALAARIGKQRAIVAIARKLLVVVWHVLTNHTADRHAQPDAVVRKLLLWGTRHRLATSLGMSRRLFVLHHLRQLGFSQEMAQAYA

SEQ ID NO: 53577 - protein, 350 aa, unidentified
MATIARTITGGVDTHLDVHVAAALDERGALLGTESFATTPRGYEALLAWLQSFGTLELIGVEGTGSYGAGLTRHLHRHGVAVVEVDRPNRQKRRRQGKSDTLDAVSAARAAQGGDANGSAKTRTGNVEAMRVLRVARSSARRSRTQAINQMRSLISTAPDELRSELRDLSIYRVLELASAYRHTGRTDVTGVTKLTLRTLARRALSLEDEVKEIDRLLKVLVAETAPELRAIDGVGTDVASALLVAAGDNPERLKNEATFAKLCGVSPLDASSGKNERHRLNHGGDRQANSALWHIVFTRMVNDARTKHYIERRMKDGKTKKEAMRCLKRYVAREVFAQLPRSEFALDNP

SEQ ID NO: 53578 - protein, 245 aa, unidentified
MRAAGIDVGKANLDLATDGESGVARFANNRAGIAKLVKRLVAMGAERIVVEATGGYEEPLLEACCDAGLWIARVNPRQARDFARATGELAKTDAIDARLLALMARMFGARLRRHVAPPVWQRELRDWLRRRGQVVVLIQAQKQQAAMAPAAVRKLVARTTAALTRELVAIEREMKALIQKHSSPALRSSKGLGPVFQATMLALLPELGHLNRRQIAKLTGVAPMNRDSGQGQGMNRPGFSGGSNL

SEQ ID NO: 53579 - protein, 393 aa, unidentified
MICVGIDVAKDKYDCFILSSEGEVLADVFTIQNNAEGFDTLLQTIRRCSRPEDKIKAGLEATGHYSYNILGFLLNEGLDTYVINPLHTNLYRKSLSLRKTKTDRVDARTIAAMLMSDVDLKSYTDTAYHNEELKSLTRYRFDKVRERAKLKQSVSRLVTVLFPELEKLVSTLHTASVYALLSEFPGAKQVSEAHLTHFKAVLYDASKGRYGSDMATTLRDAARCSVGSVMSAKSLELRHTIRLIHELDAQIEDIEAAIQSMMDEIQSPITTIPGMGVRMGAMILAEIGDFSRFDSPDKILAYAGMSPSTYQSGQLSLSGAYSHMEKRGSRYLRYALYNATKYVCLWNPTFAAYLAKKRAEGKHYNVALSHATKKLVRLIYALEKSKRPYSTAA

SEQ ID NO: 53580 - protein, 352 aa, unidentified
MSRKSLPCGITTIGLDIGKNTFHLIGFDRRGAVALQLKLSRAQLERRLANVPACLIGMEACSGAHHIGRELESLGHDVRLIPAQYVKPFLKGHKNDYRDAEAIAEAVQRPTMRFVRIKTPEQMDLLALHRVRSRLVGQRTAVTNQIRGFLIERGITVRQGLMPLRRALPEILSANSGPLSPRMVALIADLTADWRRLDERIAGVSADIEALAEQDDGCQRLMTVPGIGPIISSAVVAAIGNGAGFKQGRDFGAWLGLVPRQESTGDRTILGKISKRGNKYLRTLFVQAAHVVLIRRPNTARHALWPWIVRASKRLHRNMLAIALANKLARIAWAVLARGHTYQPRIAADAAS

SEQ ID NO: 53581 - protein, 352 aa, unidentified
MEQIYVGVDVSKERLDVHVRPTGEAFAVARNGEGLDELNQRLRGLEVTLVAVEATGGFETIVAASLAGAGFRLAVVNPAQVRAFARALGKRAKSDPIDAEVIARFAEATKPEARPLPDEQTRALGDLVARRRQIVQMIAAERQREKRTRLRRVLRSIKNVLAALEKALNDVDREIDDSVRGSPVWREKEDLLASVPGIGPITAHTLIAEMPELGSLARREVAALAGLAPWTRQSGQWQGKSFIGGGRATVRTALFMASLTAIRHNQPLKSFHHRLIDAGKPKMVALIAVARKLLTILNANTGTTNFGNNKLTGQARLASFALVTILVTAGAADRPVGARGLRRHCLWGTGLA

SEQ ID NO: 53582 - protein, 427 aa, unidentified
MEEPTKSKQVGWGGYAYFLGLDWAQDHHAIVVLAPDGQKVLDLQITHDAEGWQSLRKKLVERAGADLSIVAATVETTCGPAVERLFELGCALYPINPKAGQRYRERKVPGGGKSDPLDAWCFADALRTDGHAWRRLAPEDPRIQELRLLCRDECHLIRQRTALVNQLRQALLEYYPAALEAFDDWTVPGPWDFVLRFPTPAALVQAGRRAWEKFLHSHHLYRPTTYAKRLEIFDRAQQFCGTAPVTRAKSLLAVSLAQQLGTVQRQLNEYRERITQLFQEHPDHEFFGSLPGAGGTLAPRLLSECGQDRQRFEDHEALQCYAGTAPVSFQSGQLHVVRFRRACNRDLRAAVHLWADCSRKTCTWAQVYYEHKRQQGKSHACAIRCLGQRWLKILWKLWQTRQPYDEQVHTRNQVRHGSWVLTLAAAK

SEQ ID NO: 53583 - protein, 433 aa, unidentified
MTTAKLWRNRKERKDWARRLRSEDPGLEVVHPHAAGIDVGNSAHYVAVRPDRDPEPVRRFECFTADLYRLAKWLKSCGVKTVAMQSTGVYWIPLYEILEEHGFEVYLVNARHTKNLPGRKSDVQESQWLLKLHTYGLLNNSFQPPAEIRVLRTYWRQRAEHVSGAATCIQRMQKALTQMNLQLANLISDLSGVTGQAIVRAIIAGERNPQKLAELSDPRIEASREEVAKSLEGNWRPELVFVLRQEVEMYDTYQRRLAECDQQLQKHLASFGDTVLPQSAEAEPREKKAKPTKNAPRFDLSSELKRITGVDLTRIDGIDVMVAQTLLSEVGMDMSRWKTEAHFASWLGLCPDNRISGDKLLGKGTRHVVNRAATALRLAARNLIRSRSYLGAQYRRLRTKLGAPKAITAMAHRPRTTRLSYAEVRSTIRRQRH

SEQ ID NO: 53584 - protein, 408 aa, unidentified
MNPLYVGIDVSSKSNVVYLMLPNGDKHSNFSVANSHEGSTLLVKKIYSALTSHSLDTVLIGLEATSVYGDNLVYFLREDATLAPFNRKIHVLNPKQVKKFHDTYNDLPKNDYVDSFVIADCLRFGRINKEVYIGDYRYKALQNLTRARYFAVSNLIKEKQRFMNILFKKYSTMTQEKVFSDAFSTTALAVYDEFESAEALANMDLHELTDFIIEKGKNRFPDPDAVAKAIQKAARSSYRLPKTMNDSVNQVLSISITSMKALESQIKEFDKAIIALMELLPNVLISIPGIGPVYSAGIMAEIGDINRFDNQASLAKYAGLAWKQHQSGGFEAEVTRLIPSGNRFLKYYLCEAAFSLVRCDKEYSDFYHLKYKEVNRCQHKRALALTARKFVRLVFRLLKDNRLYCPAK

SEQ ID NO: 53585 - protein, 337 aa, unidentified
MKHSVIGMDIAKRVFQLHAVDRDSGEIERIKLKRSELREFFAQRPASWVAMEACGSSHFWARELKSLGHEVRLLAPKSVRPFVLRNKTDQADARAIWTAAQQPEARFVAIKTEAQQAILGLHRLRAQLLKFRVMQTNGLRGLLYEFGEVLPEGYQALAKALPNSLARVAERLPAMLIESLREQWARVKAMDADIMAIERRLASALRATEPCQKILRIPGVGLLTATAAVAAIGEATTFKSGREFAAWLGLVPRQTGSGGRVRQLGLSKRGDTYLRTLLIHGARAVIARSGRSPWVVALLKRRPYSVVVAALANKLARTIWAVLAKGRAYDPVTLRAA

SEQ ID NO: 53586 - protein, 315 aa, unidentified
MDKSIEFPQVVDRCCGLDVHKKVIVATVEGTGIKRETREFESTTRSLTELKEWLLELGVTHVAMESTGVYWKPVINILESGSFSLMVVNAQHIKYVPGHKTDKKDSAWICKLLHAGLLKGSFIPDRAQRDLRDLTRYRRKKVQEVTAEKNRMMKVLEDANLKLSSVFSNVSGVTCTRVIDAILDGHTDPDYLTSLCTHGKLQSTKEQIHDAVEGRFTEHHKFMLKAIRRSITSLEEEIAKLEAEIDRRCEPVRAEIERLCTIPGIDQTGAKELLAEIGVDMEVFFTAANLAAWSGVSPGNNESAGKKKFARDSRE

SEQ ID NO: 53587 - protein, 320 aa, unidentified
MTKKKSKSFIGIDVSKQHLEVAVHESDCQFRCANNVNAFGKLIVELIDWRPALVVLEATGGLEIPVVNALHAAGLPVVVVNPRQVRDFAKALGQLAKTDRLDARVLAHFAAAIKPPLRPLKSKEEQELAALTGRRDQLIEMLIDEKNRRASAASDTVRDQIKAHIDWLEECIAELDEQLKALLQSSAPWQAKDDILQSVPGIGPVVSFSIIADLPELGTLNRQQISKLVGVAPLNRDSGQQRGTRHIYGGRAELRRVLYMAALSASRHNLVIKEFYERLCAKQKPFKVAITACMRKLLSIINVMVRDNTCWKSPQQTVSA

SEQ ID NO: 53588 - protein, 344 aa, unidentified
MEHIGLDVHQRESQLCIVTEQGEVLEQRIRTERGRLAEVLGGRARAKILLEASTESEWVARCLEQMGHEVVVADPNFAPMYGGRNRRVKTDKRDARALADACMTGTYRKAHRTTESRRQLKAQLAVRDELVRERARHIVLIGALVRQQGLRVTTGSAETFLARLTKVDLSEEVRNVVAPLMAVMRTLNEQIQVVDAKLERLASDDEQVASLCTMPSVGPVTAVAFLANVDDAKRFAGAHQLEAYLGLVPSEMSSGEKQRGGRITKVGSPRMRALLVQVALSTMRLRKATTAGLWEWASRIVVRRGRKVAAVALARKAAGILYAMMRDGSHFKPRVSREAMTNAA

SEQ ID NO: 53589 - protein, 279 aa, unidentified
MENIALIGIDLGKNSFHIHCQDRRGKAVYRKKFTRPKLIEFLATCPATTIAMEACGGSHFMARKLEELGHSPKLISPQFVRPFVKSNKNDFVDAEAICEAASRPSMRFVQPRTESQQAMRALHRVRESLVQDKVKTTNQMHAFLLEFGISVPRGAAVISRLSTILEDNSLPLYLSQLLLKLQQHYHYLVEQIKDLESQLKRKLDEDEVGQRLLSIPCVGTLTASTISTEIGDGKQYASSRDFAAATGLVPRQYSTGGRTTLLGISKRGNKKGTVANSRW

SEQ ID NO: 53590 - protein, 349 aa, unidentified
MGVDPHKKTHTAVAAADNGRPLGEVTVPARHRGHERMLEWARGLDVDRVFAIEDCRHVSGSLERFLIERGEKVVRVPPKMMAGARRAARVAGKSDPIDALAVAHAALRSPDLPEAHLEGPERELRMLVDHREDLVNERTRIEGRLRWHLHDIDPTIFVPLRSLGAFKWLDKLEELLAKRDQTVQVEIARELIEDCYRLGRRVNRLQRRIERLVAEHHAPLLAIPGVAALTAAKLVGEIAGIERFATDGKLAVHAGVAPLQASSGNRQRHRLSRRGNRQLNAAFHRIAVTQIRCHRPARDYIERKMREGKTKREAIRCLKRQLVRVVFNTLKSNRMTPNEAAPALQPTAA

SEQ ID NO: 53591 - protein, 344 aa, unidentified
MRYVGVDLHKQTISLCVVELVGRERKVVQRKRFNCRDEEAIADYFGGLGPYEAVVEATASYEWFVKLIEPTAARIVLAHPGKLRVIAESKNKTDKLDAQTLAEFLALDQIPQSWRPTPRVREHRTLVRLRAYLQGRITSAKNKLRRLVANYNADRTDLFSRAGRAYLQQIDLSAADRFAADLLGEELDQHATRLKAADQRLRQFAQEAPIAEQEARAVLASIPCVGPVTTEVVLAETGDVRRFGSQRKTTAYAGLAPGIRQSDKRTKQLGITKAGSRLLRTILVETAWRLVNKTRRWGLLYERLKKRCGAKKAIVAVARRAWCVIVSLLKRGEAYAPAAAAAIG

SEQ ID NO: 53592 - protein, 391 aa, unidentified
MIFVGIDVAKDKHDCFILNSEGTVLADVFTIANNRIGFETLLSRIQSCSQGESKIKVGLEATGHYSYNLLGFLLDSGLATYVINPLHTNLYRKSLSLRRTKTDRIDARTIAMMLMSDVDLKSYSNTAYHNEELKSLTRYRFDKVKERAKLKSSVARLVNILFPELEKLVSSLHIAVVYALLSNYPGASYIANANTEELAETLCTASKGRYTKSKTAKIQVAAGVSIGSKMPAKSMELKHTIALIRELDKEISEVESAIDKITSQMDSLIFTIPGIGRHMGAMILAEVGDFSNFASADKLLAYAGLSPSTYQSGQLQNCYAHMEKRGSRYLRYALFNAAKYVCLWCPTFSAYLEKKRSEGKHYNVAISHAAKKLVRLIFAMQRSGKAFLADY

SEQ ID NO: 53593 - protein, 379 aa, unidentified
MAMRTREDEVVFPNAAGIDVGASSHWVAVPRHAVEDPVREFGAMTDDLNAMADWLLACGVDTVALESTGVYWIPVYEVLEQRGLKVWLVDARQMKYVPGRKSDVQDCQWLQKLMSLGFLRAAWRPEGDVCVVRAVARQREVLLAEQASWIQRMQKSLVQMNIQLTEVLTDVMGQTGQAIIRAIVAGERDPVALARHRNRRVKASSSEITKALTGNWRDEHLFVLGQALAMYDDIARHLAECDAKLHALLRDLGQRNVDLGKAPRTGSKQRQDFDIRQILANWAGVDLTRINGLGLTAVMKILSEIGPDLSHFATVKHFCSWLGLCPGTKISGGKVLSAKTSRAATPHLAPSIAAYAAAWTSLAPTPPRRTNSHACSTSC

SEQ ID NO: 53594 - protein, 316 aa, unidentified
MTDQAQRGVGIDVSQATLDVAVYPTGEQWQVSNDEAGISQLVERIRKLAPERIVLEATGGYEAVALASLGSAGLPALAVNPRQVRDFARSTGRLAKTDALDAQVLAHFAAVVRPQLRALPDAATRELSALLARRRQLVGMRTAESNRLARSLEAVRPEIREHLRYLDKRIKALDHELHERLRASPLWRAKDDLLRSIPGVGPVLSTTLLADVPELGTIGHKQLSALIGVAPLNRDSGRWRGKRSIWGGRGHVRAVLYMATTTAVRRNPLLKALYERLRHAGKSHQVAVTACMHKLLRICNAILSHHTPWSYQPLDT

SEQ ID NO: 53595 - protein, 313 aa, unidentified
MAKSERFIGIDVSKDTLDVHVLPEGKDFVFSNDVDGIAALCRKFGKLRPQLIVLEATGGLQIPVASALGVKKHPVAVINPRQARDFARATGRLAKTDKIDAQVLAFFGQQVRPEARPLKDEQTQELSALLSRRKHLIGMLVMEKNRLALSFGSVRNDIEQHIEWLEERLGEINTRLGKAVRSSPLWREQDNLLRSVPGVGEVLSTSLLANLPELGKLDRRSIAALVGVAPMNCDSGKYRGKRRTWGGRSDVRAVLYMAIMTAIRFNPVISKFYKRLIDAGKPHKVAATASMRKLLTILNSMVRTGQPWAYSPS

SEQ ID NO: 53596 - protein, 317 aa, unidentified
MAQNGTIVGIDVAKGKIDAAIRFGAEASFANSAEGHRELLAWLNEHGVCKAVMEASGGYEKSWARLLRGAAVEVVIADPNRVRHFAKSAGQLAKNDPIDARMIAWFGAVFGQASGQPHDEERQELDQIVTARLGIVRLKEQIESWREHEQPKAVQKAQQALLKAVALQLAKLETIIAAKIDKTERFAQRAEIIQSVPGLAGTAAAGLIAFLPELGLVDRQAAAALLGVAPFDADSGQRHGPRHIQGGRHKLRKLLFMPILSAATSTIPVLKACYQRLIAKGKKAKVALIACMRKLIGILNAMLARGAKWDPAKHAVA

SEQ ID NO: 53597 - protein, 484 aa, unidentified
MKTKRAKASRSIHKSVGHKPGPIRPAATMPVVNRHAGGIDVGSTEHYVCVPEDAVPQGESNVRSFRAFTGDLDKLVEWLQRCGVKTVALESTGVFWIPLAQKLEAAGIEMVLVNARHLRYVPGRKTDIKDCQWLQQLHSYGLLNGSFRPAPDICALRSLMRHRENLTQSCGQEVQHMQQALGQMNVHLHHAVSDLTGETGVRIVDAILAGERDAKKLVELRDVQCSRSTAQELEAALKGDWRAEHLFVLKQALENYRHLLQQMTICEQEIEKALAKVVIPQRPQPEEAIPKNPPAAAQPKKKKRFHHRKAGTGLKKDLTAELTRICGVDLTQVMGLNVLAVLIILSEIGLDMSRWRSAKAFCSWLGLCPGNKISGGRVLNSRAPHVVNRVATLLRTVAPAVGRSETWLGCFHRRMRARLGPAGANTATAHKLASLIYHLLTYKEEYIDVDRLLYESRLHRARLSRLRKQAEELGFEVVEKKAAA

SEQ ID NO: 53598 - protein, 414 aa, unidentified
MEVLHERCAGLDISKRDAKVCIRVPGGRGGRYRNEVTTFGSMTGQILELRAFLLEQQVTLVVMESTGDYWKPFYYVLENAPFELLLVNPRHVRGLPGRKTDVSDAQWLADLGAHGLVRGSLVPPPPIRELRDLTRTHADLTRDRTREYNRLQSVLEDAGIKLTSVASKINGVSCRLMLDALVAGERNPKVLAGLAKASLREKRDQLTLAMTGRFTDHHAFLVALHLQVIDQLTAAIDQLTTKIQVVTEPFHAQVALLETIPGVSQQIAQVIIAETGGDMTKFPTAGHLASWAGICPGHNQSAEVTKKAKTRPGNSYLKGALGTAAMSSMQVHDTFLQDRHHRLKPRIGGLKTIVALEHSILRSVWHMLSTNQPYRELGAGYHQRRHPQNALRSITRQANRLGYTVRFDPITQTA

SEQ ID NO: 53599 - protein, 320 aa, unidentified
MTTWIGIDISKDTADIGWFDGLIKKHIKVTNDQDGFRKAIDSVPIDCKFIMEATGTYYLNFALFLVENGQHVSVENPIRIKNHIRTDLHRSKDDKSDSLSIAKFGEEKNPPAWIPVTEDAIKLQQLAGLIDLYGKQIVQQSNQIHAYSRVKYMSDVVLKSLKKTTKYLSAEKAKIEKQYMELVNKSHRRELEIIKSIPGIGESTAARLITSVGDFNRFESSRQLIAYLGLAPTRRQSGTSLNRKGPISRMGGCKMRSFLYLCGISAAKHNSDCRAMWVRMKAAGKPGKVIIIAIANKLIRQAYAMVQSDSFYVKNYANCA

SEQ ID NO: 53600 - protein, 487 aa, unidentified
MDENGGGAGRFVGAFATGDRAEADETAVACDPDRQSGPRCIEVPFFVAPGNGEHAWQCLDYTCGVTVAFTWMEAKMEVIIERCCGLDVHQETVVACVLIGAPGERPRKEIRTFRTMTRDLEALRDWLQELGVTQVGMESTGVYWRPVHAVLEGRFDLIVANARHVRNVPGRKTDVKDAEWIADLVRHGLIAKSFVPPAPQRELRELLRYRRKLVESQTAERNRLLKLLETANIKLASVASDVFGVSGRAMLKALIEGSASPEAMADLARGQLRRKRDDLVLALEGRMEEHHRFLLATQLRRLEAAEQDIAALDHRIEAKLKPYCVQHALLMQIPGVDWVVAAALIAEIGVDMSVFLSVYHLAAWAGVAPGNHESAGKQKSGRARKGNVHLRTMLVGAAISAARTKGSYLKDKYHRLKARRGALRAALAIAHKIFVSAYHMLAKNLPYRDLGEAYLDQISQTRTVANLKRRLERLGYNVTLEPKAVPA

SEQ ID NO: 53601 - protein, 412 aa, unidentified
MEPIYTSCCGLDVHSKSIQACVRRTGKDGRIHHEVRTFGTMTRDLLALADWLSSEEVTHVAMESTGVYWKPIYNILEGRVTILLANARHIKNVPGRKTDVKDCQWLAHLLQCGLLQGSFIPDRPQRELRDLTRHRAQLVNEKSAVANRVHKVLEDANIKLGTVATDILGKSGREMIRALIRGEKDPGEMAELARKQLREKIPQLRLALEGRVTDHHRFVLSELMNHLEHLEGQIERFSQRIEEVSGPFEEAIHEVARLPGLERRSAENVIAEIGGNRAQFPSADHLSSWAGMCPGSNESAGKKKSGKTTKGSRWLRTALTQAAWAASKKKGSYFQAQYRRLAGRRGKKRAVIAVGHSLLVAIYHMLKDRNGYKELGANHFDNLNSKRLVPYLVKRLENIGYEVTLTPGQTAA

SEQ ID NO: 53602 - protein, 388 aa, unidentified
MNSNVTSATVVAAAARANDITLFASLELSKSKWVVTINSPGGEKFSRHLVEGGDGAGLIDLLSRSRAKAEQRYGVPVKAIVIQEAGLEEFWIHRLLIANGIESHVVDAASIAVPRRHRRAKTDSIDGETLLRTLMAWARGERRVCSMVQAPSPEEEDRRRLTRERGALLEERIRHTNRIRGLLSGQGIRDYNPLRRDCLKRLEALRTGDGRELPAMLKAEIRRELDRLTLATTQLAAVERARDALIRADAEERNNPAAMLLKLKGLGPEFASLLWLEALFRSFANRRQVAAYGGLAPSPWQSGGVERDQGISKSGNRRLRKTMIELAWFWLRHQPDSALSRWFQARVGAAKGRVRRIGIVALARKLLVALWRYVTQGVVPEGAVFKAA

SEQ ID NO: 53603 - protein, 425 aa, unidentified
MKSATNTIDSEPPLSLPEVAVNDVTGGLDWARDDHAVSVVDGRGRELARTMVEHTAAGLRDLTGFLGRHGVGEVAIERPDGPVVDTLLDAGLTVVVISPNQVKNLRGRYGSAGNKDDRFDAYVLADTLRTDRARLRPLIPDTDATIALRRACRARKDLVGHRVAAANQLRAHLRNVLPAVIGLFADIDSEITLAFLTRFDTQDAADWLTPKRLSDWLTKQGYSGRTDPAVLHQRLLDAPRGATGEHATSQAHITATYTALLRTLVEQIKTLSTQIDHQLAAHTDAHIFTSLPRAGRVRAARLLAEIGDCRAKFPTPESLTCLAGAAPSTRQSGKLRAVGFRWACDKQLRDAVNDFAADTRHTNPWAADLYNRARARGHDHPHAVRILARAWLFVIWHCWQDHVPYDPARHRALQRLLNQDQPEPA

SEQ ID NO: 53604 - protein, 405 aa, unidentified
MFFAGIDWADDHHDCVVVDAAGKRVGSVHVAHTVDGLEKLVAFLQGVGGEGTDLEQLACIVETSHGLLIGTLLEAGLPVYPVNPETVDRRRKPSGAKTDAIDAYLLARTGRSDLADLRRLLPDNPLIAELKLLTRDQDGLIQSQTRLVNQLIACLKAYYPAALTLFAKLQQDCTLAFLRAFPTLEAARAAAQDQIVAVLKAAGHPSAEAKAQEIQQKLAQPALQARAEVTRAKTRLMLSLIGQVELHLWDLAAYDAEIMRLFLSHSDSKVFASLPRAKTRIAPRLLAEWGDDRGRYAAVASVQALAGTSPVVFQSGRLSKVHRRYACSKPFRNVLYQFARQSIQKEAWAAAYYQRKRAAGKSHSMALRTLANQWVRIIFALWLKQEPYDPAVFLAAQQAHAPRAA

SEQ ID NO: 53605 - protein, 451 aa, unidentified
MGAWELSGETVPRLVLRRADGWWDVVPVSTAIRAPQVLLWLADGRSEQRRMAVLFVGVDWGERHHDLCLVDQDGGVLATRRITDGLAGVGALHALVAAHAQDPAQVVVGIETDRGLLVGVLLAAGYQVYAVNPQVVSRYRGRHGSSRAKSDRGDAKVLADLVRTDRHNHRQLAGDSSLVEAVKVLARAHQSLIWARQRHVNALRSALRDFYPGALAALGTHLAEPEALAVLELAPTPEQGRRLTRAAVRRALVQAGRRRNLQGRVVAVHDALAAPQLAAPEQLEAAYREVVGALVTVLGCLNVQVAALEEQLTLRFAVHRDAGIVQSLPGLGVVLGARVLAEFGDDPHRYATAKGRKAFAGTAPVTRASGLRTTVVARAACNQRLVDACYLWAFAALTASPGARRCYDAHRARGASHHQALRALGNRLVGILHGCLARRVTYQEQVAWPAA

SEQ ID NO: 53606 - protein, 384 aa, unidentified
MSNKVIFNLDELFISVGIDVGADFSWMSIALPNQQFVGKPYKILHNSMNSLTTAVSKIKEAEELYSLESRIFLESTGIYHYPLFCYLRDKGFNCSVINPIITKNSTNMNIRKVHNDRFDSKKAALVGLKPDLKVSLTLLETYTSPNAFLEADKQEIIDTIRSTARFGLTYAEKKYNTIIQAANAANEFGYIIDSNIKRIRLYISFIRKYDEEIEGILDALHNLVDANENTDFVKQIHLIETFKGAGFLSAVSLMGEIGDFSEFNKPKQLFAYFGLDPAVKQSGKFEGTKVQMSKRGSAIARRVIHILALQSISISQNGEAKNPVLRDYYLKKCESKPKLVAMGAVSHKVCNMIFAILRDNKPFKIITPQEHIKQYNAAKCNVAA

SEQ ID NO: 53607 - protein, 367 aa, unidentified
MKKVSTAAAKQSRNISQQKLTIGLDLGDRNSWYCVLDETGQIQLEQRVRTTAKALQEVFGAMPRSRIALEIGTHSPWISRLLSGLGHEVIVANARKVRLIGESRKKDDRLDAQTLARLARIDPELLYPVKHRSAQAQADLMMIRARAGLVRARTGLVNTARGLAKSYGERLRGCNVRDMDPEKAEGLSPELQRALEPLLATIEELSERIVEYNDRIEALAQTSYPQVELLKQIKGVGTLIALTFLLTLEDPYRFGKSRDVGGYLGLQPGRRKSGESEPQLHISKEGDPYLRTLLVQGAQHILGPFGIDCDLRRWGLKLAERGGRNGKKRAIVATARKLAVLLHHLWVSGEVYEPLHNSRRLPVAAAA

SEQ ID NO: 53608 - protein, 411 aa, unidentified
MSELLEQVLPGSVLVVAIDPGKVQHRVWFSTGDGGLLAGPMSVPSLRPGLDEVTATIRRLAGPDGPVVAIEATGALHGSWVRALEERFPSSVRVFAPSETAAARAQLGSRRFKSDDRDCAALTYLARQGQGRPVADDPAGAMRAAVRYRRGLVAECKVAQQRLHDQLNALCSGLSAPAGHGRVLELEDSSGQAVLACAVAFAGRPPAPRSLQARAPGRLFASNARYWAGRWKACLPPPPDATVRAERLGRSVARWQAIQADILAVEADIAVLLAATAGQVLTTLPGVGVIRAASFAAFSLPIERFPSAGHLYSAAALAPARYQSATIHRTGRISRTGLAEHRDALMGIAWGLSQNSAAFRARDAELRARGFRPIQARVALARNACRLCWRLLHTQQPYDDRRYARARRRGR

SEQ ID NO: 53609 - protein, 405 aa, unidentified
MDELDKRSVIAGVDTHKDTHTLCLIDHMGRTIGTFEFAADAKGYDSLADKIGDPATCIGVGVEGAGSYGAGLTRRLLELGYCVHEVMVPGRAKRRPGRPKSDPADAEVAARQVLAGANLSKPKEQSGWTEDLRQLIIARDRLVQATSAMINAAKSLIVTAPEDLRRSLGDLSRKDLRRALASLDSDAGGVFLALGALGRAWDLQDREAEAIEGAMKGILEANAPALLAIYGCGTVTAAALAVAGGGNPERLGSEAEFASLCGVAPLLASSGKTERHRLNRGGDRRANRALSQIAVTRMSYDQRTKDYVAKRKRDGKSKKETIRCLKRYIAREVFRALRRPLEVKGPSWKDLRPARQALGITLVEVGKALNVGFQKVSYAETGRLMNAKFLEEYDAWLKSQLRIVG

SEQ ID NO: 53610 - protein, 349 aa, unidentified
MQHYAGIDVSLGLLSVCIVDAKGKIVKEAKVGSDPDTLVAFLRGLDLAIERIGLEAGPLSQWLHAGLTSAGFEAVLLETRHVKAALSAMTVKTDRKDARGIAQLIRMGWFRAVHCKSAGSQEVRALLVARKLLLSKLLDVEFSIRGILRGFGLKMGMVTRKRFEARVRELYAGHAMLEQICSAMLTARSALQTEYAKLHKALLVIVRKDEVCRRLMTTPGVGPLVAITFKTGVDDPLRIHKSKAVGALFGLTPKKYQSGETDVTGGITRAGDEMVRTALYEAASVLLSRVTRFSALKRWGMDVAKRRGTKRAKVALARKIGVILHRMWVDMTSFRWTKGAPTTMRLARV

SEQ ID NO: 53611 - protein, 421 aa, unidentified
MHVLYQRCAAVDIGKDVIAVAVRLPGDGPEHRQTITRTFKTFYGVLKHAAGWLTAQQVTHVAMEATGIYSMPVYHALIEHGQFEKVLVCNAGHVRNVPGRKTDLSDAEWLVHLLECGLLRGSFIPPAQIKAARDVIRYRTKLTESRTSELQRLGNVLQDAGIKVDSVASTITTRSVRAMVEALIDGERRPVLLAELAKGRMRARIPDLQRALEGRFDDHHALMCRLHLDHLDHLEEMIARLDTQIQDMMQPFRAQRELLTTIAGIGPFAAAAIISEAGADIGETFPSAGHFASWIGVCPGNHESAGKRHSGKPRKGNQHLQHVLVECAWAASRTPGYLQSLYRWHVRKFGGSRNPTAKNKAIVAVAHKLAIIIWHVLATGKPYTDLGADYLDRRIDPAKETRRLIARLQALGHTVTIEPAA

SEQ ID NO: 53612 - protein, 336 aa, unidentified
MPELATVGIDLAKSVFQIHGVDENGRVLVRRQVRRGQLLAVFHNRPRCLIGMEACAGSHDWGRRLQALGHDVRLMPPSYVKPYVKRGKTDAADAAAICEAVTRPSMRFVAVKSEACSSVLVLHRTRDFLVRQRTQIGNAIRAHMTEFGVIAAKGAQNVERLREQVDRLPDVTRMPLNLLFDQLAETDKRIEQLTDEIEVAHERDETSQRLATIPGVGMLTATIIAATTPVVDNFDCARDYAAWLGLTPKPHSTGGRQRVGSISKMGNRYIRRLLYLGAMAQIMLRCRLKREPGLDWLSNLLIRKKTKVVAIALAHRMARTIFAVLRDGSRYEPQTA

SEQ ID NO: 53613 - protein, 348 aa, unidentified
MARITRIGIDTSKSVFQLHGVDEEERTVLRRKLRRSEVLTFFAKLEPTSIGLEACGGSHYWAGELQALGHTVVLIPPQYVSPYVGRGKNDAADAEAICEAMSRPRVQKRFVAVKTAEQIAAQMLLGVRENLIRRRTQLSNAIRGHAAEFGLIAAKGLSKVEPLLARIAADDSLPALAREMFATLGQELAELAPRIAAVETRLRAWHRANGLSRRLAEVPSIGPIGACLLPIKIANPHAFRSGRMCAAWIGLTAKDHTTAGKQRLGGITRAGDEALRATLVAGATAYIQQVRRGRTKPSPWLDELLKRKAPKLAAVALANKTARIAWKLMVSGQRYDRTRAAAPLAAAA

SEQ ID NO: 53614 - protein, 316 aa, unidentified
MNGKRVIGVDVGKSWLDAAVEGCHRVRRYDNDAAGIAALIEHFDPARDVVVFERTGGWERNLEAALAERAITWSVVHSQGVRAFRQAQGIKAKTDRIDAQLLRGYGRDRLDAGKLRPGHREDVTLDCLMARQRQLKAMRHAESCRLATAALEAVRSSIERMIAALDAALAAIAAELARHEKEHTDLVFKEEILCGQIGVAEQTARGILAELPELGRLDRKAVTALGGLAPRVHESGSIRKRRGLAPGRTSIKVILFNPARTAMRFDPQIKEFSGRLRARGKPGKVIMVAVMRKMLVRLNAQMRDAMAQASTGAAVQ

SEQ ID NO: 53615 - protein, 361 aa, unidentified
MTESSDYESVQVFIGVDVGKDTHHAVAINRSGKRLFDKALPNDENKLRSLISDLKQHGQILLVVDQPATIGALPVAVARSEGVLVGYLPGLAMRRIADLHAGEAKTDARDAAIIAEAARTLPHALRTLKLADEQIAELSMLCGFDDDLAAQTTQASNRIRGLLTQIHPALERVLGPRLEHPAVLDLLQRYPSPEKLASLGEKKLAAQLCKLAPRLGKRLAADIAQALAEQTVVVPGTNAAAVVLPRLALQLITLRKQRDEVALEVEQRVLAHPLYPVLTSMPGVGVRTAARLLTEVACRAFASAAHLAAYAGLAPVTRRSGSSIRGEHPSRRGNKALKRALFLSAFAALRDPLSRAYYTAK

SEQ ID NO: 53616 - protein, 420 aa, unidentified
MGYIGGGLHRSFVERIRGVEPERLLAVPIDVGKLTAAALVCDFWGEVVVGPFAFRLDERGFETFAQSIAAAVAERGASWTRVGLEQAGHYHQVLQARLLDHGLDVALLNPAQVKENRARDLLRTLKSDARDLRAMAELLIRGKGRPAGAPDDAMAAQAALAAHRARRVKARAALKNHVHKSLDLVFPGLSGCFRQILDAKVGRLLLREGMNPVRVRPLGVERLRAFCVHRGVRVTTTKAAQVVEAAQPALGLASAVASVHARILASDVSLLEPLDSEIAHIERDLAEVLPRTPAAILTTIPRVGVIRASMYGAAIGDPTRFPTSAQVYRLSGLVPKLYESAGRRRGGTRISREGKVELREAIIELGRALRQDHPDFACYARGLVARGKRAGVVACALGHRANRVAFAMIRDQVPFDPNRW

SEQ ID NO: 53617 - protein, 339 aa, unidentified
MWIIGCDYHPRFQQIAFVNTEDGEYGQRRLQHVEEAERFYRSLAGQAVRVGIEASGHARWFQRLLAELGQELWIGNPSEIRAMAPRKQKTDARDAEHLLRLLEQDRFPRIWVPTPEQRDVRQLVLHRHRLVQMRTRVKNQLQAIALNEGVGRKPGLWSRKGRAQFEALALPAWTARRRQDNLELLAELVQRTVPLDQAVQEEAARRPEVVRLMTHPGVGQITALAFVLTIGEPTRFACGKQVASYLGLIPAEASSGGKQRLGHLTKQGNALLRGLLTEAAHSAARQEPELGRCYRRLAMKKNRAIAAVAVARKLAVRLWWMWIRGLDYGQMVESGSHAG

SEQ ID NO: 53618 - protein, 422 aa, unidentified
MICAAVERCAGIDVGKTFLAVCVMTGPLTDEAMVQRRRFGTTVVELQALREWLKQERVTHAVMESTGSYWKPVFNILEESVQIYLANSQEVKNRKGHKTDDKDGWWLAHLLRHAMIRPSFIPPRPIRELRDLSRRRKRLLGNATAEKNRIQKVLEDANVKLGSVLSDVFGVSGQLMLDALLNGQNSPSEIARLAQRRAKSKVAEIQQALEQHQLRDHHRRLIRYSLSHMAFLEQQIMDLDRDILAKIQEAGLEPAWELLQSVPGIQQRGAASILAETGADMKQFPSSKHFSSWAGVCPGNNRSAGKNHGSRTTGGNPWLRSTLTECAWAAAAIKNSYLKEKFWRIVGRSAGKKAPALVAVAHNLLVEIYEVLRTGQPYQDRHASRLPELQKQRMIRHHLRRLGKLGVNVRCNPSAVARAKET

SEQ ID NO: 53619 - protein, 369 aa, unidentified
MYGLLKPIEIGLELTKNQKRNPYMKNYNTIGVDLAKNVIQVSVVSPSNKQLTNKALTRKKFAEFLGKQKSSLVAFEACATAHYWARVAKRHGHKIKIIPAKAIVAFRQGHKTDENDALAVAEAAKRPSIKEAPYKTIEQQSLQAIQRSREHLVQERTALSNHMRGLLMEFGVVIPQGFASLTKAIPEILEDGDNELADSYRPTLHRLYQRFTQLQNDIAFMDDEIKQCLKQHESCHKLTDMEGVGPISAVLLYASLGTGEAFKNGREFSAYIGLTPKQYSSGGKANIIGISKHVANRRLRAVLITGARAYVHKMKEPKTAKDKWLAGLIKRAGYGKAAVALANKNVRTAWALLTQGTEYNKQYGMLQAA

SEQ ID NO: 53620 - protein, 373 aa, unidentified
MTNNLRYLGLDVHAETIAVAVAEPGGEVRSLGMIPNEPSAVAKLIRKLGGREHLRACYEAGPCGYVLYWQLTKLGVACDVVAPTLVPIKPGDRIKTDRRDAERLARCHRAGDLTAVWVPDAAHEALRDLLRAREAAKADQLRARHRVSKFLLRHGIRPPAGVKPWTQRHRRWLDTVTFGPAAQQATLADYVHEVDHAGARLERLETALDGAITAAPPAMQAIMRALQCLRGVRQVTAATIVSELGPLSRFTHPRQLMGYSGTVPSEYSSGSSVHRGAITKTGNAHLRRVLLEAAWAYRFPPKCADALRARQRGQPAHVIEISWKAQHRLHTRYRRLLGRGKPVPHVITAVARELVGFIWAIGIAAEREVAIAA

SEQ ID NO: 53621 - protein, 372 aa, unidentified
MKKIITFIGLDVHKSSIEIAIAELGRGGEFRSYGKVDGSLAALDKVVRMLVSLNYKLHFVYEAGPCGYDIYRHLTAQGFDCVVVAPSKIPRQSGDRIKNDRRDAIKLARLHRAGELTPVYVPCTEDEAMRDLTRGREDAKGAEKKSRQRLSAFLLRQGHRFTGRSPWSTAHMRWISDIKMPHPAQQIVLQEYVDTITECANRVERLTDQIQQLLPSWQLFPIAKSLQAMRGVSLIVAATTVAEIGDLKRFENPSELMSYLGLVPSEHSSGEKTKRGSITKTGNGHVRRVLIEGAWAYRFPARVSRELRRRQEGLSPEICAISWKAQLRLCARYRRLMAKGKSKQVVVTAIARELCAFMWAIAHKVETPVMGK

SEQ ID NO: 53622 - protein, 342 aa, unidentified
MEKVSIIGLDLAKRSFQAHGAGADGGVAFRKKLSRQKVLAFLADQPRCIVAMEACGGAHHWGRAIGALGHAVRLIPPAYVKPFVKRQKNDAADAEAICEAAMRPTMRFVAVKTSEQQARAMLFRTRDLLVRQRTQLINALRGHLAEHGVVAPQGSANLKKLAEALEDETTSPPLLVVELSRVFLEQIDQLSKKIAELERAMTHESVRGETTRCLRTLPGVGPITAMAIETFAPPMTVFERGRDFSAWLGLVPRQHSTGGKPLLGKISKMGQRDIRRLLIIGAMSLIRRACRKTAPEGTWLHRLLARKPRKLVAIALANKMARIIWAMLTKEQDYRAPAAAPF

SEQ ID NO: 53623 - protein, 350 aa, unidentified
MIIGVDYHPSFQQIAFLDQETGECGERRLSHDGGEADRFYRELQQRGIFVRVGMEATGYARWFERLLAELGFELWIGDSAEIKTRRVKKQKTDRKDAELLLKLMREDRFPRIWIPPPENRDLRQLLWHRHRLVQMRTRIVNQLWALAMNEGQRRKKKLWSEQGRAELEKLSLAPWAGRRRRELLELLDRLNPAIEELTAAAEQEAKKRPDVLRLMTHPGVGPLTALAYVLIIGTPSRFARGKQIGTYAGMIPSEESSGDKQRLGHISKQGNSLLRFLLVEAAQAATRVNPEWRRRYIHLAMRRHKSIAKVAMGRRLAVRLYWMWRNGCEYSPSLEFGSYAGQPGTGHGGK

SEQ ID NO: 53624 - protein, 400 aa, unidentified
MLSIGIDVSKGKSTVCGMKPGGEIVYAPFEVQHTRKGMSELVSLLRGSGEEVRAVLESTGSYHCPVVAALLENGIFVSVVNSLRMKRFCSQSIRKVKTDRIDAMQIALYGLAYWQELQPTKLPEDTYRELQLLARQYYQMTSLLIKAKVDFNAICDQVLPGMQELMNDHAGRHKLSDFVLRYRHTTHILEMGETRFRKDYCKWAEKKGYRNCERMAALIFATAQNGIPVLPNAPSTQIVITEAIRVLHTVEASRDAILTQMQALAKTLPEYSLVREMPCIGDTLAPRLIAEIGDVRRFHSKRALIAYAGIDAPPYQSGKFCANNRHISKRGNRYLRKTGYEVMQSYVMHKPANDPIFTFIEKKRGEGKSGKLAMVAGLNKFLRVYYGKVTELYRSLPAIE

SEQ ID NO: 53625 - protein, 309 aa, unidentified
MDSVIVGIDVSKDRLDVCVRPEGEAFAVSRDAAGIEALLQRLAKLSPKLVALEATGGFETVVAASLGAAGLPVVVVNPAQIRAFARAVGKRVKTDPIDAAVIAHFAEATKPQVRPLPDADTQRLADLVARRRQIIAMMVAEKQREKRASERMKTSIARLLKALQVELSELDRDIDEAVRGSPTWREKEDLLSSVPGVGPTIARTLLAELPELGSLDRRQIAALAGLAPWTRQSGKWRGDSFIGGGRASVRSVLFMGALTAARWNPILKAFHQRLIAKGKRKMVAATAVARKLLTILNAILRDRTPWQNA

SEQ ID NO: 53626 - protein, 343 aa, unidentified
MSEISIVGLDLAKNVFQVHAVDGSGKVVLRRQLRRGAVEKFFAQLSPCTVGIEACGSAHHWARVIGRYGHQVRLMPPAYVKPYVKRNKNDGRDSEGICEAVGRPTMRFVAVKSVEQQATMAVHTARALLVRQRTMTANSLRACLSELGIVAAQGMEGLRQLMTKLEAPSEDIPEVMRSALLILARHWQALDADERALEQQIAKAARGDRQARRLMEVPGVGPIIASTVLAKVPDAKVFRSGRDFAAWIGLTGRDHGTGGKHRPGRISKQGDRMLRALLISGASAHMRQQKRRGVSDPWLRDLLARRPYKVVMVALAAKTARILWAMLVKGEPYRDRASAPAAA

SEQ ID NO: 53627 - protein, 425 aa, unidentified
MNSNTNKKINQVTENTLVIGIDIAKKKHYACAVDERGRVLQKSFPFSQSRGGFDAFYERILALRATHEKSEILVGFEPTGHYWMNLAAYLTLHGIPFVMVNPHHVNRSKELDDNLQTKNDQKDALVIARLLRDGRFSYPRILEGVEAELRNGATLRSKIQEDLNAIQNRIIRWIDRFFPEFMTVFKDFGKMAYAALEMTPLPSDIQGKAPEELLFLYRQVKGMKSPQLPKAKRLVEVAQHSIGLTEGLVMARIEIATLLTQYKLMQSQLDTLTEQLTELAKEMTDYDYLNSVPGISNGTIVELLSEVGSLTQYDHPRQLIKLAGLTLRENSSGQHKGQKRISKRGRRKLRALLFRVMMPLIRHNEAFKKLHEYYTTRTVNPLRKKQSIVVLCGKLLKILHTLCKKRVYFDVSYMMKDLYCLVKAA

SEQ ID NO: 53628 - protein, 378 aa, unidentified
MTATTHRTQSSGSQTLFLSLELSKSTWRITSSIGPGLSPRERQVAAGSAAAVVAELAHAKRRFGLSADAPVRSCYEAGRDGFWVHRWLTQLGVDNVIVDSSSIEVPRRARRAKTDRIDGQKLLAMLLRVAGGERGVWKVVHVPSEAAEDQRHLARTLHAVKRDRTRAMNRIRSLLATQGVTVAGSLLRFDVTRVRRWNGQPLLPGLHRRLAREGEHLAQLTAQLRACDVEQRAAVRRQHDNAAEQARRLRQLKGVGWNAAWLYATEIFSWRAIRNGRELGALAGLVAAPYQSGATQRTPGITKAGHRQWRTMAVQLAWGWLRYQPTSALTRWYLARFHAGGPRARRIGIVALARKLLIALWRYVDQRVVPDGAQLKTT

SEQ ID NO: 53629 - protein, 445 aa, unidentified
MYSLFFMEPYRKEHIMHNKNYISVGIDVGSAFSFMTILAPDETVILKPFKITHNNKDSLERAVSEIKKAEELYSLESRTFLESTGIYHFPLFCYLVDCGFNASIINPIITHSTKNGNNGKEKNDKIDSKGIAKLGLSKDIPVSQFPAKLVLELRSLTRKYYDLTDERSAHINKLKGDLHTVFPQYLDVFCDVTGKTSTMILRQYGTPDKILRGHKKTMIEKISKASRKGLAKASERYEKLCAAANAAKTFGCQIDSIYFNIFLTLDLVEKLDSALDSILNRIRQLITFNKNEKFIQQIKLLNTIPGVGFLTAVTIMCEIGDFSAFRNPKQLFAYFGLDPEVNESGKFVGTQLHMSKRGSRIARRAIFAVALASIRTKRNGEGINPYLRKYYELKSGQKPKMVAIGAVMHKVCNIVFAVLRDEKAFELRSPEEHCKQYQRPALAAA

SEQ ID NO: 53630 - protein, 340 aa, unidentified
MEHATIIGIDLAKRSFQLHGARADGSVAFRKKLSRDKVLGFMASQPRCVVAMEACASSHHWGRAFGKLGHEVKLVPPIYVKPFVKRQKNDAADAEAICEAASRPTMRFVAVKTQEQQSQGMLFRTRDLLVRQRTQTINALRGHFAEFGVVAPQGPAHVERLAEAIEDADSPLPGPVRELGALLFAQIGDLDEKIAELERDLRERAREDEQTERLMSIPGIGPLCAMAIQAFAPPLESFRCGRDFAAWLGLVPRQSSTGGKAKLGRISKMGQRDLRRLLVAGAMATVGWAARRGTKDPWLARMLARKPRMLVAVALANRTARIAWALMTKNEYYRAPLPTA

SEQ ID NO: 53631 - protein, 436 aa, unidentified
MFVGHRFRTDPDELDTLWARLPKDAERIEVVMEPTRNAWVALAAWFRRHGATVVMVPPEQSADLRDYYNKHTKTDRLDSKVLARLPLLHPEGLHREDSLGPGDELKRAVKIRSGLVHRRTACMARLDALLEILGPAWIAALGSDMTLTALRFLARYANPVQVKRLGKARLAAFFRRSSRQAWADERADAVIEAAATTLRLWGADGGELDFDALAADVAAEARLALTLTDEINGFDKRIGALYDKADPAGIVRSVPGAGRVCAPQILGRLGDPTRFANLAAVRSFAGLVPAADSSGQADGHRGPTKAGDSCLREALFIAADHARKVDPTLAVRYQRLMLAGKHHDSAVCTLAAVLLTRIAACLRAGTHYLVRDTDGRVITEAQGRAIVAERYTVPPEVRAARRKVTPHRHPRRNERNERAKTGVATRSKASPVPQPA

SEQ ID NO: 53632 - protein, 353 aa, unidentified
MEYIAFDAHKHYTLASVARPDGQLVREQRIAHERGALQQFLERCERGSPVAVETVGNWYWIVDEIEAAGCVPRLVHARKAKLMMGEINKTDKLDVRGLNQLQRTGTLPTVWIPPGELRDQRDLPRTRMVLVRQRTQLKNRIHSTLAKYALHDIEVSDLFGARGRALVRQRLELLPPCTAYTTRHLLEQVERLDHQVREFEQQTRILFKPTPTIQHLLTLPGVGLTLAVVIALEVGDVARFPTAEKLAAYAGTTPRVHASGGKTRFGPSRPDVNRYLKWAFVEAANAICLNRGRTPRRHVTRLYERIAQRKGHQKAIGAVARHLAEATYWVLTKQQPYREPTTAAVSSTGDKRG

SEQ ID NO: 53633 - protein, 352 aa, unidentified
MTRITTIGLDLAKKVFQVHGVDAEGKVVVARKLRRKEVLAFFAKLAPCLVGMEACGSAHYWAREIAKLGHTVKLMPPKYVKAYVKRGKTDPGDAAAICEAVTRPSMSFVPVKGLEQQGLSMLHSARSQLIGQRTQLVNGVRGHLSELGIIAERGLLGLTELAAIVRDESDQRLPTTARAALMILVRQIEAVSAEISALDTALRKENKASELGPRLETIPSVGPVIASALRARVTDAKLFENGRHLSAWIGLVPENDSTGGKVRQNGLSKKGDRYLRSLLVNGAMAVVQKAQKRPDKHPWVTKLLARMSAKQAAIAIANKTTRIAWAIMVHGGVYEAGHRAAHYRAEACAHTG

SEQ ID NO: 53634 - protein, 384 aa, unidentified
MRRQLEARAAPCYILLMKTNTIPETKANSLSKNSAPGPNLDGITIGIDLGDKKHRICAMTGDGDIIDERNITNNREALLRLSRKHPGARIVMEVGTHSPWISRLFDQRKHQVIVANARKLRAIYENDRKSDTFDARMLAMLGRVEPRLLHPVDHQCEEAQRDLLQIKLRDTLVAHRGSAITAVRSALKSLGQRLPASGTAAFADAARAALAGEPELLEMVGATLEVLDLQSAKIKVLDKEIERLGEEKYPQTKLLRQVAGVGPITALTFVLTIGDPVRFANSRDVGPYLGLVPKRDQSGNVDKEMRISKAGNSYLRRLLVGAAQYILGPFGPECDLRTHGLKLAARGGRSAKKKAVVATARKLAVLLHALWTSGSDYRPLRDAA

SEQ ID NO: 53635 - protein, 340 aa, unidentified
MSQVTLFVGLDYPQDAIQVCLMDPQGQILANRRCPNQVETLVRLVAVFGHDVHVAIEASCGAAALADELATRHGWSIHLAHPGYVARMKQTPDKTDWADARVLADLVRVGYLPRVWLAPADVCQLRTLVRYRQQLVAQRRAITLRITALLRDARVVEPGARWSRAWLAWLRSAPGLGSEARWVIDCHLREYDNIISLIAEAEQRLAAVTADDPVVAQLRALKGVGLITAATIRAEVGRFDRFTTGKQLAKFCGLSPCNSSSGPRQADAGLIRAGNPQLRVTLIEAAHRLIRYDSRWAALASRLRQAGKPTCVVVAAVANRWMRWLFHQVEGGAITLKVGA

SEQ ID NO: 53636 - protein, 355 aa, unidentified
MKRGSSAVPNLTTGLDVGDRWTALCAVDETGAAIERGRIATTPAGVERRFRQGPVHRIVLEAGKQSPWMSRLLASWGHEVIVANPRRVRLIAAAANKDDPRDAETLARLGRLDPQLLRPITHRSAEAQQDLAVVRARDALVRSRTLLINHVRGVVKSLGSRVPRCSAHAFARQADRVVPDALRPALAPMIAIIEQLTGEIRRQTRAIEALVQTRYPEALPLQQVKGVGPISALAYVLVLEDPTRFATARSVGPYLGLVPRRRQSSRADPQLRITKTGDGLLRRLLVQSAHYILGPFGPDCDLRRYGERISARGGKNAKKRAVVAVARKLSAVLYHLWVTGEVYEPLHRARAQVAA

SEQ ID NO: 53637 - protein, 373 aa, unidentified
MFHFTTLFIGMDVHKESFSLCYYDMMANQFKHSTKVGPNVSYIVNYVNELRRLYGQDAEVLCGYEAGCLGFTLYHQLQAHGIPCIVMAPTTVMKEGSKRVKTDKKDAAQLAKALAFRSYRPVHIPTVEDEQVKEYIRMRTDHKVALKKIKQQILAFCLRHDFRYTEGSSNWTQKHVRWLRSLNPDGLYAEILTEYLLTYEKLVDQIERYDARIEQLGQSDSYQEKVSRLSCFIGIKTLTALSIVTEIGDFNRFATAQHFASYLGLTPNENSSGDKERRGAITKAGNSHVRRLLIEAAQSLAKGTIGYKSKELKRRQSGNRVEVIAYADKANERLRRRYRTLVLGKNKKQNVAKTAIARELSGFIWGMMTGRIA

SEQ ID NO: 53638 - protein, 341 aa, unidentified
MKRIAVDLAKSVYQVAESVRSGQVVQRKRLNREAFRQYIQEQAEPVEWVMEACGTAHYWGRVAQAQGHRVRLIHPRYVRPYRRRNKTDRNDCDAMLEAARCKDIHPVPVKTHEQQQLQQLHGLRETWKKSRTQRINLLRGILREAGIEAPASTAAFIRAAHELVERPEIAPLSHQLHIVLAEINLHEQCMAECEQQLKRWHADDDVVRKLDEVSGIGLLTASALKTAVGKPERFANGRQLSAWLGMTPREFSSGDRRKLGHISRQGNVYVRTLLIHGSRAALLAAQRCQARTPEKMTQLQRWAVETAARIGHNKAAVALANKLVRICWAVWCHERRFNGNW

SEQ ID NO: 53639 - protein, 338 aa, unidentified
MKITTIGLDIAKSVFHFVGVNKAGKLVKKKMIKRKDLIHFFAQVEPSLVVMEACGGANYWAREFQKVGHEVKLIAPQYVIPYRPGNKNDYNDALAIAEAAQRANMRFVQPKPVEQQDVQMLHRMRERLNKQSTALVNQVRGMLAEYGIVIAKSKAAFRKALPDTLSDENNELTVKGRYIFNQLHEEFTDIEKRLKSCDTQIVEERNTNPVCLRIETSPGIGPVTSTAFYAAVGEGKDFSNGRHFSAWCGLVPRQHSSGGKDNLLGISKRGNAYLRTLFIHGARAVLQHCGGKQDRLSRWAYALAERKGFNKACVAVANKLARITWAIAAREDEYRTFA

SEQ ID NO: 53640 - protein, 352 aa, unidentified
MVKRTRVVIGGVDTHGRTHHAAVIDQLGRLLADAEFGAHTDGYRQLLGWLGRHGQLCSVGVEGTGTYGAGLTRFLLDHGVHVLEADRPNRKTRRQRGKSDPIDAEAAARAVLAGTATALPKRRDGIVEAIRVLRGVRAGAVKARTAAINQLKAVVVTAPAAVREPLDGRSTARQVTACTRLRPDPEQLADPTQATKAALRSVAVRILALEQEIKVADQRLRELVPKAAPRTLGLLAIGVEHAGQLLVTAGDNPERLRGEAAFAHLCGAAPIPASSGRTQRHRLHRGGDRDANCALHLAVVVRMRYCPRTRAYVERRTKEGLSKPEIMRCVKRYLAREVYHAILADFQALHAT

SEQ ID NO: 53641 - protein, 405 aa, unidentified
MSEIQQHERVEVFIGLDVGKGTHHAVALDRKGKRLLDSALPNDESKLRALIEKLKEHGQILLVVDQPATVGALPVAVAQAEGVWVAYLPGLAMRRIADLHAGEAKTDARDAYIIAEAARSMPHTLRSMKLADNEVAELTMLCGFDEDLAGQITQTSNRIRGLLTQIHPALERVLGPHLDHPAMLDLLERYPSPAQLAALSSKQLANRLVKLAPRMGKTWAAEIVQALSEQTVVVLGTQAASIVLPRLARQLAALRVQREEVAKEVERLVLAHPLHPVLTSMPGVGVRTAARLLVDVASRAFASAGHLAAYAGLAPVTRRSGSSIRGELPSRRGNKQLKRAMFLSAFAALRDPLSRAYYTRKISQGKRHNQALIALARRRCDVLFAMLRDGTLYCPPQPKMLLTTT

SEQ ID NO: 53642 - protein, 328 aa, unidentified
MAEASTTPQQNATSAVVVGIDVSKHRLDIAHLHGDAPLDAAFDNTTEGHAALVERLCQIRPRLIVLEATGGYQRAVVAALAAAGLPVVVANPRQVRDFARGLGILAKTDAIDAMVLARFAEKIDPTVRNLPDAQAQALADLLARRRQLVELRTAEKNRLQQATAPRIKASIRAVLTTLDAQIAALDDDLDGHIRRSPVWREKENLLLSVPGVGAQTARTLLACLPELGTISRQAIAALVGVAPINRDSGAMRGKRTTWGGRKVVRSSLYMATLVASRHNPVIRAQYQKLLAAGKPKKVALVACMRKLLTILNAMLRTGQPWRNPCETA

SEQ ID NO: 53643 - protein, 329 aa, unidentified
MKKNWYVGIDVSKKWLDVAIFVENSDLKGYFHTQVSNDKPGYRELLRWLKEHDVDASTCTYGMEHTGFYSDGLQHFLDKKGYKYTMLEPAVIKHYPIQPREKNDRLDAAKIADYLYRFKDTVKLSRVPDKTMEKLRELHKERKFYVEDRVCYLNRKLVVGKEETKRLDKMIEMLDKQIDAIEEKIRDIIQNDKSLMENYLYLDSIKGIGFVNAVNAIVITQNFTVFKTARDYASYIGVAPHTKTSGTTVRWKPKPRKHCDLTAKADISQAAKIAVVHDVELKRFYERKCNGKDDADTVRKAMNAVKFKLVLRMFAVVKQKHTYRQFTTI

SEQ ID NO: 53644 - protein, 368 aa, unidentified
MKNYTLEAALTAGAKELKNQKAAKAKRIVMGSDLHLRGCQAARKIDNGPIGPVANFRSQEELLLYVEKQKEQAEEVVLVYEAGPLGYGLYRALKARGVKCYVCAPDSSEQKRKRRKNNTIDTRTLTSNLFNYLNGNERALQLVRVPTEEQEQARLQSRQHDQLVEERKRLGAKGNALLLSQGFGSWKNWWRPKAFSRLSQLVPGRLLELLETWVDLLRKLDEKIGRAKAALAKRCCGPRPKGAGAPSLVQLQSEVLDWGLYSNGRKIGCLAGMVPSEWSTGDSQRRGSITKVGVGAIRRIITEMVWRMILFQPQYKPVQKWQEVLRGSNRGLKKKAVVAIGRQLMVDLWRLQTGRVSAQELNLLMIWG

SEQ ID NO: 53645 - protein, 451 aa, unidentified
MSKKTMSLEVVNPNAAGIDIGSRSHWVAIGQDAQDVKEFGVYSEDNEALCKWLLENKITTIAMESTGTYWQNLFSTLVSHGFDVILVNGKQTKNIKGKKTDIKDCQWIQKLHSLGLLSSSFLPDSTTDVIRTYSRHRQNLIQQSSRTVLKVQKYLRLMNMRLDVVVKDIVGLTGTKIISDFIAGERSGKKLAMNRHYNCRKPEEEIAKALQYNGREDYMFALKHEWNTYLHIQKQIEEVDAEIKKLLEEIIDKDDNKKQHVASKKNYKRKNKNTIKGTDMNQIAYQYFEGVDLMEIEGVNDATIMAIISEIGLVGIRKFGASKQFTAWLRLAPNNKISGGKVLSHHLPKGSSRLKIAFRNAANAIGNQKEGHLADFFRKINYKKGRATAVSATARKLAVIIWNMLVKGESYNPPTKYMYLDEKRRLGLVKRIKKQIDKFEINPEQLGFATT

SEQ ID NO: 53646 - protein, 433 aa, unidentified
MNTPHPYDLVIGLDRSDKKADLCLITTATGQRRSTIIDTAPEALWEWLLELRQQHPQARVGLCLEQPAVHLIAFLESYEWITLYPINPITLQKYREAFVTSRAKDDTKDADYQADLLLTHHAKLKPWAPQDSQTRAVQQLVYHRRSVVDERTGLTNRLIALLKQYFPQALMLCGDDLWRPLATRFLLKWTSLQAVQKTKPATLKAFYYLNGSRSAKLLEQRLALVAKAVPVTDEPALIESFALRVQLICRQLQLVQQTITHYEKQIASTYAAHPDHELFASLPGAGPVLGPRLLASLGSQRERFTAATELQHYTGIAPVTKKSGGSCYIHRRYLCPKFHKQSFHEYAGQSILSSRWAAAYYLQQRSKGAPHQTAVRALAFKWQRVIFRCWHNRTPYQEAIYEAALRKNGSPLVAFFDKVESGKSPFKNPTKKS

SEQ ID NO: 53647 - protein, 348 aa, unidentified
MIRNKPSAAVYGIDLGKNVFHVVGTDAAGNVIQRARFRRDTLLAFFERAERALVGMEACPGSQWLARKLQAIGHSVRIIPAQFVKPYVRSNKNDTIDAAAIAEAVVRPTMRFVQIKEPDQVDLQALHRIRDQLVGSRTRLICQMRAFCLEYGVAIRQGAGVFKLDLPRVIADESNDLTPTMRRLLAELFDDLSRLEKRIGGVTREIEGLAATDELARRLMTVPGIGPLGATALLAAAGNAQQFKKARDMAAWLGLVPQQYSTGGRTQMLGISKRGNRYVRRLLIHGARSCMMHLDRSRDRLGAWIDRLQSRMHVNKVTVALAAKIARIAWVVINRPGAIYERRDPAIA

SEQ ID NO: 53648 - protein, 348 aa, unidentified
MAMTIVEATRPITGGVDTHLDTHVAAAVDANGGLLGVESFPTTTAGLAELHDWLVSFGALVRVGVEGTGAYGAGLARHLRGRGVEVIEVDRPNRQARRRAGKSDTVDAVEAARGALSGRVAGIAKSADGTVEAMRTLVVAKRSARQARISYLNQIRHLGFTAPDDLRERFRLVPRAALAATAAGLRPQTGSDPVLYATKLAMRTLGRRVLALEHDTNDLDAVLAELVGVTAPSLLDVHGVGVDTAAILLVAAGDNGERIRTEAAFAHLCGAAPTETGSGKTSGRHRLNLGGNRQANHALWRIAITRMSSDPRTRVYVERRLAEGLSKREIIRCLKRYIAREIYPHLPR

SEQ ID NO: 53649 - protein, 346 aa, unidentified
MVVLGTDAHKRTHTMVAADHSGAEIGSITVSATSEGHLRALKWAAQWDDRKWAVEDCRHLSRRLEADLLAAGELVVRVPPKMMAGARRSARTRGKSDPIDALAVARAALREPDLPVAQLDGPSREVKLLVDYREALVRERTAAQNRLRWRLHELEPGFDPPAGSLDVYRTLDQVEELLGTHQGVVADLARAEVARIREITREANRLRAEITSRVATIAPSLLELPGCAGLTAAKLVGEAADITRFRNRDAYAMFAGTAPIPVWTGNSEKFRLNRGGNRQTNAAIHRIAITQLRIHPPAQELVARHTSNGKSKRDALRILKRRITDVTYRTMIKDTRAHQAAQPVAA

SEQ ID NO: 53650 - protein, 426 aa, unidentified
MEVMNKRVAGLDVHKETVVACVRAMAGRKPTRECRTFATTTDGLLALLALLAWLTASRVTHVAMEATGVYWKPVWTILSDGPFVLMVANAAHIKNVPGRKTDLNDAMWIADLLACGLIKASFVPAADIQELRSLMRTRKQLVREQTRHVQRLEKTLEEANIKLGAVISDLMGVSGRRMIEAMIAGERNPHRLAALAERTVKASPKQLCDALHGRLREHHRFLLKLHLQQWDALDAAIQQIDRQVAGQIERMDAEAAASQPPFRDLILRLSAIPGVSSLSATTILAEIGRDMSRFPTAGHLVAWAGLCPGQNESAGKRKSARLRRGAPWLKTMLVQCAWAAKRAKDSYYRAQFFRLQSRRGPQKAVCAVAASILTAIYHMLKSGLPHRDLGADYFDRRSPEAKAKRLVAQLAKLGFGAQLQPLADAA

SEQ ID NO: 53651 - protein, 345 aa, unidentified
MKKIAIGIDFAKEKFDVTVKNVLEGTSCYGQYPNTPAGGRAMLSMVKKFAQGTTSEDWLFCGEDTGYYSQTISRYLTEKGYFMWLQNPYSIKHSEGDIRRGKNDKADSASIADYAHRYEDKARKYELPSEASEQLHMLLTRRDALVRAKKVVQTGVGEIPKRERQGETITLIKASNKRVVKVIDDEIALLEKQMEKIVGKEEDMQKNYEILRSFKGIGIVNSMCFIAYTDNFKKFDLNARSIATYWGVAPFGEDSGKTVYKKPHVSHICNHWLKAILSNAANSAIKYNTVIIDYYARLEKAGKHEGIRRNNVKNKIIHIITAMIRKGEKFNPEYKFTIEKDTPKC

SEQ ID NO: 53652 - protein, 482 aa, unidentified
MKTRPSERAKKTTDDAKHVHWHEMNRKQRREMMREIQNEDISLEVVHPDAAGIDIGNESHYVAVPPGRDSLQVRRYGCTTDELKAMAAWLKLLGIRTVAMQSTGVYWIAVFDTLEAAGLEVYLINARDTKNLPGRKSDVQESQWLMKLHTYGLLRNSFRPSQEVRMMRTYWRQRNDLVRAAASHIQRMQKALTQMNVQLANVLSDITGVTGQAIIKAILGGERDPHKLAAFRDCRVKASEEQIARYLEGNWQEDLLFLLKQEQEAYEFCQQQMAACDRQMEQYLQQRKEPNPDARLPEETRRCRLKKKIHNPQFNLRAELFRITGTDLTQIDGIDVLTAATILSEAGWDMSKFENDDHFVSWLRLCPNNRITGGKVIGKGRLPTNNRASIALRMAASSLRTSKTYLGAQFRRLRTKLGAPIAIKAMAAKLARLVYRMLRYGMKYVDRGAALYELKHRELQVKQLKWKAASLGYQVTPVPAAA

SEQ ID NO: 53653 - protein, 368 aa, unidentified
MKNVTTYVGIDAHKKDLFFAMLIGSQMKPVTWTIANEPNAIRRVVRKLEREAPGPVRACYEAGPCGYALQRQLTTARVACQVIAPALIPRKAGERIKTDRRDARKLAELFRAGLLTEVRPPTPKEEAVRDLCRARDDVREDLQRSRHRLGKLLLRRGLHYSGRHWTPAHRRWIEGLQWAEPAEHVVVDDYLLAIEQLETRRRELDAQLAEIADTDPYRERVGWLRCFRGIDTLTAMLILAELHDFRRFRSPRALMAYLGLVPGEDSSGEKHRRGRITRTGNGLVRRLLVETAWHYQHRPSVGVALARRRRGQPGRVIAMADKAQQRLCRRFRKLAAEHKPTPKIAVAIARELSGFLWAALQPVPVAGK

SEQ ID NO: 53654 - protein, 347 aa, unidentified
MKFYTTFHQYYCGIDLHARLLYVCILDKHGNKILHQKIKADPNQLRKLLKPYIGQVVVGVECMHCWYWVSDFCRELNIEFILSHALYMKAIHGGKAKNDKIDSYKIASLIRGGNFPLAYNYPQETRSTRDLLRRRTHIMRHGADLKAHVINTDSQYNLPAQSLNLKNVSAREGLRHHYDDPIVQRMIELDMNILDCYMRELKHVESFIENKAKQHYGALLNIVRTFPGIGQILALTILYEIGDINRFPSVQQFASYSRLVKCKAESAGKVYGTSGNKIGNGYLKWAFSEAAVLYLRGNDKAKRYLAKLQKRMSKGKALSALAHKIGRCVYFMLRDKQVFDEDKFLKG

SEQ ID NO: 53655 - protein, 387 aa, unidentified
MPQVNDLSRCLAALDQDSTLIAVIEMSQSSWLVAGIVPGIERHPAKKLEPDQTALLRLLHRWRAEAERAGRAINRIAVAFEAGRDGVWLARWLRAREVDAQVIHPNSIAVAREHRRAKTDRLDVALLKRSFLGWLRGEPDHCQMIAIPTLEEEDARRPGREREGLVGERTRIINRIKSTLAWLGIRGFKPHLRNAAARLEMLRTPEGMPLPANTLAELHREMTRLQLIGRQIREIETARLERLRRQPNAGAHPMIRLLTQVRGVGVETADLLANEAFARPLRDQRAVARYGGLTGAPDESGSRRREKGLARAGNARIRRGMIQLAWRFLMFQKDSHLAQWYWRRTVDARGATRKTMIVALARKLLVSLWRLATTGEVPEGVVLRPAL

SEQ ID NO: 53656 - protein, 341 aa, unidentified
MKEYIGLDVSLKETAVSIRRDGKRMWRGKCASDPKVIAELVRKRAPAVELVVFETGPLSVWFYHALVQERLPAICIDARHAAGALEMAPNKTDANDADGLAQLAEIGYFKAVRVKCFDSMLTRTLITVRTRLVRMTVELSNQIRGIMKTFGLTVPAGQGNVFDQNVSHLLDDQDELATIILPVLAAWRSLRERTAELSRKLVADARRSEACQILMSIPGVGTITATAFMAAIEDPGNFRKSRSVAAWLGLTPRRYQSGEVDYDGHISRRGDKHLRGLLYEAAVVILTRSFAQSGLRTWGLKLKERIGFKRAATALARKLAVTMHAMLKSGEFFNPSIGAAA

SEQ ID NO: 53657 - protein, 344 aa, unidentified
MNEVITIGVDLAKNIFQVHGVDAEGGVVVRRQLRRGQMLAFFKKLPPCLVGMEACATAHHWARQLIGLGHEVRLMPPHYVKPYVKRSKNDATDAAAICEAVTRPTMRFVSVKSMDQQSVLMLHRTRELLVRQRTMLINAIRAHMAEFGIVAPAGVPRIKELLTVIADEEDLRLPSLARTCLESLVRQYLSLNDEIIAAEQHITRWHRSNEVSRRLETIPGIGPIIASALTATITNPEVFKSGRELAAWIGLVPRQNSTGGRQRLGNISKQGDQYLRWLLVAGAMSVIRHAKRRGRACLPWLADIIDRKPTKVAAVALANKNARIVWALLKYGGTYRSPQSVSAE

SEQ ID NO: 53658 - protein, 400 aa, unidentified
MISVGIDVSKEKSTICILKPYGEIVSKPFEVCHTEKELSELTSMLLRLNDDVRVVMEATGIYHLPVLCYFQEKGLFVAVVNPFEMKEYRCQGLRRVKTDKQDAVTISNYGIDHWYRLKEYEPEESIYAELKLLGRQYRHYMRMRVESVLELTHLLDYTMPGIKTLLKGWNETNGKDKLGDFVEEYWHYDNITKKSEEQFIESYLKWAKEKGYHQSQDKAAKIYMLAKEGIPTVSSDTSSTKMLVQEAVRVLREIDNTLMTILTQMQALSKSLPEYPVVRAMGGVGNVLAPKLIAEIGDVRRFHSGKALIAHAGIDAPPYQSGQFTGTERKISKRGSSSLRKIGYEVMRCLKTHKEPEDAAVYRFILKKEKEGKSKRAAKIAGLNKFLRIYYARVMEVYQK

SEQ ID NO: 53659 - protein, 410 aa, unidentified
MAERFVGIDVALHEHRVAVLDRDGEAVGPSFTIAASTDGVATLLRTLAARAATAAETLIGLEASGHLWENLEAALVGAGYRVIVLNPLQTRRYRDVVRRKAKTDDIDAHVIAGLLRSGAAQASYVPDEPIQSLRELARLRARLMADRQDYLRRLVAQLDVVLPEHHAVLGDLLTARARGILAQFPTAQHLATANPRAIRRAAADAGARGFALDDATSVRDSARRSLYSGKAAAARAHVVRTLVGQLERLTTAIDEVDRAATTLLPPSDPGTGPSDAELLQTIPGIGPQTAATLLGELGTLTRFTDARALVAYVGFYPVINQSGDRAATPRLSRVGSRLARHSLYLAAVNAVRRSGEWRTIYLRKKAQGKTGKQALVVVAVKLLHAVYAMLKHRQPYNPSRLLVASATIGT

SEQ ID NO: 53660 - protein, 324 aa, unidentified
MTGPALGIDIAKLKFNACLIKHDGKLKHKVFPNTSSGFEQLTDWLSRQGVSTVRACLEATGTYSEPLALFLAGAGHTVSLVNPAAVKAFAQSRLSRTKTDRVDAELIARFCLAQEPPAWNPPAVEVRELQALVRRLDSLVEMRVMEENRLSAGVTVDSVRRSVEEHLAHLNEQIKRTQELIRNHINSHPRLKQRSELLDSIPGIGEATAALLLSEITDIKQYRSARQVAAYAGLVPRERQSGSSVRGRTRLSKIGNARLRRALYFPAITALRCSPFFQAWAEGLRQRGKCKMSVICAVMRKLVHLAYGVLKSEKPFDPQWAKSA

SEQ ID NO: 53661 - protein, 352 aa, unidentified
MEMIALDCHKHYSVACVQSPEGRYLAEGRIEHRRGSIRAFLAPFSDGCPVAVETIGNWYWIVDEIEQAGKVPRLVHARKAKLMLGSINKTDKLDVRGLNRLQQTGTLPTVWIPPAQLRDHRELPRTRMVFATARTRLKNRIHSVLDKYGLQDQLTGVSDIFAAGVRERLEGCIEQLPAQAAYTSELLLEQLEAVQEIIEALETRMAELFKPTADLERLDTLPGVGLILGVVLMLEIGDIQRFLCAECLASYAGTVPRVHSSGGKTHYGRTRPDVNHYLKWAYTEAANAVAVHRDSLAQRHVGQLYNRIRSRRGHASAVGAVARHLAEATYWMLTKKESYRERGITEVSPQGL

SEQ ID NO: 53662 - protein, 392 aa, unidentified
MEIYVGIDVAKETHWACALDPRAQVLLDRAVENDQAAIERLVADLRGLGGEVVVGLDITGSLARFLEAILLAEGVRLVYVPGIAVNRAGQGFSGGERKSDPRDAHTIAELVRTRDLRPILPGDETAIALRLKVTRRRELSDDQTRRISRMRQLLAAIHPGLERRLDLTAKGPLVLVTRYVTPAEIRRAGLKRLMAYLKRTPHLHAVEALAQRSLEAAEGQSIAVPGEASFADMIRELATEALQAREAIARIDRDLEALLERHPDGALIRSLPGMGAVLSAELIANIGTIERFHSADALASAAGLTPVIRQSGKSRSWRRAFGGDKALKRVFFQSAFCAVSTRDPLSKAFYDRKRREGKHHTQAIIALARRRVTVLWTMLRTRQTFDPTQKAA

SEQ ID NO: 53663 - protein, 343 aa, unidentified
MEYIGIDVHKRESQVCILDDGAAVMEERRSRFGAVLGTRPRARILLEASTESEWVAQCLEELGHEVIVADPNFAPMYATRSRRVKTDRRDARTLAEACRLGAYRPAHRMSAARRELRAALTARDALVRTRVRYISLIRALLRREGIAVASGSSGAFLRRLETITLPAALQAALAPLVTVLAPLNAAITAADAHITEAMESDAVAVRLCTVPGVGPVTAAAFVATLDDVARFRGAPQVAAYLGLVPQERSSGDRQHRGGLTKAGNARARWVLVQAAWAIWRDRTPRTATLRAWAERIAVRRGKRVAAIALSRRLAGILYALWRDGTAYEPQRVGRRPATRQVAA

SEQ ID NO: 53664 - protein, 341 aa, unidentified
MEEKKTIIWAGFDVGKETFSASLDQISENGKAKITLLPCRDFKRNPEGITKFFQWAEKFASEKELHIVMETTGCYSQQLTDWINQSHPEVNVTIENSRNIHAFIESLNLPHKTDKLDAQAIARFGTERQPHPTNRPSKTILTIRELSRERTALIKARVELQNRQDTITSSIVRKINAQTLATLTMQIKRIEKEIKACIVEDEEILSEVHIMTTMPGVNFVSAYSILAEIGSLKQYSIKELSAISGLAPRIQQSGSSVHSSFMSRRSSGRLRQILYLDSVPGVPKIPFLQDFQQRLLAKGKKKMTVRCACMRKMLLMLRSMVVHNRPFDENFLKNSQTALEL

SEQ ID NO: 53665 - protein, 365 aa, unidentified
MARSFVTEDRAWKEASYIMLHVGLDLSRKRVDVCLISDQGELVDELAAPFDEDGLRRLSERVAAKQTGRVRAVVESMNGARFVHDALEVHGWDVLVADAQRVKGLAPLACKTDKIDARVLAELSFRDLVPAIWLPDPRVRRERELARFRLHLVRHRSSLKNRIHSTLITFGKPCPVSDLFGVAGRKLLGRLDVPAPWRENVEASVLLVDQFDRQIDAVASELKFVGADHPYVPLLMSAPGVGWLVGFSIACEIGDISRFSSPTKLCGYTGLCPRVIQSGETDRRGPISKHGPKYLRWALFEAALNACDHPVYKERYERTKKRLGRQRGPKVAQIELSRKLTEAIWHMLTRNQPFAPAGAPFRLAA

SEQ ID NO: 53666 - protein, 347 aa, unidentified
MANGIVVGIDISKNTLDVAIGRDGAATVFSNDQEGHQALVAVLRRQPISLVVMEATGRYQFACACACAPQAAGFQVAVVNPRQARDFAKAMGRLAKTDRVDVLMLAELAEVIDKRPDRDRLTRPMADETQQRLHALVTRRRQLVRLQVSERQRKYASHSDVQPGIIELMNILKRQVQDIDASIAAHLAKYQVSLTKLFQSVKGVGPATTAALISELPELGQLKAKQISSLVGVAPMNRDSGQSRGKRMICGGRATVRSALYMAAIVAMRHNPLIRACYERLVAAGKPKEVAIVACMRKLLIILNAMVRTGRPWKETAATAQDDAEAHIVPQRGRGAQSFIACTRPSP

SEQ ID NO: 53667 - protein, 326 aa, unidentified
MKVIGIDVSKAKLDCVWIRDLAGMKVKSKVQANTPAGHQALIDWAMKQTGEAIAGLHFVMEATGVYHEALAYALHDAGARVSVVNPARIHNYAKSLGSLTKTDKKDSVIIARYGMTQSLRLWVPERVEVRQLKALIARCDAVKQDIQRELNRMEKAQVSAVSTEVRTSIETVHAQLEAERKRLESLIDNHIDRHPGLKDDRALLESIPGVGPVISQQMVAVIRSRSFNWASECAAFLGLVPIEHESGSSVRGRPRLSKQGDGRIRAKLYMAAVVATRHNPDIRHQYNRLLKRGKSKMAAIGAAMRKLVHICFGVLKHQTPYRPQPV

SEQ ID NO: 53668 - protein, 367 aa, unidentified
MKKNTTLKQSLSSTDVSACTTVAVDLAKQVFQVAGEDALGQVLYEERLKSREAFHAFLRKLAPNIVVLMETGPGAQAWARQLLAQGNLARILPAQLVAKHRTGAKNDRNDVLAILRANRDQKIIAVPIKSAAALAMQVLHRARQGYVRRRTATSNQMRGLLMEHGVALAQGDVAISQTLPRVLEDATQPLPDMLRELIDELLGEWRQLGERINVLTGRLEAAAKEDDTARRLMTVRGVGPIIATAILAKQTEPQRFADARRFAAYFGLVPDQNSSGSKVRLGRMCKRGDGYVRSLMVQGAHAVLRQLRPDSEQPDDRRLQRWQSRLGRKEAAVRLANRNLRIIWVLLQNDQTYRRQPADGRPAATSC

SEQ ID NO: 53669 - protein, 317 aa, unidentified
MTKIICGVDVSSTSLDAFVGPSGPACSFRNTAEGIAELAAFCRQQSVELVALEASGGYEKQAFALLWAGGVPVALLNARAMRDFAKGMGLLEKTDRIDARVIAWFAAVKGSAPSFPAPAQQQRLKALVTRLRQLTELQTAQRNQRLLVSEATVLESIADLLKVVASQIRMLEGEITALLASDPLWQRLDQALRSIKGVADRTVARVMAEMPEIGTLSNKAVSKLAGLAPLAHDSGKREGRRPVRGGRRNVRAILFVVAGVVRRHDPDFAAFHQRLSAAGKPRKVIRIALAHKLLVRLNARARDARKAFAVSGVCQSA

SEQ ID NO: 53670 - protein, 414 aa, unidentified
MKVVYPICCGIDVHKSFLVGTIISTTDGVQPHYQKKRFSTYNHDLHRFCDWLHANNCLDVCMESTGKYWVPVFNILEERGIRTTIANPKWVKAVKGNKDDTKDSKWIGDLFRLGLVPGSFIPPKEIRILREFTRYRYKLVCMKSSEKNRFQNAFTVCNVALDSVVSDMFGKSASAITDYLISDEAFNPEHCVSLLQRSLKKKSDSVLESIEGYSITYEQKLRMRIVHSHLDYISKLIAKVDDAIHSMVEKHEGLISLLCTIPGIDRNCAITIISEIGTDMSQFGSSKRLCCWAGLTPGNNESAGKKKSVRITRAGVYLKPALVQAAHAAVKSKESSYYRLKYENISRRRGKKRAIIAIARMILTAIYSMMSAGEVWNPTDLMKVDMPESLKEKTISKAIKQATKFLQNQGLTVL

SEQ ID NO: 53671 - protein, 342 aa, unidentified
MQITTIGLDIAKNVFQVHGINASEKVVVRKQVRRSQVLEFFKALPPCLVGMEACATAHYWARELTKLGHQVGLMPAKDVKAYVKRNKNDAADAEAICEAVRRPTMRFVPVKSAEQQSRLMLHRTRDLLMRQRTQVINALRAHMGELGIAAAQGREGLKELLKIIASEEDARLPVDAHTSLVVLAMQLQAVQTMIGSIEKRIMAQHRSSEASKRLETIPGIGVIGATAIAATVTDPKVFRSGRDFAAWIGIVPRQDSTGGKQKLGPISKQGDRYLRRILVVGAHAVLRYARLQPEKYPWLTQLLARKPFKVVAVALANKMARIAWALLAKGGIYRAPALAAAA

SEQ ID NO: 53672 - protein, 346 aa, unidentified
MFYLGLDVHGKWTTVKGFNPQTGEGVELVRVPNDPGAMPAALAGLGGPLHGAMEAGTNSWAMYRLWRPLFAELTVVHPADLWDRQRDRQAKTDRRDALRMAQKLYRGELKGIYIPEERIQDLRVLVRSKVRATRWVTRLTNEIASLLRSWGYVGQRSLLSKQGLKDLEQVRDLPEHSARVLGLWRQLLSTAQAIEQELERAVEREAAQDADCALLQTIPSVGPFTALLVKAEVAQVARFATADQFVSYVGLAPRVQQSGERCSYGKLGPWGNRWLRYGLVLLANRIARSRKDNRLRRVYLRTCLGQKQNAAKIAVARKAARLMHYLLTHREVWKEAGKERRALRAA

SEQ ID NO: 53673 - protein, 348 aa, unidentified
MRFYTKTHKHYCGIDLHAKKMYVCIIDGEGNILVHCNINCNPAEFLRTIAPYREGLVVGVECMFAWYWLSDLCREEKIELVLGHALYMRAIHGGKAKSDKIDSKKIAAMLRGGMFPVAYEYPREMRATRDLLRRRNFFVRKRGELMAHIHNTVTQYNLPALGFDLSCESNRHQVAELFSDLEVRKIIEMDVAMIDSYDDALKILEKDIEKSARKHDRHALMLLCSILGIGPILSMVMLYEIHDINRFETVQQFASYCRLVKCSHESANKKKGTGGAKIGNAHLKWAFSEAAVLFMRCNPQAKKLVENLAKIHGKGKALSILSHKLARAIFYMLKNNKPFNREKFFATA

SEQ ID NO: 53674 - protein, 427 aa, unidentified
MSEEKSIELRVSVDVGYRRHSVAIGLPSGEVLEEFEIEHRLEGFQDFFSRIEKHNPKQGYSVAVAMEGYNGYARPLDSMVRQRGYRLYNINNLKLARFKEIFPGAAKSDRIDARKGLELFQLRDHLPLAKEVLQEVSGTPQHNEVLKRLTRRRRRLVNERVRVVNNLQADLQAVCPGLLEITSEASNQWFLNFLLSADTLPQLARLRKASLLKIPAVGKKYASLIEAWQKRAHFGAEVEWVSEMIQEDAQRCLDLEEKIKTLETKIQQVATDSKIAKTLLSIPGFGPVCTSELAGEIGTIERFSKEGSLALYLGMSTLDNSSGKYQGTKAPKHVNTRAKAAMMIALDRHRKYVPESQRYYEKKRSEGKRHNQAIRALGRHLCRIIYKMLKEQREHQLRSEKGNTKTKVASRSCVKTNIRRPKISVNV

SEQ ID NO: 53675 - protein, 387 aa, unidentified
MEVRVVSTPSAGADNEPVHCYVAIELSKSSWIVGFQTPLTNKTSQYQVKACDANALLELIERIRTRVARELRRPIEVMSCYEAGYDGFWLHRVLKAHGIHNHVLDPASLQVNRRARRAKTDRIDADRMVRALIRYLRGEPEACSVVRVPSVEQEDAKRLHRERRRLIAERVQHVNRIKGLCATQGIYDYSPLRKDRLARLDGLRTGDGRALPTRLKAEIVRELKRLELVIEMIATVEAERDAILTNPASTHVNAGKIKMLAKLRAIGPEFATNLVGEVFYREFANRRKLGSYVGLGSSPFCSGPVDRDQGISKAGNPTARSMMIELAWTWLRYQPGSALSIWFRERVGNLKGRPRRIAIVAMARKLLVALWRYLQTGLVPTGALLKA

SEQ ID NO: 53676 - protein, 345 aa, unidentified
MKVYNVNDFAALIGIDWADTKHDICEHPNLTDKYHFAIIKSKPQALHEWAMSLKQRYPNQQIAVACELKKGPLIYALAKYKHLTLFTINPSAVANYRKAFTPSHAKDDPADAFIQVEILSLHMDKLTVIEPESPAIRSLAQLVEYRRSLVQDRVNLSNKITTSLKNYYPQALEWFKEKDTFIFCDFIKKWPSLAHAKRAKKQTLLDFFNDHNSHYVHVNEARISSIKDAMALTEDAGVIEPNQLLVEVLIAQFKVLLKGIESLDSVIKQAYKAQKDKVIFDSLPGAGPQLSPRLLVAFGSNRERYHDASELQKYAGIAPVIERSGKKMWTHWRYSCPTFFEANLC

SEQ ID NO: 53677 - protein, 326 aa, unidentified
MEPANIGIDVSKNSLDVVLLHEGKRHYQVVENNLSGFKHLSAWLERKGLQQVHLCMEATGQYGDAAATYFHQSGYQVSVVNPARIKAYATSRLTRNKTDKADAMLIAEYCQKEKPSLWSPPRDVFRTLKALVHYLDDLMAMKQQERNRMEFSSTDKLVESILLEHIALLDEKIKEVHRAIHQHLQSDLQLKHCCELLVSIPGIGEWTAARLLAEIQDFHTFENARQLTAYAGLNPRKYQSGSSVHRKSRLSKIGNAHLRYALYMPAIVAMKHNPIIRELCQRLSERGLAKMAIVGASMRKLLVLAYGVIKSNSPFDPQFAQKAIAD

SEQ ID NO: 53678 - protein, 338 aa, unidentified
MAIVYVGIDLAKNVFALHGVNEGGAVGLKQPKVARAKLTALVVALPPCTIGIEACSGAHHWARQFQAHGHTVRLMAPKLVTPYRMSGKRGKNDAADAAAICEAVQRPNMRFVPVKTEEQQSRLMVHRARQGFVAARTACINRIRGLLSEFGIVLPLKAEVVRCEAHKHLEDLPGCANLVIGDLLSEVSHLDERVKQYDAYVRAMAKECTAAQQLMQLMGVGEITATAIVAMVGNAREFDSGRQFAAWIGLVPGQYSSGGKARLGRITKAGDAYLRSLLVLGARSVLNAAQGKTDSLSRWALQLRQRRGYWKAVVAIAAKNARMAWAVLTKGESFKLAA

SEQ ID NO: 53679 - protein, 504 aa, unidentified
MWYAGIDWADQHHDALVIDEKGHQVGSIRIDHHPQGLAKLNTFLQQFIGSRPKEQMACIIETTHGLLIASLLEAGWPVYPVNPRTVDRRRSASGAKTDTIDAYLLAKTGRADFADLHRLTPDSEKVAELKLLTRDQDALIQTQTRLVNQLTACLTAYYPVALELFAKLQQHTTLVFLQTYPTPQQASAASREQITQVLKQAGHPNPLGVAPKIVERLHQPHLLADAVMTRTKSRLMVALVSQLLPLIAQIAQYDKEIDTLFLTHEDHAIFESLPRAGQRLAPRLLAEIGDDRTRYQSASCLQALGGTSPVLYQSGMYSKAHRRLGCIKPLRNALQHFAWQTTQSEPWARDYYQRKRAEGKSHTVAVRALANVWVRIIFAMWMHHQCYETATFERAQHQHARKLPSAASVSRPLCSCAYRATHLATVALSMRCVLMTSHKQAVWITGLCPVADMALPLLSLNFFSSPKLLQKGLTIESLSLLFPVILAPSAAAEDLLHTAPVLLF

SEQ ID NO: 53680 - protein, 374 aa, unidentified
MDVVHPRCAGIDISKKDAKVCVRIQGRGNRRTSSTVTTWGAMTNQILALREHLLERKVTCVVMEATSNYWRPFYYLLEELLEVMLVNAHDVRTVPGRKSDVSDAAWLADLGAHGLVRASFVPPEPIRVLRDLTRARTMITHERTREIQRLEKLLEDTGIKLSSVATDVTGVSGRLMLEALIDGRNDPVQLSQLAKGRLRSQIPVLTEALTGHFSAHHAFMTRLFPGRIDAHTADIDKLSARIDEAMAPFRPARDLLISIPGFSTTVAEIFIAETGGDMRVFPTAGHLASWAGAAPGSNESAGRVKSTKTRPGNRYLKGALARRRPRRLPLQGNLFLGEVPAHRRASGADEGSRGGGARDARRRLEHAHPRRLLP

SEQ ID NO: 53681 - protein, 348 aa, unidentified
MKNKSFVGIDISKNVIDVSIFREDTNIKMFPHEVFNNTRKGFGDMCSWLKKNRVVLSQALFGMEFTGCYSLDLEKFLTSKNYSFCMLSTRIVKHHPMGTIDKRDKNDSAKIADFLYRYDDTECAKPYKLPSKAMQQLKQLVNERKFLVEQRTNFMNRMQMFETKEDSAMYESYIKKLNHDIEKIDQEECELMSKEEDVFDTFQNLLTIPGIGFVNATNIIAITRNFTAFDTARQYARYVGVAPCSHTSGTSVKWRARPSAHCNGQVKADLSMAALRAVEYDVEMQMFYNRKLGGRKDSDTKRKALNAVKFKLIRRMFAIGKQKRKWEVLNTSDDRKNLHIEKSKASEL

SEQ ID NO: 53682 - protein, 424 aa, unidentified
MKVTYQTCCGVDVHKSFLVATIVKTTGGIEPSYQKKRFSTFNNSILEFKQWLINNNCHDVCIESTGKYWVPVFNLLEDDINVVIANPKWVKAVKGNKDDTKDSKWIGDLFRLGLVKGSYIPCKAIRILREYTRYRYKLVSCRSSEKNRYQNALTVCNVALDSVVSDIFGKSSTSIIDYLLEQSGTTINHEEIASKLLRRLKSKEDAVIESVEGYQMTDAPKYRMRLVRAHMDYITAEINDVDKMIENMISSDPDYENAVQLLCTIPGVKHDSAVTIISEIGIDMSQFCSSKRLCCWAGLTPGSNESAGKKKSVRITRAGVYLKPALVQCAHAAVKSDKSPYYKKKYESLVKRRGKKRSIIAIARMILTAIYQMLSTGEQWNPSDLYKIDMPVALVEKQKAKAIKQAKKLLQREGLLPPDEPLAS

SEQ ID NO: 53683 - protein, 350 aa, unidentified
MERYIGGDVHAASVSFSVRNETGKVLRRDVVETNGQALIGYVSQQPGQVHLCIEEGEWSQWLHEILSPHVAELVVYRAKWTPGMKSDRRDADGLSERMRTGRVGTPVYKDRKQFVALREASRRYTMLTHDQARVKNRIKSFYRSRGIACGGNDVYKPDARDERMRALPVPHQETLKFLGRELDALVELQTEAEKAMLQESHRHPMARVLETVPGLGPIRVAVMLPIVVTPWRFRTKRQFWSYCGFAIVTRSSSDWVKEGDRWVRVPVRQTRGLSFSHNRQLKWIYKGAATTVVAHMAGSPLHDHYDAMLEHGTKPNLAKLTIARQIAAISLSMWKAKERYDPERIQRTQS

SEQ ID NO: 53684 - protein, 392 aa, unidentified
MLYIGIDVAKSKHDCFIIDSDGAVYTDNLRIPNNRAGFNRLLETILNALNGEPVKNAKVGLEHTGHYSINIKRFLESQGFVVTSFNPLETNAFRKASTLRKTKTDKGDAKTIAAMLFSNESIPTLNPSYQIQELKSLTRHRFRLIGYRGKLKTSLTRIIDIVFPEFPDFVWSVHQKSSQQLLLELPTPDAIAHCHLTRLTNLIRKESRGRYGREKAVALRKLAASSIGFSDEALAFELRQTIRMIQNVQTEIDALDQKIKSIVRELDTPLLTIPGISYTLAAIILAEIGDIDNFSHPSKLQAFAGLDPSTYQSGKYTASHSTMVKRGSTYLRWAMFQAARLVAMRDKTFADYLAKKRSEGKHFNVALSHVSKKLLRTIFYMLKHNEAFVPQN

SEQ ID NO: 53685 - protein, 355 aa, unidentified
MDSIKYIGLDVHQSTISVAVLSADGKLVMQCVLATQASAILDFFQGQRGTLHVTCEEGTHSAWLYDLLVRRVVKLVVCNPRKNALLKAGNKSDTIDARKLAELLRAGLLSPVYHGQNSTAAVKQLGRSYAALTEDSTRIMARLKALYRSQAIACAGQKPYGSRHRDEWLAQLTESGLQRRARRLYQQLDLVQQLRREARHDLILECRKHSETRLLRTIPWLGPIRAAVLLGRVQTPHRFRSKRQFWAYCGLALETRSSADYQMVNGQLERRKKPVFIRGLNLNHNHDLKNLFKSAATTASGSSGPFRPFYENLLGKGMKPELARLTLARKIAAITLHVWKKGEPFDPEYLKPQAA

SEQ ID NO: 53686 - protein, 442 aa, unidentified
MNRRCFGLDVHREFAQVAVWEDGLVRQVGRVPATPEGFRLFADSLAATDEVAIEATCNTHAIAKLLEPRVARVVVSNPQKTRVIAESKVKTDKVDAQVLAQLLAADFLPGVWLADEATHALRRQVARRANIVRQRTRLKNQVQAILHRNLVPRCPAADLFGIKGRAWLTEQELPADERQAVEALLRQLDFHGQELQIIDAQLSQIALASDDVKRLMTIPGVDSTVALSIVAAVGDFSRFASPGQLVSYIGLNPRVRQSGGLAASHGRITKQGRAHARGMLVEAAWSAARIPGPLRAFFERVRSRRGMQIAVVATARKLTCLCWHLATKGEDYAFARPSLTAQKLRRLELRAGAPSHRGRKGTTGAYSLKEVRAGELELAAQAEHAYRQLVADWQAKAPSNKVGAAAASGARLLGHQKGQAARQDQAPDPALRSGVGHAHTRA

SEQ ID NO: 53687 - protein, 451 aa, unidentified
MKNEKVKKGISRISTGLPVFNEHAAGIDIGDTLHYIAISDGDGGHEVKTTTGFTSDLKEIVGYLKQNNITTVAMESTGVYWLPLFILLEQAGIEPYLVNAAHAKNVTGRKKDDTDAIWLHKLHTCGLLQKSYQPENDMRIVRDYTRQRKRLINLSSDAVRRLLKALELMNIKIHTVISDILGKTGMSMVKAILAGQRDPEELAKLCDPRIKASKEEVIKSLEGIWKDEYLFMLRQAVEHYEFHKQQIKECEVVLEKILRERVVKIKEGDLTGMEHPIKKSKKVKRNEFEYEITPYVKEIVGVDISGIPGIGESTAIEIMSEIGVDMKKWKSEKNLCAWLNLAPNTKISGGKILSSKRMKKKNPAGQMLMQAASTLRNSKSSLGDYYRKKRAQLGGKGAVVATAHKMARIIYKMILKQTEYSEEKINFEDQKFKQNKIRKLEKLLENLKKAS

SEQ ID NO: 53688 - protein, 424 aa, unidentified
MNCNQNFKISQVTEGTLVLGIDVGSNTHYARAFDWSGLELSKVFKFKNSFEGFQSFVLWVNDLCCKYNKSKVIAGLEPTGHYWFSLGELLKENNITIAIVNPYHVKQSKELDDNLQTKNDSKDLKVIAKLVIDGRYSFPYIPEGIYGELRVADKLKNDITQQIISIKNKIHRWLSIYFPEYEKIYSSIDSKSGFLLLKETPLPKDIVELGSEGIVERWKQTKLRAVGLDKAKKLEEAAKKSIGCKNITSSARFEIKLLIEDYEYKQNQLNSITEELNKLCEKIPMIKEIAEIKGIGIATAISFVAEVGDIRRFKSAKQVQKYAGLALKENSSGKHKGLTRISKRGRKKLRTILFRATISLIGFNKEFSSIYNYYIERKDNPLKKKQALTAICCKMIRIFFTILSKGIKYDETKMLHDIKRPVAA

SEQ ID NO: 53689 - protein, 351 aa, unidentified
MKYYTTTTEFNCGIDLHTRQMYICVMNRAGEVLVHRNIRNNDFDFFLKLVEPYRKDLTVTCESCFVCFWLADACEDAGIQFVLGHAYYIKSIAANKHKNDKEDARELAECLRTNRIPPAYVCPRDLRPIRKLLRRRNKYVKNRAVLTGHSTCEVMAAGNQPLKISSNSKERWREGIRDSFDDPLDSFTADAELFMIESYDRVIQQMEQRIEKHAKNDQLQEYRLLRTVPGIGKILALTILYETIDIKRFPSEKDFVSYCRLVAGTNESGGKDFGGKGRKMGNPYLKWAFMQAAILCKRADPKLNAYFEKLSRQKGKHVANAIVAAKFARAVYFMLDRKTGFSREMLLKGKR

SEQ ID NO: 53690 - protein, 342 aa, unidentified
MQITTIGLDIAKNVFQVHGIDAKEKVVVRKQLRRDKVMGFFKALSPCLIGMEACATAHYWARELTKLGHEVRLMPPKDVKAYLKRNKNDAADAAAICEAVRRPTMRFVRVKSEEQQGQLMQHRTRDLLMRQRTQLINALRGHLAEFGIVAAKGDAGLKELLAIVADDRDERLPSDARASVIVLAAQLEAAQTMLRSLDKRIMKQHRANEASRRLESIPGIGIIGASAIAATVSDPMVFRSGRDFAAWIGLVPRQDSTGGKQKLGPISKQGDRYLRRIIIIGAHAVLRRAKENPHKYPWLTQLLARRPFKVVAVALANKMARTAWALLAHGDTYRAPELVAAA

SEQ ID NO: 53691 - protein, 348 aa, unidentified
MLADQLDYVVGVDPHRDVHALAIVEVRTGGVVFETSVAASSGGYARALQLADEHAPGRRAFAIEGTGSFGAGLTRFLSGEGERVLEVGRLRRERRSGGKSDALDAIRAARSVLGQKRAAEPRAGGEREALRALMAAREGAVNARRAGLCQLRDLLITTPEPLRSELRPLTRAQLLHRLRAMRPQRQRDVELRGALQALRTVAGRVQHLTAEERELAGEIETLTRKLAPQLLDQPGVGPLAAAQILISWSHQGRIRSEAAFARLAGCAPIPASSGQTIRYRLDRSGDRRLNRALHMILVTRRRAHPPTIAYIDRRIREGKSRREATRCLKRYLARNLYRLLEHGPPLAT

SEQ ID NO: 53692 - protein, 335 aa, unidentified
MEFTYFIGTDVSKNELDFAVMQGKALLFHKEIQNTPTSIKTCIKELIKLPGFDLNNAVFCLEHTGIYSNHLLSILHDRKAHICLEAATQIKNSLGNLRGKNDKVDAIRIAEYAYRNRDKLRLWQPKRDVIQQLAHLSTLRSRLVEVQKVIKTPLKEAGSFIKKNQGKQNDKLCSKTLTAIEFDLEKIEKAIDVVIAGDPELNRLFKLVNSVSGIGKITAATVIITTNEFKDINDPKKFACHAGVAPFVKESGLFKGKARVSHMANKRLKMLLHLAALNSVRYNEDLKLYYQRRVIEDKKNKMSVLNAIRNKLILRIFACVNQNRPYEKNYSRSVA

SEQ ID NO: 53693 - protein, 342 aa, unidentified
MNNSVISIDLAKNVFQVCEFNQYHKPTSNKKVRRANLLDSVRKLKPTRIVMEACYSSNYWGREFKEMGYVVDLIPPHQVKPFVVGNKTDHNDALAIAEASFRSTTVFVPVKTIEQQDIQSLHRIRDRYIKSRTAVANQMRGLMSEYGVIVEKRIAVLRREVPYILEDAAQPLTVIAREFVADLYDELRNYDRLIDAKNRLIGELMESNEDYHRICEVPGVGPIVGSAMIAAVGNAKQFKNGRAMAAWIGLTPRLYASGDTSRMGGMSKRGNQALRRLLIHGARSVVNWSEKKTDGLSLWIQALKKRMPHCKVVVAVANKLARMIWAVLSKEEAYRSPEPKAT

SEQ ID NO: 53694 - protein, 417 aa, unidentified
MLPLIEAIHNHPVRHDFEKKVASGKLLKRVVTKEMLMNTETTLTNQYNRFEPYLFLAFELSQNLWKLGFTIGVAQRPRIRNISARDLLALQHEIQAAKKRFGLPANAPVLSCYEAGRDGFWIHRYLGENGIQNLVVDSASIEVSRRARRRKTDKLDVNKLLAMLIRFHSGEQKVWRVVRVPTKEAEDSRQLHRELMILKSERTRHTNRIKGLLTSQGISISVKLDLPDRLETLRLWDGSRLSEALVMRLQREYQRWVLVDQQIDQLTAHRKELLKTSQQPNVEQVRQLMRLKGIGVNSAWLFVMEFFSWRDFRNRREVGACAGLTNAPYQSGDTSRDQGIEKAGNRFIRAIAIEIAWSWLRYQPISKLSQWYQQRFGHGSKRQRKIGIVALARKLLIALWRYLETGTVPEGALLKAA

SEQ ID NO: 53695 - protein, 374 aa, unidentified
MAQRSEGLRAAKGLSMGLDLGDRISEVCLKDREGEVLERAKVKTKDTAMAAYFGGRARCRVVLEVGTHSPWVQRLLAGLGHEAVVANPHQVRLIAESVEKGDSSDAEILADLGRMGFGALRTVEHRSAEAQADMEVLRARALLVRQRAALATHIRGVVKANGARVSGCGVRASSEKVLEQVPLALRPTIAPLQQQVEALSGSIRAYDRRVAELIEERYPVATLLQRVRGVGPITALTYVLVIGRPERFRRSRQVGAYVGLVPRRRQSGDRDPELGVTKAGDGEMRRLLVQCAHHILSHESADSALRRWGLKKAEGGKTAYKRAVVAVARKLAVLLHVLWLRGEVYEAFPNSRDEQGEPAEQAQKEVAVSTTTVA

SEQ ID NO: 53696 - protein, 366 aa, unidentified
MKKNSTVATRRKEIFREKKLTIGMDLGDRFTYYCVLDEVGEVMVEQKLPTTKQAMKQVFGRLPRSRVALETGAHSPWVSRQLTQLGHEVIVAHARNVRLIGESSRKDDRLDARMLARLARLDPRLLSPVQHRSAKAQVHLTVIRARAALVGARTALVNSARGLAKSYGERLRKCGTQQVSKDLAAGLSTELRTALEPLLAEVASLNQRIAEYDRRIEQIATEVHPEVALLKQVKGVGTLIALTYVLTVGDPHRFRRSRDVGCYLGLRPGRRNSGSSQPQLHISKEGDRYLRTLMVQGAHYILGPFGQDSDLRRWGLKLCERGGSNAKKRAVVAVARKLCVLLHKLWVSGEVYEPLRHHSNAASAAA

SEQ ID NO: 53697 - protein, 354 aa, unidentified
MIIIGVDYHPEFQQIAWVDTETGELKEARLHHPEEAERYYRELAEQGVQVRIGMEASGHARWLERLLAELQFELWIGDAAEIRTKRVRKQKTDRQDAQLILKLMLEDRFPRIWVPSSENRDLRQLLWHRHRMVQARTRIMNQLQAVALNEGLRCKKKLWREPGRQQLESFQLGPWASRRRHDLLQLLDRLNPTIADLTQAIEREAEKCPEAARLRTHPGVGALTALGFVLILGKAERFRCGKQVASYLGLVPLEESSGNRRRLGHITKQGSSMLRFLLVEAAQVTVRSVPEWRSKYFHLMLRRGRKTAKVAMARRLAVRLYWMWRQGRNYEQLQKFGSHAGQPGNRDGVQAHIE

SEQ ID NO: 53698 - protein, 340 aa, unidentified
MSEITTVGLDLAKHVFQVHGVDASGTPVLRKRLRRSEVLAFFARLPGCLIGLEACATAHYWARELQALGHEVRLMPAQYVKAYVKRNKNDAADAEAICEAVRRPTMRFVPIKTAEQQAALLVHRGRERLVRQRTALVNALRAHLAEFGVIAPLGLRNVAHLIAVVRDASDARLPDLARQVLRVLAEQVEQLEAAVAALEQQLTAWHKSNPVSQRLATIPGIGPIIATAIAATVVEASGFRSGREFAAWLGLVPRQHSTGGKARLGGISKRGNRYLRRLLINGASANLLRSKATNADPWVIGLRRRRPSLVVAVALANKTARIAWAVMHRQVNYQRMAAAA

SEQ ID NO: 53699 - protein, 341 aa, unidentified
MKVTTVGLDLAKQVFSVHGVDEHGKAVLRKRVSRGKLLELFAQLPSSLVGMEACSGAHYWARELERLGHRVGIMAPRFVVPYRKSQKNDGNDAEAICEAVSRPNMRHVPVKSAEQQGLLVLHRVRQGLTAERTGAINQLRGLLAEFGIVLPKGRYQLRAHIGAVLENAENAIPSLARRAFADLNTRIGELDQKILAYDRELEALARQSDAAKRLQQIPGIGPITATALVASVADAKQFNNGRQFAAWLGLVPRQYTTGGHVRLGRITKRGDVYLRTLLIHGTRAVLSSTKEKPDRLSRWAEAVRARRGTRKAAVALAAKNAHIAWVLLARGEDYQLRRAAG

SEQ ID NO: 53700 - protein, 361 aa, unidentified
MKSTGQGRRDRQEHWVGLDVSKGTFDAALALSEQRYPCTPLRALPWRTFPRTRRGVRSFLAWLDKLAPGKNVRVVMEATGQYSVELTTWLLARRATLQPAIENPKNTKAFIDSLNQRNKTDGLDARGLAFYGVERRPAPYEPLSETRQELRTLNRYRDTLVAQRTALKNRRHEKSSSTVVARMQTKQLRQLERDIAAIEQEMKRVVNQDDAFKRDFELLTSIDGVGPITALTVLAEIGDLRRFERARQLTAYAGVSPRVVQSGTSVRGKTHMCKRGNQRIRQALYLSAMATLNTKKPNSLSAMHYRLCEEGKEGKAALGAVMRKQLTVMRAILISGKPYDPAFTKCGKVRSQPAQKGEVQA

SEQ ID NO: 53701 - protein, 409 aa, unidentified
MFFVGIDIAKKTHQAAIISDDGKLIGKAFKFSNTIDGFNLFLEKLGAVNTELSQFEIGMEATGHYWLNLYTWLADKNFKLHVINPLQSDALRNLYIRKTKTDSVDSKIIADVIRIGQYSETQLADDKIISLRDLSRQRFFLVDMASDLKRKIIAMMDRVFPEYQDFFSNMFGKTSVQIMKECTSPEQILEIPTEKLTEMLKKASRGRFKESKAKELKELASNSFAAMLSSDMISLLIRQMLEQIDLLEKQISDIEQIIAAQFAEINTKIATIPGVGTTLGATILSEIGDINRFEKPKQLIAFAGLDPSVKQSGNFVGTESHMSKRGSPFLRRAIWLASVVAVSHDPLFKYLFQQKMASGKNYSQAMGYICHKLLNTIFAILKTGEEYKPIYPPEIDVSKLANEAINSQK

SEQ ID NO: 53702 - protein, 349 aa, unidentified
MVNAHRTLSPRRVTRTGAVVMSEHLQGRESVMVRRLNAGVDVSKETLDVAVGSRSERFGNDAQGMESLAALLRQQDVDVVVLEATGGYEAAAAAALQAAGLTVAVVNPRQARDFAKAMGVLAKTDKVDAKVLAAFADVIAQHERRASFLRAVPDEQRVHLAALVSRRRQLLEMRIAEGNRLALSHKVTRKSMAAVIKILDKQISDLDRDIDNHLRGHFRDLTKVLSSAKGVGAVTATTLAAQLPELGQLDRRAIAALVGVAPLACDSGKRSRRRSTWGGRSQVRAVLYMATLTASRYNPVIRTFYQRLLAAGKAKKVALVACMRKLLTILNAMARDGTQWNDALHAINP

SEQ ID NO: 53703 - protein, 413 aa, unidentified
MKQIPSHFAAHIGLDWADRKHDICLKEVNDEQLSYEIISHTPEAIDDWALKLQKRFNNHPVAICLELKAGPIVYALLKYDFIVIFPIPPKALAKYREAFTQSGAKDDPTDAYLQLDYLLKHPTALKPLIPDNVETRILQRLVEDRRVLVSEKVRLTNRITAALKSYFPQALQWFDDIDTQIFCDFIQQWPTFNQAKQARASTLTKFFKSHRSVRQNVIDKRIKAIKEAMPLTEDEGAIIPFERLVNVFVRQLSQTLIAIHEYDLEISERFKHHSEHNLFESFPGAGPVFGPRLLAAFGTNRERFNSADEVNRLSGVAPVLKRSGNYTWTHWRYSCPKFLRQTFVEWANQSIRYSFWAREFYDAKRAKGKSHQATLRVLAFKWIRIMFSCWKNKMPYDESAYLFALKKRKANVI

SEQ ID NO: 53704 - protein, 343 aa, unidentified
MDQYIGLDCSLKDTAISIRQDGKRIWRGKCASDPKLLAQMIRKHAPHPKRVVFETGPLSTWFYHALTAEGVPAICIEARHAQKVLDETLNKTGANDADGLAQLAEAGFYKAVRVKAFDSMLTRTLVGARNQLLGIATKLSNQIRGLMKTFGLIIPKGTGRVFDGNVREFLDGNDGLARIILPLLEAWRDIRKRAADLDHQLLATARESQEAKLLMTIPGIGAVTAVSYVAAVEDPENFKTSRSVGAWLGLTTRRYQSGEVDYDVHISRRGDNHLRGLLYEAATVILTRTSAKTESSLKSWGLKLRERLGFKRAAVAVARKLAVVMHSMLKTGEVFNTSAGATA

SEQ ID NO: 53705 - protein, 368 aa, unidentified
MKKNTSNKQRTGKGDRQGHDKEAFAFYIGIDLGDKHGEVCVMNPAGEVHQQFRLRMKAADLQGYFLTIGRSRVAVEAGGQSQWVAELIQRCGHQVYVSNTRKVAYIYESDDKDDPGDAYKLAELVHFKPRLLHPIQHRSQALQADLSWIRAREALVESRTHLINTIRGISKAFGERLPKCSVESFTAKLAAEIPAAIRGAVAALLETIDHLNEQIHYYDQMEEQIARERYPKYMLLAQVNGVGVHTALSYMLTIGDPERFQKSRMVGCFLGMRPRKKDSGESRPQLGITKAGDEYLRKTLVNCAHYILGPYGKDSDLRRFGLRICERGGKNAKKRAVIAVARKLSVLLHRLWVTGEAYEALRNSKRVA

SEQ ID NO: 53706 - protein, 340 aa, unidentified
MESFAGADLHKRVTQLAVLRDGQPPSQFRFSNDPKTVDGVLKKLPRGTKIAVEATGSWWWFVEKARELGHEVSLSHPKQTKAIAHARLKTDKVDAVMLARLLKADFLPTVWIPGEKERYVRELLAHRVRLVRTRTAVINELHAVYAKRNVEVPGMIWHRIRPVPWRAEELSGYAPRIVSENAELLKLINQQIQNLDKELVKAGQEDPQAKRLMTIPGVGVATAVAVSCWIGDIRRFPSAKKLVSYFGMAPKVRQSANRKTHGHISKEGSGMVRWLILQAALVGIRMSKGPARGHYIGVSRRRGKKIARIAVARKLLGTIFHMMKEEIDYEEFLKRGSNAQ

SEQ ID NO: 53707 - protein, 347 aa, unidentified
MEQITRIGMDTSKNVFQLHGVDAAEKPVLRKKLTRREMIRFFEKLPPTLVAIEACGSSHHWARLLGSLGHDVRLIAPQLAKPYVKRGKNDAADAEALCEAVSRPTMRFVPVKTAEQQAALMLVGVRERLIQKRTQLVNAIRGYGAEFGITAATGACRVVPLLECIAEDETIPELARELFVLQGKEYAQLQCEIERIDAKLMEWHRNDECSQRLAKIPGVGPIGATLLMMKTPDPHLFKSGRDFAAWMGLTPKDHSTAGKTRHGVITRAGDELLRSTLVVGATAVVQHARNGRGRNLTPWLIGLIARKSPKLVAVAVANKAARVAWKLMVSGERYQCVAPPALTAVAA

SEQ ID NO: 53708 - protein, 354 aa, unidentified
MKDEPIRYLGLDVHRSTVVASVRDEQGKVVMKATIATEEKAIVTLVRSAGPRVHVAFEEGTQAQWLHDLLIGEAERVVVCNVRGRDALRNANDRIDADEMSKRLRDGSLKEVFHGAPEMLTLKELVRCYSNLVEDATRVMLRIKALFRARAIPTPGVSVYRPSQRKQWLAKLEGGARVRAESLLSQMDVLIELRPKAKTAMIAAACRQPGWKVLRTIPFLGPVRVAFLLAIMRTPWRFRTKRNLWPYAGLAVVRQSSADQEFRDGKLQRSRKSPMTRGLNRNHNPMLKATFKGAANAAVAKAGPLRDYYEASLARGVRDELAKVTLARKIAAVALHLWKKGEGFDPKKLTIQAT

SEQ ID NO: 53709 - protein, 362 aa, unidentified
MKRMTYQQVTVGVDTHKHIHVAVALSETGQRLGDLTVSADPGGYEQLLSWARSFGEPWCFGVEGCGSYGQGLVGFLRRHDQRVVEAGRPDRRDRRERGKSDPIDAENAARAVLAGTATGVPKTADGTSEVIREIKVVRDTAVKCRTQAIITLKTLVVTAPDELRHELQPLSKAKLRDRCAGLRPGKIDTPLAAAKHALKALARRWQHLDEEIKTHDRLLDGLTAQVAPALREAFGIGVDVAAEMLILAGDNPERIRSEAAFAKLCGACPIPASSGATQRHRLNWGGHRQANSALYRSVIVRMRFHPPTIAYVTRRTQEGKTKREIIRCLKRYLAREIYHTITQSPTAITPQPVPRKPAQNAS

SEQ ID NO: 53710 - protein, 374 aa, unidentified
MGIIVYVGIDVHKDQNTVCLFTREEDNLLIELGKIPAGTEYMVKALKKAEKEYFKGQDVEWKAGYEAGPTGYGLCKGLQKKGIDCGIMAPTTIIKASGERTKTDRRDAASLAMALANGTYKPVHLLDDEDSSAREITRLRGSIKNKLEKEKQNLLSFLLGVGKSYPESGNYWTQKHFDWLNAVHFDDILLEYSFQTYLAEIRASMELLARIDARIGEMANTERYKDNAAKLVCFTGIQTHAAVSLLCEMGDFTRFETAEQFSAYIGLVPGQDSSGKRQCYTSITKTGNGRIRLLLTEAAKGIKNSNPFQKSKRIQARQALASPDIVLYADKGTRRIKCKMSRMEKNGKNANVATTAGARELACFVWGMMTGNIA

SEQ ID NO: 53711 - protein, 386 aa, unidentified
MIYVGIDVAKRTHYACISSDKHGIITQPFPFENDESGFSKLRNSFKKYRKNDIIVGIEATGVYGENLIAHLSELGYKIALINPIETGTLRKRNVRKTKTDKIDSRGICKYLASEDYRLLQPQELKMSQLRGLCRFRQNFKKSKSRLKTQLVQYLDVCFPEFHTLFSTIHGKGTYAVLMEFPSAQAVSKANITKLANLLENASRGKLKRERAEALKALAKHSVASKNADKDFQIKQTIVQIQLIESQLAEIEEQITKLYDEVDSVIKTVPGIGAINGSMILSEIGDIKRFSKPKHLIAFAGLDPATSQSGQWKANSTRMSKRGSPTLRYALVNAAWNVSLNNDTFGEYYNEKLAQKGRHYIALGHVAGKLTRVIHAMLKNNMEFDLP

SEQ ID NO: 53712 - protein, 397 aa, unidentified
MYIVGIDIAKRKHEAAVIDGEGAVIIKPFSFTNNCSGYNRLLAMLTKAKLPLDEVSFAMEATGHYWLALFTRLQKEGFRVQVINPVQTNSIRSFYIRQAKTDPRDALLIAEVIRFGHFSESTLHPENIYELRELCRGRHAIVSMQADVKRKVVALLDQVFPEYETAFTNMFSDTSMAILQTCPTPKELSEMPLEELCHLIEVSSHKRFRMAKARELQELARNSFGFAMAGDVFSTMIRLYAKHLIFLKQQVQEMDRKIAEIMDTLDTPITTITGIGPTLGAYILSEIGDISRFSSAAKLAAYAGIDPTMRQSGKYNGVRNRMSKRGSPYLRHAIWLAASSAVLHDPALKLYFQKKRDEGKPYMASVGHACRKMVSIIYAVMRDNKAYVPYIPSKIFA

SEQ ID NO: 53713 - protein, 370 aa, unidentified
MLNVTTFVGLDVHARSIKAVALDAMTGEVRCAAFGYDAAAVADWVDSIGPKAKCVYESGVTGFDLQKKLTALGVDCVVGAVSKMIKPSADRKRKNDRNDAEFLARMLSVGNVVEVWVPDDECEAARDLVRALDDAREDLKRCKQRLSKFLLRHGYVFNETTPTGRRKGNWTAAHWAWIRSISFPEKADDDVLAHYVDAVRQAMEDKKRLERLVEAEASKPRWKKRVDSLRCLKGVDTMTAADIAFEAGEFSRFKSARSFAAWLGLTPSEHSSGESVRQGGITKAGNKHLRRVLVESAWHYLNATAHSKDLVKGQIPDPAARRHAAKGVRRLVRRREGMLERGVHKNKANVATARELACWCWAIGCMVESA

SEQ ID NO: 53714 - protein, 328 aa, unidentified
MNNSNVVCDVLGIDISKAKFDVALIQGNAKIKSKVFANNPEGFAELKEWLNTQGVNNLHGCMEATSTYGNALARFLVEAGYKVSIVNPSRPKAFGKSELSRTKTDRADAKVIARFCAALKPAPWTPPALEIEQLQALVHRLDSLTAMQQQEQNRLATADPILVEAINAHIDFLKEQIEMTKKLIRQHFDQHPHLKSQRDLLTSIPGIAELTATVLLAEIRDVSAFDTADQLAAFAGLTPREFSSGSSIHGKPRLSKMGNSRLRKALFMPAIVARRYNSPIASFCDRLTAKGKSKMSVIGAVMHKLLRQVFGVLKSQRSFDPNFVQIPS

SEQ ID NO: 53715 - protein, 426 aa, unidentified
MNANNDETPYDYAAFIAIDWADQQHVFSLQVAGKTKKETGILEQKPEVIGSWVAQLRERFGGRSVAIAVEQSRGALIHALLSYDFIVIYPLHPTTVAKFREAFKSSGAKSDPLDTDQILEILTKHLDRLKPLNPDTEQTRLLGRLVEDRRKAVDLRTGHIQALLAALKEYFPQAIELANGNLTSRLAGDLLKKWPTFQAFQQAKPSTIKRFYYGHNIRSPKILEKVLNLAPRAQPLTTDPAIVESGSRLSQMHAQLIQTVNPIIEDYDRRIETVFQAHPEAQLFRQLPGAGPALAPRLLSFFGTDRSRYETAQNVHNFSGIAPVTKSSGKTKAVYFRRACPKFDRQTFHEFARLSLAKCQWARNYVDYYKAKGKKYHTIIRALAFKWIRILFRCWHDRTPYRDDIYLKALKKRGSIFATLHLEQKS

SEQ ID NO: 53716 - protein, 354 aa, unidentified
MSRKTTNLEAVATIGIDIGKNTFHLIGLDEKGAIVLRQKLLRGQVVTRLANMPLCLIGMEACVGAHHLGRQLKALGHDARLMPARYVRPYSKGQKNDFRDAEAIAEAVLRPTMKFVAIKTVEQLDLQALHRVRERLVSQRTSVINQIRAFLLERGIAVRQGLRALRTEIPIVLAMTDKLSPRMIRMIGDLCTDWHYLDERIETVSDEIATLSEEDEGAKRLMTVPGIGPIISTATVAAIGRGDVFSKGRDFAAWLGLVPRQMSTGGRTVLGPISKRGNRYLRMLFVQAANAVLLHPQSWEKHGLKSWIEAAARRLNRFKLAIALANKLARIAWGVLQGGRNFEVRSMKSAAQAA

SEQ ID NO: 53717 - protein, 407 aa, unidentified
MEVLYPRCAGLDVHAASVVACVRIASGATVRYERRTVATSTRGLLELTDWLVGHDVTHVAMEATGVYWKPVWHVLEGHVTLVLANARHIRNIPGRKSDKNDATWIADLLALGLIRSSFVPPAPIHELRDLTRTRKQLVREVVRHTQRIQKTLEDANIKLTEVVSDILGVSGRAILQALVAGETDPERMADLAHRRLETPRAQLIDALHGRVTAHHRFMIKLHLAQILALETAVADLETRIGEALAPFRAAVSLLTTMPGLKDTAAAVVVAEIGTDMSQFPSAGHLLSWAGFCPRLDESAGKRRSTRTRHGAPWLKTTLVQVAWTAARKKDSYFHAQFLRLKSRRGPKKAILAVAASMLTDVYVMLRDGVEFRDLGNQYFVQRDKQRLTNRLLQRLRDLGVEVEVKAA

SEQ ID NO: 53718 - protein, 334 aa, unidentified
MEQVTTVGIDLAKNVFSLHGVDGAGRTVLRRTVRRDRLLETVAGLSPCLIGMEACSGAHEWGRRFQQHGHTVRLMAPKFVAPYRKSDKNDGNDAEAVCEAVSRPSMRFVPVKSTEQQALLAMHRVRQGFVVERTAVINRLRGLMSEFGVVLPLRSVTVRRQAAQAAEELPELARRAVADLLEQLRLLDARIDSYDREIEAQARLSEPAHRLMKIRGIGATTALAIVATVGDAREFKNERQFAAWIGLVPGQYSTGGKSRLGHISKRGDAYLRNLLVQGARSVLQTAPAHQDRLSRWALALQERRGYYRTLVAIANKNARIAWALLAKAQELSAV

SEQ ID NO: 53719 - protein, 407 aa, unidentified
MKKKDVIEFKQVVERGCGMDVHKDLIVATILGKDIKMQTKSYNAFTSSLIKLKEWLLKNGITHVAMESTGVYWKPVFNILGDDFKILLVNARHVKNVPGHKSDKKDSRWLAKLLLSGLLKGSFIPERPIRELRDLTRYKTKLINQVTAEKNRFQKILEDANIKLSSVLKDVFGATGTKIINHILEHESYHPEDILQYVHSKVKSSREDIKEALTGYVTPHHRFMLKTIMRNILRIESTIAEVDTQIEVSIEPYKVERELLESIPGVSKVGSTCIIAEVGVDMGQFPDQNHLASWAGICPGSNETAGKNKSGRITHGNKYLRSLLVECGWAASRTKDTYLSAKYKSLVGRRGKKKAIIAVGHKILIATYFIIRDKIEFKELGPDHLNNFKKDRLIAYYRQQLEKLTAA

SEQ ID NO: 53720 - protein, 392 aa, unidentified
MVVSIGIDVSKDKHDCFIVSSEGKVLADAFTIPNTMDGFNCLLQRIQDCTTPQDKMKVGLEATGHYSYNLLGFLLDNGLTTYVLNPLRTNLYRKRLSLRKIKTDRVDARTIASMLLSDAGLKPYTDTAYHNEELKSLTRYHFDKVKERAKLKSSIARLVCIMFPELEKLVPSLHIASVYALLEEFPRAKQIAAAHLTRLKALLETASKGRYKRDMALEIRDATRNSIGSWMPAKSLELQHTIRLIRELDNEIAEIEEQIQAIMDELNSPITTIPGIGFRMAAMIFAEVGDFTRFDSPDKLLAYAGMSPSTYQSGQLKNCYPHMEKRGSRYLRYALYNVTKYVCHWNPAFAAYLAKKRAEGKHYNVALSHAAKKLLRLIFAMERSRQPYCAAP

SEQ ID NO: 53721 - protein, 408 aa, unidentified
MQKVISVGIDIGSKEHRIAAMNPERQIIAEWSIKHRHSEFKQTCHQIKSLAAQHSLPVIIGIEGYNGYAAPFDKYLIVQGFEVKQVNNLTLNRYRQLFGQPFKTDEYDARLIASYLQQPFELKNNNYQENQVKLPQQVNVDIKLLSRHQLDLTKERTRFKNKLHKLLLSYFPEIFDLYSDPFSANCLALFTLGKTPAELGKMKMQRLADVKPKSSKRGMGTLRAQKLKSLLEQTVPALIGGNRVQAIVAADYAQRIYDLNQAINRLDQELASLLGQHPCGKTVLSIPGAGTKTAARIIGETIDIHRFSTLDKYSAYSGVVCLRNDSGKSKRAKTSKQVNHILKDTYMKIAFTSLRTNSASAVYYQRKIKAGHSHFSALKCLAHQICKVAYKLMVSKSMYQEPYYKKAA

SEQ ID NO: 53722 - protein, 417 aa, unidentified
MEPNRYRHYIGIDWATAAHRICLLDQEGQVLGKISVPHSGTGLAQLLEWLAHHGVVPAQAAVAIETPRGAVVETLVERGYAVFAINPKQLERFRERYSTAGAKDDDRDAWVGASALRTDPVAFHRVNLDAAEVIQVRELYRTHDELQGDAQRFANRLSEQLRRYYPQMLALCPAGDQPLLWDLLELAPLPEVAHQVSAGQIATVLRRRRIRRLTAEQVLTQFCTTPLHVAPGAAAAASAHALVLIAQLRTVHELRKQTLKQLILALRPMRTRRTDPLRPSDAEIVDSLPGAGTLTVAAMISEASQAVAERNGTALRTHSGVAPVTRQTGKHRGVGMRYACSQRLRNAFYHFAMTSPQADPLARHHYDELRQQGHTHARALRGVADRWIAVLMAMLRAGELYDPTRRKAWRAAPEQTP

SEQ ID NO: 53723 - protein, 418 aa, unidentified
MSEDESARGTRRYVALDIHKHYCVIAAVDREGRGVLHPVRVEHADLEGWLKKKLLPSDHVVFESTTNAWHVYDLLEPLVERVVVANPIKVKQIAQARVKTDIRDTLILARLLAANLVPDVWVPPAHVREMRQLLSQRRQLVETHTQIVNRMHSVAHRHHLKHERGKRFNEKNTLWQKDKRLSKVEQFQLELEMENRAYIEKQISRIGKEVAKLSHQSPWAESMTYLMQLPGFGVITGMTVLAAIGEIERFGSAKPLASYSGLTGGLDQSGTHLVQKGITKEGRKELRWAMVEVAQRAVKSDPRWTRKFQELHKRMHRNQAIVAVARQLLELVWYVLTRRQAYRHFSQERIAYKYLTWAWQMDEAARDGLTRQQFARYYLMRLGIGHDLTRIALDPRHPRKLATEAELLALRPELNHIE

SEQ ID NO: 53724 - protein, 347 aa, unidentified
MIVFAGLDISLEETHVCVVDSNGKTLKEARVPTEPEAIVPVLQRFGEGLKRVGFEASSLSPWLSNELTKHGLPAIIVEARHMAGALSAMRNKTDRNDARGLAQMMRTGWFRQVHVKSDDSHRIRVLLGNRRMLKRKFLDIENAIRGTLKVFGVKMTRTTRGRFEEDLRERLREEDPVLQDMTESMLHARRTLYEEFQKCHRLVMQIAREDEVCLRFMTVPGVGPVTALSFKSCIDDPGRFRRSKTVGAHLGLTPKRFQSGTVDYNSRISKCGDPETRWLLVEAGNSILSNVRTWSVLKAWGMRLQKRLGHRRAAVALARKLSVILHRMWLEGSTFIPSNADLKARAI

SEQ ID NO: 53725 - protein, 345 aa, unidentified
MKIVGCDLHTRYQQIAMLDAETGELVERRLEHESGEARAFYAGLSGPVRVGIEATGHTRWFERMLRELGHELWIGDAAQIRASMVRKQKTDARDAAHLLELLLSDRFPRIWRPSLEERDLRQLVWHRQKLVWMRNAVGNQLQALAMGEGVCRKKKLFTKKGRAELEGLRLGRWASHRRQELLTMLDQLDASMKELDQAVAEQAEQNQSATLLMTHPGVGPVTSLAFVLTLGPVQRFERSKQVVSYLGLNPREHSSGGRQRLGTISKQGNPMMRSLLVEAGHTAARLDSELRQDYQRLKMRRGSGVAKVAIARKLAVRMYWMLRSPASYAQLVRMQGSPRGTLVGP

SEQ ID NO: 53726 - protein, 342 aa, unidentified
MDEYDGRQFVGIDLHRQRSVIVRQSESGEQLSAVRIVNDPVALALQLEQAGSDPEVVLEATYGWYWAVDVLQDCGARVHLAHPLGVKGFRYRRVKNDVRDAGDLADLLRMGRLPEAWIAPPETRELRELVRYRAKLVAIRSGLKAQIHAVLAKAGVLIAVSDLFGVTGRQRLAKVPLGPAYAQRIGSLLELIDILDGHEARFAAMIAERLDTHRGYQAIQQVPGIGPTLAAVFVAEIGDVHRFTDPAHLCSWAGLTPRHRESDTVVHRGHITKQGSKAVRWAAIEAVQRHPTTAKIAADKQRIEARRGKNIAKVAAARKLLTLVYYGLRDGQIRALDRARAA

SEQ ID NO: 53727 - protein, 437 aa, unidentified
MLPYLNPNAAGVDIGATEIYIAVPADRDGQPVRHFSTFTEDLHAAAAWLKACNIETVAMESTGVYWIPLFQILEAQGFTVFLVNAHHVKNVPGRKSDVSDCQWLQYLHSVGLLRGSFRPKQAVCTVRSILRHRDSLVQMASSHVQHMQKALDQMNLHLHHVISDITGLTGITILEAILRGERNPYTLAKLRDRRVKATEETIAKSLVGDYRREHLFTLGQSLEAFRHYQRLIAACDTEIAQCLETFDSKLDPPEGPRPQSREGSIASDDAGKFDLRTHFHQIMGVDLTKIPGINVLTTQTLLAEIGPDFSRFAQGPALTSWLGLCPDNRVSGGKVLSVRTRKVKNRAATALRIAAQSLHRSQSYLGHFYRRMRAKLGAPKAITATAHKLARIIYHMVTTGHEYDETICAQNEMQNRQRLEARLRKQARDLGLQVVPI

SEQ ID NO: 53728 - protein, 359 aa, unidentified
MSTMPEAEVFVTLGIDTHKHTHLVVALDQLGRRLDQLEIPTTTAGFVELYAWASELGTIDTVGIEGTGAYGAGLCRWLRERGLVVVEVERPDRKLRRNAGKSDPIDAEAAARKVLSGEATVTPKSGAGNVEMIRVLRLTRRSAVVSRSQVTNQLHALTVTSPPALREQLEGRTTRKRVAIAAKFRPGDEPDTVLAATRYAMKKLALRFRALDAEIKDLDRQLTRLVTTTAPKVVALRGVGIHTTATLLVTAGDNAERLRSEGAFARLTGTAPMPASSGQTDRFRLSRGGDRQANAALHLIAVNRLLCDPRSKAYVKKRTGGTKANLDILRRLKRYTARELYPLIVEALTEAEPDLVPAA

SEQ ID NO: 53729 - protein, 352 aa, unidentified
MQYVGIDWAYRRAAWCALSDGGAISGEGMVPADEDGLARLVLTVGREVRACVEMMSGAVWVRDRLAAAGWKVEVAHARKVRDIAPLACKTDKVDARVLAELCRRDLVPALWLPSLEDRALRERLRRRMHLVRLRTSARNRIFGLLTQWGLRLSLKRLRAPDAMDVLAACGVEEAWRRSIAEALEVIDLLDARIAPLDAELRPLAAADPRVLLLRTIPGLGDLLGLTFAAEIGDISRFSAPRKLIGYAGLAPKISQSGDRSRTGALSKAGSRTLRWAAVEAAHQSWRPTNPWHALYADVTRRAGKNPAKSAVARKVLIAAWHVLSREQPFKPARPRNTDSTTVPASSRCFLAA

SEQ ID NO: 53730 - protein, 338 aa, unidentified
MNIVFLGIDLAKNVFQLCGLNQAGKPVYTKRTGRKELLQTLANIPACLIGIEASTGAFYWQREFEKLRHKVKVISPQYVKTFVRRQKNDGNDAQAIAVALMQPTMQFVPPKSPEQQDIQALHRARQRIVNRRTATVCQIRGLLLDRGSPIGSAVSRARRAIPLILEDAENGLSSRMRRTIAELYELFNDLGRRIHFFDKEIETVFRQSEACQRIARVKGIGPKTATAIVAAIGKGTEFKNGRHFAAWLGLVPRQHSSGDRQALMNMMKKGDKHLRTLFIHGARAVVRVATNNNDGHMNQWVNQLKERRGFNKTTVAVANKNARIIWSMLRNETEYQVV

SEQ ID NO: 53731 - protein, 405 aa, unidentified
MGARRRSPGPSHVLITPDHASNVVGIDPYKRTLTATVIDPRGGILASEHFRVSGEGHRALEAWALQFGAVARWGIEGSASWGRHTAVFLADRGHDVRDVCANRTARQDRARQRGKSDVLDSERIAREVLAHPLLPKAFKRAGQDQGPDEQHQLLAIWHNQRRSILTSRQHLVGEAESLLCELPLELRDDLPSSKAVRPRLAALERRDRRRRYDAPTTLRLQMLDEYRAQIVALDREEKQVVAELKKLVQASGSTLTELCGLDTRSVAELLVETGDPRRFTEGGFARFNASAPLAASTAEGPGEPVRHRYNPGGNRRVNAILHRMAVTQLRCEPRAQRIYANARANGPHTKKEARRILKRHLSDVIYRCMIRDMAHSPTAPSLMSEPRAAAGQSRVARQGRAKRAA

SEQ ID NO: 53732 - protein, 412 aa, unidentified
MTAINQFTAHIGLDWADKKHDVCVQFNNGERVFHVIEHTPEALDTWLKALHKKVKGRIAVAIELKKGPVVFALQKYPFITVFPVHALSLARYRQTFWPCGAKDDPQDAELALDLMLLYPKKIKAIEPDNADIRLLQQLVEQRRQLIEDKRRFVNRLINTLKQYYPQLLEWFSHRGSLLLCELIMRWPSLQQLKRARRDTIRNFLNAKGGRATVLTEQRVASIDNAIPLTTDPSVIEANALMATALAAQIRVVSEIIKTYDERIETLFDTLPDAELFKSLPGMGPCMGPRMLAALGDNRDRFNSAEEIQNYAGIAPVTERSGQKSWVHWRWQCAKFVRQTFVEWAAKTVNSSYWSRLYYQSLRKKGKSHQSAIRALAFKWIRIIYSCWKNRTCYDEAKYLLALEERKSPLLKP

SEQ ID NO: 53733 - protein, 406 aa, unidentified
MKQYLGIDIAKHEHVLGSRYESGEQHGKAFAFANDEKGFASLLERFRELGAEPEESLVVVESTGHYWMALWEFLVAHGYDVAIVNPVLTDAFRKADTLRKTKTDRVDAFLIAEYARFKNLGPTRVSPEGAEGLKQLTRYRHHLVSERTALKNRLTSVADRIFPELAGLFSGKHSATARAILGEYGTAARVAATDIRTLTRTVREASRGRHGRAKAEEVKEAAKRSVGTTFAAEALAFEAGHIASLVGHLDAEVASLDAEIARLLDPEVGALLQTIPGIGPVCAAAIAAEVGDPDRFDDPKKLMAYAGMDSTKSQSGGFDGDEQHMSKRGSAPLRNALMTAADGARRLDPYFGDYYDSLRARGKHHYVAVSGCARKLCGVILAVLRERRPYEPRPSIQSQQKQPGRG

SEQ ID NO: 53734 - protein, 318 aa, unidentified
MASFLGIDLSKETFHAFLLSDRADAKKVFPNTPIGFEQLTTWLKNRHADELHFCMEATGSYWEALALYLHGLDQHVSVVNPARIKAFAQSELLRTKTDAVDAALIARFCKSQSPEPWVPPPPEIRVLQALMRHCDHLKKTRAQQSVYAQSSDSTVVTASIREVIATLDEQIAQVERKIRQHFDDHPDLKRRRDLLTSIPGIGETTAGSILSEIPHLDRFESAKAVAAFAGLSPRERQSGTSIHGRPRMCKTGNARIRKALYMPAMVALRFNPTLRTFAERLSAAGKHKRLIIGAVMRKLLVLAYGILRSGVPFDENYA

SEQ ID NO: 53735 - protein, 329 aa, unidentified
MSSPSQQEIHVGIDVSKKTLDVYILPSEGKGGSQGESFVVTNDQEGIDELLRRLAEPGLSPKLVVLEATGRYERLAASSIAAKEIPVAVVNPRQARDFAKAIGKLAKTDKIDAFVLARFARAVEPRASVIPDEEATALRAILARRRQLIEMLVSENNRLKMAREKPLQKRIRSHIKWLEREIERTDSDLDHAIEENSAFKANEALLRSVPGVGKVLSRTLLAELPELGTLTHKRLCALVGVAPFNRDSGQGRGKREVWGGRAPARAALYMGALVATRHNPVIKEFYERLLAAGKPKKVALVACMRKLLSILNALMRDRSIWRCPHALTP

SEQ ID NO: 53736 - protein, 402 aa, unidentified
MNAVGIDVSKGKSMVAIMRPFGEIVSTPFEIKHTSSDINSLVKLIKSIEGESRIVMEHTGRYYEVLAHQLSEANLFVSAINPKLIKDFDNDSLRKVKTDKADSVKIARYALDKWQNLKQYSVMDELRNQLKTMNRQFGFYMKHKTAMKNNLIGILDQTYPGVNTYFDSPARSDGSQKWVDFASTYWHVDCVRKMSINAFIDHYENWCKRKKYNFSKSKAEEIYGKAKELVPVLPKDDITKLIIKQAVDQLNSASITVESLRTLMNETASKLPEYPVVMAMKGVGTSLGPQLMSEIGDVSRFTHNGAITAFAGVDPGVNESGSYEQKSVPTSKRGSSDLRKTLFQVMDVLIKTHPQDDPVYQFLDKKRAQKKPYYVYMTAGANKFLRIYYGRVKEYLASLPES

SEQ ID NO: 53737 - protein, 390 aa, unidentified
MIYVGIDIAKLNHFASAISSDGEILIEPFKFTNDGDGFQLLVSKLNSLNAEPDSIIIGLESTAHYGDNLIRYLVAESFQVCVLNPIKTSTMRKNNIRKTKTDKVDTYIIAKTLMMQDSYRFYTFYDLDLMDLKTMGRFYQKTVKQRTRLKIQLTAYVDEVFPELQYFFKSGLHQKSVYALLKEAPTPEAIASMHMTHLANLLVKTSHGHFNRDNAKELRVLARKSVGASDSALSIQITHSIAQIELLDSQLQKIEDEMTEIMKFNDSVIMTIPGIGCINGGMILGEIGDIHRFSNPCKLLAFAGLDPTVYQSGNFQARRTRMSKRGSKVLRYALINAAHNVVKNNSTFKAYYDAKMAEGRTHYNALGHCAGKLVRVIWKMMTDDVEFNLD

SEQ ID NO: 53738 - protein, 364 aa, unidentified
MDVHLRSTTVCALDAETGEAVTRRFRGNPWGEVAEWMSGFPGPSLAAYESGYLGFAPQRELSGLGVDCVVAAVSKVPRSAADFSSKNDRNDAARMAKAILSHDISPVWVPSPEIEGLRDLAGAHDAATARLAAAKQRLLAFLARRGYAYGGTTPAGNPRRYWTYDFLRWLDKVRPADDGGIRALAALRSEVEAASETRDDLLAEYRAAVAAGPLSAEVEALQSIKGCGFALAAAFASEVGDFSRFRSGRQVTSYFGLAPKQRSSADSVRLGGISGAGNALVRRLAVEGSWSYAQAGHQPKLMPKGSGVPLEVRMHGRKGSERLLRRREEMLARGMPQAKANAATAAELVRWLWALGAMCREATE

SEQ ID NO: 53739 - protein, 426 aa, unidentified
MRIVYKRCCGMDVHKNSVTACVLRIDEDGEFEKQTRYFSTMTRDLKEMSGWLASLGVEATAMEATGVYWKPVWNILETEKKLQLLLVNAHHVKHVPGRKTDQKDSEWIAELLQHGLLKGSFVPPQIIRRLRDLTRTRAKIAQNVATFANRIQKVLEDANVKLGSVATDPLGLSGRRMLRALIEGQRDPQQLSQLACGRLRKKISQLQLALEGHFTEHHGFQIKALLELVEFGEKQLCQLEAEIHRLLLLPEPEPHRSHGSAIAEVDTEVDTSSTPPTSPLQRAVELLDTIPGVDHITAWTLIAEMGANMDQFGSASRLAKWAGICPGNKDSAGKRLSGKTAKGNIWLRRALCEAAWAASRTKDTYLAAQYKHLILRKGKKKTIVAVGHSILRIAYYLLTRQCPYAELGGDFFDRSNQEAVRSRLVK

SEQ ID NO: 53740 - protein, 367 aa, unidentified
MKKHSTTEKSSCGMMRANGKRTIGLDIGDRNSRYCVVDEQGEVTEEGSVATTRKGLDRVLGAATRCRLAMEVGTHSPWVSRHLARLGFEVIVANARRVRLITESSRKDDKLDAKTLARLARIDPELLSPIRHRGEQAQADLMMIRARAVLVETRTALINAARGLTKSYGERLPSCGTYQMGRDQAESLSPAIRAALDPLLAEVETVTERIQEYDRQLEELCKRRYPEVNLLKQVHGVGTLIALTFVLTVEDPHRFRKSRAVGCYVGLRPKRRQSGQSRPELGISKEGDAYLRTLLVQGAHHVLGPFGKDSDLRRWGLKLAGQGGKNAKKRAVVAVARKLAVLLHKLWISRETYEPLRLANRSQNVAA

SEQ ID NO: 53741 - protein, 343 aa, unidentified
MESIHYVGLDVHKKTIAYCVKTVSGKTVRQGVVNAERKALREWLTELPEPWMGALEATLFTGWIYDFLKPHAVELKVAHPQMLKAITAAKKKNDRADAEKLADLLRVNLLPECTMMSEELRELRRILRYRNLVVRTATQMKNKMSGLLMEVGATYDKRRLHGRKYFNVLLERVEDVPESVKDLLRLSRGNLELFTAVQKKLTKTLREQPLIRERVERLMSIAGVGEILALTWVLEVGDPARFSSSRDAISYCGLCSAQRESAGKEQRGPISKKRNKHLQTILIEAAKIAPHWNPQLATLHEKELGRGNRNRATLAVARKLVEYLLAVDRRGTPFVKEAPPRVA

SEQ ID NO: 53742 - protein, 338 aa, unidentified
MEYGAIDLHLRHSQIRIVREDGSVVVDRRISTSREALTALFGDRAPMRVVVETGTDSEWVAQTVEACGHEVVVVDPNYALMYGTWQRRVKTDRRDAAGLAEANRRGIYRAAHRVSASQRQQRRVLRVREQLIRVRTQAINLLRAQLRQEGHRLPSGSAAYAVARYRALTVPAALDQALAPVIALLEHLAPALAAANTEATAAARQDPIVRRLITAPGVGPITGLTYRAVVDDIGRFRDAAAASAYFGLVPREDSSAERQCRGRITKMGPSTPRSLLIQAAWGVWRQRARDPLQGWVRRLAERRGRRIAIVALARRLCRILYAMWRDGADYQSAPFAEA

SEQ ID NO: 53743 - protein, 439 aa, unidentified
MVQSGQSLPVSSRLLETEVYMALKIVFPICCGMDVHKNFVVACIAATNGKGITSYMRKRFSTYTNDLRRLSEWLSDNNCRDVCMESTGKYWIPVFNILEKTCNVVLAHPKYVKAIRGKKTDVRDAAWIADIFKHGLVSGSFIPPFEIRQLRDLLRYRVKLTGFNVGEKNRAQNCLTVSNIKLDDVFTDIFGRSSSAIISQLLQCPDGKFDVSPFIDRHCKASLEQIQSAIDGLMCSEQMAKLQIIRSHMNSLALCKKNLDSSIYSLSEQFNPQIELLMTVPGIQQLSAITIISEIGVDMSVFPTAKHLCSWAGLVPQNNESAGKKKSTRISRAGAYIKPLLVQCALSVCMSDKHPEIKSRYLALKKRRGHKKAIIAICRMLLTAIYSILKKSEAYNPTLYRKETASSVPANRRMSFEQAIAFVQSKGIFIVTPDGELIA

SEQ ID NO: 53744 - protein, 397 aa, unidentified
MYIVGIDIAKRKHEAAVIDGEGTVIIKPFSFTNNCSGYNRLLAMLTKAKLPLDEVSFAMEATGHYWLALFTRLQKEGFRVQVINPVQTNSIRSFYIRQAKTDPRDALLIAEVIRFGHFSESTLHPENIYELRELCRGRHAIVSMQADVKRKVVALLDQVFPEYETAFANMFGDTSMAILQTCPTPKELSEMPLEELCHLIEVSSHKRFRMAKAQELQALARNSFGFAMAGDVFSTMIRLYAKHLDFLKQQVREMDRKIAEIMETLDTPITTITGIGPTLGAYILSEIGDISRFSSAAKLAAYAGIDPTMRQSGEYNGVRNRMSKRGSPYLRHAIWLAASSAVLHDPALKLYFQKKRDEGKPYMASVGHACRKMVSIIYAVMRDNKAYTPYIPNEISA

SEQ ID NO: 53745 - protein, 407 aa, unidentified
MEVVIERACGMDVHKDNMTACIMTPEGKEIQTFSTKTIFLIQLMDWIKQHNCTHVAMESTSVYWKPIVNLLEAEDIEFLVVNAQHMKAVPGRKTDVKDAEWIAKLLRHGLLKASYIPDRNQRELRELVRYRRSIIEERARQHNRIQKVLEGANIKLGSVVSDVMGVSARDMLNAIVEGEEDPEKLANFARRTMKKKKDELQLALKGYINSHQRLMLKTILKHIDFLTEQIEMLDQEVEQRVSSYQEDVERLDSIPGIATRMAEQILSEIGTDIKKQFPSAAHMCSWAGLVPGHNESAGKRKSAKTKKGNKYLRSALTEAAHSVRGSKNYLGALYRRTASRKGKKRAGIVVAHAMMRIAYYLLTRKEIYVDLGEDYFDKQRQQSIVQHSLRRLESLGYTVTLQEPEAS

SEQ ID NO: 53746 - protein, 360 aa, unidentified
MISERTSVGLDVHARSVVAAGLDSVTGEVFKRTLVAVHEEVIGWLRGLPGPVATTYEAGPTGFGLYRALTAEGIRCDVAAPSRLNRPCGDRIKTDSRDALLLAQLLQVGQITAVRVPSVTEEAARDLVRAREDARSDLMRARHRVSKLLLRHGHVYYGGKAWTGVHDAWLRRIRFDQPGTRAAYEADLEAVEFAVARRDRLDTTIAAMAADSEFTATVRKLCCLRGVSTLTGFALAVELGDWERFTGATIGAYLGLVPSEHSSGQSRRQGGITKAGNSHVRRLLVEAAWHHKPRYVVGKVLQARWDQAPQAARTRGHAGNQRLHQRWISYSARKKKHTVATTAIARELAGWCWSLATLPD

SEQ ID NO: 53747 - protein, 381 aa, unidentified
MTTPATRNVQERPTEGTLFVAFELSEKTWKLGCTTGHGQQPRERTVPARQQERVLDEIAHAKRRLGLPDTAPVVSCYEAGREGFWLHRFLQGHGITNHVVDSSSIEVNRRRRRAKSDGLDVRKLLSMLLRYAHGERQVWQVVKVPSVEAEDQRHLHRDLETLKQERASTMTRIEGLLSSQGLRVTSLTKLPEQLEALRLWDGSPMPPGLRRRVMRVYAHYTFLSEQIAAVEVERRAQLQTSADASLDKIRQLMQLKGIGINGAWLLVMEFFGWRAFKNRREVGGLAGFTPTPYQSGESAREQGITKSGNRHVRWMTTELAWSWLRFQPDSALSVWFRERFGSGGKRLRRIGIVAVARKLLIALWRFLETGVLPAGAVLKEA

SEQ ID NO: 53748 - protein, 405 aa, unidentified
MDALFVGHDWAEDHHDVHLQDREGRQLAQVRLADGVEGIARFHALIAEHAQDPASVVIATETDRGLFVAALVAAGYRVFAVNPVSTAAYRTRHSTSGAKSDPGDAKVLADLARTDVRNHRPVAGDSELAVAVKVLARAHQGLVWTRQRQANQLRSTLREFYPAALEAFDDLASGDALALLAVASTPEQGRRLSRSKIAAALRRGGRQRNIDRRTIEIQTALRAEHLHAPAIVADTMGEVVSSLVAVIATIQTQISQLEQQLNERFEAHPDAKIIRSLPGLGMILGARVLAEFGDDPNRYDTAKSRKNYAGTSPITKASGKHHVVLARYARNKRLADACYQWAFSAITASPGARAFYDQRRAAGDTHHRALRALGNRLVGILHGCLRHHTLYDEHIAWAHRLTLAA

SEQ ID NO: 53749 - protein, 413 aa, unidentified
MSVSCGIDWAEDHHDVALVDAGGASVAKRRITDDAAGFELLLQLFADVGDSAEDPIPVAIETNRGLLVACLRATGRTVYAINPKAVDRYRDRHSVARKKSDAGDALVLAHILRTDQAAHRPLPADSELAQAIAVLARAQQDAVWERTCAHNKLRSLLREYYPAILAAFASKRAGILRPEARAILAAAPTPRAAAQLTTAQLRKLLGQAGRQRGITAEATRLQTVLRAEYLHHPPLVEDAFGKQALALLRQLNVACTNADELAAAAVAHFDTHPDAEVITSLPGLGSLTGARVLAEIGDDRSRFADARSLKAYAGAAPVTRASGKSLTVTHRRVKNQRLAAVGYVWAFSALTASPGARAHYDRRKTTGDRHTAAQRNLFNRLLGCLHHCLHTRQHYNEQIAFPTTDNNSITEAA

SEQ ID NO: 53750 - protein, 412 aa, unidentified
MTHPQHTHFAGFDWAGDHHDVIIVDSAGVLVADFRFDHSAAGWQHWRDQIAAWPHLGVAIETSFGAVVEQLIDSGVTVYPVAPSSAKGYRQRKYPGGTKTDRHDAWALADALRTDGHAWRALSAKDPIIEELRMLCRDEIALIEERTALVNQARQAAREYYPVVLEAFEDWTLPSTWAFIESFPDTQALLKAGRRAWQKFFHTHKLHRAETVQRRIAVLEAAGQWRIAEPMVKAKRLYLLTKTRQLRALHIQLEEYRRRIEAVFASHPDSGMFGSLPGAGAKLAPRLLGEIGSDRALYADACSLQSVSGTAPVSYQTGKLHKVQMRRACNRHLRHTMHLFSDLSRAQCAWAKVYYDGLKSRGKTHAQALRSLGQRWLNIIFRMWQNHTRYDPELHTRNQLQHGSWVLQHRPS

SEQ ID NO: 53751 - protein, 344 aa, unidentified
MQITTIGLDLAKNVFQVHGIDATGQVVVRRSLRRSQMLPFFAKLPACLVGMEACGTSHYWARELVKLGHDVRLMPPAYVKPYVKRGKTDAADAEAVCEAVTRPTMRFVPVKSPEQQAALSMHRTRDLLVKQRTQLINMIRGLLAEFGVDIPKGLERALLMARQIVDGKAPEVPIEAAKIVTTLSQQALDIHVRLREIDRDLAACLRGNDVARRLMTIPGIGPVGATALVASVTDPHQFRSGRQFAAWLGLTPLQKSSGGKERLGRISKMGDKYLRKLLIVGMTSLVRRVRHNPATIDPRLADLLARKPTRVATVAMANKTARIIWAIMTRGETYRAGHRPALAA

SEQ ID NO: 53752 - protein, 371 aa, unidentified
MKKHSTFIGMDVHKNSIDIAIAEEGRNAEVRHYGKIGGTISALAKAVKKLAVKGKPLFFVYEAGPCGYQIYRYLTGQGHDCMVAAPSRIPKQSGRQIKNDRRDAMMLAKLHRSGELTPVCVPDEQDEAIRDLFRAREQAKSDMKRSKQRLLAFLLRSGNRYDGKRPWSQAFMRWLSELKMPHRSQQIVLQEYINANSQSQERVDRITGQIRQLLPQWHLYPIVQALKSLRGVSEIVASATVAELGDFKRFRTPQDMMSYLGLVPSEHSSGNRIRRGSITKAGNSCVRRMLVEAAWAYRYRARVTPQLLKRQQGLPQHIRDIAWKAQERLCRRYTHLFSIGKPKQVIITAIARELCGFIWDIANQVELPKAS

SEQ ID NO: 53753 - protein, 374 aa, unidentified
MKISIGVDLHKTQFTICMLSEDRKIIEFGEYPTRDAGYEAFIRKVNFLIKNGYEVSAAVESTGNTRYFINRIAGAGVLVKVVNTLKFKVVTESVKKTDRHDARTLAEFLEKDMLPESQLCSQESEDIRRVLKSRAVLVKAVVSLKNQVHALLLSYGIETKRGQLQSKKERQRILSGLEDHKSFGSAAKAVKPLLDTIDQVYAEVKKLEKVLAELIKEDEDVELLKTIPGVGSITASIIRAFTDDIQRFDSAKKYAAHAGLVPWVQNSNQTIHQGKITKRGPVELRTAFVQVVMGMIRAQKKTQAYRLIRKYRDMKQHKGSGKSIIAMARKMSTVIYTMLKNREPFDELKMASVTEYKEIQAAVFDAALAEERSA

SEQ ID NO: 53754 - protein, 333 aa, unidentified
MAKRVFQLHGATMTGHVTFRKKLTREQFRHFMAEHPPCMVVFEACGSASYWAREMAKLGHDAKLIAPQYVKPFVKRQKNDAADAEAIVIAARQPEMRFVSAKTEDQQARAMLFRGRERLVHQRTELVNALRAVLYEYGHVFPAGIGHLKRIEALIEDPDCDLPLLIIAECRDLLAQIAEKTDRIDAKTKALKELAAATDTARRLQTMPGVGALTAVAVEAFGPDMAQFKTGRDFAAWLGLVPRQHSSGGKERLGRMTKAGQADIRRLLIVGAMSRLNWLGQRTISEGSWLSRMLARKPRMLVAIALANKMARQIWAMLTKDEDYRDPALAGAA

SEQ ID NO: 53755 - protein, 395 aa, unidentified
MERPAPVQQTRRGSAVFLILTTNRRGPAVPNNNATQRGLIYLGLDVAKDSIAVGILRPDEVVPDTEKIFHDEASIRRLINRFDSPTQLRACYEAGPTGYELHRLLTSIGVRCDVVAPSLIPRVPGDHVKTDRRDCRRLARLHRARELTAIRVPTRKEEGVRDLCRARQVAVEERRQARQRLSSFLLRHNEVYRDGTTWTIRHERWIAARHFEDRPTKDAFSFYRSGVTIQDAALTAITADLTPYFDDPLFSDPLHRLGAYRGIDYLGALSIISEVCDFRRFAHSGAFMGFCGLVPSEYSSGASVSRGGITHAGNVHVRTQLIESAWSYQRGPNTGVGMKTRQSGLEKEVIDRAWNAQLRLCGRFRRLASRKDSRNTVVTAIARELAGFLYAEMTS

SEQ ID NO: 53756 - protein, 421 aa, unidentified
MFNAVGIDVSKGKSTIAVLQPGGVVIRKPFDVKHSSCELKDLAKYISSLEGETKAVMECTGRYHEPILQVLSDAGIFVSAVNPHLIKNMGNNTLRKVKSDPADSRKIARYAIDNWAELRKYSIMDATRTQLKTLNAQMDFFTKQKAAAKTNLISLLDMTYPGANDLFDSPVRDDGHEKWVDYVAKYWHVDCVRKRSLKDFTESYRKFCKKNHYNFQADRPEEIYVAAKELVAVFPKDDEYKQLVQMGVEQVITASAYAEQIRKEMNRLAQTLPEYNIVMSMRGVGTTLGPQLMAEIGDVSRFTHREALTAFAGVDPGVDESGQRRKRSNGSSKCGSPRLRRTLFLVMDSLLKTKPIDDPVYQFLDRKRSEGKIYKVYMTAGANKFLRIYYGKVKEHLHKLEMEDEPRSSAEDQDSGQSLVN

SEQ ID NO: 53757 - protein, 340 aa, unidentified
MDKITKKKDFIGIDISKDFIDCALLSEDHPGSFKDKKFGNNLSGFESMEEWLLKNKVDLKKAMFCTEHTGTYGLLLFAWLSQKGIDYCVEPGLKIKRSLGLTRGKNDKVDARRIADYAATNKAKLKLFSFPLEEILQIKQLLTYREQQVRIRTSLKNSLQSHKQYEQITGKDFVSTDIKNQIKQFDKKIKLIEKEITAAIESNQKLRKNFELATSVKGIGIVIASLMLVTTNNFSGFEDGRQYACYGGVAPFDHTSGTSIKGKTVVSHLANKTVKTMLSRGANSAATWDPEIRSYYERRISEGKDHKVIINAISCKLINRVFAVVKRQTPFVITYQQKIA

SEQ ID NO: 53758 - protein, 419 aa, unidentified
MNKLYVGMDVSQEDIKVYILDQEGNEATKRFAADNNPIGAETIASRILECCRRLNIQKLFVGLESTSVYGWHIQFYLADHLELKPYDPMIITFNAKIIEAFKKSLGNLPKNDWVDAFSIAERLRFGRLPKSCPVDFRYLALQRLTRHRFHIVGNIVREKNYFLSNLFLKFSGLCQSKVFSNNFGAVATELFNEFLTPDDIAARPLDELVDFLVEHGKDHFQNSVASAKALKDAVHKSYRINSSVDNSLSFVIKSCLDNIHALEKQKKAAEKVIAQEVTSFNNQFLCLTSVKGIGPTIAAGLISEIGGISRFEDDNALAKFSGLYWSEYQSADFTAEDTYLKRTGNEYIRYYFIQAADQLRKYNPEFSQYYARKFKEAKTHKHKRALVLTARKAVRLIFALLREEKLYKPPAPKGGDNEK

SEQ ID NO: 53759 - protein, 354 aa, unidentified
MIVIGADPHKSTHTASAVDARSGELRSSETVSARAAGHAQLLAWGRSLGEQRVWAIEDCRHVSGNLERFLVARGERVVRVAPKLMAGARRSTRERGKSDAIDSLAVARAALREGLERLPSAHLDEQALEIKLLADHREDLVSQRSDDQRRLRWHLHDLWPELEIPAGALDRQRWLDKVSRRLARAERSARVRVARELVRAIRERTRRERELEREITLLVRAKAPRLLELPGCGPLTAAKLVSEAAGFERFSSDAKFARLAGAAPIPVSSGRTDRHRLDRGGNRQLNCALHRVAVTQGRVHPPAREFLARKQAEGRTRMDALRSLKRHLARTVWKTMTTPQTPNHQPPARTPVLT

SEQ ID NO: 53760 - protein, 340 aa, unidentified
MPTIGLDLHKRESQLCILADSGELIEQRIPTTRAQFTAALSHWPGARVLLEASTESEWVARHLEGLGHAVIVADPGFAPMYATRSSRVKTDKRDARTLCEALRLGAYRPIHRVSEAQRHVRAELAVRDALVRTRTRYIAIIKAAVRREGLRLTSGEAQHTARKVAELPLTPETVQELAPLVELFTPLNAAIAAADARLVALARRQRAVLRLETMPTIGPITALAFVAALDDVARFASAKQVRAYLGLVPSEYSSADRRIRGRITKRGDVRTRWLLVEAGWRVLRSSQPELAMLKAWAEQIARRRGKRIAAVALARRIAGILYAMWRDDQSFGGVAPSIAA

SEQ ID NO: 53761 - protein, 370 aa, unidentified
MQFIGVDLHTNKFTCSYRDEHTPPEAKKGNRTETFELTGIGLADFYRTLTSDTYVLVEATITTFSFVRLIQPLVKEVIVANTYELKQISLARVNTDKLDANILSRIIKMLVLAGEQPAFAVTVPPEEIQELRGLFTTYRLYKKQIVQIKNRIHSLLKEKLYGFTQEEIFDRKSRQRIRGIESGTPLSFQINELFELLEYTEARVEPLKERIMAQAEPYMREIEILTSMKGVSVFIAIAVIADIIKVDRFKNSKSFTSYLRSAPKVSNSNTSVSIKGTNKKGRKLAATLLTQSLNHVLDASEKLNQWYTRLVRYKKPGLVRTGLRRRVFAEMYQMLKKGEYHYARDERNHEAKLLQYRRFLKKRKILLESS

SEQ ID NO: 53762 - protein, 482 aa, unidentified
MAKRKKSTYERLQSSNPNRQQRKKLQRQFDADSAELVVVHPNAAGVDVGNASHFVSVPPDRDQAPVREFGSWTADLRRTAEWLKSCGITTVVMQSTGVYWIAIYDLLEQEGFEVYLVNARGTKNLPGRKSDVQECQWLRKLHTYGLLRKSFRPPEQIREVRTLWRLRGRIVEDAARAVQHIQKALTTMNVQLANAISDVSGVTGMAIVRAILQGQRDPHELAKLRDPHIQASEEEIAQSLEGNWQRDVLFELQQVVEAYDFHRQQLATIDTELQKYLTALPTREPVGEVSADVSKLSAKLRKKLKANRKSKDNRPAFDLGAELARLMGVDLRLIDGIDVMTAQTIYSELGADLSDWPTEDHFASWLELAPRNNITGGKVIKKEKRPSNNRVTTALRNAAESLVRSDSYLGARYRHFTGRLVGLKGVKAMARYLACLVYRLLTKGPAWVDRGAAYYENKRRDRELVSLHRKAAAAGMRLVPAV

SEQ ID NO: 53763 - protein, 412 aa, unidentified
MDILHPCCAGLDVHKDTVYACVRHADPSGSARQSIRVFGTMTPDLLALGDWLAEHGVTHVAMESTGVYWKPVYHLLEGRFELVLANAQQLRRVPGRKTDVRDCAWIAQLLQHGLIAPSFVPPAPQQELRELTRQRVQLVRQKATLANRIQKVLEGANLKLGSVASDVLGKSGRAMLRALVAGQTDPAALAELALGRLRKQLPRLRPALTGRVTEHHRFLLELLLDEVEAVEGFLARLEGRIAAALGPFAEAVARLTTIPGVDRRAAEAVVAEIGPDMSRFPSEGHLASWAGMCPGNDESAGKRRSGRTAKGNPWLKRALVQAAWAASHATGTYLAAFYRRLAARRGRKRALVALGHALLGIMYQMLRQGTEYADLGGDYFERRDREGLTRRLVHRLERLGHKVSLEPHEQVA

SEQ ID NO: 53764 - protein, 357 aa, unidentified
MKNKIPRITIGTDLGDKSHAICVLDKAGEIIEQRSITNHRDSLRRLSQKYPKARIAMEVGTHSPWISRFWQALGHEVIVANPRKLRAIYTSTRKSDQTDACMIARLARVDPTLLHPIEHSSEEAQRDLLQIKLRDNLVRQRVDIISSVRFTLKSMGLKIASPNTQCFAKRCRQNLAALDPVLLAHCEPSLRVIDALTLSIRELEKQIESLCEKRYPQTEILRKIAGVGPITALTFVLTIGDPRRFRSNRDVAAYLGLVPRRDQSGETDKQLRISKAGDAYLRRLLVSAAHYILGPFGPDCDLKRHGEQLAAKGGRGAKKKAVIAIARKLSVLLLTLWSRGESYEPLRKALPLETRAA

SEQ ID NO: 53765 - protein, 567 aa, unidentified
MQISILGVDIGKNSFSVVGVDGQGAVILRRTMRRQTLIDFVEKLPRCVIAMEARCGAHHLGRLFAAAGHEVRLMSPEYVRPYVKAQKNDDRDAEGIAEAASRPTMRFVDLKSQEQLDIQTLHRVRSRLVAERTTLINQLRAILLERGVVFPAGRVKFESALDDLIAGGNDVLSPRIRSLIMELRDEWRRLDQKIETLNTEFVALAKHNSAMRRLTSIPGIGVLNATALVAAIGDASSFQHARDLGAWLGLVPRQFTTGGKARLLGITKRGNTYLRTLLVHGARAARSSADGVRGFKAEAGRYHLYVSLACPWAHRTLIIRNLKGLSNLVGVSVVHWLMLENGWTFEPGPGVVPDDINGVAMLHELYTLADPQCSSRVTVPVLWDKQQQTIVSNESSEILRMFNSAFDHLGATEGDYYPDRLRIEIDAVNDRIYDTVNNGVYKAGFASTQDAYEREVTAIFETLDWLEERLANKHYLVGDQLTEADIRLLPTLLRFDSVYFGHFKCNLRALVDYPALWAYTRSLYQHPDIRPTVDFQHIKGHYYGSHANLNPSGIVPMGPKRDFTGDI

SEQ ID NO: 53766 - protein, 427 aa, unidentified
MPEKPVAGIDVSKDFSDMCIITPDNKVFQTVHIFHDATSLRRSLAALEAAAREFREKPVIVMESTAHYHRVIAQFLQSAGYEVMVINPMQSGALKNINIRKVKSDKSDAHRLALLYRLKTLHTTNQPNELLSNIRDYCRQRADIMNSHTAYVNRLTSLLDQAFPGYARVFSRVACKSSLGILKTYPSPAAILAADPEQLAETISKYARRGVTTDYVIKKVAALRRAAENAEEINLKREAYSVLIVTVAELLEGLQRHIETLKKRIIELATEDPSVKFEVSLLQTIPGIGLYSAVLLRAEIGDFSLFQKPKQLVAFFGMDPSTRQSGKFVGTKTKISKRGSPYARAILDICAQSAVHPVKGKEPANPVLANYYAEKVKTKEPKVVKCIIMRKLVNIIFAVLRDKKPFELRTPEEHIELLKHPNISRAA

SEQ ID NO: 53767 - protein, 418 aa, unidentified
MKVVYAVCCGVDVHKTFLVATIITSQGITPHYSKKRFSTFNNSILQFKQWLIENNCFDICMESTGKYYIPILNLLEDTIHITIANPKWVKAVKGNKDDVKDSKWIGDIFRLGLVPGSYIPNKPIRILREYTRYRSKLISCKSSEKNRFQNAFTVCNVALDAVVSDMFGKSASSITDYLISSESFDPEHCSSLLQKSLKKKAATVFESIEGYQITKEQKERMIMVRSHLDFVQQSLVELDEKLDKMVAPYESAITLLCTIPGVDRTSAITIISEIGTDMSQFANSKRLCCWAGLTPGNNESAGKKKSVRITRAGVYLKPALVQVAHAAVKSNRSPYYKNKYERICKRRGKKRAIIAIARMILTAIYHMFITGEAFNPSDLYKIDAPQEMLEKQKEKAIKQAMKLLISNGLIKPTDISVA

SEQ ID NO: 53768 - protein, 350 aa, unidentified
MIIIGCDYHPAFQQIALVDTETGDCVERRLQHREEAENFYRDLAAQGMKVRVGMEASGHARWFERLVAELQIELWIGDAAEIRTKRVRKQKTDRQDAQLILRLLLEDRFPRIWVPSWENRDLRQLLWHRHRLVHARTRIMNQLQAVALNEGLRCKKRLWREAGREQLEAFRLAPWASRRRRDLLELLDRLSPTIAELTQAIEREVEKCPEAQRLRTHPGVGSLTALAFVLIIGRAERFHCGKQIASYLGLVPLEESSGDRRRLGHITKQGNSLLRFLLVEAAQVTVRSLPEWRSKYFHLAMRRGRKIAKVAMARKLAVQMYWMLRKEWDYEQVKKFGSHAGQPGNRHGVQ

SEQ ID NO: 53769 - protein, 323 aa, unidentified
MNKDIKFYGIDISHLVFDVTSHTGEHYQFKNSTIGFKKFVKLLDENSHCVMEATGYYHYQLAYYLLENGIKVSVENPLSVKRFIQMRLSKIKTDKSDSKLICEYAEQVELKLWRGNSKHQIECLQMTRLLTIYTKQSTMLKNKIHGKSVLGNPSKVVVRSLTRSLKQVRKEMDLLEEKLLILVKQVHKDVLSRLKTIPGIGKKTSLMLVVLTDGFERFTSAAELCSYAGLTPVIRKSGTSINGRARISKIGNQKLRNLLFMCSFNACKYNKACRDIYEQIVAKGKSKKLALIAVCNKLLKQAFAIAKSGLIYDDSYRSTLPVN

SEQ ID NO: 53770 - protein, 403 aa, unidentified
MSPEHSIDIFLGPDVGKSEHHACALDRDGNKVFDKPLPQLESELAGVFHQLQKLGTVLVIVDQPNTIGALPIAVARDCGCEVGYLPGLAMRKAADLYPGRAKTDKRDAFIIADTARTMPHTLRAVDRNDEVLSALKMLSGFDDDIARDCTRTVNRLRSILTQIYPSLERVFAGSTLTRTPILDLLIHYKGPQGLKRAGYQRVLNWMIKHTRKDPTPLVDDIFAALKAQTVTVPGSDAAELVIPQLAAHIKALKEQRNTIAEQVEEMLADFPLCEVLMSMPGVGIKTAAQILLAIGDGSDFDSAGHLAAYAGIAPVTRRSGSSIRGEFPARSGNKRLKNALCYSTFAVIRSHEPSRRYYERKRAEGKRHNAAVICLARRRCNVIYAMLKNKEFFREIPPRPVAA

SEQ ID NO: 53771 - protein, 342 aa, unidentified
MSGAYEGRQIVGMDLHRRRSVLVRMTATGEHLETVRISNDPDYLRQVMARAGEAPEVVLEATYGWYWAADTLAEMGAQVHLAHPLGVKMFSYRRLKNDQRDAADLADLLRMGRLPEAWIAPPVTRELRGWVRHRAKLVGLRSGLKNQIHAVLAGAGVQVPMSDLFGPGGQQLLADTALAVESRSRVDSLLRVITTLDFEIDTFARLVTGRLRTDPGYVAIQVIPGVGPLLGAVFVAEIGDIGRFTRPEQLASWAGLTPKHHESDTTVHRGRITKQGSTLVRWAAVAAVQRVSAHTRLGQIRDRIGERRGRNIGVVAAARELITLVFYGLRDHHIRCLSARAG

SEQ ID NO: 53772 - protein, 342 aa, unidentified
MKLTTIGIDLAKTVMQVHGINERGKTALKKQFRRDQMLPFFANLTPCLIGIEACGSAHYWARKLEALGHTVKLMAPQFVKPYVKTNKNDAADAEAICEAVSRPNMRFVPAKNGEQQAVLSVHRARQGFVKARTAQANQIRGLLAEYGIVIPQGIGYIAKRLPEILEDGENDLPGVFRQLLQRLGDHFKELDRQVSELEVQIQLWHRDCAASRVLAEIPGIGPITASALVATIGNARNFENGRQLAAWLGLVPRQHSSGGKPTLLGISKRGDTYLRTLLIHGARAVIRIAARKVTTGDSWIKRVMGRRNKNIAAVALANKNARTVWALLAHDRHYETNYGVTQ

SEQ ID NO: 53773 - protein, 489 aa, unidentified
MRKPLTEAEKTELNKPKPPSKNGLKKIAAVEKKARKKRIRQTKRKKVIKFDSLEQIKADAAGLDIGASEIYACVPEGRDEENVRVFKTFTVDLHSLADWLSKCGVKSIAMESTGVYWIPIYEILENRGLDVNLVNARQIKNVPGKKTDILDCQWIQQLHSYGLLHSSFRPDEDMCALRSLIRQRAMLVNYRVNHIQHIQKNLELMNIKLCSILKDITGTTGMKIIRAIVDGEKNIVKLAQFRDPRCFSSEDEFAKSLEGNYKSEHLFNLTQAVKLYDDYSRHIKDCDLEIEQKFSAFKCYKGRRDLPPLQKKPAKNLKNKPAFDLRTHLYNTCGVDLTKIDGIDVLSAQTVLSEIGLDMSKWKTVKHFTSWLGLCPWNDISGGRVLRRGSKKVKNRASLALRVAARSLHGSKSALGAFYRRMRAKHGPMKANLAAAHKMARIIYFMLKNQDDYKDPGEAYYTEKYRDRVVLNLKRRAASLGFEIKPIEA

SEQ ID NO: 53774 - protein, 352 aa, unidentified
MGEHSTICVGIDIGDHYCQIAVLDEDGEVSEASRIRTTPAAFKRYFQGKLPMRVAMEVGTHSPWMGQLVNDLGHEALVANACKLRLIHRNDQKSDEVDAELLARLCRFDPQLLYPICHKGKAAQSAFAVLRTRDALVRSRTALINHARGLVKPTGYRLPKCSSRYFGKLQDELPETLRPVLEPILSTVSQLTDQIQAYGQQIEQIGRDQYPQTLLLRQVPGVGPITALAFVLTIGDPWRFAHNRDVGAYLGMTPRRSQTGQSDPELPITKAGSRYMRRMLVQCSHYILGPFGPDSDLRRSGERIASRGGKNAKKRARVAVARRLAVMLLSMLKTGEAYDPLHGSHDDEISAA

SEQ ID NO: 53775 - protein, 387 aa, unidentified
MAQVNDLSRSLTAFDPISTLVVVVEMSKASWLVSGAVPGVERQPLKKLEPDATALLRLIERWRNEAVRAGRPISRIALAYEAGRDGFWLARWLIARGIEAHVIHSASVAVSRERKRAKTDRLDAAMLMRVFLGWLRGERGHCGMVAIPTMEEEDARRPSRERECLVNERSRITNRMKSALARLGVRGFKPHLRKAPERLAGLRTAEGTGLPMNIIEEFRRDMARLALVREQISSIEKTRAERLERAPDTGPHAMVRLLARVIGIGIETADMLVREILSRKLRDRRAVARYAGLTGSPDESGLKRREKGLAKAGNARVRRGLIQLAWRFLMFQKDSALAQWYRTRTEGPSGARKTTMIVALARKLLIALWRLVTTGEVPDGVELRPAA

SEQ ID NO: 53776 - protein, 401 aa, unidentified
MEEFNAAAVQQQTATALRTILPAQVVDAYAAYVGLDVHKETIAVSVACAGRDAPGSRGEIANRPKAAVKLAARLSKEFGGEVLLFCYEAGPCGYVLYRQLLDLGHDCQVVAPSLIPRKPGERIKTDRRDASKLARTLRSGDLTAVWVPDEEQEAMRDLSRARDDMKAQERKARQQLNAYVLRHGHAWPANKSRWTRTHYHWLESLRFSHDWQQVVLQEYIDAVKAASRRVADITAQMERVLPQWSLAPVVDSLMALRGIDKLAAMVLLAELGDVSRFDSPRQLMAYLGLVPSERSSGPRRRQGGITLTGNRHARRMLVESAWSYRFPARQTMHLKRKAKGASDEAKVIAWRAQKRLCGRYRTLIEAGKNTKQTTVAIARELVGFIWDIVRHEMPKLQQPVR

SEQ ID NO: 53777 - protein, 337 aa, unidentified
MKLTIIGMDIAKQVFQLHALDPQSGRVERIKLKRAQVLEFFAKRAPSIVVMEACGSAHDWARRLQSLGHDAKLISARSVRPFVLRNKTDAADARAICTAAQQPEARFVAVKSEAQQTVLAIHRVRAQLMKFRIMQTNALRGLLYEFGEILPEGYRAFSKAFPAALARAAERLPAMLIDSLREQWGRAQDTDREMAVLERRLSNLFRHNPDCQKIAEIPGVGLLTATATVAAIGDVRTFKSGREFASWLGLVPRQSGTGGRVRQMGLSKRGDTYLRTLLMHGARSVIIQGKRSDWVDGLLKRRPFNVTVAAVANKLARTIWAVLARPEKYRASPTATA

SEQ ID NO: 53778 - protein, 344 aa, unidentified
MSIVGGLDIHRKQLTFDYPGTASGQVTRGQVTPADREHLRAWLARFAGRDDAEFAFEGCTGWRYVAGELAAARIGVHLAEPADTAFARGRKRHAKTDKTDSRHLRKLLAEGRLPECWIPPEQVLEARALLEAYNDLRREHTAWLQRIHAVFFHQGAPALGEGTLRGTEGLAAARAAAAHLSPAGQQQVTVALAMMTCLEDQLCELRHQLLDMARHLKGARVLTRELYGVGPLTALALTCWLGGKDRFSSSRKAVRFAGLDITVYSSDRKGPPGRLSRQGPEVLRWCVYEAGKTHARASAPDHRYYAQVKDRQDGKRAALSEARKIVRQACHILAELGDDALTAA

SEQ ID NO: 53779 - protein, 350 aa, unidentified
MKKVVKQVVGIDVAQDELVCCFGQLYDDFTINLVTRHTFENKLPGFKKLTEWFEPLVNKEVQLRFVLEATGVYHQSFAYYLHDMSNNVSIILPNKISNYKRTLDVKTITDKTMADAIAQFGLERNLDNWQPPKGIYRTMQQLTRERSQLIDEKVVIKNQLHAENAEAKPNKKSIDRCTKRLALVEKQVKEIVEEINELIRTDEDVQRIVVLICSITGIGKLTAATVLGETNGFELIRNKRQLTSYAGLDVKEKQSGTSIKGKPGISKKGNKHLRKAMHLPALSAIKHDERFKAIFARIVSKHGIKMKAAVAVQRKLLEMTYTIYKTGVAYDKEYFKNLTEVVEITEDEMA

SEQ ID NO: 53780 - protein, 400 aa, unidentified
MGQPLWAGVDAGKSDHYCVVIDADGKRLLSRRVANDEAALLELINAITALADGGELTWAIDLNAGGAALLIALLIGAEQRLLYIPGRTVYHASGGYRGEGKTDAKDAAVIADQARMRRDLKPLRPQDDIAEELRILTSRRTDLVTDRTRAINRLRAQLLEYFPALERAFDYSASKAALILLSGYQTPDGLRHAGAARLAAWLRKRKARNADAVAAAAIEAAKSQHTVVPGQQLAAAMVARLAEEVMTLNTEIGDTDAMIEERFRRHRHAEIILSMPGFGVILGAEFLAATGGDIAAFGNTDRLAAVAGLAPVPRDSGRISGNLKRPRRYNRRLLRACYLASHIAIRTDTASRIYYDRKRAEGKRHTQAVLALARRRLNVMWAMLRDHKPYQPTAPTTAAA

SEQ ID NO: 53781 - protein, 420 aa, unidentified
MLGTIPFAASIGIDWADKKHDICLSVAGSTKRERSVVQHTPAALRDWADQLRARFGGAPVAVCIELSQGPIVSALLEHDFFVLFPVQPKTLARYRETFTISGAKDDPTDAEFALELLLRHPEKLTRLDPESVPMRTLRRLVELRRAIVQDRVRTTNRITAALKAYYPQVLDWFRDKEAAVFADFIERWPTLELAQRARPETLTTFFRNHNVRYPAAIARRLAAIRDELPLTTDAAAIQPNRLLVDVLLPQLRAACAAIERFDDEIAKLAPELPDYDLFRALPGAGAALAPRLLVAFGERRERFPDAASLQKYAGVAPVTKRSGNKSSVHWRYRCPTFLRQTFIEWVGQTIPRSFWANAFYAGCRARGMQHQAALRALAFKWIRVLHRCWVDRIPYDEARYLLALQRRQAPLLKVAASLPT

SEQ ID NO: 53782 - protein, 347 aa, unidentified
MRFYTKNHLYYCDIDLHARMLYVCILDKNGVPVVHCNIAATSIDLIDTLAPYMHHNLVVGVECMHCWYWVSDLCRDFNISFVLGHALYMRAIHGGKAKNDKIDSLKIAKLLKGGMFPMAYDYPVEMRATRDLLRRREHLMRKRAELLAHIKNTNSQYNLPAIDMNLRYVPNRALMKGRFDDPSVQRSIDMDLNLIDFYDKELSSVEWFIEKQAKQHNYQDYVLLRSVPGIGQIMALTILYEIGDVCRFDRVQQFASYARLVKCKAESAGKSYGNSGAKIGNAHLKWAFSEVAVLYLRNNPRGQQYLKSLQKRMSKAKALLALAHKLGRTVYFMLKKGRMFDEKQFLS

SEQ ID NO: 53783 - protein, 331 aa, unidentified
MKIKETIGIDISKLDFDVRIHGNQMFECFKNSDNGFQKLLTWVYRNSVYSKDEILFVFEHTGLYSYGLSVFLTSQDIPFALVSGLEIKRSLGISRGKEDKIDATKIALYGYRLRDEIKPYELPTQAVMIIKRLLSLRDRLVKQRAGYKATLKEQKRILAKKNNKVLFEAQEKVIVFFSKQIDKIQKELQDIVKRNKQLKEQYDLITSIKGVGCQTALFLIAYTNGFTKFNNARKFACYCGIAPFPNSSGTSLRGRTRVSHLANKKVKSLLDLCAKSAIQNNIEMKNYYTKRVEKGKNKMSTINIIRNKLLSRIFAVIERKTPYIDLMKYAA

SEQ ID NO: 53784 - protein, 349 aa, unidentified
MNNTITIGMDLGDKFHMAVVFDSDGNELKIAKVTNTKIGVSKFFKPYRSAQVAIEASTHSPWISRLLNEMGLTVYVGNPRKLRCIWDSIDKSDAKDARMLGMVCRLEPRLLHPIHHRSSQAQADLTTIKSRDMLVKSRTQLINHVRGIVKANGDRLPKCSTASFANRCSPLISIELCSALTPLFEILTQLNKQIKELEKEIERLSIERYPETKYLRQVPGVGPITALSYVLHIEDRAIFTKSRQIGPFLGLTPRRDQSGEMDKQLSITKAGNKHLRHLLVGCAQYIMGPFGPESNLRLHGLAIAARGGKNAKKRAAVAVARKLAVLLHRLWITEKKYQPFYSIHNKQAA

SEQ ID NO: 53785 - protein, 413 aa, unidentified
MEVIHPRCAGIDISKRDAKVCVRIAGPRKPAVEVRTFGAMTKDVLALRDWLTGQEVTCVVMEATGAYWKQFYFLLEDAGFELLLTNAHQVRNMPGRKSDVSDAQWLAELGAHGLVRGSLVPPEPIRQLRDLTRLRTHLRREQARDKQRLEKVLEDAGIKLAAVATDVTGVSSRRMLDGLAHQIPADQLADMAYGALRRKIPELTAALDGRFNTHHNFMVTMLLDRIDRTEADIADINTKIDELMGPWQRAQQLLTTIPSVSDDTAQVIIAETGADMSMFPTAKHLVSWSGCAPGMCESAGKKKSTTTRPGNTYLKGALGIVALAISRNNNTYLSALYRRIASRRGPMKALVAVENSILTAVWYMLTTDQPYQELGPDYYTRRKPRQTINNAIQHIRDLGYDVTLTPLAPTVAG

SEQ ID NO: 53786 - protein, 347 aa, unidentified
MNYIGVDCHISSLDFAVVNEKGTTTKRARVNTGVKEFMEFVKSIPKPRKIFIEEGELATWLLEASLKYGETLVITDPKINKWIGKSGKKDDSIDAEKLAQLARGKYIKEIYHSINNRRRFKELVFAYHDTVKSQTRIKNKIKAAFRREGIGCSGVTVYSEKYRKEWRKKLPRNKVVHLIIDELWNQLDQIQDAKERLKRNIRIHGKQYPEIKRFRNVPGIGLINASTISAIIETPHRFANKKKLWMYAGMGLAERKSGEKVYSRRLTWEYNRLLKNAVKQSTEAAIYAKDNPFRRQYLRLTIEKGIPSYKAKLTVSRSLLAALYGMWKKGEAYDFQIDIKRDKKNKK

SEQ ID NO: 53787 - protein, 377 aa, unidentified
MSKILFVGLDVHAETIAVAVAEPGGELRSVGVIPNRLESIRKLVGKLGPVQQLKVCYEAGPTGYVLYWQLTQLGVACEVIAPTLVPTKAGDRVKTDRRDAEKLARCYCAGDLTSVWVPDAAHEALRDLVRAREAAKKDQLRARHRLGKFLLRHGQRPTDAGKAWTKKYLEWIKTHVRFDQPALEATLSYYVQEVEHMAERIVHLEKAIDEAVAQASPEIRAVIEALQALRGVAQMTAATVVCELGSLSRFQSPRQLMGYSGLVSREHSSGNRIQRGAITKTGNAHLRRVLVEAAWAYQHRPNVTGFLLRRQKSLALSDEVKHIAWKAQYRLHKRYQALAARGKNKNQIVTALGRELLGFLWAIAVHTEKQTKIQKAA

SEQ ID NO: 53788 - protein, 396 aa, unidentified
MNEFKPEASRIDTVAAKLELPGQECYAAYVGLDVHKETIAVALAEPGRQEPRSEGEIANRPKSIEKLVRRLSERFGGGVLQFVYEAGPCGYGLHHQLVDTGHACDVVAPSRIPKAPAERVKTDRRDALKLARLARSGDLTPVWVPGSEQEAMRDLTRARGDMKAQERKARQQLTAFVLRHGHAWPAGKKRWTETHYAWLESLKLTHDWQQVVLQEYVDAVRAATQRVADLRAQMERALAQWSLAPVVEALVALRGIDTLAAMVLLAELGDISRFDSPRQLMAFLGLVPSEHSSGGRRRQGGITLTGNGHARRMLVESAWSYRFPARQTKHLKRKAAPASEAAKGIAWQAQKRLCGRYRDLIRSGKNSKLVCVAIARELAGFIWAIVREEMPKVRGA

SEQ ID NO: 53789 - protein, 343 aa, unidentified
MEHFAGLDVSVKVTSLCIVDDAGGIIREAKIESDPDALLQVLKSGAYQFKRIGLEAGPLSQWLFSALAEAGLPVICVETRHMRAALKAQINKTDRNDARGMAQMMRAGLYRPVHVKTVRSQKLRMLLTHRKLLQSKAIAIENDLRATLRNFGLKVGMAGAVKFEARIKELVENIPDLAILVEPLLIVRRTLREQFGIVHRRLLAVVRQDEVCRRLMTVPGVGPVVALTYRSTVDVPARFRNSKAVGAVFGLTPSKYQSGEIDRTGAISRCGDEMMRVMLYEAAQSMLYSRKWSWLKAWAMQIARRRGIKKAIVALARRLAVVMHRIWVDGTEFRWTKQEAAAA

SEQ ID NO: 53790 - protein, 343 aa, unidentified
MAQQTIIGIDLAKHVFQVCMVTPTGTLKTNTAVARGKLLALIARQPPALIFMEACGGAHDWARRFCAMGHEVRLLAPQYVTPFRRGQKNDPNDALALTEAGQRPNIPTVPIKTIEQQDLQALHRVRERLVKHRTAVVNQARGLLLEYGIVIPQGIARLRKRLPRVLEEADNGLSFLMRDLLQSMQSELSALDTRITDVTCQLTRLSHELEACQRLQAMEGIGPLSATALVAALGNGHDFQTGRQVAAWLGLVPRQHSSGGTMRLGGITKGGNSYVRRLLIHGARSVISHVRDKPDAKSAWIRQLVTRIGVNKACVAVANKMARVAWALLHTGEQYRKPVALPL

SEQ ID NO: 53791 - protein, 361 aa, unidentified
MDVSKQQPKMTAGLDLGDKYSYLCLIDQADGEVIEEGKLRTTPDALRRRFASEQQLRIAIEAGTHSPWVSRVLEECGHEVLVANARKLRFIYANKRKTDEVDAENLARLARVDPKLLHPLRHRGEGSQAHLAIIRSREALVSTRTQLVNHVRGAVKSFGARLPKCPARSFHNRAPEHIPEALLPALGPILEQIGSLTERIREYERQLETISKEHYPETDLLRQVEGIGPLTALAFVLTLEDPYRFERSRSVGAYLGLVPATDRSGDRDPQKRISKEGDEMLRRLLVGSAHYILGPFGSDSDLRRHGEKIASRGGKNAKKRAVVATARKLAVLLHSLWVTGAVYDPLHNAHRHARRRQEEIA

SEQ ID NO: 53792 - protein, 366 aa, unidentified
METIYIGVDFHARQQTICYLKTETGELVFHELKHQDKQEVRAFYAQFPGSVIVGLEASGYSPWFERLLEELGCEVWLGHATEIHRRARWRQKNDRRDAELILDLMLHNEFPRLHRPAVQSREVLRMLRYRQKLIKMRTMSKNSLQALALQAGLAKRSGLFTKQGQQQLGAAEMSPVMHWQREHWLQLMEPLNQQLLETIGWFKAQSKGDDSITRLRTHPGIGLLTSLCLLHTLQPVSRFRNTRKVAAYAGCDPVERSSGERKCFLGISKAGSRLLRYLLVEAAQTAVRKDEDLKRFYQRLADRRGRPKAKVAAARKLLIRAYIMLRDEIDYAEFRHRAVAARLARRGQGPSNVPEVLIGQPASPEQ

SEQ ID NO: 53793 - protein, 350 aa, unidentified
MMIIGCDLHTRYQQIAMLDRETGELTERRLEHASGEARAFYAALSGPVRVGIEATGHTHWFEAMLAELGHELWMGDAAKIRAAVVRKQKTDARDAAHLLDLLCGDRFPKIWRPSGEERDLRQLVWHRQKLVWMRGAVKNQMHALAMGEGVCRKKKLFTAKGRKELEALALGPWASYRRQELLRMFDELQASVARLDRAVAQAAKSQPLAAGLMTHPGVGPVTSLAFVLIIGPVNRFQHSKQVVSYLGLNPQEHSSGGKQRLGSISKQGNPMMRSLLVEAGHTAARFDPQLRRVYQRLKFRRGASVAKVAVARKLAVRMYWMLRSTADYAQLVRMQGSPWATLVEKDSSLG

SEQ ID NO: 53794 - protein, 348 aa, unidentified
MRFYTKTHKHYCGIDLHAKKMFVCILDADGAVVLHRNITTSPDDFLRVIGPFRDDLVVGVECMFAWYWLADLCSREKIDFVLGHALYMKAIHGGKVKNDKIDSQKIAGLLRGGMFPMAYVYPPEMRATRDLLRRRCFLVRRRADLFGHVRSTAIQYNLPEIEVRMTYEGPRSTVPDHFTDPEVKKIVQIDLAMIDAYDDVIGALEWELEKTSRRQDRRTLMLLSSIHGVGKILSMVLLYEIHDINRFETVQDFSSYCRLVKCPHESAGKKKGNGGAKIGNAHLKWAFSEAAVSFLRHNAPGKQMVEKLARKHGKGKALSILAHKLTRAVYYMLKDGVPFNREKFLATA

SEQ ID NO: 53795 - protein, 354 aa, unidentified
MSHTTKQAPSELSTIGIDIGKDVFHIVGFDLDGKIVLRRKIKRLALVATFEKLPRCIVGLEACLSAHFVSRTLRRLGFEPRIIPAKYTKPFVKGQKNDYNDAEGIAEAALRPNLKLVGEKSQDQLDLQALHRVRSRLVSRRTATINQIRAFLIEQGITVRTGAHALRNSLFAILQNREDEISPRMIDLIVGLYEDWLWLDERIATITGEIDLIGKRDGDCQRLMSIPGVGPMISTAMVAAIGTGEAFDRGRDFAAWLGLVPRQYSTGGKPILGRISKRGSKYLRTLFIQAAHIILMRPHNWPRFSFGPWLEQASQRMHKNKLAAALANKLARIAWSILRHGNRFDTNRFEVTAV

SEQ ID NO: 53796 - protein, 392 aa, unidentified
MVVSVGIDVSKDKHDCFIVSAEGKVLADVFTVPNNMDGFHCLLQRIRDCTAPQDKKKVGLEATGHYSYNLLGFLLDNGLTTCVLNPLRTNLYRKSLSLRKTKTDRVDARTIASMLLSDAGLKPYTSTAYHNEELKSLTRYRFDKVKERAKLKSSVSRLVCILFPELEKLVPSLHLASVYALLEEFPGAKQVASAHLTRLKALLETASKGRYKRDMALEIRDAARNSIGSRMPAKSLELQHTIRLIRELDNEIAEIEGQIQAIMDELHSPITTIPGLGFRMAAMILAEVGDFTRFESPDKLLAYAGMSPSIYQSGQLKNCYSHMEKRGSRYLRYALYNATKYVCQWDPTFSDYLAKKRAEGKHYNVALSHAAKKLVRLIFAMEKSRTTYRLAA

SEQ ID NO: 53797 - protein, 459 aa, unidentified
MNRKQRRETMRKIQSEELSLEVIHPDAAGIDIGNESHYVAVPPSRDIQSVRRFGCTTAELKAMAQWLKQCGIQTIAMQSTGVYWIAVFDILEEAGFEVYLVNARETKNLPGRKTDVQESQWLMKLHRYGLLRNSFRPSQEIRTMRTYWRQRNDLVQAGARHIQRIQKALTQMNIQLANVLSDVSGMTGQAIIKAILAGERDPHKLAAFRDPRVKASEEQIERSLEGHWQKDLLFVLKQEQDGYEFCQQQMAECDRQLDQYLQQQEDRSKGASLPEEKRKERLKKKKGNKPRFDLRTGLFRMAGVDLTQIDCIDVMTATTILSEAGSDMSKWETEHHFVSWLRLCPDNRISGNKIIGKGRLPTSNRITNALKMAASTLRTSNTYLGAQFRRLRTKLGAPIAIKAMAAKLARLIYRMLRYGMKYLDQGAAFYELQHRKLQIKHLKSKAAKLGFQIVQAPAA

SEQ ID NO: 53798 - protein, 460 aa, unidentified
MRNQKVKGKRKSVRPKVDWKALEVIEPDAAGIDVGGQEHWVAISPERDAEPVRSFGCFTADIHQMADWLVEKGVRSVAMQSTGVYWMPVLEILEQRGLKMYLVNARDTKNLPGRKSDVQECQWLLKLHTFGLLNNSFQPSDEIRTARSLWRQRGLLTADAASAIQRIQKVLTEMNVQLSTVLSDLSGVSGMQIIQAILDGDRDPWKLAALARPEVKAKREDIAKSLEGNWRPELLFILRQQLELYQVYQRKITHCDEQLRCHLESFASKVDLSTHPLGAKPKGKKGSKNAPAFDLRTELYRITGVDWAQVNGLDVLTAQTVITEAGADLQAFPSEGHFASWLGLCPTNETSSGKVLKRRTRKVVNRAATALRNAASTLLRSQSYLGAQYRRLRTRLGAPKAVTAMARKLACLFYRLIKHGQQYVDKGVEYYEARYREQQIRALTKRAQKLGLQVVIPKVA

SEQ ID NO: 53799 - protein, 288 aa, unidentified
MRIQNRKGSFPKLIRWLRKLEPEIVVFEPTGSYHRAFEQALHTAGIPVCKVNPLYARRFSQSAGVLAKTDRVDAAMLARMGFALDLEPQQPQRELVAILRELAMFRRGLVKERTATLNRQKVLTHPLLRRQCAAQLRQIERQVKQLDAEIRNTVEADRQLKRQKEILISIPGISDVTAFTVLVEMPEIGTLSSPQVASLAGLAPMTRESGKWKGKSFIQGGRAVLRHALYMPALVASRHNPDLRALYERLVAAGKPAKVAITAVMRKLIVLANVLIKADRPWENRPAL

SEQ ID NO: 53800 - protein, 426 aa, unidentified
MDDISRIEQFRQFKNQIRGSDRFLIVGLDIGKSIHYGFLGTANGKTVKRGLRVENSDSGFEHLLTMLQFYMDRDGFKDVVFGLEPTSVYHKPLAEFLITHHYLVVYVTNEAIKKNRALLDGRWDKNDTKDSANAADLVAQGKCQFYDLPDIQLRDLRALLALRQRLKKQLHSCRVRIRNNLVAQYFPELDKCWNQAQEENLAIVRWCLSPRVISELSFEDFFQMVTTRNKGLRQYNRLIKIWEIAPYSIGCQPGIAMELEAQILVENFKTIEAHIASIDESIEDICVSFQEYKYLLSIPGFGPYVSAVVLAAIGTARRFENTRQVVKFAGYDLNANRSGQKSQSAVPVISKKGKASLRYALYQAALIASSSNAKFRGYFHHRLAGREREKGIRTKMRVKLAAKLLVIAWTLMKKKQAFDPSYLKAQ

SEQ ID NO: 53801 - protein, 341 aa, unidentified
MKLKTITIDLAKNVFQVCGVNEHIKPQFNQKLKRNQLLDFMRQQEPTMVVMEACYSSHYWGREIAKLGHDTKLIPAQHVTPFVRGNKNDHNDAFAIAEASQRDNIRFVPVKTEHQQEISCLHRIRERLIKNKTAMSNQARGLLSEFGVVFPCGHKALLNGLTSVIDNPQYSHRLQDMVIDMLSEYDITLNRLKGIEKQLGEFVDASESGKILRSIPGIGVINASALLAAIDKGQAFNNPKEFAVWLGLTPKQHASGNISKMGGITKRGDRYLRKQLIHGARAFVSRAAKSTDPLALWALKLRATKPFNKVAVAMAHRLARLIWILLSRQEHYRVTPANLSA

SEQ ID NO: 53802 - protein, 411 aa, unidentified
MEVVVTCCAGLDVHQVSIVACVNSTGRGGRSHKEIRTFGTMRDDLVALREWLVQAGCTLVAMESTGVYWKPVHAALEDHFEVIVANAQHIKNVPGRKTDVKDCAWISDLTRHGLIAPGFVPPRDIRDLRDLSRYRRKLKDTQAGERNRLIKVLETAGIKLAGVASDVFGVSGRAMIRALIEGNATPEAMARLARGKLRARQADLARALDTPLGAHQRFMLRTQLERIEQAEADLERVDATLVTMVAPYERQMRLLMSIPGVDWVIAVIIIAEIGVDMSVFASAAHLVSWAGLCPGSHVSAGKTRGGKTRKGNVFLKTALITAAITGPRRAGISYLAEKSRRLTARRGRMRAAVAIAHKLLVAIWHMLSDGTFYQDLGADYLDRVDRARTAKHLVRRLDHLGFDVQLTEKAA

SEQ ID NO: 53803 - protein, 328 aa, unidentified
MAPVSVGVDVSKRELAIAVHPTGEQWTTATTPAAIATVVSRVRALAPQIVVVEATGGYERGLVAALAGAEVPVAVVNPRQVRAFAQAIGRTAKTDVVDAALLATFGGRLEPAPRPVADAATQALGALVARRRQLLEMIGMERARLEHAPPTGSLTRELRRHIRWLERRVADVDDEIGTSIAAHPTWRVQEELLRSVPGVGPTTARTLLGELPELGRLDRRAIAALVGVAPFNCDSGQHRGQRHIWGGRASVRSTMYMAALSAARYNPVLRVFYRRLRDAGKPAKVALVATMRKLLTILNAMIKHHRHWTTPVASTPASPTGPPRAATL

SEQ ID NO: 53804 - protein, 444 aa, unidentified
MYYIGLDVHKKTISYCVKDASGQVHQEGKVGATRRELDSWIKTLPQPRTMAMEATIFTGWIYDHLLPHAQQVKVAHPLMLRAIAAAKKKNDRIDAGKIADCLRCDFLPECHMASTQIRDRRRTLRYRHLLVRQMVQMKNRISGLLMETGVSYNKQRLHKVGYFRELLSTNEDVHESIRPLLKLSRDTVVRLQKTEYALVSSLQRDPLLADRVKRLRTVPGVGPITALAWALEIGNVARFRSIRQAISYCGLCGEEKSSADKVLRTPLSKQRNKHIQRVLVEAAKLAPRQDHDLALVYETEKQERECQSSDSGRSSKDGRVSARRRSRRTGLRARRKLRESGGLETSAWGRTQRSHSAQAARSCRLPTERRRSNSRGSLRIVSGLAASTDSIFCDGLQGPETANGCPVLRRQEPLPRGTSASCGYWRERWCALLRSARQENCVFP

SEQ ID NO: 53805 - protein, 281 aa, unidentified
MEYGAIDLHKKESQVRIIDQSGAIIDRRITTTRERLTTVFWGRPRTRILVEASTESEWVAQHLESLGHEVIVADPNVGAMYASRGRRIKTDRRDAAVLAVACQQGHYRTVHRRSARQRIVQSMLRVRRELIESRTRAISLARAITRAGGLRIRGGRTEIFLDRLGALELPETMHATLVPLRSTIEVLNQELATADERFTTLVADDPVATRLMTMPGVGPITASAFVAALDDATRFESAAQVTSYLGLVPREYSSGERQHRGRVLRSAIRRCNRSSFRRHGA

SEQ ID NO: 53806 - protein, 410 aa, unidentified
MSDRDNSRDWPAFAGVDWGGSEHQLCVLDATGTRLTQQRVTHDVAGLTELDTALAQHGRALPIAVERAEGLLVEHLQARGHTVFPVSPRIAARARERYRVAAVKDDRFDAFVLADTLRHEHPHWRALTPPSPLLAEIKALTRDRDRLQQTQQATESQLRAILEAYHPAPARLFSSVDRQITLHFVLDYPTPAAASRIKTTRMNGFLSRHRYTGRVPGQVLAERLRENLLAASTGTVAGKSYSAQSFARLLQLLNTQLAEYDDAIAAAVTEHPDMPIFASFPGVGPVLTGTLLAEIGEDRARFPTPATLLAESGLAPVTRASGRSRKVRFRYAANTILREAAMWWAYNSMKEAPWAKAAFRDARDQRGQHYHRALRGLAARWMRVLWTCWSTHTPYDPKRHTTAQAALTTG

SEQ ID NO: 53807 - protein, 261 aa, unidentified
MYLGIDIHKRYAQVAVMGEAGEIVEEVRVENANLDELAQHYAGAEAAIEATSNYYHIHDTLSEHLDVTVAHPSKLTLIANTDKKTDRVDAKELSRMVRLDSVPESYVPTDEIREARALVRGRQKLVENRTEYANKIHGLLSDHGITQEIKPLSVSGRESLRDLSLPTPWNTLLASYLEMIETLTDEIERLEATIEERAGSLPETQLLMTIPGVSYCPALMIYAEVGEIDRFDRDKEVVSYAGLNPVIREPGDSRIEGGISK

SEQ ID NO: 53808 - protein, 370 aa, unidentified
MSVRRILAKTINTDLEYEAIGIDLAKNCVSVALLTTDGEVVCIDRLDYSELEKSAQALSSTTFAMEPCTEMNYLVQKLEAWGHRCLVIGGKNVQNYVENHFSGQKTDLNDAQALAFLAQDTQLRTIKAKDVEQQKYASLTTLREQYIKQYRQTIVSLKGICQAWGLNISKGISGKARLKDLIENHAAFPEELKESLVDMVTHAQTAQKALNKITKTLEELAKNDKVCQLIQTIPGLGTICSCRLRATIGDIKRFKNPKDFPAYYGLVPRSIATGHNEKKGKITHRGDKTMRSLMVQGAGSVINMATKGKLKSKQLTKWILKKQKEKMPWGKLVCAVAAKLLRIVRAVLISRKAYDPKLAGVAKCSLPKAT

SEQ ID NO: 53809 - protein, 355 aa, unidentified
MSQEKYIGMDVHQATISVAVMDAGGKLIMECLLETQAATIVEFVRGLHGTLSLTFEEGTSAAWLHDLLQPHVSRLVVCDPRKNALLKEGSKSDRIDARKLAELLRTNQLKPVYHEEHGIRALKELGRSYLTITKDVTRVMNRIKALYRSWGIPCGGTRVYAPRHRAEWLAKIVEPGVRVRAEHLYQQLDSLQPLRLQARRELLRESSQHPAVKLLRQIPSIGPIRAALLVALLQTPHRFRTKRQLWAYSGFAVETHDSGEYRYVRGKLQRNRERITVRGLNPNHNKDVKNLFKSAAISASTRPGPLHDCYVARVEKGMRPTMARLTLARKIAAITLTIWKKGVSFDPKHLHRQAA

SEQ ID NO: 53810 - protein, 342 aa, unidentified
MTKVSTIGLDLAKHVFQVHGVDECGGAIVRRRLRRSEVLKYFARLEPTIVGMEACSTSHYWARELRALGHAVRLMPAQYVKPYVKRQKNDAADAAAICEAVSRPSMRFVPVKTAEQQATLMLHRARDLLVRQRTMLINSLRAHLAEFGVIEARGPSRIVPLAALIESGDAPVPELARRALLPLIAQLRASETQIDALDAEILSWHQASDTSRRLATIPGIGPVIASALAASVPDASAFASGRQFAAWLGLVPRQSSTGGKPRLGRISKQGDANLRRLLIIGAQSVLRWARPGKSSAWIIALLGRRPRKVAAVALANKMARIAWALMARGERYRAPRIVTAAA

SEQ ID NO: 53811 - protein, 388 aa, unidentified
MIYIGIDVAKDKHDCIIISSDGEIIRNSFTIKNNLEGFTNLLQSIPDVPKNEIRVGLEATGHYSLNIMNFILEHQLPLIVLNPLQTNLFRKAHTLRKSKTDKIDARLIVFMMQSGNFKPHSNVSYHLSELKSLTRHKSRFKKTLAKYRISLCRILDIMFPELEEIVYSINQKSTYAMLKEFPSKDALASAHLTRLTNILRKSSRGKYGVEKALLIRTTAASSIGTDSRAISFELTQTLSMIELYNLEIKKIEREIKLIMDELCSPILSVPGISYGLGSIILAEIGDISRFDTSSKLLAFAGLEPSTYQSGKFNGTEMKMVKRGSSYLRWALLEAARLIAIKDTTFRAYYLKKKAEGKHHNVATSHVAKKLIRVLHHLLTTNTVYVPQV

SEQ ID NO: 53812 - protein, 335 aa, unidentified
MHKKTISYCVKDAAGKIHQEGKIGSTRRELDAWIKTLPQPRMMAMEATIFSGWIYDHLLPHAEKVKVAHPLMLRAIAAAKRKNDKIDASKIADCLRCDFLPECYMTSTEIRDRRRTLRYRGLLVKQMVQMKNRISGLLMETGVTYNKQRLHKVGYFTELMAGNEEIDCVRPLLKLSRETINRTQKLDYAMVSSLERDPLLAERLKRLRTVPGVGPITALTWVLEIGDVARFQSIKQAISYCGLCGAEKRSADKIVRTPISKQRNKHIQQVLVEAAKLAPRYSHELALLHEKEKQRGDRNRATLAVARKMVAWMVAVERRKKGFVPAEERGGAAAA

SEQ ID NO: 53813 - protein, 355 aa, unidentified
MSMLAEQYEFVIGGDPDRDTVDLAVVDSATGALRAHLADRADGAGYARMLAWADSHAPGRRVWALEGTGSFAAGLAVFLAEAGEDVVEIGGVKRQRGAKNDQIDAARAARQALAREHQTKVRAHGLREALRMILTTRQAILVSRTKAINELKGLIVATPEQLRSDLRGCSLARQLDRIEAMRTQPEGAVEHRMAVLTLQSIAARVRFLSAQVDELDPELMTLLKQHPAGPALLAEPGVGPVVAAQLLVSWSHRGRVRSEAAFAALSGTAPLEASSGQRTRHRLNRGGDRDLNRALHTVAITRMRCHPETRAYHAKRTAQGKTHRDIRRCLKRALARRLYRRIQAATHQQQIPAAA

SEQ ID NO: 53814 - protein, 408 aa, unidentified
MDFNVVMVETLDGKTRRFRMANSAMDHERLVELIRSLPQPCRIGFEATGNYHRTLAFRLASEGFDVCLISSLASARYREVMFNSWDKNDPKDAGILLELLKQRVVQTYVDPVLSGFHDIQELSKTYYHITLSRTRLQHSILTHYLPLYFPEMRKWWCSTRNSWWVNYLLHFPTPTSVTRYTEEGFCEIASPIVGRKVNKAAKLLELYSTAQHSIGLPIAEDSIACQTFRLQLQRYQELNTLRQQLEQQAELTLNGHPDYFVLKSVPGIGPIIALTILAEGDDLRRFGHHRQFLKYCGLDLAKNQSGAFRGQEKISKRGNARLRYALYIASVIAIRQPENTFRNKFHRYTEASPNDADLKRKAMTAVMAKMARVLHALIKSGTPYQGYFEALPSGSISLCRAVGAYRTP

SEQ ID NO: 53815 - protein, 407 aa, unidentified
MPLFVGIDVSSKNLDACLMDGMGETLATQTVTNNLPGASELRDAILQHAEADDTIQIAMEATSVYSWHPAMFFHEDPELKQRRTKVFTLNPKLVRNFKKAYAEMDKTDPKDAWVIADRLRFGRLPKSVIQSEQYLALQRLTRMRYHLIQSLTREQQVFLNHLFFKFSAFNLEVDTPIFGHAITEFLLEAYSLDEIAQMPLEDLAMYLQTKGHGRFSDPEDLAASIQKAARSSYRLSKCVEDSIDLVLGSSIEIIRHLKRQIKDLDKAIARVLDGIPNTLQTIPGIGPVSCAGILAEIGDIERFDDQAAIAKFAGLFWPRHQSGDFEADDKMLARTGNRYLRYYLVEAANLVRRHEPEYRAFYQKKYREVHKHSHKRALVLTARKLVRLIDALLRNDQIYAPKKKVTR

SEQ ID NO: 53816 - protein, 357 aa, unidentified
MLKQNSKLSFKDQTIYVGLDIAKKSWNVTILTEQFFHKTYTQSPVPDVLVAYLNKNFPDAHYICAYEAGLFGFWIYDALTKLGVDCIVVHPADIPTKDKERRNRNDDVDSNKIARNLRSGQLTPLYIPSLQAQEDRSLVRMRIIMVKKQTRTKNQLKAILTYYGKEIPDKLASSNWSKQFISWLENLDFKSNSGKQAFSALLSELKYLRSVISQLTKDIGCLSEQEPYKMPVQYLTSIPGISTTTAMVYLTEIVDIKRFKDFDHLSSYFGLIPGEDSSGDNEIHTGISPRRNANLRVLLIESSWIAVRKDPALLMSFNQLSKRMPKNKAIIRIARKLLNRIHYVLKNQCYYKIGVVS

SEQ ID NO: 53817 - protein, 419 aa, unidentified
MILLKIVYPVCCGIDVHKRTVVATIASTDKNNITTYSTKTFLTLNPYLYALRDWLLENGCRNVCMESTGKYWIPVFNILEEHCYVILTHPKYVRAIKGKKTDKKDSKWIADLFKHDMVRASFIPPKEVRSWRELARYRAKLVYMRSSEKNRYQNCMTVSNIALANVLSDAFSKTADDIMGHLTSSGVFDEELCKTLIRKSAKKKTELILDSVRGCSVEADQKFKMIVSRNHISFLDEMIFKTELELYVRIKPHYQLIETVTQLPGISELSAALIIAETGIDMSVFETSKHLASWAGLSPANNESAGKKKSVRISKAGQFLKPLLVQCALAATMDKKEPYFAIKYQRIKKRRGHKKAIIAIARMMIVCIYHMLKTGESFNPSDYEDFQNPAPRKQAFTEQNAIKFLLEQGYDVSGLVKAM

SEQ ID NO: 53818 - protein, 368 aa, unidentified
MFYSIGIDISKDDFKACILEYNPVEQTERVRSSRKFNNTQAELPKFVSWVTKWESKQPAPVRITMEATGVYYERVALHLFDNHPEWALSVVLPSQARRFNESEGFKNKTDRIDARGLALMGARKKLQLWRGIKPYWSELRQLTRTRGALVEQRTQLKNQLHALNYSAYAIKDTRKIVQQTIAALDKQITKLEKLITRHLDSDPEIEEKVDKLKSIPSIGLITISTVLAETLGFEYFTSRSQLISYAGYDIVVKESGKHKGKRKMSKQGNARIRAAMYMPVGNILSHKRQPYYNYYDRLVSRHGIKMKANVALQKKLLCLMYHLWKKNEAFDAALALRPAGLSASAVSPKGDTGVDTTIPELEMAFFED

SEQ ID NO: 53819 - protein, 380 aa, unidentified
MEKACGLDVHKNSIFACILDEEGKKILEKRYGTLTPDLIALRDALVEEGCGNVAMESTSIYWIPIWQVLQSDFLLKLSNPYFIKQLPGRKSDVKDAQWIAECLQKDLIKGSFVPDSVLQQMRQLSRQFRRLIKSRVRLEQQIDNQLQRCNIRLSNYVSNQGNNVSLRKVIEAIIAGERDSSKLIRLVHGRTKNKHGHQVIAASLEGVINSTDIEILKGCMEQINLLEKQQATCLNHLEELADRYFAREISLLCTIPGIQKYSAMSILSEIGNDMSSFGKASHLIGWAGLRPRNDESAGKIQSRKTLHGNKYLRQMLIEVSWSAARSNKTFLGKKYYYLSKRMKSQKALLAITRKILVIIFNVLQTGKPFDTTRNLQAVKA

SEQ ID NO: 53820 - protein, 314 aa, unidentified
MDDTATVPTRFIGCDVGKAEIIVFDSASGKTTSLPNRADALAAFAASLDPAALVVCEATGGYEAALLDAMVAAGRAAHRADARKVKAFIRSLGILGKSDAIDAKALAQYGRERHDRLTRWQPREQHRDQLQLLVSMRRDLVRQRVAHRNRRQAPGAAPVAARLQRIIATLDAEIAGIDADIRALIDACDTLAQTVHTLTDIAGIGQTTAAQLTALMPELGSLNRKQAAALAGLAPHPKQSGSNNAYRRTRGGRPEVKHTLFMAALAAARHNPTLNTFYKRLISNGKKPIVALVAVMRKLITIANARLRDNLASI

SEQ ID NO: 53821 - protein, 406 aa, unidentified
MQGPVITVDVSKGSCHYQPYVSNGHPMRKPKVLHDTVEGFQSLSDLIDTMKDRYECETIPVIFEATGVYHRCLQKYLDDHQIPYYIISPLMSASYRKTTPNSNKTDDLDCSHIAKAYYGECNLFPYDKPSKSFHNLRGLNRYYECELNHLRMRKNTFRKYLDIVYPRLDKCFKGHSSLYDEIPMEVIKQYPHPSLLLKHKEETIVKKIEKKTSHNASFIQNIVHEMYECSMHCYSGADVTDVESMILPELVDDLQSQEERCDEILKQLVSEAQKTPYFTSIVSIVGIGDNLAARIIAELGDMSRFSCRRAITAYAGLNPKIRQSGDMDGIHLAISKKGNKHLRCLMYLAVSCNYRLKKGDVLYEFNQKKRQQSFSPLKPKAATIATAHKLLLIIYALCTNGTVYHS

SEQ ID NO: 53822 - protein, 297 aa, unidentified
MNQIIRIGMDTSKHFFQLHGVDAAEQPVLRKRLGRQQMVAFFAKLPPTVIGIEACGAAHYWARVLGEFGHEVKLIAPQHVKPYVKRNKNDRRDAEGLCEATSRPTMRFVPVKTSAQQAALMLAGIREQMIARRTQLSNAIRGYAAEFGITAAKGLDKIEPLLARLAQDESLPALACELFAIQGREYAQVQVELKAIEARLRAWHRANADSRRLAQIPGVGPIGATTLVMKTPDPGAFPSGRHFAAWLGLTPKDHSTAGKTRLGKITRAGRVMVWTAPYGIAMCQNEVVANLRQGSRP

SEQ ID NO: 53823 - protein, 337 aa, unidentified
MERRYVGIDLHRRRSVVVTMDEAGEVLSSVRIANDPVAMSIAVAEAGEGAEVAFEATYGWYWLADLLKADGHHLHLSHPLAMRGMTTNRRVKTDWKDATLLADVLRMGSLPEGWIAPPELRELRELVRYRAKLVALRSGLKAQVHAVMAKNGILPARVEMFGPGGQAQLDALDVPMNFTIRIESLRDLIEIYDREVAMLEREIHSQLKDDAGYQAIQKIVGVGKVLGAIFSAEIGDIHRFSSPERLCSWAGLTPKHRESDLTKHQGDITKQGSKLVRWAAIEAISGYRGGAKLRADYERIAQRRGKYRARVAVARKLLTLVYYGLRDGEIRCLETAA

SEQ ID NO: 53824 - protein, 326 aa, unidentified
MTTIGIDVSKAKFDSAWLRDGETGKVKTKILKNNRAGFQALIEWAETNTRQAITEIHFVMEATGIYHEALAYALHEAGANVSVVNPAYIHSYAKSLGCRVKTDKKDSITIAYYGATQKPALWQPEPGEIRRLKALLARHEAIEKDIQRESNRLEKAEITQVSAEVIDSIANIIGELTKEKNRIKKLIDDHIDQNPQLKNDRALLESIPCVGPVISQYMLALIYSRHFSTAKQCSAFIGLNPVMHESGSSVRGRSRLSKVGNARIRAKLYMAAVVAIKHNPDIKQQYERLLKNGKSKMAALGAAMRKLVQICFGVLKHQTRYQPQVI

SEQ ID NO: 53825 - protein, 456 aa, unidentified
MSKKKKASNDFDALQQINLHAAGIDVGAEELYVAVPKGRDIESVRVFGTFTVDLEQVADWLKRCRVTTVAMESTGVYWIPLFEVLESRGFEVCLVNARHLKNVPGHKTDVLDCQWLQQLHTYGLLRASFRPPENVCALRAIVRQREMLVHYRASHIQHMQKALQQMNIQLTQVLSDITGVTGMKIIRAIVAGERDGHVLAAYRQAGCAHTESEIVKALQGHYRREHLLALRQAVELYDTYGLQIQQCDAELQAMYGDLEPPNEPDKSANQELSQRQTKRRKNQAHFDLGTFLYRMAGVDLTRIDGINALTAQAVLSEIGLDMSKWPTDKHFTSWLGLCPQNEVTGGKVKRRGTAKTKNRANTALRLAAQTLWKSDSTMGAFYRRIRAKHGPAIAITASAHKLARTIYHMLKSRTAYIDPGPGVYEARQRERAVRNLHRQATRLGFVLTPDAPATVS

SEQ ID NO: 53826 - protein, 340 aa, unidentified
MEITTIGLDLAKNVFQAHGATATGAVGFRKKLRREQVLAFFSAQPHCLVAMEACASSHFWAREIGKLGHEVRLIPPAYVKPFVKRQKNDAADAEAICEAAQRPTMRFVAVKSEEKQASAVIFKTRDLLVAQRTQIINALRGHLGEYGFIAPQGVTYVDRLIAEVESNSSSAPEAARACLLRLVDILRELQAEIAALDAEVAVRAKRDAVAKRLMTIPGIGPVIATAIEALAPPAETFRSGRDFAAWIGLTPIQKSTGGKPRMGRTSRMGERTLRRLLIIACSGVVRWAKRKGAPTNLWLARMLAKKPPMLVIVALANKTARVAWAVMTRGEVYRASPSVA

SEQ ID NO: 53827 - protein, 352 aa, unidentified
MNSVKYVGMDVHKVITVIVVLNALGQMESHSKVKTKAENISDFFRGLSGKVEVVFEEGTHSAWLHKLIKPLVASVTVCDPRHNKLIEDGNKSDDDDAETLAQLLRIGAVKAVYKGDDEQQALKEFCRAYENLVSDATRAKNRLQAIYRGRGLDPGRAIYRADRRQEWLAKLNDEAMRFRAESLLDQLAALQELRKQAKQRFVLRVRQHPDYRILSGLPGFGPVHVGQLIATVGTPHRFRTKRQFWPYCGLAVVTRSSADYQIAEGKIVKSQKKVSTRGLNRNHNPRLKHVFKSAALTSLRYEECKAYYHRLVEDGTRPELARVSVARKLAAAALALWQRKEEYDPQKFFAAV

SEQ ID NO: 53828 - protein, 344 aa, unidentified
MGEVSTIGLDIAKSVFQVHGVDGAGAVVIRKRISRAKMLEYFGDLPPCLVGIEACPSAHHWGRELQALGHTVKLMPPSYVKAYLKRSKNDANDAAAICEAVTRPSMRFVPIKTKEQQTALMLHRTRQLLVRQRTMLSNALRGHLAELGIVSAKGRNGTGELLRILADTEDQRLAPAVRAILDVLARQYSAIGAEIRSIDKSILTLHRSCEASRRLEEIPGVGPIVATALVAEIGDWKEFRSGRNLAAWIGLVPKQHTTGGKDKLGGITKQGNRYLRWLLVTGAMAVIRYAQKHGTERRPWLGRLMERRPTKVAAVALANKIARMAWAIMVHGERYREPKLLMAA

SEQ ID NO: 53829 - protein, 366 aa, unidentified
MKKSSTVAKRGNGIFRKPKLTIGLDLGDRTSHYCILDEAGNVILERSLPTTPKGIHQVFSRIPRSRIALETGTHSPWVSRQLSELGHEVIVAHARNVRLIGESSRKDDRLDARTLARLARIDPGLLGPVRHRSAKAQIHLTVIRARAALVSTRTALVNAARGLTKSHGERLRKCGTGQMNREIAKGLSQELRDALDPLLGEIESLNERIAEYDRRIEQIAKGAHPEVALLQQVKGVGTLIALTYVLTLDDPHRFRRSRDAGCFLGLRPGRRNSGRSEPQMHISKEGDRYLRTLLVQGAHYILGPFGQDSDLRRWGLQLAERGGKNAKKRAVVAVARKLAVLLHKLWVSGEVYEPLRNNHKVVSAVA

SEQ ID NO: 53830 - protein, 359 aa, unidentified
MQTQNKMKTPDFTGQNIYVGIDTHLKTWMVSIYSDEFELKTFGQEPDVDRLENYLHKHYPNANLKLAYESGFCGFWIQRSFAKKGINCSIVHAADVPGSNKELIRKTDKVDSRKIARGLKNNELNYIFIPDEQLESDRQLLRSRTRIVRDTTSVKNRIKAFLKFKGISIPDEYRSHKWSKKFIVWLQNIEHNNISSKTAFGSYVDELLFLMQKQMQLNKSIENLAKSENYLDNIHLLMTVPSIGLLSAMTILTELGDINRFQKQDHLYSYCGLTPDCHSSGDIERIGKVSRRGNIFIKTVLIECAWVAVRKDPALLLYYKQQLVKMDRNKAIIKVARKLLNRIRYVLKNKAAYQIGIIE

SEQ ID NO: 53831 - protein, 343 aa, unidentified
MGIDLAKKSWKVCVYLGTAYHKHFAQPPDPEVLVDYLRRNFSGASYHTVYEAGYFGFWVHRELIRMGVDSIVINPADVPTTDKERRTKTDRVDAAKLARSLANGELTPIYVPERAAEEDRALLRMRRTFVCKQTRTKNQIKAQLQLSGYRVPPDLTDRYWSRAYVRWLESITFDHDTGRAAFHTLLRELVTLRATIADLTKQIRHLSQQDRYRSRVELLFSICGIGLLAAMTFLCEIIAIERFKNLDCLLSYVGLVPGEHSTGETEEDTGLNPRRNSTLRYMLIECAWIAQREDPALLEAFNSYCKRMPKSMAIIPIARKLVSRMRFVLKHNQPYVIGVLSAR

SEQ ID NO: 53832 - protein, 322 aa, unidentified
MRYIGIDVSKATFVVAYSSDKGGEIRTFNNTTTGIKQFIGALPKDGSIHCVMEATGNYSALLLYMLNVAGITVSMENPLKVKNFAKAMLSTIKTDKSDARLITLYGEKMNPRPFKVQGEAILRLRQKRTVIRQLTKQITAMSNLRGSLACLPVPDKGATHTVDETIKFLEKKRDRLQSELTDLVEVEFSRQLALLTTIKGIGITLATALIITTGGFTYFQNAKQVSRYLGICPTYEQSGTSVNIKGHINRNGDAYTRGLLYIAAWPASRFNAQCKETYTRLRQNGKSGKLAMIAVANKLIRQAFAVVAHDKEYIDGFVSNRP

SEQ ID NO: 53833 - protein, 357 aa, unidentified
MSQQSNNCAIAVIGIDIGKNSFHVVGHDQRGAIVLRQKWSRGQVEARLANLPPCLIGMEACVGAHHLSRKLQLLGHNARLMPAKYVRPYSKGQKNDFRDAEAIAEAVQRPTMKFVATKTADQLDLQALHRVRERLVGQRTGIINQIRAFLLERGVAVRQGLRFLRAELPGILATQTDVLSPRMLRILEDLSTDWRHLDARIEGLSGEIETFAHQDQHCERLMTVPGIGPIISSAMVAAIGTGEVFSKGRDFGAWLGLVPKQISTGDRTILGSISRRGNRYLRALFVQAAWVVLVKLGPKQWERYGLKSWIEAAKKRLHYNVLAIALANKLARIAWAVLNKGRVFTCVKTDAMASRPA

SEQ ID NO: 53834 - protein, 342 aa, unidentified
MSVYVGIDVHRKRSQVAVVDQSGEVLVNRNVPNGVEPILRVIGGLPPGTAAAFEAAYGTSWLVELLEGYGFTPHLVHSLRCKAIASARLKNDRVDAATLAQLLRADLLPEAWIAPPPVRQLRALLRHRVALVRLRTLLRNRIHAIVADYGHDRPVGVYWSGPGRAWLASLDLPAVSRELVEDDLGLIGALQERIDRLDWEIRQRARSDPRVKVLTQLPGIGPFTALVILAEIGEVSRFGSARKLASWAGLTPTVRGSDRVAHYGHISKEGSVWLRWVLCEAAQTAKRSPQFAASYQAIAKRRGKKIATTAVARKLLTRAWHLLTDAEHPAAPPPATPQTAAP

SEQ ID NO: 53835 - protein, 378 aa, unidentified
MVTGPKHQKEKRSMEHFAGLDVSVNETSVCIVDDTGRIVREAKVASEPEALLAALKNRAYHFKRIGLEAGPLSQWLFSALAEAGLPVICVETRHMKAVLKAQINKTDRNDARGIAQMMRAGLYRPVHVKTLRSQKLRMLLTHRKLLQSKAIAIENDLRGTLRNFGLKVGVVGTVKFEARIHELVENLPDLAVLVEPMLTVRRVLREQIVILHRRVLAIVRDDEVCRRLMTTPGVGPVVALTYRATVDVPARFRKSKSVGAVFGLTCAKYQSGELDWSGRISRCGDEMMRSMLYEAAQSMLVHSKKWSWLKAWAMQIARRRGMKKAIVALARRLAVIMHRIARSNPIGGNASSTKWWNDVPCGTMDEVSSFGRLDLPSV

SEQ ID NO: 53836 - protein, 359 aa, unidentified
MANKVILNQSLGIDIAKDSFSYCFCFLNSDLSKGFELGEDLSNEEKGFKTLEKRIKKSGIPKDSLTIVMEATGVYHEAIAYYLHDKGYRVCIMQSGRVKKYAQSLDQRSKTDALDSKMLSMLGCERKLTLWEPPSETMEALRFLSRERATIIKERSIEKNRHHAMTAARFEHKKAIRRFNKRMKLLNIQIAEIEKELQELISSDSVLKQKIAYLSSIPGVSFVSSITVVAETFGFSLISNSKQLVSYCGYDVVLRESGNYQGKTRISKKGNKHIRAALHMPSMTAVRVNPTLKPFYERLKPKKAKPIVALVAVQRKMLILMYSLWKSNSYYDGEFEIKKAARKQILTAQDSHKNELVTS

SEQ ID NO: 53837 - protein, 331 aa, unidentified
MYFSQFIGVDISKNTLDAAIYPAKDKKLDFLHFDNTQKGLGEMLSWLKRRGVKPSEMVICAEHTGVYTNPLIAFADKKGLALSLNSPLDIKHSMGIARGKNDAVDAGRIAEYAHNHRDKLRLYEKPSEAIMKLQYLLTERRQYMRQRTSLINLNSAMGKYETPEARYRNESAIHHCEKLVKKVEEQMMDVLCSEPEVKQNFDLVSSVKGIGLINAINTVVYTNNFKAFETPRRYACYIGVAPFDHTSGTSVKGKTQVSKICRTQQKAELSMAARSAVVHDPGLKRYYQRKMKEKGGGKDAHGVVLNAVKFKLILRMFAVVRSRQPYKVLNY

SEQ ID NO: 53838 - protein, 424 aa, unidentified
MDVIYDRVAGLDVHKETVVATVRVMVGRKAERECRTFETTTAGLSALLAWLTETRCSHVAMEATGVYWKPVWNILSDGAFELIVANAAHIKNVPGRKTDVNDATWIADLLACGLIRGSFVPSETFQELRALQRTRKQLTREQTRHVQRLQKTLEEANIKLDSVISDIMGLSGRRMIEAIIAGVRSPRKLADLADRRIKASPKELYDALHGRVTDHHRFRLRLHLGQYDALAEAIAALDKEIDAAIGRIDGEREFAGQIPFRAASREVCQIPGINLLAANMILAETGLDMGRFRTAGHLVAWAGLCPGQNESAGKRKSSKLRKGAPWLKTTLVQCAVSASNKKDSYFRAQFQRLKSRRGAPKAFCAVAASLLTTIYHMLKDGTQFRDLGKDHFDKRPTKAKVNRLLAQLAKLGYQADVRLLANAP

SEQ ID NO: 53839 - protein, 384 aa, unidentified
MPKQSTATAFDHDSTLVLALELSGKGWEVGAVLPGVTRRPRRGLAARDMAGLLQQIERWKAEALRAGRTVCRTVLAYEAGRDGFWIARYLLACGIEVQIMHPASIPVERRGRRAKTDRIDLDMLLRTLLAWLRGEPRVCSIVRIPSEAEEDMRRPERERERLVSERVALENRIENLLCLQGIIGFKPRLKKAAVRLDELRSATGTPLPPLLLDELKRLMVRHRVLSEQLREIEAAREQAAMAAEPDHAVQQIRMLTRLVGLGLATATGLTREVFCRSFADRRAIAGFVGLTGTPFNSGGSEREQGISKNGNPRVRRILLQLAWRWLRFQPESALSCWFAERTGGVKGRIRKIMVVALARKLLVALWRYVETGELPAGARLAAAA

SEQ ID NO: 53840 - protein, 338 aa, unidentified
MKLYAGIDLHSSNNFIGVINEKDERLFQKKMPNELNQVLAALNPFKKELESIVVESTYNWYWLVDGLMENGYKVNLANPNAIQQYEGRKHRDDKWDSFWLAHLKRLDILPEGYIYPKDERHVRDALRRRQLFVQHRTSHILSLQSAITRNHGYKMSVREIKRLNDSDASNLFNDPFLIMTARNNISVIRFLDNKIDEIESEVLSHTKLRPEFDKLLTVPGIGKILGLTIMLEVGDIRRFPTVGNYSSYCRAVKSIRLSDNKKKGEGNKKNGNKYLSWAYVEAANAAKRSYPEITRFYERKKAKRNNIVAIKALSNKLARASYYVMRDKVSYNAEKLFR

SEQ ID NO: 53841 - protein, 426 aa, unidentified
MDVKYPICCGVDVHKSFLVAVIVKDSQPKPQYIKKRFSTFNNDLEEFKKWLIGNDCLFMCMESTGKYWVPVFNILEDKINITVANPKWVRAIKGEKDDNKDAKWIADLFRLGLVRGSYIPSKEIRVLREFTRYKYKLTGLRSGEMNRYHNCLTVGNLAVDHVFSDIFGKSSQAIIDYILNTDSANFNDDYCLSLLDKRGKRKSTNEEILNAVKNSSFTDAQKTRISIVKEHLDYITNSISRLESEIDSLVAPYEMYIDLLTTIPGMDRNSAIITLSEISCDMSHFDSSRRLCSWAGLVPSNNQSAGKKKSVKISRAGVYLKPCLVQVAHAAVKDTTNPYYTNKFNRISKRRGKKRAIIAIARMILTAIHHMISTGEYWKPSDLESAEMPAEVKIKLAKSDLQRSLKTLLSNGYTIEDITNGFLSIT

SEQ ID NO: 53842 - protein, 413 aa, unidentified
MKQAYRVAGIDVHKSMLAVVITDVSAEGEFHFERRKFGTVDSQLKALSEWLSEQQVQEAVMESTAQYWKPVWRQLEGQCKLHLAQAQSNRAPRGRKGDFRDAERLVKRHVAGELILSFVPDVEQRLWRTVTRTKYQLTRDRVRLQNQLEAFLEDARLKLGTCVSDLLGVSSQRILRAVADGQTDPHFLATLAEENLRATPEQLADALTAVPSLSRLHRDILKLFLDRFDLLDSQIQKLHRQIAQALHSHQQAVVRLAAIPGLAVDSAQQIVAEVGPTAATFPSPQHLASWVGVCPGREESAEVSKSNRSPKGNRTMRRLLNQAANAAIKSQGSIFQLHYRRMVIRMGHNKAIWAIAHRLCKLVWTLLHRGLDYIEYGAERSVQALQRRTAKQLRQLRALGYHIIPPTKTEPSA

SEQ ID NO: 53843 - protein, 363 aa, unidentified
MYSERTSVGLDVHARSVAAAAIDSVTGELKQARLTPSHDHIRSWLDGLAGPVAVTYEAGPTGFGLYRSLTEAGVRCVVAAPSKLQRPAGDRVKTDAKDAVHLARLLRLGEVTPVTVPSVNQEAARDLVRTREDCRGDLMRARHRLSKLLLRQGIVYSGGQAWTGAHDAWLRRQRFDNRATQLAFESDYDAVLAVSARRDRLDTAINDRAADSEFTPVVRRLACLRGVSTLTAFALAVEIGDWHRFSGNSIGSFVGLVPSEHSSGASRVQGSITKTGNTHARRLLVEAAWHHRARYAPGKTMHDRWELAPPAARARGDAGNRRLHARWVTFNLRRKRPVIANVAIARELAGWCWSLAVLDSDTS

SEQ ID NO: 53844 - protein, 394 aa, unidentified
MKLVGIDIGKHKHFVSIVDKLTGEIILQPVAFSNNAQGFEFLISQIALYPVDSVLIGMEDTGHYHFALLRFLLQKNYSVALINPKTTDLNRRMDGGITKNDKLDTLNICDILSSNKLKKPYRLTSSKKFDLYEQKQLTRLHHSLKEQINVLSNRLQKCIDLVFPEYNALFKSKYGKVYMSILKQFGSAKAIAQADIRTLRKCFDITGRGNRISLTAEKLKESAKTSVGISSLADEMQIKHLIAHIELLNDQLKEIDKKIEEFSTDLNSPIISVPGISHFSGTSILAEYGDIFNYSKPSKIIKAAGVAPFHYESSQYEAKHSAITKQGSSYLRKTLYQVIVPVIRFNKVFKDYYDLKRSQGKSHRCAQGHCIRKLLRVIYHLVTTNQQFDASLLR

SEQ ID NO: 53845 - protein, 428 aa, unidentified
MNYNQLKKINQITDQTLIIGTDVSKNFHVSRAQDFRGIEFGKSIRFNNDIIGILEFEKWFKQLMTDNGKTEVIIGMEPTGHYWIPLARCLKKMGYNVVTVNPAATKKAKELDDNNQSKTDHRDARVIAQLVKDGRYTEPNLLDGLYEELREVTKIKRILTGDMVRTKNQITNWFDRYFPEYTKVYKQWNKKTLLWIIKKYRFPILIAKLDPEEIYLEIKKDIKKGIGRTKVKEIIDAAKTSIGITEGLKSASIEFDYLISKYEKFTDDLINLDIYIQELIQGYDETSRIKDINGIGLNTAAGLISELGAISQYKSPKQLSKMAGLSLVEDSSGKKRGKRVISKRGRSNLRKLLYQCIVSMLRHNKEFQELYAYYTKRNINPLTGKEAIIGLMNKLLRIIHALITKKVKYDPEKMLNDIKRQEGYFVVA

SEQ ID NO: 53846 - protein, 391 aa, unidentified
MIFVGIDVAKDKHDCFILNSEGTVLADVFTIANNRIGFETLLSRIQSCSQGESKIKVGLEATGHYSYNLLGFLLDSGLATYVINPLHTNLYRKSLSLRRTKTDRIDARTIAMMLMSDVDLKSYSNTAYHNEELKSLTRYRFDKVKERAKLKSSVARLVNILFPELEKQVSSLHIAVVYALLSNYPGASYIANANTEELAETLCTASKGRYTKSKTAEIQVAAGVSIGSKMPAKSMELKHTIALIRELDKEISEVESAIDKITSQMDSPIFTIPGIGRHMGAMILAEVGDFSNFASADKLLAFAGLSPSTYQSGQLQNCYAHMEKRGSRYLRYALFNAAKYVCLWCPTFSAYLEKKRSEGKHYNVAISHAAKKLVRLIFAMQRSGKAFLADY

SEQ ID NO: 53847 - protein, 320 aa, unidentified
MAKPIAPIMIGIDVSKAELVIARSDSKSLERITNTPRAISRWLKTLPSGTQLAFEATGAYHRTLASLAHQVGFALYLLDGYRLNRYRDGIGNRAKTDPADARLILRYLSKELSELKPWVPPHEAFYRIQSLLRRRASLVHTRVALAQSLSDVPELKSASKRLSNNIKDIERLIERRLTEAMAEVGWGADAQRCKAIEGIGELTCVALANTFHRGEFKSSDAFIAYLGMDVRVRDSGKQVGRRKLTKKGDPEMRRLLYNAAMSARRTKAWAGQYETYLSQGLKTTQALVKLARKLARIAFALMKKQSTYRPKMPVTCCATP

SEQ ID NO: 53848 - protein, 339 aa, unidentified
MNIMAVGVDIAKNVFQVHYVDQASGEIVNKAIKRAKFLEHFANRERCVIGMEACGGAHHWARALKRMGHEVRLMPAEFVKAFNIRNKNDAADARAIWLAVQQPGKPIAVKTEMQQAMLALHRMREQLVKFRTMQINGLRGLLTEYGEVMSRGRAALDKEIPAALGRIAERLPAALIDTLREQWNGLARLDEQIAEIERRMRDWKKEDRAVQAISEIPGVGLLTATAAVAMMGDPKGFRSGREFAAWAGLVPKQTGSGGKVNLHGISKRGDTYLRTLLIHGARSVLTHAKEPGPWVEQIKKRRPTNVVIIALANKMARTIWAVLAHERAYRKDYVSMKPA

SEQ ID NO: 53849 - protein, 448 aa, unidentified
MSNGNGVSRGDRNRNARLSRLRVLVPVCNAIVGIDLADNKQMVVVTDHDSKVLARRTFRCRAWDLGLALDWAGQQASKAGFAGVSVACEPTGHRWRVLGQLAADRGMAFVCVQTLLTSWARRSEDLTFDKTDEKDAVLIARLTAQLRCYIPEPLDETWGRLRHLGARRERLLAETVSQVQQIRDLLECVWPASLDTAKQPFRSRTWLAGMCVVLARTGGDPARLRRLGPARFEAAVRREVVARQGKRPCLRIVRLLFAAATDPRGVTAHRPGALERVQLLLDDFRDTGRRLAEAEARMVDVLDELQLSELVCSIVGLSALGGATILAETGDLTRFASARAVVKHSGLAPREKSSGTYTGRTRLTGQGRPGLRAAAWRAVWGAQRANPVYAAKFTHLTSRSENKLNRGQAHAAIAAALLRQLYAVVTTGQKWDPAIAAGGRSEVIEPAA

SEQ ID NO: 53850 - protein, 476 aa, unidentified
MEAQKQGARRPDERSWHEMNRKQRREIARRIQSEDLRLEVVHPDAAGVDIGNESHYVAVPATRDRQPVRRFGCTTAELKDMATWLKQCGILTVALQSTGVFWIPVYDILEEAGLEVYLVNARDTKNLPGRKSDVQESQWLMKLHTYGLLRNSFRPPQEVRRMRTYWRQRNDLVRSAGRQIQRIQKALTQMNLRLANVLSDVSGVTGQAIIKAILTGERDPRKLAAFRDKRVKASEEEIARGLEGNWQEDLLFMLKQEQEGYEFCQKQIAECDARLEQYLQQTPDRSQGASLPEEKRKGRLQKKAKNPQFNLRTALFRITGTDLTQIDGIDVRTAATVISEAGWDMSKWENENHFVSWLRLCPDNRISGEKVIGKGRLRTNNRLATALRMAASTLRESDTYLGAQFRRLRTRLEAPVAIKAMAAKLARLVYRMLRYGMQFVDQGAIFYEARHRQRQINSLKRKAAKLGFQIVLAPAT

SEQ ID NO: 53851 - protein, 349 aa, unidentified
MNTTTIGLDVAKSYFQVHGVDAHGKTTLQRQLRRAQVVTFFANLPACLIGIEACGGAHHWARKLAELGHQVKLMPPQFVKAYVKTNKNDARDAEAICEAVTRPNMRFVAVKTVAQQELLMLHRVRQHLVVERTAKANQLRGLLAEFGIVLPQGLHRLRGVMPEILGDAENGLSCLLRERFSHLFSHLRELDATVIVWQRQIVLWHRENPLSRELEKIPGIGPLGASALVASIGDVRTFKSGRQLAAWLGLVPRQESSGGKTRLLGISKRGDRYLRTLFILGARSVLRQSKRNPAQAASSWLGKLSARRHPHIAAVALANKNARIAWALLTHGREYRANYRSTRPAMAAG

SEQ ID NO: 53852 - protein, 397 aa, unidentified
MYIVGIDIAKRKHEAAVIDGEGTIIIKPFSFTNNCSGYNRLLAMLAKAKLPLDEVSFAMEATGHYWLALFTRLQKEGFRVQVINPVQTNSIRSFYIRQAKTDPRDALLIAEVIRFGHFSESTLHPENIYELRELCRGRHAIVSMQADVKRKVVALLDQVFPEYETAFTNLFGDTSMAILQNCPTPKELSEMPLEKLCYLIEVSSHKRFRMAKARELQEIARNSFGFAMAGDVFSTMIRLYAKHLDFLKQQVREMDRKIAEIMETLDTPITTITGIGPTLGAYILSEIGDISRFSSAAKLAAYAGIDPTMRQSGEYNGVRNRMSKRGSPYLRHAIWLAASSAVLHDPALKLYFQKKRDEGKPYMASVGHACRKMVSIIYAVMRDNKAYTPCIPNEISA

SEQ ID NO: 53853 - protein, 338 aa, unidentified
MAIVSVGIDLAKNVFAVHSVDESGKPALVRPNVARSKLLELIASLPPCLIGMEACSGAHHWAREFARFGHTVRLMAPKFVIPYRLSGKRGKNDAADAAAICEAVTRPNMRFVPVKSLDQQGQLLVHRARQGFVEQRTATLNRIRGLLSELGIVLPLKAAVVRREALARLEDLPGWANTVIGDLLGEVSRLDERIAQYDQHIRSMARQSTEAQRLMLLPGIGETTATALLSTIGNGRDFKCGRQLCAWLGLVPGQYSSGGKQRLGRITKAGDPYLRSLLVLGARAVLAAAKNKSDPISRWATALAQRRGYWKAVVAIAAKNARMCWAVLSRGEDFRLPA

SEQ ID NO: 53854 - protein, 306 aa, unidentified
MSTSPVYIGVDVAKATLALDGFRRDFPNTPAAHSQIIKSLPAAAHIVVEASGGYQKALVRALHRAGVPVSTVNARHPREYAKSMGQLAKTDKIDKAVLSAFAEHKALKPDKPPTQAEEKLAEMLSRREQLVAMRITEKNRFEHHFDTFVKKQAAKALRSIERWIAEIDTAVSKLIDSDTVLKAKSETIRKIDGIGPVCAAGMLGYIPELGTLSRNAASALAGLAPYADDSGTIRGKRKIYGGRAAPRALLYMAALTAARKNPILMLFYQRLRKAGKPFKVAIVAVMRKLIMLINQTLKNPNFVLAS

SEQ ID NO: 53855 - protein, 347 aa, unidentified
MQHAAIDLGSKESQICIRQPDGTIVEERKLPTRKLTEVFKTWPASRVVMEASAEAFKIADAALAAGHQVRVVPGTLVRLLGVGERGVKNDQRDARQLSKASWQTDVPSVHIPSSAARELKSFCGARDVLVATQRNLSNNVRGWLRTQLWKLPGGTMVTLPERLRTHARASGRELPEHIERQLTMLTQVTEQVQAANKQARRLAKEHPVCRRLMTVPGVGPLTSLRFVAAIDDPSRFATAHRVQSYVGLTPGEHSSGGDGGKTGGGKRGITKAGPSELRRCLVQAAWSVMLARRPHPMLEWARQIAQRRNRPVAVIALARKLAGILFAIWRDGTTYEANRAARRSAPT

SEQ ID NO: 53856 - protein, 362 aa, unidentified
MAHFVGLDVSVKETSVCVVDAAGTVILEQKVTTEPADIITLLTSLGVSFCRIGIEAGPLSQWLVNALTAADLPVICVETRHMKALLTAQQINKTDRNDARGIAQMMRVGLFKPVHVKTLVAQEQRMLLTSRKLLQRKLLDLESDLRGTLRNFGLKIGAVSGSRYEARVRELVAGFPRLAAIAEPLLNVRRVMRQQFAVLHKMLLDTVRGDPVCRRLMTAPGVGAVVALTYRATVDQPQRFVHSRAVGAHVGLTPKRYQSGEIDYDGRVSKCGDALLRTMLYEAAHSLLTQNRKWSWLKGWGVRVAQRRGMRRAIVAVARRLAVVLHRMWVDGSEFRWSKGQRRRTYGCLNRRRTAQEMSARR

SEQ ID NO: 53857 - protein, 343 aa, unidentified
MDHFAGLDVSVKETSICIVDDTGRIVREVKVASEPEALLPVLTNPVYHFKRIGLEAGPLSQWLFSALAEAGLPVICVETRHMRAVLKAQINKTDRNDARGMAQMMRAGLYRPVHVKTLRSQKLRMLLTHRKLLQSKAIAIENDLRGTLRNFGLKVGVVGTVRFEARIKELVENMPDLAVLVEPLLIVRRVLREQFVILHRRLLAIVRDDEVCRRLMTTPGVGPVVALTYRATVDLPGRFRHSKSVGAVFGLTPSKYQSGEINRTGAISKCGDDMMRMMLYEAAQSMLRSTKWSWLKAWAIKIARHRGMKKAIVALARRLAVIMHRIWVDGTEFQWTREQAAAA

SEQ ID NO: 53858 - protein, 310 aa, unidentified
MESIAVGIDVSKDRLDVAVRPSGEAFAVERNGAGLDRLAARLKELSPQIVALEATGGFETVATAALAAAGLPVAVVNPAQVRAFARALGQRAKTDPIDAAVIAHFAEATKPEPRPLPDQATQLLADLVARRRQIVEMMGAERQREKRMTTPHLKKSIIRLLKALEKELSSLDADIDDAVRGSPAWREKEDLLASAPGVGTIIARTMIAELPELGRLDRKQIAALAGLAPFTRQSGQWRGRSFISGGRKAVRTALFMGAMVAKKHNPVLKAFFERLVAAGKPKMVALIAVARKLLTILNAMIRDNRPWQNA

SEQ ID NO: 53859 - protein, 370 aa, unidentified
MSVRRILAKTIDTDLEYEAIGIDLAKNCVSAALITTEGEVVGIDRLDYSELEKSAQVLSPTTFVMEPCTEMNYLVQKLEAWGHRCLVIGGKNVQNYVENHYSGQKTDLNDAQALAFLAQDTQLRPIKAKDMEQQKYASLTTLREQYIKQYRQTIVSLKGICQSWGLNISKGISGKARLKDLIENHAAFPEELKESLVDMVTHAQTTQKALNKITKTLEELAKNDKLCQLIQTIPGLGPVCSCRLRATIGDIQRFKNPKDFPAYYGLVPRSIATGHNEKKGRITHRGDKTMRSLMVQGAGSVVNMATKGKLKSKQLTKWILKKQKEKMPWGKLVCAVAAKLLRIVRAVLISSKPYNPKIAGVAKCSLPKGT

SEQ ID NO: 53860 - protein, 376 aa, unidentified
MQEISKIHVGLDVHKDSIAVAVAEPGRAAAKVIGTIRHDVPKLLKLLVKLGNTEAVHVVYEAGPTGWGLQRALTAKGYSCEVIAPSKMPRRPGDRIKTDRRDCAQLAECSRAGQLRAVWVPRPEDEAIRDLARAREDALNDRRQLRQQLKALLLRHDVRFPGKTSWTQAHHAWLGKLNFSEVATQAAFMDYWMAVQASDERLKRLNSALLEYVKNWRFAPQVSALQALRGIDVTCAIALVAEIGDFSRFDHPRKLMGYLGPVPSERSSGERTARGSITKTGNAHARRMLSEAAWSYRFKPRLGERARRRQEGLSQQLCAIGWTAQLRLTQRFAKLDARGVHRNKVCVAVARELTGFVWAVAQAADTPLQATQGGTT

SEQ ID NO: 53861 - protein, 457 aa, unidentified
MKRKNKRRSGKEEAHPFRGLSQVNPNAAGIDIGAEEIVVCAPGPENTQIVKTFGNYTADLQAIGRWLKEHDVKTVAMESTGVYWIPLFEELERQGFACLLISSRSLRRVAGRKSDITDAQWIQTLHTYGLLEGSFRPQADLVALRTLLRHRSQLVEHRAPHILHMQKALLQMNVQLSQAVTDVTGMTGLKIIRAILVGERDPQTLAGLREPGCKKRAEEIGKALTGTWREEHLFILKQSMRLYDFYTEQIQACDEEIERLYGLTRPDWKTEEVQPLTKRKKNSHSKNLPHNAEEVRKHLKRLSGVDLSLVDGFGVSLAQTVIMEVGTDMSKFPDEKHFCSWLGLAPKHEISGGKVLKNNTLKTKNRAGQAFRLAANSVKQAECMFGVFYRRLKARLGPSQATVATAHAIARVVYRMLKYKVEYEPLTVNDYQRQFEAQQIKYLKKRAAKFGFQLLPT

SEQ ID NO: 53862 - protein, 402 aa, unidentified
MDIGDIDVFIGIDVGKSEHWATALSRDGQKVLDKALPNDEDRLREVYQRLQAKGQVLVVVDQPATIGALAVAVAQDMGITVGYLPGLSMRRIADLTPGSAKTDAKDAAVIAQAARTMPHTLRAVSTSDEEAAALSMLTGFDLDLARQVNQTANRIRGLYTQIHPALEAVVGPWLEHDAILEVITAWPTPADLKRAGKTRIDARLKKHGCRRHATWAGQIVSALKHQTVVVAGTDAAGTVLPHLARQLITLHAQRADIAAQVETLVQAHPLYQVLTSMPGIGVRTAAVFLAETLGKTFDTGAQLASYSGLAPVTRRSGSSIRGEHVSHGGNKRLKRAMFLSAFASLRSDPVSRAYYQRKRDQGKRHNQAVLALAHRRILTLHAMIRNGALYDPQPATKLPAAA

SEQ ID NO: 53863 - protein, 380 aa, unidentified
MQPTQGNDITANEVTLCVAFELSRASWKLAFHDGKRDTPAIVTVRAETPQARLDEARAAIEAIGRKWGLCMDTPVAMVYEAGQDGFWIGRALCKQGMDVKVIDPASLPVQRHARRAKTDRLDAIRLVNSLRAWLRGERDVMHVVRVPDEQAEAQRHLVRERGELQKEITQHQDRMRKLLRTVGCWDAIGTDFALRLAQGQVRCHNGRALPAELAQRLQRECERLALAQQQLQALEETLVQQLPAPAQQKIAQLSRLKGVGQVGAMRLVLELFWRRFDNRRQVGACVGLVPQPYDSGESRVDQGISKQGNRRVRSLLIEMAWMWLRYQPKSALAAWFAQRTQGQNKRGKRVAIVAVARRLVIDLWKYLEHGLVPQGAAMKG

SEQ ID NO: 53864 - protein, 462 aa, unidentified
MKNKPSTDRARKRLTKHLEQINLYAAGIDIGSESHYVAVPEGLDDEPVRCFSCNTGDLEKLADWLVQIGIQSVAMESTGIYWIPLFEILEERGLEVLLVNARHVKNVSGRKSDVLDCQWLQQLHTYGLLAGAFRPPEQVTALRAYMRQRGTLVRYAGSHIQHMQKALRQMNLLLDNVVTDITGKTGMTIIRTILQGERDPHKLAAYRDRRCKKSEQAIAQSLHGHYREEHLFALRQSVELYDTYHAKILACDEAIEQQLKRFDAQGDPQQLRAGKKNKAANAPAFDVRGELYRMSGVDLTAIDGINDITALKVLAETGTDMSRWKSEKHFSSWLGLSPGNKISGGKILSSKTKPTTNRAAAALRMAAFTLSNSKSALGAYYRRMRSRQGAPKAITATAHKLARLIYSMLKHGTEYVDQGQDYYEQHYQDRVMKNLKQRAAQMGFALVPSSADNGSVVKESTG

SEQ ID NO: 53865 - protein, 409 aa, unidentified
MIQPLSKSSAGLDVHREIIVATVLQEQPDGTVNKTVKEFATFSRNLEELARWLTSLNPEIVVMESTGVYWMQVYETLETAGMIPWVVNAYHIKRVPGRKTDVQDSEWLAELARCGLLRASFIPPKDFRQLRLLTRYRRKLSGVLSSEKNRLHKILESCGIKLGIVLSDIDGVSARRIISSLIDETIQPDQIAALLHGSLLPKLMMIQQSLSTTLNERQRFLLKQIQAHLLWLEARIEQIDEQLVTAMVPYQEFCQLLQTIPGIDLIAATMLLAELGTDMSVFPNQQHLCSWAGLAPGNNESAGKRKHGKTRKGNAHIRALLCECANAAIKSKSQFKGRYQGLVIRRGHKRSIVAIAHKLLQTIYVMLKKHEPYRDPQIDYEELVVKRNSARWIKALDKYGYLPKIKQQN

SEQ ID NO: 53866 - protein, 417 aa, unidentified
MKLLFIGDDWAEGHHDVAAQDDAGKTLARRRLPEGADGIARFHEMVGSCLGEDAEPDPARVIVVIETDRGPWVKALAAAGYRVYPANPGQAARHKETVANPGKKDDFFDAGCLADMGRTRRHQMRELAAGSDVAEAVKIAARAHQKLVRERTRHLLRMRPALREYFPAALEAYADLTLAGKDALELLAKAPNPESAARLTVTQVTAALKRAGRRGDLAQRARDIQAALRAPHLAQPDVTAEAHAASVQAAAAVITALNEQVKIMEAKVSGLFRRHPDAGLYLSQPGIGDITGARIPGEFGDAPGRYATAKARKNYAGTSPLTIQSGKKKTVHARYIRNRHLIDALPAQALTALSVSPGARGSYDDLRARETGHDDAMRRVASRLAGILHGCLKTGREYDEATAWSHRAGNPEATKAA

SEQ ID NO: 53867 - protein, 409 aa, unidentified
MPNSLLVGIDVSSSDNKVRLLDSSGNSLSKFSVSNNQPGAKTLVSKIVSAMTLNRFDSLVIGLEATSVYGEPLVHFLKQDAGIGSFKPSIHVLNPKQVNAFKKAYPDLPKTDDVDAWIIAENLRFGRINQEVYMDDRITALKKLTRARYYAARNLTREKNHFLNSLFLKFSSLTQEKVFSDQFGATALAVVEEFLSVDEIAYMSIEELSAFVNEKGKGKFDVPEDVAKLIQKAARSSYRLPKTVNDSVNQVLAISLVAIRALKDQLKLFDKAIEEHMKVIPNTLTSVKGIGPVYAAGIIAEIGDIHRFKNQAALAKFAGICWSKYQSGKYTADNTHLIPSGNRYLRYYLMEAANKVRMHDPEFKRFYDLKYRETPKTPHKRALALTARKLVRLVYALLHDNRLYIPPTE

SEQ ID NO: 53868 - protein, 412 aa, unidentified
MKQQAERAAGLDVHRDNVAAATRVNEPGGEVAVTKKRFPTTRRGVRELAAFLSEAGVTRVAMEATGVYWKTIYYALEGLFDELWLCNAQHVKNVPGRKTDLGDAEWLADVAAHGMVRPSFVPPPEIRELRELTRYRKTQVDARAREIQRLEKTLQDAGIKLTSVASAVWSVSSRKIIEALIAGERNPAVLASLVLGKLRPKIAQLEEALDGHFGPHHAIVCRQVIEHIDFLDGSIAALSEEITARLIPFEAAVTLVCSITGIAELSAQAIVAEIGVDMSRFPTAGHLCAWAGVAPASHESAGKRRPAGTRHGSTWLKRVLIEVARAASRTKGSYFSAQYSRIARRRGPNKAAVAVANSILAVIWHVLTNGCIYEDPGADYFERRHDPAVEAKRLQARIEALGFDVTLTLKAA

SEQ ID NO: 53869 - protein, 412 aa, unidentified
MEVIYPCCCGLDVHKKSITACVLWAEAKGKSRKEKKRFGTFTHDLLQLADWLEKCGVTHAAMESTGVYWKPVWNILAEQFEVLLVNAQHIKAVPGRKTDQKDSEWMADLLQHGLLRGSFVPPQPIRELRDLTRYRVSLVQEINRIANRIQKVLEDANIKLASVATDALGASGRAILQAMLAGEQDAARLAEMSKGLLRNKIPELKLALEGRMTEHHRFLLRELFDHLRFTESKLSEIEKEIDKRMLPFEDKVTRLCTIPGVDRVTAWGMLAEIGMNMNQFPSSGHLASWACLCPGSFESAGKRLSGKMRKGNVSLRRCLSQAAWAISMMKNNYLSALYRRIAARRGAKRAVMAVAHALLVIAYHMLKRKEDYRELGADHFDRIDVNRIRRSLVRRLERLGHKVTLEPLAQTA

SEQ ID NO: 53870 - protein, 395 aa, unidentified
MMYLGIDIGKRTHVASLISEQSKVLFRAFSFSNTTEGAEQLLELLDKFAPNPADVEIGMEATGHYWLSLYSFLIEREFRVYVVNPIQTDGWRKGTEIRKRKTDIIDSVLIADLIRYGGFIEAALADENTITLRNLARFRSYLVDSISDLKRKTITVLDQVFPEYETVFSDIFGKTSKELLLHFSSVAEFEHITTTQLNDALSSIIHKKFARQKVDKLSALAKHSFGVTYAQDSFSFQLKILIEQINFIENQVSQIEVEIDQVLELMDSPITTVPGIGPVNAAIILGEIGDINRFSSPSKLVAYAGLDASVSQSGDFSSTNNRMSKRGSPYLRRAIFTAAQVASFNDPVFSAYYQKKRAQGKHHLVAVGAVARKMCNTIHFILKNNTTYIPQVPKE

SEQ ID NO: 53871 - protein, 406 aa, unidentified
MEVIYPRCAGLDVHKQTVVACVRIAGDGPPLQQVRTFATTTSGLLALADWLDSFGVEQVGMEATGVYWKPVWHVLEGHFELVLANAAHVKNVPGRKTDVNDAMWLADLLAHGLIRASFVPPVAVQELRTLTRTRKQFVRERSAHVQRIEKVLEDANLKLSVVLADILGKSGRAVLQAIIDGQDDPQRLVSCIGRVKASRAELLEALRGHVSAHHRFMLKLHLGHIDALDQAIATIEKEVGLGLEPFRHAAKLLSTMPGLSAVSANVVVAEIGIDMSRFATPGHLLSWACMCPRNDESAGKRRSTRLRRGGKWLKTTLVQAAWSAVKVKGSYLQAQFHRLRARRGAKKAIIAVAASMLTAAWHMLRDGTEWHDLGAAHFDRADAQKTANRLIRRLQQIGYTVQVTPA

SEQ ID NO: 53872 - protein, 370 aa, unidentified
MVAGKKSRKTKGYGMNSIVAGIDLGDRESLATVLSPIGDVADRFTFPMNEEGYAFFASRVPKNARVAFESTIMAYPISRALRTHGYNDVTVAHPKTLAWIVRSKKKNDRVDSLKIAKLHMAGMLPESHLLDRNDQIVRDLLVQRVKLGVEIGRLKNSMIGYLKREGVYESLPKSGDNFSARRRQAIHSLRFNDNRDLVLGTMMDRLRFLEKQCTPLEDTVRENAKLNDDVKILMTITGVDYYLASLISSFIGNVERFPSDDHLASFFGIVPASRDSADVKRRGKMTKDGSSIARWTLSIMVDTVMKHNQPIREYYTSVKKRTGSGKLAHVSTMRKLTRMLYHMLKTKQHWKWENPQLTERKMARLQIDGR

SEQ ID NO: 53873 - protein, 349 aa, unidentified
MEHVAIDLGRPNSVICRLNEEGKKSIRGFALNRLNLDRFFEGRPRCRVLIESSTESEWVAQHLESLGHEMVVADPNYAPMYGERNRRVKTDRRDADALFEANRLGIYREAHRRSREQRNVTALLKVRDALVRTRTRWINLVRALLRREGLRIRTGAAESFVDRVEELDLPLELCAQIRPVLELLGPLNEQLVAVDKQVVELKKRDERVRRLQSAPGIGAVTAAAFMALIDDVGRFPRAHAVESYVGLVPSEWSSSEKRSQGRITKAGDTRVRWLLVEAGWTILRSRRLESQPLRSWAEGIAARGGPNVAAVALARRLAGILYAMLRDGTNYDPTLLQQGSHRRSRRAAA

SEQ ID NO: 53874 - protein, 440 aa, unidentified
MAKDSLYLIERPQVISNHVHENWIAGKQGNPAYGGNIQEGAIETMDGPIISFDVSKGSSHMRGFLDHGKPAGKATVIRHDLEGFAKLDALRGRIREETGSDPVAVYEFTGVYSHTLERYLDSIGMRRYGVSPLESAKVRKAMIRPTKNDSLDCRTIAEVYYLRPLREGRSDDEIHVGLRDMGRFYHYLLEVKVVEKGRYRRCLDDVWPCFDKVIEPDSPKSLAIISRYGHPSKIRSKEQVKNFLMKLPRRGRASTDELAEKIAAYAKTHVSGASPNSYKTEEVKLMSARVKGIIDESERVMDSMISIAENLPEFASLKTIPGIADVTAARLIAEIGDISAYPKADSLIAYAGLDPAVMQSGQMTGEHMHITKKGNPHLRATLYVAVTNMIMSKAENMITRYVLKKKNSGLSYKAAVIAGCSKLLRLIHAMLRNGTCYSDK

SEQ ID NO: 53875 - protein, 293 aa, unidentified
MLADQLDYVVGVDPHRDSHALAVVHVVSDAIVFESTVVASSDGYAHALKLVDQHAPGRRAFAVEGTGSFGAGLTRFLTGRGEHVLEVGRLRRDRRSGGKTDALDAISAARSVLTSERPATPRAGGERQGLQALVAAREGAVNAKRAGLCQLRDLLITTPEPLRSELRPLTRARLLQRLAATRPGGGRDPELRGSMLALRSIARRVLQLTAEERELAREIEALTRKLAPQLLDQPGVGPHAAAQLVLSWSHRGRIESEAAFARLAGAAPIPASSGQTIRYRLDRSGDRKLNRST

SEQ ID NO: 53876 - protein, 351 aa, unidentified
MVRWTAYPYLGGTMLHSGIDLHKNDLVISTLDAGGTQVQKLRLRTQRSVVSRYFRLLPGPHRAVVESTASWYWLADLLEREGVELTLAHAKLVKAIAYAKVKTDAVDAHTLAQLLRVDLIPPAHMISPELRGIRDVLRVRLRLVQKRTRCQSAIASLLTKYNVASPEDLPVLARLEAECHHQQITLLERQIKRVVKAISPELLTLDPVQHLLWIPGIGRINAFSIYLEIDDITRFPSVKHFLSYARLVPGSSNSGGKTKHRPSKDGNRYLKIAFTHAAVRAIQNSPEIKAFYQKQCRRKPKPVARGIVAKELGKIVYYVRKHAAPYDGTFKGKPLSTSKKAEWPRKRSPDA

SEQ ID NO: 53877 - protein, 376 aa, unidentified
MNEFNNIYVGLDSHKATIAVGIAHDGREAPLYYGEIAYTEAAVAKLVKRLSKDGQTLHFCYEAGPCGYELQRQIQLLGHVCEVIAPALIPRKAGQRMKTDRRDALSLSGLYRAGELTPVWIPDRAQESIRDLTRTREDMKENELRARQQLGAFLLRHRRIYSGKSRWTQAHFRWLEQQVFSEPAQQLVLQEYIDQVSAMSRRVAALEQAMRQALEHWHWKPVVQGLMALRGVSLITAMTTVAELGDLTRFDSPRQLMGYLGLVPSEHSSGLTRRQGGITRTGNGHVRRVLVEAAWAYQFQARKTRTIERRAEQTSPQVQAIAWEAQKRLCGRYRNLLSVGKRKQQAVTAVARELAGFIWAIACEVQGKPHASKVIG

SEQ ID NO: 53878 - protein, 413 aa, unidentified
MLHPKMQYTYVGIDSHKETHTAVFMNCFFEKLGELQFSNLPSDFDAFLHYAQAYLMPGTSFMFGLEDCSSYGRMLMVHLTQNGYHVKHVNALLVARERKNQSTAQKTDSVDAECAARVLLSKFDQLPDSVPEDKYWALRSLVTRRALLVRHRAATKHYLHGLLTQNYPKYRSFFDNIDCKTSLAFFMRYPSPSTLQSTTAEELAAFLEIPSNRSIGITKATQILNTLKDSAAAITHQHVRDSVVQSAIRQIEFSMDEVNKLESDIAAFLTEFNCTLTSMVGIDTVTAAQMLSCIGDIKKFSTPAKLARYAGIAPVTYASGKKDLQYANQHGNRELNSLFFWLAVRLSNPMSGKHRVMNSFFYDYYHRKMSEGKTKRQALKCIERRLVNIVWGMLTNNEEYINPPAYDLITKEY

SEQ ID NO: 53879 - protein, 480 aa, unidentified
MNVKANQTKKQVNVENQANLLLSKEELRKRMEGVEKELKSYTWRELETNGKFAKNDKLSFITDDMLIVGCDIGSETHYIRAIDIRGRELGKGAFEFSNTAEGFENAKAWMLKHAAQNEKRQIVLGLEPTGHYWFALAAWMISKGISVVQVNPYAVKQSKEIEDNSQHKDDRKDPKLIANLVKDGNYGMPYLPEKTYADMRRLSMFRDQLTEDRIRNINRLHRELKIYFPEYMDAFGKIDGAFALEVLKVSCIPSEIAALGTEGLRNIWHDAKLRGRGYSRAGKIVNHAEKSVGLEDGTSAGREAVRWFSEQIMKLDEQLARIESTLHKKCMEIPYAENILEIKGVGENILAGIVAEMGDISRFDDVKEIQKLSGMGLVACSSGKHRGQTKISHRGRKRLRYWLFQAAKSAVSHAEEFKQLHVYYTTRARNPLKKMQSLIVIACKILRVIYTILKTGATYDPQKMLKDIKRPEAAPAQMAA

SEQ ID NO: 53880 - protein, 345 aa, unidentified
MPNIEIGVDSMVKENFIYVGIDLHKETHTAVMIDCYNQKLGEITFPNRPADFPKLVAKVKKCNTDGKTIVFGLENAYGYGRALAVWLIDKGYLVKDVNTAISHRQAKHRGAMYRKSDSDDAKAIALATLNMLDKLPDAYPNDAYWSLGQLVHRRDNIMKQRTRLVNQLHEQLCIAYPSYKQFFNDISRPTALYFWEHYPSRKYLKGKSVEDLRTELVPVSHNRCSTKNCEKILDAVASDKVKNNAYQDARDMVTLSIVSDLQHYDSQLAEVDKMLEQMYKMLGCTLTTIPGVNVITAVKILAEIGDIKRFSNANKLAQFAGIAPLHLSSSGKGKDVATKQGNRRL

SEQ ID NO: 53881 - protein, 472 aa, unidentified
MAKRKRKRKSVQKASQTFADLEQLNLNAAGLDIGASEIYACVPRDRDERPIRSFGTYTVELYLLADWLEACGVETVAMESTGVYWIPAYEVLEARGFDVCLVNARHLKNVPGRKSDVLDCEWLQRLHTDGLLRSSFRPEEEVCALRALVRQRKQLVESRSRQIQLMQKAMEQMNVKLTEVVSDITGVTGLSIIRAIVQGERDPKVLARLRNHQCRKSKDEIAMALEGTYQFEHLFALQQALAAYDFYGQQLHECDRMIEAQYDSMPDTPPGDDTSPPKGNNQKPRKNQPDFDLASSLYRLVGVDLTEIDGIDALTAQTVLSEIGLDMTRWPTVKHFANWLGLSPNSKISGGKLLSSRTKKTKNRATTALRVAAQSLHRSDSALGAFYRRMRARNGPAKAVTATAHKLARIIYFMLRDRTPYRAPSVEEYEQQHRERLIRNLKRRAKRLGLQMIPIETESDNTPFSLEQALVS

SEQ ID NO: 53882 - protein, 394 aa, unidentified
MSKVIMIGCDLHDRSMLLRFAAGKAEPQQLTVDNDTRGRRQMIGRLKSIAIRENASRVIFAYEASGLGFGLADLLVEEGIECHVLSPSLLPTTPKSAKLKTDAKDAQMIFEHLRGHVLAGNKLAVVWTPSQRLRDDRELVRARIDAGDELTRVKLKILSMLKRRGIVKPTWYASKWTKRFVNWLREEVLAGSDSVVAAVFEKLIDRYELFQKEQVKLDKAIRALSQQARYKHPHAALRKIPGVGLLVAMTFLTEMGDLTRFHNRREVAAYLGLCPSSHESGEANNRKGRITRQGPSRLRKMLCQAAWVSVRDCSQAQATYHKIKQNQSKRTKKALVALMRKLGVRMWHQALTCGVSCELVGRGGPHGIQASGRAQQRDNVATSAPPSLRPSFAG

SEQ ID NO: 53883 - protein, 463 aa, unidentified
MSIVEAVEPETSLVLGRGTSDCRCEHEPQIRLSPRSLPGGSVIVNRRKEAAVQQIYDRVAGLDVHRDNVVACFRRLGPRGGVVFEKERFGTTTARLRELEAWLADRQVELVAMEATGVYWKPVYYALESRFTVWLCNARNVKKVPGRKTDLTDAEWLADVAAHGMIRPSFVPPPPIRELRELTRYRKTQSAARAAEIQRLEKVLQDAGIKLTSVASRVLTQSGRAMIEALVGGERDGAKLAELALGKMRPKVPALTEALTGHFGSHHAVACARILGHLDFLNESIQALTEQIDARTAAFAPVYTSLLPVPGVDRLTIDVIIAETGADMSRFPTPGDLASWVGVCPGSHESAGKRRRVGTTKGNPWLRQALIESARAAARTKGSYFGAQYRQIARRRGPNKAAMAIAHSLITLVWHLLSTGAVYTDLGDDYFASREDPDRRARRLVAQLEQLGFKVTLEAAAAA

SEQ ID NO: 53884 - protein, 312 aa, unidentified
MTEITIGVDVSKDTLDVHLHPDGTHRQFINDAAGFRLILDWIGSQPVARLVFEASGAYHRAFERAMGEAGIALCKVNPARARRFAEATGQSAKTDRIDAAMLARMGAVLEPDTRAAPSKTACDLKELHMMRVALVKDRTAAKNRAATLTLPLLKRQLRQRLAAIDRQIRQIEQAMHARIEADPELARKRDILISIPGIAERSAFALLTGMPELGDLNSQAAGALSGTAPRTRQSGKWTGRAFVQGGRAHVRRALYMPALAAARFNPDLNQTYKSLTARGKPPKLALTAVMRKLIVLANALIRDNRKWTPKPN

SEQ ID NO: 53885 - protein, 348 aa, unidentified
MKYYIGLDAHSTTSTFAVVDKNGQCVLRETVRTSEQSLVHVINKVIGERHMTFEESSISQWLYLQLKDKVDNLIICNPTYVAKKQGAKTDFRDALHLANELRTNHLQPVFHDTSHWMEIRTTVSGYLDIVEEIVRFKNRLKAVFRAEAIQTDENSFYKNNSRVKELKNPAAKFVAEKLFNQIEFLESEKDKYKEVFERNRKKYRPIRNLMTIPGISIIRANIIAAIVCQPNRFENKHKFWGYCMLVRHIQISGGKIYGNKRFYGRRELRNVFLGAAENVMRLDGELRDRYDALRAKGADHKDAKVNLARQIASIALCLLKNNDKYNENYADYLKERKKLRKDFFEQSL

SEQ ID NO: 53886 - protein, 431 aa, unidentified
MFRRRTKLILEVRNMSEFAALVAIDWADKKHAVSLYDQTTGSREQRIINHTPEALQEWALDLRARFQAQPIAVCLEQSRGPLIYALLKYDFFVLYPINPTMLARYRKAFSPALGKDDPSDADYLLDLLQHHRERLTPWRPDDQKTRTLRLLVEQRRRLVNDGTRITNRLTALLKSYFPQVLCWFSDLRRLVVCDFLDRWPTLEAVQRARPTTINKFLRSHHSVRRQTNERRLAEIKTAIPLTNDPAVLNSSQLIVKVLTAQLRTTIKALAELDRHIEALCLTHEDYELFSALPGSGTVYAARLTAAMGSDRSRWKTSDDLLRFSGVAPVIERSGKQNWIRWRYFCPKFFRQSFVEYAEQSIHHSFWAKAYYSMQRLRGKEHNAAVRALAFKWIRIIWKCWQTRTPYNEVIYLESLRKAGSPLLKFAAEHQN

SEQ ID NO: 53887 - protein, 323 aa, unidentified
MQGQIQPEARSAQVVYAGIDVCKDRLDVHLHPLGRRLCVANDRAGVKRLARELAGHPPALVVMEATATFHRLAHRALSQAGLPVAVVNPLRSRLFAEALGSHAKTDRVDARMLAILGAALTPRATPPAPEAIETLQELVHARDAAMAERTALSNRLGASRTAFLKRELARRLESLERHIARLEARVADLLAGDPALARRKAILVSIPGIGPAVAAALIADLPELGRLDRHAAACLAGLAPFADDSGDAQGPRHIKGGRAKPRRALYWAALAAARHNPDLAPFYRRLRERGKKPKVALTAVMRKLVVLANTLLKDDRLWVNHAA

SEQ ID NO: 53888 - protein, 400 aa, unidentified
MLSIGIDVSKGKSTVCGMKPGGEIVYTPFEVQHTREGMSELVSLLRGSGEEVRAVLESTGSYHCPVVAALLENGIFVSVINSLRMKRFCSQSIRKVKTDRIDAMQIALYGLAYWQELQPTKLPEDTYRELQLLARQYYQMTSMLIKAKVDFNALCDQVLPGMQELMNDHAGRHKLSDFVLRYHHTTHILEMGETRFRKDYCKWAEKKGYRNCERMAVLIFATAQNGIPVLPNAPSTQIVITEAIRVLHTVEASRDAILTQMQALAKTLLEYSLVREMPCIGDTLAPRLIAEIGDVRRFHSKRALIAYAGIDAPPYQSGKFCANNRHISKRGNRYLRKTGYEVMQSYVMHKPANDPIFTFIEKKRGEGKSGKLAMVAGLNKFLRVYYGKVTELYRSLPTIE

SEQ ID NO: 53889 - protein, 317 aa, unidentified
MRIIGMDIHRVAAEVVSLLDGEIVNGRVQMLRNKLEEFARRELTPDDHVVIEATGNATAVAEVLSPYVDRIVIANPKQVHMIAHAKVKTDTIDATVLAKLYASGFLPEVWVPDPGTLALRRQVTRRTQLVRQRSRLKNLIQSILHAHLILPCPHGNLVGISGRKWLTRQILPADERAAIERHLGLISHINEALTVVEADIAVHALQDPTIRRLMTLPALDVTVAASVAAAIGDIRRFGDPQRLVAYLGLNPSVRQSGEGPAYHGRITKQGRGHARGMLVEAAWAAARSPGPLRAFTSGSPRVAASTSQPSPLRASLQ

SEQ ID NO: 53890 - protein, 370 aa, unidentified
MEKSTPLFVGLDVHKDSIAVAYAQGQSADPPVFLGAIGTREADLTKLIRRLQSKRATLRFAYEAGPCGYGLFRDLASQGFDCQVVAPSLIPKKPGDKIKTDRRDALELARLLRNGDLTRVYVPTIDDEAIRDLCRARDAARLTLKNAKLRLKSFLLRLGLHYVGRADWNAAHLRYLAKVVCPTSAQQIVFQESVRAVDEQVDRLKRLEAELLERAPAWRLYPVVQALQALRGVQWLVAITVVAELGDLTRFDNPRQLAAFVGLIPSEYSSGPARRQGGITKAGNGRARRALIEGAWAYRHPAKVSAHIQTRIDGLPKPIQDIGWRAQVRLCKRFRRLVARGKHPNVAVTAIARELIAFMWAIAKAVPRTA

SEQ ID NO: 53891 - protein, 388 aa, unidentified
MTSTQYIGMDVHKESISIAVRNAAGKIVMECVIETKASTTLQFMDGLRGDVQVTFEEGTWAAWLYDLLKPHVTKVVVCDPRRNALLQEGNQNDRVDARKLAELLHNNQLRSVYHGDHGLRALKELVRSYLTITKDLSRVMTRVKAIYRSWAIPCSGKQVYSSRRRAEWLGKIQEPGVRRRAEFYYQQLDALRALRQEVRRDLLAESKKHKIWKRLCQIPSIGPIRAAMLLGILQTAHRFRTKRQLWTYSGLGIEVHSSADHHTVKGQLERKKKHIEIRGLNENCNHDVKNLLLHRTIVRLKKGLHRFFDLVLIFAVGDGFARGRCQVKNIRVRNASLGRIVVTHENTRARCPRSVLRRHGVVHQDQDTRRLWMRIGPGRDGQDKRNDQ

SEQ ID NO: 53892 - protein, 477 aa, unidentified
MVNDLNKSFGLRTKYRYGAGIDIHKEYVITCVAIHRQDSITGQTMQQFQRNSKGLGEMCRFLKKFLLSTIVMESTGVYTPFVKEWLEKTDWRGLTPKILVINPSIVKKYPGELHADRQDAFDLARLGLLGLAEPSYLPVNVLKELRWLSRRIFFVTKDCTRLKNRIKQNLDLWGLSLPYFDLKGGWALDLCRVLIFHANGNLRQSFQLIEQKKINLKSQSIAAILRRKNKYERFFDIQLPPSAIRVVELQLANLNAQNAIINGITGEIERLINNHRSFQDKIQILTQIPGLDDQSAISLISEIGIITRFSNIKKFLQYAGCAPTIYQSGTIHKPSHLNKRVNHFCKLVFMQAGRTVCSKVNKDSDLKEFARKQLNRHWKDKKLAHANTGIKIARIVYRLLLTGEQYHPFYESQVKKDINKETGNELKKPFRLSSIRRKTRHHLHYLHAVLENQHEDTVKRVYDEIKTMWKDVVGYLD

SEQ ID NO: 53893 - protein, 377 aa, unidentified
MSSAAASIIYLGMDVHKDSITIAVLPATAKTPTRLERLPNDLPKLKRFLDRAARDGELRACYEASGAGYVLHRALRDWGYACDVIAPSLIPKRPGVQRKHDKRDAAELARYYRAGELTAVRIPSEAEERVRDVVRCRETFQREILKSRHYILKFLARRGFVYREGTNWCTPHLRWLEHLTGEASPLAPADRLVFREYHALLAYKLQRRDELDRQIEQLALTPALATAVARLQCFRGIALQGAMVLATEIVDWRRFERPGQLAAYLGLVSREDSSGPRERKGSITKAGNSHCRHVLVQAAWCYHYRPNLSVEIRRRQQGQPPAVVAHAWKAQQRLHQRYQHLAHRKQPQIAVVAVARELVGFLWAVMRDLPVPEVAAA

SEQ ID NO: 53894 - protein, 428 aa, unidentified
MQQLDRIRLAQFRQLKEEIRGSERHGVVGMDIGKEKHHAFFGTARGKALLRRLVFENSLEGFERLLEQAEAVRVGHGLGEMVFGFEPTANYHKPLADFLVRRGRQVVMVSGVAAKENRKTLDGRWDKYDDKDAANVADLVAQGKFLFYEYVDQGLRELRDLLALKRRLKRQEHGYRVRIRNHLVAKYFPELDRYYDQSETVGLAIMRWCLDPQVLSGLEFEKFVQLVVSRRGVRGSEGRLRSIWERARHSIGCPVGPAAEFEAQVMVEGLKQIRAVIGETERHIAEHCSEFPEYDCLLSIPGFGPDVSAKVLGAIGDPFRFQNGRQVIKLAGWDLEAERSGKSSDSARPVISKKGKADLRYALYQAALIASIKNRPFMNYFTNKLRGREKEPGIKTKMRVKLAAKLLIIAWTLMKKKEPFNPDYLKLE

SEQ ID NO: 53895 - protein, 342 aa, unidentified
MQITTIGLDIAKNVFQVHGIDATEKVVVRKQLRRSKVIAFFEALPPCLVGMEACASAHYWARELRKLGHEVRLMPAKDVKAYVKRNKNDAVDAEASCEAVRRPTMRFVGVKSAEQQGRLMQHRTRDLLLRQRTQVINALRAHLAELGVVAAQGREGLKELLAIIADENDDRLPVDARASLIVLAAQLQALQTLIGSIEKRLVVQHRANEASKRLETIPGIGVLGASAIAATVSDPNVFRSGRDFAAWIGLVPRQDSTGGKQKLGPISKQGDRYLRRILVVGAIAVLRYAKQNPEKYPWLTQLLARRPFKVVAVALANKMARMAWALLAKGGTYRAPALAAAA

SEQ ID NO: 53896 - protein, 406 aa, unidentified
MISVGIDVSKGKSTVCVLKPGGEVLRTPFEMAHTKEDLLSLVHLIRSYPEEVRVILEDTGHYHWSVVALLVENGIFVCSVNALRMKKYCAQSIRKVKTDRIDSVHIASYGLTYWNELVSVKPAEDTYKELKLLARQYYQTVSMLIKAKVNLNNLLDQVMPGIVDLMSDSASNHKLTDFVARYWHYGRILEMGEKRFTADYCKWAKKQGYRVYERLASEILAVAQNGIPALPNSPVTRIVVVEAVRVLHQIEITRDTIIAQMQELAKSLPEYSVVKNFACVGDTLAPRVIAEIGDIRRFKHKHSLIAYAGIDAPPYQSGTFNATERHISKRGNSYLRKTGYEIMQSLMMHKSDGNPIYDFIQKKRSEGKCGKEAMIAGLNKFLRVYYGRVSELYNDIQKQLNSVTTE

SEQ ID NO: 53897 - protein, 330 aa, unidentified
MSEETAEIIYVGLDWAAATHAVCVLSAVGKILAQFMIDHTADGIATLIRKLSKFGDPADVHIGIERPNGRLVDLLLEAGHPVIPVSPNAIKTWRDGEVISGAKSDAGDALVIAEYLRLRHHRLRPAAPYSSSTKALRTVVRTRDDVVAMRVAATNQLSALLDDHWPGAKAIFADVESPISLAFLRRYPTAASAARLGEKRLAAFLVKHSYSGRRPVKELLTRLRSAPAGTTDPVLTIAVRDVVLALVSVIEALNSAGKALDRSVIARLGEHPDAEVFTSLPRSGQINAAQVLAEWGDSRAAYDGPDAVAALAGVTPVTKSSGKQHAVHFR

SEQ ID NO: 53898 - protein, 423 aa, unidentified
MSKKSRIAGLAALYGRVCGLDVHKKLVVACVRILDAKDGTVQSTLRKFGTMTADLLELRQWLGELKVTHVAMESTGVYWQPVFNLLEGHFQVWVVNAQHIKKVPGRKTDMKDAEWIAQLLQCGLLKPSFVPDRQQRELRDLTRQQTKLVQQRNAVDNRIQKVLETANIKLGSVASDVLGVSGRKMIEALIAGEKDVTVLAELAQRKLREKIPELQRALEGELTEHHRFLLHQLLGQYDFLEKEIASVSERLGAVAPPSFRAAVEQLDAVAGVGERGARALLAETGIDMSRFPTHKHFASWAGRCPGNHESAGKRRSGKTPAANRHLDAVLTEMAHAAVRTKTSYFKSQYHRLAGRRGKKRAIGAVKHSLLVTVYFMLRDDKPYKDLGVDYFDKLNPQQRIRYHVRKLQELGQEVELSPMADAA

SEQ ID NO: 53899 - protein, 320 aa, unidentified
MTSQAFSIGVDISLAELVIAYFGDTTAPIKLANNAAEIKRWLKRLPPDCTIGMEATGIHHRLLADLAFAAGHTVFVLNPRDVALYLKSLRSRGKTDVLDARGIARYTHNETDKCHAYVPLTMQQQTITTLIQRRHQVVKSRTSLRMSFADTSQCAQALGKLMRAFEALIAEIDSQLKALLAADEGLNTRCKNLRSIQGIGPLISAALAMRMSRVRYANSDALVAAVGLDPRPRESGQYTGTRHLSKRGNPEERRLLYLAAVSACRHPIWKTIQTALLKKGLSSTAVYCIIARKILRIAFAVWNSGVPYDPRLVGRACAPT

SEQ ID NO: 53900 - protein, 348 aa, unidentified
MTLVGCDLHSRKQQVAVLDTRTGELVEQELVHEGDAVERFYRALPPPVTIGIETTGYTQWFHALMHQLGHTVVVGEAAKIRAMVVRKTKTDRRDARHLLDLLQHDRFPAVWIPDPDTRDRRALIAHRVRLVRMRTMVKNGLQAIALNQRLALHSALWTQRGLTQLKALALPPHTTRRRDDSLALLAWLTTRIDQLDAHIATVASADPRVQLLLTHPGVGPLTALTTVLVLGPLARFPDSKHVVSYVGLAPAVNASADKQRLGKITKQGNALLRWVLGQAAPLAARADDELRRRYFSILHRRGRPKAKVALARKLLVRLYIMLRDQIDYEEFRRRGRAPRPHPLPVAVM

SEQ ID NO: 53901 - protein, 392 aa, unidentified
MTVVVGIDVAKDKHDCFIMSAEGEVLEDVFTIPNTLEGFNLLLSKIRVCTGNQDKIKVGFEATGHYSYNLSGFLLNNGLATYVLNPLQTNLYRKSLTLRKTKTDRVDARMIASMLLSDVGLKPYTDTAYHNEELKSLTRYRFDKVQDRAKLKSSVSRLVCILFPELEKLVPTLHMASVYALLEEMPGARQIAAANLTHLKNLLSAASKGHYGREKAIEFRDAARSSIGSQMPAKSLELQHTIRLIQELNREIDDIEAQIQKLMDELDSPITTIPGIGPQMGAMILAEVGDFSNFDSPDKILAYAGLSPSTYQSGQLKNCYPHMEKRGSRYLRYALFNAAKYVCNWDPTFTAYLAKKRAEGKHYYVAISHAARKLVRLIFALEKTRQPYRQAA

SEQ ID NO: 53902 - protein, 325 aa, unidentified
MNIVFLGIDLAKNVFQICGLNQAGKPVYTKRTGRKELLQTLATIPACLIGIEASTGAFYWQREFEKLGHNVKVISPQYVKPFVRGQKNDGNDAQAIAVALMQPTMQFVPPKSPEQQDIQALHRARQRIVNHRTATVCQIRGLLLDRGITIGAAVSRVRRAVPLILEDAENGLSVRMRRTIAELYDLFNDLERRIHFFDKEIETVFRQSEACQRIAKVKGIGPKTATAVIAAIGKGTEFKNGRHFAAWLGLVPRQHSSGDRQVLMNMTKKGDKHLRTLFIHGARAVVRVATNNNDSHMNQWVNQLKERRGFNKTTDLPPRLDTTLS

SEQ ID NO: 53903 - protein, 313 aa, unidentified
MNHLAIDVSKEELVIFASVTGKHYSIPNTKMGIKNFLDENKFCTNETVIGCESTGDYHLQVCKLALECGYQVKVINPILTKQIISATVRKKKTDYSDAEIIAKLLESGQGNSISLESLQQSKKTMLRIQKKIVDCTSDLKRIKKTLETKSKIMDVDECLETINRCIQFLENESGDLTKKACEGQKSHQEEIIDSVPGCGEKLSAIISTEAGDIKRFPSAKQFKAYVGIDPKVSQSGNSLYTGKITKRGNSNLRYALYLSANIARIHDPSLKDFYDKKRNEGKSHRHCVCAVARKLCERIYAIVTKDCIYQKNK

SEQ ID NO: 53904 - protein, 441 aa, unidentified
MTEFFLGIDVSKGYADFVLIDSQKNIIEKNFQLDDTFQGHNLLFSFLQSFFLNNPQSNIIAAVESTGGYENNWVSFIAKLKADFPICVTRLNPFGVSHSSKAELKRVITDKISALTIAEYVINHRAKISFVGEDYFAPLRKQWIYIKLLVKQKVQLYNQLEALLYTANPELITYCKHGMPNWVLMLLKQYPSSKSLAKASPSVLSRIPYVTVQKAETIISNAKISVASQTDPVTGALLKSVVEQIIFLDKTIKAQEKKLTDSCAFPEVKLLSSFIGIGAYSAVGLLLEIRTIERFSSSKKLAAFFGLHPVYKASGDGMGSMRMSKKGRREPRLILFNIARTAINCNPLIKEVYKNNLKKGKSGLSAIGVVMHKILRIVYGMLKTNTPFNPDIDRRNTEHAAIKKPKVVVLKSRRFQEFDSLAPVSKKQNKKREEQKASQKE

SEQ ID NO: 53905 - protein, 396 aa, unidentified
MILLKGVDLMIYVGIDIAKLNHYASVMNSDGEVLVEPFMFTNDFSGFQKLLDCISIFPKDELYIGMESTAHYAENLTSFLFTRDFNVCIINPIQTSSLRKSNIRKTKTDSVDTYLIIKALTLNHFRLYSQRDFDSLQLKNLCRFRQKLIKARTKVKIQLVTYVDLLFPELQYFFKSGIHGKACYALLKEEPNPDKIARMHLTRLSNLLNKTSKGHFGKQHAIALKELAAQSVGIKNDTLSLQILQSINQIELYNSQIKEVEESINDIMDNLDSVIKTIPGIGNLNGAMIIGEIGDIKRFEKPCQLLAYAGLDPSVYQSGNFTASRTRMSKRGSKILRYALINAAWQATLTNKTFKDYYDLKISQGRRHYNALGHVAHKLVRVIHKMMTDNLEFNLD

SEQ ID NO: 53906 - protein, 420 aa, unidentified
MFAKDFPRRPMRRCYGASGERGIFSAGHEPMERPMRKPNDCSRSVTAFEQNSTLIAVIEMSLSSWLVAGVVPGIERHPLKKLETDEDALLKLLLRWRDEAVKAGHKIERIAIAFEAGRDGFWLARWLRARGIEAYVIHPASVAVSHEHRRAKTDRLDTELLKRVFLGWLRGEPDHCSMSAIPTLEQEDAKRPNRERENLVGQRTRIVNRMKACLIRFGIRNFKPTLRKAPEGLEALRTPEGAPLPPNTRAEMRRDMARLRFVQDQIKEIEATRLQQLEQAPAEGPHAMIRLLARVTGVGIETADMLVNEILARNLRDQKAVARYAGLTGSPDESGKRSREKGLSRAGNARVRRGMIQLAWRFLIFQKESALAQWYRVATKDARGAIRKTMIVALARKLLIALWRMVTIGEMPDGVAMRAT

SEQ ID NO: 53907 - protein, 409 aa, unidentified
MRYYLGVDWADQTHAVWGVDEDGTKVGLRTVPHTAEGLTEWGRELDEWRAHGIELWAAIERPEGRVVDFLLDHGVVVYAVNPKALDRARDRFRQSAAKSDPFDARVLAEFLRTDHAHLRALQPSSEAAQELKLLTDDYQRQIRQQTRLVNQLTTTLKAYYPRGLEVAELTTALAREFLQAYPTPAALTALTERQWQRWARTHRLHEARTRALWAVLQRPQLPVPAHVVRAKARLMQSLVAQLTVVLEGVGAYREAIEDFFAQLPAAQWIRTLPIGDHGITAPTLWARLGDAPGRWQSFRHLQAQAGTVPVTLRSGKQQVVRFRFACDKSLRYIIDHVAFLSLRWSAWAHAYYAGQRARGHSYRQALRALSAKWLKIIFVMWERQIPYDEQYHLAMMTRQQLRQRHEKVA

SEQ ID NO: 53908 - protein, 405 aa, unidentified
MNAVGIDVSKGKSTVTIRKPGDVVLMSPCDIPHTQSAINDLIKQIKSLEGETKVCMEHTGRYYEPVATWLSDAGIFVSAVNPILIRDFGDDSLRTPKTDKADSKKIARYTLDRWAKLKQYGIMDKTRNQLKTMNRQFGFYMAQKTAMKNNLIALIDQTYPGANDFFDSPARNDGSQKWVDFIHTYWHVDCVRSKSLNAFTEHYQNWCKRKNYNFSAEKAAKIYQISSDLIAVFPKNDITKMLIWQAVALLNTASKTVKSLRSKMNELASTLPEYPVVMDMNGVGATLGPQLIAEIGDVSRFTHREALTAFAGVDPGKNDSGKHIQNSVRTSKKGSPYLRKTLFQIMDSLIKRSPVDDPVYAFMDKKRSEGKPYYVYMIAGANKFLRIYYGRVREYLSNLSNNETI

SEQ ID NO: 53909 - protein, 390 aa, unidentified
MTYYVGIDIAKFKHDCFIADESGSAVRDSFSFKNDKDGFEFLLSILNDLKPKGKIKIGFESTGHYHFNLKLFLEANGFDYVEFNPLLVHNFATKQTLRRTKTDKKDSKTIAKYLMTIDYKPYVNSFYHINNLKSLCRLRETLVTDRTRYINQITSYLDQIFPEFKPLFENGLNKSAFYLLTHYMTPKKMSKLDADKYSKMKSELKHPISYQKVCQIKDAASKSIGHTSKSLEYALKAVMDLYLYLDKQIDDLESKIKEIYLSMDYKIHTIRGVGILTSAGIASELGNLDRFLTRNQILAFAGLEPSRNDSGEHNGVGKMVKHGSSYLRKYLMNASETFYVFNPSITDFYWKKRNEGKHHRVALSHVARKLVNIIFTLEKYHVEFDSQLVK

SEQ ID NO: 53910 - protein, 320 aa, unidentified
MMTQDDLVVAGIDVAKNKVDVCIRSQSLRRAFASNREGRRELACWLRRRKVGKAVMEASGGYEREWAMALRDAGIEVRIVDPKRVRSFARSAGRLAKNDTIDAEMIAWFAETFGEAPHQVYDAERERLAQIVNTRQALLDVQSELQNSSEHSRPEVVQRVQARLLKKITAELATLEAAITATIKATPRFAELAEIIESVPGLARITSAGLIAAMPELGQVSNKVAAALLGVAPYDDDSGKRRGERQIKGGRRKTRNLFYMACLGAATRHNPVLKAFYRRLVAKGKEKKVALVACMRKLIVILNIMIARRQKWNPNLSAAA

SEQ ID NO: 53911 - protein, 356 aa, unidentified
MSRDMKYIGMDVHKEATVIAVRNSTGQLVMESIVETKAGSLLQFIHGLQGELHVTWEEGTWAAWLYDLLKPHVHEVLVCNPRRNALLKEGSKNDKVDARKLSDLLRTGMLRPVYHGEHGLRTLRELARSYQTISQDLNRVMNRVKALYRGWGIACAGTQVYAPRYREEWLEKIEHAGVRRRAELLYQQLDGLQGLRRTLRPELLAESRKHKASKLLRQIPCIGPIRAARLLALMQTPHRFRSKRQLWTYSGLGIETRDSAQYRFVRGQLQLAKKPQQIRGLNQNHNHEMKEIFKGAATRASCGVGPLRDFYVALLDKGMKPEMARLTLARKIAAIALILWKKEERFDAEQLKTQAA

SEQ ID NO: 53912 - protein, 355 aa, unidentified
MNQEKYIGMDVHDATISAAVKNAQGKLLMECVLETKAATILEFIQGLRGTLAVTFEEGILAAWLHDLLKPHVSRLVVCDPRKNALLRDGNQNDRADARNLAELLRTNQVKAVYHGKHGIRTLRELGRSYSTLTKDSTRVMNRIKSVYRGWAIPCAGTSVFSRRHRAEWLAKLVEPGVRIRAEHLYEQLDSLEPVRQAARHELLRESRKHAAVKLLRQIPAIGPIRSALLVALLQTPHRFRTKRQLWAYGGFAVQTYDSGEYRMVRGKRQRNRERITVRGLNRNHNHDLKNLLKGAAISAIERPGPLQDFYAALVEKGMRPSMARLTLARKIAAITLTMWKKGASFDPQQLQRQAA

SEQ ID NO: 53913 - protein, 422 aa, unidentified
MRCIGLDVHRDFCQVAIADGGRVRHAGRIETSVAALELFAGSLAPDDRVVLEATGPAFAIARILRPHVARVVVANAREVRAISHARVKSDRFDAATLARLLSADMLVAVWVCDERIGALRRRLARRAALVRQRTRAKNEVHAVLSRCLLGRPPASDLFGKAGRAWLAGHELAEEEQETVEGCLRQIDFLDAEIALVDRKVAQFVLGSADAQRLMTIPGIDITTAATLAAAIGDIARFASPRHLVAYLGLDPKVRQSGTDPARHGRISKRGDARARFVLVEAAWTATRTTGPLRAFGERIRARRGSQIAAVAVARKIATIAWHMLSNDEDYAFARPSLTRAKLRRLERLAGATPGTLVDARHQRRHSEQERELQRQAERSYRRLVSDWQATGKGAGATQGRASQRPSKGTAARQTSKPQTAAL

SEQ ID NO: 53914 - protein, 350 aa, unidentified
MLIIGCDYHPGFQQIAFVDTETGECGERRLQHREEAEKFYRALAAQGVKVRVGIEASGHARWFERLLSELQFELWIGDAAEIRTKRVRKQKTDRQDAQLLLRLMVEDRFPRIWVADAENRDLRQLLWHRHRLVQMRTRVMNQLHVVALNEGLRRKKALWRPAGRSELESLQLAPWASRRRQDLLDVLDQLTPKIQELTRALEEEVEKRPVTRRLMTHPGVGPLTALAYELVIGTPERFHCGKQIASYLGLVPSEESSGDRRRLGHISKQGNVLLRFLLVEAAQVTVRSHSEWRSTFFHLAMRRGRKIAKVAMARKLAVHLYWMWRQGLDYGQLHKLGSHAGEPGHPHGVQ

SEQ ID NO: 53915 - protein, 375 aa, unidentified
MSNHSEAFVAFDSSKLRNAVAIADSGRTGEIRFLGEIENSTTATAKLVRKLASKYERLTFCYEAGPTGYELYRQIKSLGQECIVVAPSLIPKKPGDRVKTNRRDAVSLAKLLRAGELTAVWVPDRHHEAMRDLTRARDTAVNDLRSKRQQISAFLLRKGLHYCAGKKTWSQAHLNWLMSQRFEYPEHRLVFEEIMMAMRQAQERLERLEQAMRAAVPDWSLADLVTALMAMRGIDLISAATFLAEIGDLSRFQSPSELMAYLGLVPSEDSTGDHIKRGPITKAGNRRARRTLVECSWSYQHPPRVGKDKQAKVAAAPQAVREIAWKAQSRLNRRYRALVRRGKLKTVAITAVAREFAGFIWAVAREATAARAAAK

SEQ ID NO: 53916 - protein, 405 aa, unidentified
MNMNAIGIDVSKRKSMVAILRPGGEVVAKPFEVSHLSKDLRSLIHRIRSLDGESRIVMECTGHYYETIAHELVSAGLFVSAVNPQLIRHYQDEDNSLRKVESDKADSLKIARYTLDRWSKLKQYGLMDELRNQLKTMNRQFGFYMKHKTAMKNNLIGLLDQTYPGVNTCFDSPAREDGSQKWVDFADCYWHADCVRKISVDAFVDHYQKWCHRKKYNFSKTKAEEIYETAKELVPVLPKDSFTKRIIKQAIEQLNTASQTVEQLRSLMNETAAQLPEYTVVMAMKGVGPSLGPQLIAEIGDVSRFTHRNAITAFAGVDPGVNESGDYSQKSIHASKHGSPALRKTLFQVMDVLIKTKPQDDPVYLFMDKKRAQGKPYYVYMTAGANKFLRIYYGRVKEYLASLPQ

SEQ ID NO: 53917 - protein, 414 aa, unidentified
MTFKIVRFICGGMDVHKNLIVATIGTTDKQTLTTEYIQQSFSTFYSDLIRLKEWFISHDCYDVCMESTGKYWIPIYNVLETELNICLTHPKYVKAIKGKKTDKRDSKWICDLYKCDLVKHSFIPEKEIREMREIARYRCKLVYMRSSERNRYQNCLTVSNISLASAVSDPFGKTATNIMKELMQSEVIEDNKILKLIHKNCKDKILDSLQGYHIESDQRFKMDTVMNHIEYLDKQIQACEAELIKRAYPLRDYFQHITHIKGISALSAILIVSEIGTDMNQFESDKQLVNWAGLSPANNESANKKKSVRISKAGQYLKPLLVQCALSSIKDKNSYFGIKYCRIKKRRGHKKAIIAIARMMLVCIYHMILTGEEFNPCDYESLTNPKPKKEPIMTVESALQFLKDSNFDFSSIQL

SEQ ID NO: 53918 - protein, 347 aa, unidentified
MGKSITDLSSVTTVGLDLAKHVFQVHAIGAFGRVIVAKALRRKDVLFFFAQLPKCLVGMEACGSAHHWARELIKLGHDARMMPPAYVKPYVRRQKNDAADAAGICEAVTRPSMRFVGVRTLENQAALMHHKAREMLVAQRTQLINALRGHLAEIGVIAAQGLKNARELAGVVMAEGNETIPACVRAALAPLVRQLHVLDQEIACSDRTIAAMARGDERARRLMTIPGLGPVTASAMAASVQDVSAFSGPRAFAAFLGLTPKQNSSGGKERLGRISKMGNRYLRKLLVVGAHAVLYHRKPHEDALRSWAKKLMQTKPFKLVAVALANKMARIAFAIMRGRTSYCAVSA

SEQ ID NO: 53919 - protein, 449 aa, unidentified
MREPQEIQDQEYEQVAERVAAVDVAKASGMVCTRVPHPSRPGKRVTKVWQVDATTNAIIELGEHLAGLGVEKVTVESTSDYWRGFFYLLEAAGLEVQLVNARDVKNVPGRPKTDRLDAVWLAKLTERGMLRPSFVPPAQIRQLRDYTRLRVDLTHERTRYWQRLEKLLEDALIKVSSVASTLDTASTRDMLEALIAGERDPGVLAGLARGKMKAKHAALAQALTGRFDAHHAELARLLLDQIDALSGQIGTLTTRIQQLLQAIPAAQGVDADGTTGPGAGSGTDAAVLPAAARLDEIAGIGPGAAQVILAEVGLDMGVFPTPGQLVSWAKLCPRTIQSGAKHHAGKTGKGNPYLRGVLGEAAAAAAKTDTFLGERYRRLVKRRGKLKALVAVARSILVIVWHLLADPAARYHDLGAGYWADRIDKAKKARNHIRQLEALGFTVSLAPAA

SEQ ID NO: 53920 - protein, 346 aa, unidentified
MLIVGCDYHPKWQQVAWFDTETGEIGEQKLVNGDGEAERWYRQLPVPSLIGLEATGNSQWFLDLLNQLGHEVWVGDAAEIRASYVRRQKNDRRDAGHVLKLLREGRFPRLWVPSAEQRDLRQLLIHRHKLVQIRSRVKNGLQHLAMNQGMQKKSRLWSVAGQKAFRQLPLVGWAQCRRQDLLQLLVYLDQQIAPLDQAAQQAAEQDPQARLLLTQPGVGPITALAFVLTIGDVTRFPRGKQVASYLGLIPREHSSGGRQRLGAISKQGNSFLRMLLVEAAHSVVRLDEGFRKQYAHRCHSKPKGIAKVAAARRLAVRLYWMLRTNTPYPEIVRIESSPRVPLVGKS

SEQ ID NO: 53921 - protein, 295 aa, unidentified
MDHFAGLDVSVKETSVCIVDETGKIVREVKVASEPEALLSVLKNPAYRFKRIGLEAGPLSQWLFSALAEAELPVVCVETRHMQAVLKAQINKTDRNDARGIAQMMRVGLYRPVHVKTLRSQKLRMLLTHRKLLQSKAIAIENDLRGTLRNFGLKVGMVGTVKFEARIKELVENLPDLAVLVEPLLVVRRVLREQFVILHRRLLAIVRDDEVCRRLMTTPGVGPVVALTYRATVDVPARFRKSKAVGAVFGLTCSKYQSGEIDRSGRISRCGDEMMRVMLYEAAQSMLHSKKWSWL

SEQ ID NO: 53922 - protein, 361 aa, unidentified
MSESMALVGLDVHKSQTVAAVLDPVSGELRVERLRGEPERVVPVFLEELERPVEAVYEAGPTGFVLARVAEQRGLDIRVVAPGSIPRAPGDRVKTDRRDAKRLVRLFAAGELRFAFVPSEVDERFRDLVRCIDDVRRDLMRARHRLSKFLLRRGVRFAGKAWTQQHERWLCTLHFEDPLSQATFVDYQCAVQGLAQRRKTLTGVLEAAVPDSSHAETVSRLRCFRSIDTLTAAGLCAEVGDFTRFPKPALLAGFLGIVPSEYTSDEKRTQGHITKAGPSNARRLLVEAAHNCRHRPAVGENLKARQSGQDPRVVRIAWRCQQRLHQRWMHLAGKRGKPAGTAAVACARELAAFCWEAATLD

SEQ ID NO: 53923 - protein, 326 aa, unidentified
MQGKEASEQETKVKSNVGIDASKCWLDVHILPCGERRRVANSEAGVRQLKRWLLRHELALVVIEATGKWHRLVHRSLVASAIPVAVVDPFRVRMFAKAKGILAKTDRLDARVLAAFAAVMAPPLRPPAPQTMAELAELVVARASAVEAQTALKNQRGAAEGNFLKRQLERRIMRGDKDVECLDREILARIKADQGLARRYAILTSIPSFHFVVAATLIACLAELGSLTTKQIAMLAGLAPIADQSGERDGVRVIWGGRKAVRRILYLAALSAIRFNADMKAFHQRLKSVGKPPKLILIAVARKLVILANTLINQDRTWQPNPIKTA

SEQ ID NO: 53924 - protein, 358 aa, unidentified
MDMIVLGADTHKRSHTLAAVVEATGRVLADRTVAAKRRSFDELLVWARGLAGERVWAIEDCRHVSGALERFLLVHGERVVRVAPKLMAGARSSSRERGKSDAIDAVTIARAAIREGLDNMPIAQLAGRELDVRLLVDHRERLVRQRTRLINDLRWGLHDLWPELEIPRRVLITAAWQERIGGRLARAAQTTRVRIARDELRSIRELTRSISALERELSVLVSELAPQLVAERGCGALTAAKLVGEIAGIGRFANDAKLARLAGSAPIPASSGRSDRHRLDRGGNRQLNCALHRLAISKARLDPESAAYLARKQAEGKTRRDALRCLKRQLARRVWHLLQPPPERATEPVTIHCNAPHS

SEQ ID NO: 53925 - protein, 343 aa, unidentified
MKIMRVGVDLAKNVFHVHGVDRAEKPVWQRKLSREKWLGAVLEKVEPGCEVGMEACAGAHHWARELQSRGYTVKLMAPQFVKPYVKSNKNDMNDAQAVCEAMSRPSMRFVPVKSVVQQDIQAMHRVRAELVSQRTAKGNQIRGLVAEYGLVAPRQLTRLRGAIPKWLEDAENGLSTRLRRLLDGLRGDLVVLDHRIGELDAEIEAMANSDPVAKRLQQLRGVGPLTATALVATVGNGEQFTKGRHLAVSLGLTPKQHSTGGKERLLGISKRGDPYLRKLLVHGGRAALYAARDKDDPLSQWAKNIAARSHPNVAAVAWANKTARIAWAMIRHGCDYQPERGTN

SEQ ID NO: 53926 - protein, 383 aa, unidentified
MRKIQETLQAQSTTDQDIMYIAFELSNSTWRLAFSDGNKKRHVTIKARDLKQLEMEIKKAKKRFGLKDKTKIMSCYEAGRDGFWIHRYLLSKGIDNLVVDSSSIEVNRRKRRAKSDRLDAENLLRLLMRYHGNERQVWKVVTAPTVEDEDARHLHREIETLLRERTRYRNRIRALLVQHGLDVKNPSRKNFLKVLNTLRSWDGQALPESMKARVVREHERLKMIEDHIKLLKKEREQRVKSKETASLRQVAQLRGLCGIGVNSSWVFVMEFFGWRKFRNRREVAALAGLTPTPYDSGGSQREQGISKAGNKRIRTMAVEIAWCWLRFQPHSKLSRWFNERFASGGSRMRRIGIVALARKLLISLWRYLEHGVIPEGAIIKSAS

SEQ ID NO: 53927 - protein, 340 aa, unidentified
MTLVGCDLHSRKQQVAVLDTSTGEVLEQELAHDGDAVERFYRALPPPVTIGIETTGYTQWFHALMHRLGHTVLVGEAAKIRAMVVRKTKTDRRDARHLLDLLKHDRFPTVWIPDPGTRDLRALIAHRVRLVRMRTMVKNGLQAIALNQRLALRSALWTQRGLAQLKALVLLPHTTRRRDDSLELLAWLTTRIDQLDDHLAAIARVDRRAQLLLTHPGVGPLTALTTVLVLGPLARFADSKHVVSYVGLAPAVNASADTQRLGKITKQGNALLRWVLGQAAPLAARADDDLRRRYFSVTHRRGRPKAKVALARKLLVRLYLMLRDEIDSAQSPAVRGLHLP

SEQ ID NO: 53928 - protein, 348 aa, unidentified
MKLYSAFDVHSKNNFLGIIDEDGKRIFRRRLSNDPQRIRESLEPYKGQMVGIVVESTYNWYWIVDALMEEGYRVHLANPSAIQQYSGLKHADDEHDSFWLAELLRLGVLPEGYIYPKEERPIRDLLRKRGHLVKLRTSLIISLQNIISRNCGMKVNVSDVKVLKEDRVGPLLAGQEDLALARGVSKESIDFLTHQIRRIERVVEGRVELKEPYGYLLSLPGVGKVLGLTIMLETGPISRFSKVGHYVSYCRKVSSQWMSNGKLKGRGNKKNGNRYLAWAYSEAVEIARRYHPESRAYYQRKMQRTNFMVAHGALAHKLARAGYYIMRDQVPFQPEEKVISIFTAYPSF

SEQ ID NO: 53929 - protein, 351 aa, unidentified
MHYIALDAHKKYTLASVEPMQGGRARETRIAHEPGMLKGFLGHFEEGSPVAVETVGNWYWIVDEIEEAGMVPQLVHARKAKVMMGNVNKTDKLDAQGLNRLQRNGTLPTVWIPPAHLRDKRDLARTRMALVGQRTQLKNRIHATLAKYGLSVEVSDLFGKKGRELLGQAILELPPETEFSLGRTLEALDALEEQIKALEKRMEEVFEETDEARLLKTLPGVGFILSVVLSGEIGDVERFTSPERLASYSGTVPRVASSGGKTRYGSLRTESNQYLKWAFIEAANCVCLNRARHPERSLSRLYNRIRSRKGHGKAIGAVARNLAESAFWVLKKKEPYRDPIVGSPAVLPTKV

SEQ ID NO: 53930 - protein, 335 aa, unidentified
MKKSYFLGIDVAKASCDFALLKANGSCLWSGQFDNNPSSINRWLALLEARQLDLSKILFGFEATGVYSQTLLLVLQQFDLAACQLNPAQIKYFGVSLNRRTKNDRADARLIARFLLERQPVATRALSPTEHQLKVLAHEREALAIDLTRERNRSEKHELLPIKVHGVLLKQRKERLHKLKAWIKDLDAVIKELIDLDPVLCAQAKLLCSIPGIALCSAAKILSQLAGKEFQSAHQLALYAGLNPKENQSGRFKGKTTLSKIGNAFLRKALFMPASVATRCCRPIKLWVQQIKSRRPEFTKLAIRGAVMHKLIRIVFGVLRHQTPFDPTLASSDHT

SEQ ID NO: 53931 - protein, 340 aa, unidentified
MMLVGVDLHTRDQSVATLDTITGEVQQLRLRHDGNAVEDFYAALPAPVTVAIETTGYALWFHALMQRLGHRLLIGDAAKIRATVVRKTKTDRRDARHILTLLSEDRFPTIWVPDPGVRDLRALVAHRMRLVRVRTMVRNGVHAIALNYRLTLGASLFTRGGLARLGQLTLPAHTAHRREESLELLAWLDARIAALDARIAEVADADAEARRLMTHPGVGPLTALATLLVLGPVDRFPASKHVVSYVGLAPSIASSAGKHHLGGITKQGNRMLRFVLGQAGHTALRGDPDLKHLYYRVLHRRGKARAKVAVARALLVRLYIMRRDDIDYAEFRRRGQAKAA

SEQ ID NO: 53932 - protein, 402 aa, unidentified
MNCVGIDISKGKSMIAVMRPFGEVVVSPFEVLHTDSELSKLAKLLKSLDGETRVVMESTGNYHAPVAWLLHDAGLYVSVVNAMLVHDYGNNSLRRGKTDKKDAVKLANYGLDHWLTLPRYVPEEDTRLMLKSCYRQYQQYSKVRTMLKNNLISLLDTAFPDANRLFTSPPRADGSEKWVDFVAAFWHCECVCGLSEKAFTAKYQKWCKKHGYNFSEDKALDIYASACGHFGVMPKTDTAKLLVEQAISQLRATSAALAALKQEMQSLAASLPEYPVVMEMFGVGPALGPQLIAEIGDVRRFHSKKSLVAFAGIDAPPYQSGQMDIRSRSISKRGSASLRRTLFLVMGVLLQCAPMDEPVYQFMNKKRSEGKPYRVYMMASANKFLRIYYASVKAYLDSLEHN

SEQ ID NO: 53933 - protein, 371 aa, unidentified
MGKSSKSLFIGLDVRKDTIAVAYAAEDRGIEVVSLGMIGTRQYDIDKLIRKLEAKGATLLFAYEAGPCGYWLYRYLTRRGLSCAVVAPSLIPRKPGDRVKTDRRDAVTLARLLRSGDLSSIYVPTVDDEAIRDLSRAREDAVRDLKRHKVRLKAFLLRQDIRYEGRANWTAAHLRWLARVVCPTPAQQIVFQEYVHAVSEQTDRLGRLETELQTAVTTWRLYPVVAAVQALRGLNLTGAVTLIAEVGDLTRFDTPRKLMSYLGLTPSEYSSGEHRHQGGITKAGNGHARRALVEGAWAYRYPAKVSRHLQLRLENVPAEVRAIAWKAQLRLCKRYRLLSARGKHVNQVVVAIAREMAAFAWAIARTVPIAA

SEQ ID NO: 53934 - protein, 408 aa, unidentified
MNTLYVGIDISSKSNVVYMMLPNGDKHSNFSVASSHEGSIQLVKRIYSALTSHSLDTVLIGLEATSVYGDNLVYFLREDATLAPFNSRIHVINPKQVKRFHDAYNDLPKNDYVDSFVIADCLRFGRINKEVYSGDYRYQALRNLTRARFFTVQNLIKEKQRFMNVLFKKYSTMTQEKVFSNTFSATALAVYEEFDSAEALANMDLHELTDFIIEKGKNRFQNPDAVAKAIQKAARSSYRLPKTVNDSVNQVFSISITSMKALESQIKEFDKAIKAQTELLPNVLISIPGICPVYSAGIMAEIGDINRFDNQAALAKYAGLAWKQYQSGGFEAEVTRLIPSGNRFLKYYLCEAAFSLVRCDKEYSDFYHLKYKEVNRCQHKRALALTARKFVCLVFRLLKDNRLYCPAK

SEQ ID NO: 53935 - protein, 340 aa, unidentified
MTITTIGIDLAKNVFAVHGVDQNGKTVLVKSRVTRAALPGLIASLPPCVIGMEACSGAYYWARLFLQYGHEPRLMAAKFVSPYRMAGKSGKNDAADAQAICEAVRRPHMRFVPVKDESQQAMQCLHRNRQGFIEEKTATYNRLRGLISEFGVIAPQSTDALRHMVSAQKSSLPLQVQQCVDDLLEHVDRIEANITEYDRILSRIAKTDHRSQRLMKLKGVGPTTACALVACIGNAHDFKNGRQLAAWLGLTPSQYSSGGKSKLGRITKAGDSYLRTLLVQGARSVLIGAEKRTDLFSRWVCSLVERRGYWRAVVVIAAKNARLCWASLHYGDDFRLYSAS

SEQ ID NO: 53936 - protein, 414 aa, unidentified
MEVVYPRCAGLDVHKKTVVAAIIVADPNGALHKETQTFGTMTADLLMLSDWLAAQGVTHVAMESTGEYWKPVFNILEATFEVWLVNAQHIKAVPGRKTDVNDAEWIADLLRHGLLRASFIPPLGQRELRELTRHRSNFVRERANLINRVHKVLESANIKLASVATDVMGVSGRAMLAAIIEGQATPSEMAELSKGRMRDKRDQLAKALEGRVKPHHRFVLTELLCQIDGLDESLARFDQQIADYCAPFEAAVTLLDTIPGVARQTAEVIVSEIGTDMSRFPSAAHLAAWAGVAPGNNESAGKRRSGRTRKGNRPLCAALNQAANAASHTKATYLSAQYHRLAGRRGKKKAIVAVEHSILVIAYYLIKRQEPYRELGGNYFDNRRPEATAKHLVKRLEQLGYEVTIQQPSATVTA

SEQ ID NO: 53937 - protein, 345 aa, unidentified
MALYVGLDVSLKTTSICVVEANGTVTWEGKADSEPTPLVKALLRWREQITLVGLEACPLSEWLYGALVESGFKTVCIETRHAQRFLSSRPNKTDRSDARGIADMIRFGHYRPVHVKSKASQLMRTVLIARKKFVDHMLAIENTIRGLLKVYGLKLGNVHRSAFAAKVGNLLADDADLRMAIEPLLEARNMMRKQKALIDRRLGQLARKDEVCKRLMTVSGVGPIVSLLFKATIDDPRRFEDSKAVAAHLGLTPRVYQSGEIDRSGHISKCGDKLMRHALYEAASAHLRRCRKWSVLRAWGMKLAKKVGVKKACVAVARKLAIIMHRMWVEETDFRFGQPPATQAA

SEQ ID NO: 53938 - protein, 415 aa, unidentified
MTDERRWYAGVDWASESHHVLLTDGDGRKIGEKIFKHGGEGLAEMAAWLMAMSGVAEPRQIHIAIEVPHGPVVETLIERSFKVHAINPKQMDRFRDRFTLAGAKDDSRDAEVMASALRTDPRCFRLLAVADPVVIELREWSRIAEDLGAERNRLTNRLREQLWRYFPAMLDLESDLGAEWLLDLWETAPTPHKAIRIREATVAKVLKRNRVRRFDAAHVLDVLRKPPVQVAAGTTEAASAHITTLIARIRLVNQQLREAHRQLDALTARLIPSEETGLGQRKQHDVAILASLPGVGRIVLATLLAEAFDALQRRDYAALRSLTGVAPVTKRSGKSCIVVRRQACHDRLANAMYHWARVAVQHDPRSRSKYAALRSRGHSHGRALRSIADRLLNVACAMLKTGTTFNPSLATEKSP

SEQ ID NO: 53939 - protein, 307 aa, unidentified
MTAVGIDVGKRALDVAIFGEPKVHRFSNTVAGIRRLIRLLQDREDVRIVVEATGGYEEAVLAACAEAGLWIARVNPRQARHFARAIGQLAKTDNLDARMLAEMVQAFHARLRAHVPLAPWQTELRGWLRRRHQIIEAIQRTRQQLAMTLPAIRPLMKKTLIALQREQTLVDAAMKQLLQVHATPAMRSSKGLGPMFQASVLALLPELGQLRRQQIAKLVGVAPLNRDSGQSQGKRRIYGGRAEVRVALYMATLSAVRWEPAMKAHYQQLRARGKVAKVALVACMRKLLTIVNARRRDELRMEAAMVI

SEQ ID NO: 53940 - protein, 352 aa, unidentified
MKQFIGCDAHQKYAVFVTMDETGRAGVPVRVDSNKLVMQRYLQGLPAGTPVALETSGSWYWMVDQIEAAGLEPRLVDAKQAKQRMGGRKKTDAVDALGLALLLRNGTLPTVWIPSFDLRDLRGLLRTRLAMRQQGSFLKNRLTAAVRRYGLREDSVSDLFAGKGRLHLSRYIGWMPPQTQFACLQEWDLLDQLEAHIEALEKRIREKIGTIGWVRLLKTMPGIGEILGATLWLEIGDVTRFATAEYLASYAGLTPTVSSSGGKIYLGPTSKCSNHYLRWAYVEAANCIIAHKDKYAKHHVGKLYERIKARKCPAKAKVAVGRHLAEASWWILTKKQGYREPAPALVASSENG

SEQ ID NO: 53941 - protein, 349 aa, unidentified
MSKITRVGVDLAKRVLQVHAVDARGQRITSRALSRDKFLAWCAQLPPGCMLAMEASSSAHHWARRLRAMGLDARIIAAHLVAPYRIQGKTGKNDANDAAAICEAAGRPHMHFVPIKTAEQQSLLCVHRLREGFKAERTACINRIRGLLAEFGRVFPQKPQALRQALPDALEDASNELGGIARMALQRAQAQWAELDAHLAWCDERISAHIKADAQAALAQQLMGVGPVGASAAIATVGDFKQFRNGPQFGAWLGLTPRQHSSGGKNNLGGITRRGDMYLRTLLIQGAKSVVWTAHKRDDPVSRWVHGLREKCGWQKAAVALANKNARILWAVMTKGQAYDARHISVKPG

SEQ ID NO: 53942 - protein, 351 aa, unidentified
MNATTVAVDLAKNVFELALANAQWKVLERARLTRGQFERWFDNRKVDLVVMEACGSAHHWARRFKARGIEVRLLPAQYVRAYVKRNKTDAADCLALLEAGRAQDIQPVAVKSVEQQALQALHRTRSGWMSTRTRRINTLRGFCREFGLVVPEGAATGLAQIARYLADERSGLPGMLRPSMRLVLEEIRLMEARIGQLEQTLSALAKESPACQMLLSVPGIGLLTSTAMVAAVADPRSFPSGRRYSSFLGLTPREYSSGNTRHLGRISKRGDRYIRMLLTHGARSILRAATVARRAGRQIDRLKIWALAVQARTNHNKAACALANKLARIAWAVWVKHERYRAEPAPATPSL

SEQ ID NO: 53943 - protein, 351 aa, unidentified
MLYVGLDYHTRKSQVSILDEFGEVVLEGSVETSGELASLLKDLPDEARVLFEAGHGWPRLVRELEGVPVELEMCHPVENREIARDRRKSDRRDAQNLAGYLMTGIYKKVYMPSEDVRAQRQFVRSRASLSRCRTMAKNGIHGLLGYAGVPKRDGDIFAKRQRKYLEKLELPGEVREVLDIDLRLLDVQDELIGMLDKRIAEMNRHDPTARLLKTIPGVGDFTARVIIAQIGDIRRFPSDGSFACYCGLTPGQRQSSDKLRMKGITKEGSSMLRWCLVQSAWIAVRMDPSLREFFRNLASRKDSCTAICAVARKLAIAVWHIMTKKVPYRARKPQAEGKPVVAPGKTGRKSG

SEQ ID NO: 53944 - protein, 423 aa, unidentified
MKGSSPSIYDDFELLIGVDWADKKHDICEYDACSQQYKFSVIPHTPDAIQAWLLSLQERYPGKRFAIACELTKGPLINALQACEDVVIYPLNPSMVARYRKAFASSGSKSDPVDAKIQVEILQYHRDKLTPLKPQSDSIRQLNQLVLFRRKLVQDRVSLSNKITGILKQYFPQSLLWFKEKDTVIFCDFLMRWTTLEQAQAARKTTFLAFFSKHNSHYPDVNEARFTQLKAAKPLTRDEAIIKPNSLMISLLVPQLKQLLLAIRTLDEEIKELYIQHDDHIIFDSLPGAGPCYAPRLLAAFGEDRARYQSASDIQKYAGIAPVIEASGQKAWIHWRYHCPKFLRQSLVEWAGQTVRYSYWAKAFYEQQIGKGKSHNVAIRALTFKWIRIVWRCWQDRKVYDESTYLNALRVKGSQLLKYAVDN

SEQ ID NO: 53945 - protein, 468 aa, unidentified
MSPKKTPKKRHRDDLACVFPNAAGLDIGSAEIVVAVPPDRDAEPVRVFATFTPDLHTLVAWLLACGIDTVVMESTGVFWIPIYELLEQAGITPYLVNARHVKTVPGRKTDWNDAQWLQKVHALGLLQGSFRPDAEIRTLRTLVRYRAELIERRAPHINHMIQALKHLNIQLNLVLTDITGKSGLAILRAIVAGERDPQQLACFRESGCKHSEAEIAKALPGTWDDAQLFILEQALEIFDYYTAKIPGCDDKLEQQYQAMESRAEKDAALPDLPPAKKASRSKNALSFKARAQIARVIGVDLVAVMGLSAVTVQTIISEIGTDMQLFPTVKHFCSWLGLAAHNDKSGGKVLRSRTMKVRNRANQAFRQAAQSVAQSDSSFGAYYRAMRARLGPKQAIVATAHKIARTVYHLLKTREPYQEESAAEYDRKRRERELKHLARRAQKLGYTLTAAQATAPASPPEPGGEGRF

SEQ ID NO: 53946 - protein, 344 aa, unidentified
MNYHTALDVSLRSVSICIVDDDGAIQFEAKAPAEVEEIVACLKRFSPEITSVGFEAGALTQYLTYGLQAAGYEVICLEARQVNAALSAMRNKTDKIDARGIAQILRTGWYSRVHVKSMESHLIRALLSSRKTILQKCVDLENEIRGLIRLLGIRLPGTLYHGVYDATVRQAIEADGSMVDTLIPLLDARLVLYQTFLKLDNQVKSLVREDPICQRLMTVPGVGAITALTFKAAVDDPMRFKRSRTVAAHFGLTPRRFQSGELDNPGHISKAGDPDVRSALYMAAQSLMVRSEQWCSLKVWGIQLMKTKGHRRATVAVARKLAVILHQMWLNGTDFRYGSAETTT

SEQ ID NO: 53947 - protein, 417 aa, unidentified
MSEEIRWWCGLDWGSEKHHAYLLDAKGSRLGEREVVHGGAGLAELCAWLIEATGGAPGQIAVAIETTHGPVVETFLERSFAVYAINPKQLDRFRDRFTVAGAKDDSRDAQVLADSLRTDARAFRRLSVEDPVVIELREWSRLHDDLKAELNRLGNRLREQLWRYYPQALEVAGGDLIAAWFLALWHQAPTPAKAVKLRQTTLEDLLKTRHIRRLDAAEILRILGQKPITVAPGTTEAAMGHIRLLLPRIRLINDQLKAAHHRLDELCAKLEAPENEPGQDGEHRDATILRSLPGVGRIVLAAMLAEAPEPLRERDYHALRALCGQAPVTRRSGKSCIVLRRYACNKRLAEAIYHWARVAVQHDPTSHQRYAALRQRGHSHGRALRTVGDRLLYLACTLLKRGVLYDPDHKSPQAAAA

SEQ ID NO: 53948 - protein, 420 aa, unidentified
MRNIKAKTNRIVNEETLIATVDIGKVTHMGYYRCPNGRDVRPFEFFNNGRGFVKFWEGIVQTMSANNLKEVVIGFESTGPYAEPLIHHLRRKPVRLVQVNPMHTKKIKELQGNSPNKTDRKDPKIIADIIELGHALTLVIPEGPAAELRRLTQARERSVQGRSALFNTLQHLVFVLFPEFLQVMKDVKTRSARYLLSRYPTPKDLLKCDFESLACSVWNISRGKVNRQRLEALYTAARESVGIQQGQEGMAFEIKNILYMIDASDCFTDNVEEKMSSLLKEIPYSRAILSIKGIGEVTAAGLIGEVGDFRQFKTLSEITKLAGLDLFEISSGKHQGQRRISKRGRSLLRKLLFYAALNMVSRAGMMRQIYESYLKRGMLKMKALVAIARKLLRIIFALVRDQTEYVEGYTKTKTMFTEAA

SEQ ID NO: 53949 - protein, 330 aa, unidentified
MKQYDHVFGVDVSKRTVDITHACNQQFSHRQFSNDDTGMEQLLEWLQELTPAFDKTLFCMEATGLYCFPLTRFLAANAIDIWIEHAAQIKKATALVRGKNDKVDSQRIALYATKNLDRLRLWKPVNATLEKIKHLAKLRDRLVETKKKLVTPIKEFEDMGDIAMAKLLTKSIKSSISAIEKDLKNIESKIIDIINEDETLKLLYKLIISVVGIGFVTAINLLVHTKGFTIMKDVRKLACYCGVAPFEYSSGTSIRGKTKVHYMANKKLKCNLHMASLTAVKLDADLKAYYERKVAEGKNKMSVLNAVKNKLLARVIAVVNKQQEYVKKSA

SEQ ID NO: 53950 - protein, 346 aa, unidentified
MNLSQQGGAVMMLYCAIDLHSDNNVLVIINSNDNILFQRRLPNDLGVVLSVLEPYKHRLVGVAVESTFNWYWLVDGLSEAGYTTTLVNTAKVKQYEGLKHTEDKYDAFWLAHLMRLGILPKGYIYPRKERAVRDLLRKRGQLVNHRTIHVLSIQNQYWRNTAIKLKADYIKRRSDYLEDLEDENIQLALSSNYEVMRASHKQIGKIEKRVKQQMKLRPEYELLLGVDGIGYILALTIMLETGDISRFKKVGNYASYCRCVESKHTSNNKKKGKGNEKNGNKYLAWAFVEAANFATRYSEKARRFHQRKMAKTNNVVATKALAHKLARACYYIIRDQVPYDEDKLFG

SEQ ID NO: 53951 - protein, 410 aa, unidentified
MISFPKRARAQRAAACVGVDAGKFAHTLVVRPTGQPDSRPLSFPTTRAGFEQAVAFIRQQVPRASATAVLVGIEFAGNYGFTFAHYLRELGFPVVSVLPAHTKRWKDVAHNQPLKTDAKDAATITDLLAQGHFVGFPFLEPAYADLRYLATARERLAVLRRGAITQLRALLQVVFPEYETIFPLVSQRTAVLLLRAFPSPQQLLAAPRAKVLRVLRVGSRGHLGAETYERLVVAARSSLGLPGAQARLRQEIVLTLDRLALFEQQIRALEVELVAALEAVPETPYLLSIPKVAAVTAAVFLGSIGDPRAYDAGAQILRVAGLSLVERSSGVLHGTKRISKRGRPLLRAAAYLFAVRSITHGGLFRADYEALCARNGGQKLKAVVAVMRSGLQLMEPPPRRTRPTLEVTPA

SEQ ID NO: 53952 - protein, 344 aa, unidentified
MTDIAVIGLDLAKSVFQIHAVNLQGLPVLKRQLRRAELLKFFQKLPPCLIGMEACGSAHYWAREFKALGHTVRLMPPNYVKPYLKRGKTDARDAEAICEAVTRPTMQFVPVKSVEQQSVLMLHSSRDLLVKQKTMLINALRGHLSEIGLIAPKGVVGAKSLGGLVHENQDSWPNEIRTVAHAFLDQLRMIQTQIEKLDDRILQWHRNNENSMRLATVPGIGPIVASAIAASVPDPKLFRSGRHFSAWLGLTPRVHGSGGKDTLGRITKAGNGYIRRLLVVGVTALLRIDRKKTPSHLWGQMLREKKPGRVVSVALANKTARIAWALMSRAETYRGTSAVPYAVC

SEQ ID NO: 53953 - protein, 475 aa, unidentified
MANLGGRAQKGYEMPGADEIASSGKRREQLAGLPIIRRNVAGIDLGSEQHWVCAPTQDRSGREVASFGATTAELIRMAEWLKARQVESVAMESTGVYWIAPHEVLEGQGLQMLLVDTRQLARVPGRDKKSDPTDCEWIQRLHSCGLLRGSFRPEEAVCMLRTLVRDKASLVAERSDWVRRMQKSLDQMNVRVHRAVSDIDGVTGMAILRAIAGGERDAQKLAKLRNRGCSKTEQEIAEQLSGHWRADHVFSLQQALKMYDAVQERIAAYEQEILRKLGEMERNEPHEPTAAPLQNANKARTIKNRGQEAKRQALYRMSGVDMTQIDAIGVETVEVVVSEYGSDLSRFPTEKQFVSHATLAPHVPKSGGKPVRKKKRNSASTRVAAALRMAALSLRHSQTALGAYYRRIAQRRGGDIAVFATARKLASLVYRLLRWGQPYVDEGAAAYENRYRQHRIGRLAATAKELGYQLTPVTA

SEQ ID NO: 53954 - protein, 331 aa, unidentified
MNMAGIDVANETFDVQKRCGETLTYRTFSNSPSGHQKVMEWLKLGSEQVRVCLEATGIYHLQLALALFRTPGIELMVLNPRAARRFAEAQMVRGKTDKVDALVLLHYLERMRFVPWHAPSEQHLILQSLTHRLSQLTKEQVRERSRLHAAERAGPHTHEAQNDIQVHLRFLQRRHRQLEAKAIALMQQQPVMAQELELVDTVPGFAQSSAMHVLAEVGVLPDHLEPQQWVAQAGLDPKPTESGTSVHSPRHISKQGNAKLRAALFFPAMVACRCDPNVRAFYEKLLARGKTKRSAQTAVMRKLLHSIWGILKYRQPWDGDKFYRMPAPINA

SEQ ID NO: 53955 - protein, 316 aa, unidentified
MDSNPFVGIDVSKHDLDVCALPGGERWHSAQEPGEIDALVAEISRAKPTLVVLEATGGLEMPVAAALAAAGVPVAVVNPRQVRDFAKATGTLAKTDRIDAEILARFAQAIRPPVRPLPDAQTQELQALTARRRQLVEMITAESNRLHSSRSPAVQTGIRAHVDWLRDQVGDVDQDLDRAVKASPIWHVKDNLLQSVPGVGRVLARTLLTELPELGQLNRKQIAALVGVAPLNRDSGTLRGQRKVWGGRAQVRAVLYMNALVATRHNPVIRRYYQRLLAHGKPKKVALTACMRKLLVILNVIIRDGSPWRQIAAVEA

SEQ ID NO: 53956 - protein, 371 aa, unidentified
MNSIVYVGMDVHKEQYTLCCYSYDTDKVEYKQTIPSDYKLVLKYMEQIRSRYEGEVSFVCGYEAGCLGYSLYHQLKDHAVDCKILAPSTMAITNTHHVKTDKRDAANIARCLAFHTYSEVYVPDNDDNDVKEYIRMRDDQKLYLKKVKQQILAFVLRQGKRFEGGKTYWTIAHLKWLKTLELSDLQREALDEYLLTYEYLTEKISRFDERIEELASVERYEEKVKHMSCLLGIKTHTALSMIVEVGDFERFEKAPKFASFLGLVPSEDSSDTRANRYSITKAGNSHLRRLLVEAAQSYTRGNVGHKSVALKQRQKGNPPEVIAYADKANERLRRRFYKMTLNKGVNRNVAATAIARELACFIWGMMTEHVS

SEQ ID NO: 53957 - protein, 355 aa, unidentified
MCSRTVGDLDDLVVVGVDIGKDVFHLVGFDADGNLVLRRKIKRLALSATFEALPRCVVGMEACLSAHFVSRTLREKGFEPRIIPAIYVRPFIKGQKNDYNDAEAIAEAALRPNLRTVTEKTQDQLDLQALHRVRSRLVSRRTATINQIRAFLIEQGITVRKGLNALKASFLTILEERQDEISPRMRTILTGLYGDWLWLDERIETVTREIEDISRTEENCVHAMTIPGIGPLISTAMVAAIGRGEAFDRGRDFAAWIGLIPRQYSTGGRTVLGRISKRGSRYLRMLFVQAANVVLMRPHRWPDFSFGDWLARASTRMHRNKLAIALANKLARIAWSVLRHGMPFDHPRDEVMAGV

SEQ ID NO: 53958 - protein, 422 aa, unidentified
MDILYERVAGLDVHKDTVVACVRIAADGKTKRECRTFAATTEQLVELRAWLEDCRCTDVAMEATGVYWMPVFRILGEGDFELIVANAAHIKNVPGRKTDMNDAMWIADLLACGLIKASFVPNEEVQELRALTRTRKQLVREQTRHVQRIEKTLAEANIKLSSVISDIMGASGRRMIQAMIDGVRQPRQLAELAGKQIKATPKELYDALHGRLTDHHRFLLALHLKQWDGLDETIHKLDVEIAQRIEGMEARTAGKTPFRALIGLLTTIPGVSAVAAPAILSEIGPDMSRFPTAGHLVAWAGLCPGQNESAGKRKSSRLRKGAPWLKTMLVQCAWAAKRAKDSYYRAQFFRLQSKRGPQKAICAVAASLLTAIYHILKDGTEHHDLGLAYFDRRPTEVKAHHLVARLKKLGFTVQLQPIAEAA

SEQ ID NO: 53959 - protein, 351 aa, unidentified
MEKIIRQSVGIDVSLKTLDVTFGKMSESMDIYYLFQCSFKNTEAGFMKLLQFMNDKMDSSISVRFVMEATGVYHEKLAYFLHGKGHSLSIVLPNKINSYMRTLTIKTVNDKTCSEAIARFGLERKLDDWNPPKESYKKLRQLTRERDQLVSERAALKNQLHAEEREAYPLLKTINRLKQRIKFLNKQESEIKADIERVVCKSPDLDDEIKYMTSVPGVGRLTAVILLAETNGFELIRNKKQLASYAGLDVKERQSGTSIRGVSKISKRGNKHIRKAMYLPALTSVRSNKINRDIYTRIVQKHGIKKKAIIAIERRLLELCFILFRNKTFFNPAFEEKNSTQLKLCAIQANL

SEQ ID NO: 53960 - protein, 315 aa, unidentified
MWIIGCDFHPRYQQIAALNLDTDELVERRLSHEGKEAAAFYEALPRGALIGMEATCTAQWFERLLERCGHTLRVGDAAQIRASVVRKQKTDTRDALHVLDLLLTDRFPSVWIPTPAERDARQLLLHRHTLVRWRTAVQNQLHALARNQGLLPHTSFWTRTGRQQLESLALDPWAHRRRQDLLCQLDHLNSQIDELTQQVQQQARQRTDTAELMQQPGVGPIVSLAFVLTLGTAKRFPRGKQVASYLGLNPAEHSSGGKQRLGHISKQGNRMMRWLLVEAAYVAVRKDTELKRIYQRLAFRRGRKMLPWRWPESWP

SEQ ID NO: 53961 - protein, 353 aa, unidentified
MSHLPEEREVILGVDTHLDMHVAVLIDVVGRIVATTSVSTTALGYEQLIEWARGFGRLTRAGIEGTGTYGAALARRVHAHGVQVLEINRPDRSRRRLRGKSDPTDAEHAARAVLAGEANAIPKAQSGVVEAMRAVSMARRSAVKAKTQAINQLRALLVTAPESIRATLWKVKPEQCVARCARLQSLGDTPLLQALTNTLRLLARRWMSLAKELHQLDAALVELTKRAGRRLLARFGVGPQTAATLLVTAGDNPNRLRSEAALAALCGASPLEASSGKTTRHRLNRGGDRTANNALWTISMVRMRSDPRTRAYVARRTAEGLSTKEIQRCLKRYIVRELYPLILADLADSVCET

SEQ ID NO: 53962 - protein, 396 aa, unidentified
MKFNTQNAKIEAITEKTLVLGIDVGSETHYARAFDYRGIEYSKKPFKFSNTEAGFVTFKEWILDLKERHEKDKVVPGMEPTGHYWFNLGKFLQDNEMKPVLVNPHHVKKSKELDDNNPTKNDRKDPKVIAGLVREGRYMIPYLPDGVYADLRTVSNIRFQLQAELTRIQNRISRWFNIYFPEYKTVYGKPDAKSGILILKAAPLPEDILTLGINGVNQIWRDAKLRAVGKARAKTLIEAAKHSVGSKEGAVAARMEIRMLLEDYESRNIRLQEVMTLIEGLIKQIPMAEKLLEIKGVGIRTVSGFLAEVGDISRFNNPKELQKLAGLALVENSSGKHKGETTISRRGRKRLRYLLFEVAMSLVAKNPEFRELHNYYTTRRLNPLKKCSHLWRLQPS

SEQ ID NO: 53963 - protein, 420 aa, unidentified
MPSHPSDFAAVIGLDWADRKHDICLLETGQQTPEYSVLAHDPAIINAWAANLKKRFAGRPIAVCVELARGPIVSALLEYDFFVIFPINPAMLAKYRRAFSPSRAKDDPKDAFLALDLFRHHFDRLSPLRRERPAMRALQCLVRGRRTLVDDRCRLINRLTYALKEYFPQVVRWFRDKHTDVFIDFVTRWPTLDAAKRAHHDTLVEFFHAHNVRYGKTTERRVDAIKAARPLTSDPAVIEPNRLMAESLLAQIGALSKAISRFDAEIAARSAELPDFKIFAALPGAGAALAPRLLAAFGENRDRFPNAASVQKCTGIAPVVERSGNKSWTHWRFIAPAFLRQTFVEWVGETVPHSFWAKAFYESRRASGVPHQVILRALAFKWIRIIWRCWHDRQPYDEARHLLALQKRHSPIIALAAQST

SEQ ID NO: 53964 - protein, 455 aa, unidentified
MVKQKRQMKIKVKVNALEQINPNAAGIDIGAEEIYVAVPPDRDTESVRSFPTFTADLRRLVEWLKACRIETVAMEATGEYWIPLYELMEEEGFEVCLVNARHLKNVSGRKTDVLDCQWIQQLHTYGLLNPSFRPPEQIVAIRCLVRHREMLVQYRTAHIQHMQKALTLMNVRLTDVLSDITGVTGLKIIRSILGGEHNPLCLAALREPGCKKSAAEIAKSLEGHYKREHLFALKQALELYEYYDQKLMACDAELEAMYQEFDPPDNPGTPPPTPRTQKRRKNQAHFDLAPALFRLTGVDLTRIDGVDELTVQKVLAEIGTDMSKWPTVKHFTSWLHLCPNNKITGGKVFQTGVQPTKNRASAALRVAAASLKTSDSALGAYFRRMRARLGTPAAITATAHKLARIIYFMLKYRKPFHDLGANYYEQQFRARVLRNLTRRAAVLGFRLEPAAQSVS

SEQ ID NO: 53965 - protein, 446 aa, unidentified
MEVVFPYCAGLDVHKKRVTACRLVSDSTGQVPEGVAELQTFGTMTHELLALADWLVEAGVTHVAMESTGEYWKPVYNLLEGIVTIFLVNASHVKNVPGRKTDPADARWLAKLMRYGLLQASFIPPIAQRDLRDLTRYRTKLVQERAREVNRVQGVLERANIKLASVASDVLGVSGRAMLEALMAGQADPATMAALAKRRMRSKIPALEQALTGTVRDHHRRLLAMQLRHIDFLDEQIAALNSAIAQCVTALSQEAAESPAPLSPMTIDVPTPADPPPSLTFTRAVELLDTIPGVNQRGAEMIVAEIGIDMARFGTAPRLAAWSGVAPGNNESAGKQRSGKTRKGNQVLRAGLTQLAHGAVRTKGTYLSALYRRLAARRGKRRAILAVAHSIMGSVFHMLSRNEPYRELGATYFDERRRHYTVDRLTARIEHLGYRVHLEPLPTAAA

SEQ ID NO: 53966 - protein, 330 aa, unidentified
MNRTTYGLDIAKNVMQLHWVDGETGEIGRKKLGRAKLSEFFAQRQPARVAMEACGSAHHWARELGGLGHQVELLPARQVRAFVRSNKDDAADARAIWLAAQHSDIRRAPVKTVEQQGVMSLHRARSHWMSVRTATVNMLRGLLYEFGVVLPGGKKAALKAIAAKRAEIDDKLAPLMRGLLDQELEALKGVELSIDQLEAEIAGQQRQLDKARTLREVPGIGVLGATALAATLGDASGWRSGREFAASLGLVPAHSGTGGKTRIGHLTKRGDPYLRTLLIHGARAVITHAKVKPASLEELLRRRPLNVVIEVVDVPSTHDLTATVRVRRRA

SEQ ID NO: 53967 - protein, 490 aa, unidentified
MSKRRKLSTFERLNSGKMNRAQRKELARRVCADDPGLEVVHRNVAGIDVGNESHYVAVAPGCDPQPVREFGCWTADLKRMAEWLKSCGVKTAVMQSTGVYWIAVFDVLERAGLNVWLSNARDTKNLPGRKSDVQESQWLMKLHTYGLLRNSFRPPEQIRAVRTVWRLRGRHVQDASREIQHMQKAMTTMNLQLANVISDVSGETGQAIIRAILKGQRNPRELAKLRDYRIKASEEEIACSLEGHWQEEVLFELQQSVDRYDFCQRQIAECDQRLQKCLAALPSRTIVPQRESKTGPAVNCPEGQDATEKSTKKKRSKPRDNEPKFDLESELTRICGVDLTTIDGVKLMTIQTFVAELGTDMSRWPTEDNLVSWLKLSPNRPVTGGRVMRQRPLKTKNRVSTVLRTAATTLADSDSYLGARYRQFRAHLGPGKAAKAMAAHLARLIYQMLTHGQAWVDRGAQEHEKRRTHRETQFLLRKAAALGYRLEPAA

SEQ ID NO: 53968 - protein, 394 aa, unidentified
MKLIGIDIGKNKHFFCVMDQQTGEIISQPVSFSNDKEGFDFLVQKIKSYPKDSILIGMEDTGHYHFALLKYLLDLQYTVALINPKTTDFNRKMQGGITKNDKLDTINICDVLDTPERKKQYRITKVNNFDLYEQKQLTRHHHNLKEEENVYKNRLQKCIDIVFPEFNKLFNSKYGIVYMNILKMFGSAENIANTDIRTIRKCFEIEGRGNRISLTPERLKECARSSIGISSSAEVIQIKHLTAQIELIEEQLTEIDKKIEEFSIQNNSPILSIPGISHFSGTSILAELGDISNYSKPSQIIKFAGVAPLHYESSQFNAQHTAITKKGSKYLRKTLYQIILPVIRHNPVFNKYYQLKISQGKGHRCAQGHCVRKLLRIIYHLLKTNQQFDPQLLR

SEQ ID NO: 53969 - protein, 365 aa, unidentified
MTMYLGLDVHASATVYVAQDQEGKVLGSGKVSTSREGLKEMLEKVGAPAGSKLALESGSQSFWVSGLLSELGMESYVIEASEVRQKARRPRQKSDRRDAFEICDGFRRGIFVKMVYVPVREAQRLRLVLSRRRHFVRICTSQINAAKSLLRSIGLAELAGSLVTVKAWEGLLAKPELGELQQMVSLHYQVWRSARSQAEELKGELDKVLTPFAAISRRLQTVPGVGEITAATFIAVIARPDRFPGSGEVSSYLGLVPSGWDSGESEKHGPITKTGNSELRSLLVECAHHASSPNHPLHPYFARVCAKGGFKKAVVCVAQRLARILWRMWLNQEDFQVEKLNVIKGRRKVSRTYYWRIKEPARAEA

SEQ ID NO: 53970 - protein, 352 aa, unidentified
MLIIGCDFHPGFQQVAIFDNRTGEMGEKRLQHRAEAEEFYGSLAGQEVRVGMEACGQYPWFERLLQELGIELWFGDAARVRASVVRKQKTDRRDAEQLLQLLMENRFPKIWVPSLEVRDVRQLLVHRHKQVQARTRTKNQLQAMALSCGMQKKWKLWTKAGRMELEQLALLPYAAERRKRLLEALDGLEAEVGELDRRVAEEAGRRPEAVRLMTHPGVGPVTALAMVLTLGPAERFASGKQVGSYFGLIPSEDSSGGKQRLGKISKQGSSFLRFLLVEAGQTAARLDPQLKRFYRRLAVRKNRSLAKVAVARKLATRLYLMLRENWTYAQLCQAVMQVSPSHSVAGESEPSA

SEQ ID NO: 53971 - protein, 357 aa, unidentified
MTNDKYVGLDVHQASTSIVVLDCNGKLICESVIRTRADAIRDFISGLSGTIHVTFEEGTQAAWLHEVIRRLIAELIVCDPRQNKVLAAGNKGDRIDAKKLAELLRAGLLRPVYHSNHDTKLLKQLTHNYDSLVSDTTRVMSRIKAVFRGQGIPCSGRDVYYKRNREQWITRLAEPGLRTRAEFLFAELEPLKALRRGAKKVMLKEVRRHKAFKILSEVPTLGPIRIAQIIAAVGAPHRFRTRRQFWAYCGFAVVTRSTDDYRFDENGPLRRSRPPATRGLNRNFNRRLKHVFKSAALQGASKEPFKSYYQARIAAGMRPEMARLTLARKIANITLTLWKNGGQFDGHKLSEPHDRTT

SEQ ID NO: 53972 - protein, 340 aa, unidentified
MDNYIGIDIHSKTSTYVVMNYDGEITHEGKIPTSEKTLKDLMRSISGSKSLTFEETTVSQWAYCLLKNEVEQLIVCNPSYLPKKSGAKTDYRDALHLVMQLRAGNLTSVYHDENVLMDLRSLVKYYSDVSERLSNLKKSFKALLRSEALECSTAYMTSREKNKYLEIKNSTKQFVAKRIFEEACELEKKKANLKYELESNKLNLPFVDNLLSIPGIGVVRAHVIAAFISTGDRFENKHKLWAYAMLVKHRDVSDGALVRVRSAKGRNELKNAFMGAALQIIISKQESALKDYYKYLIETKFLDARKARKNLARKVAAICLMVMKKGTKYDDALVHVSIKK

SEQ ID NO: 53973 - protein, 352 aa, unidentified
MDYFAGLDVSLEMTSICIVDADGVVMKEAKIASEPDDLVAFFARCGMAMKRIGLEAGAPSQWLYGGMAEAGLPVVCIETRHAKAALSAMPNKTDRNDARGIANIMRTGWFRAVHVKTQTAQELRFLLVARQTLVRKLMDIELAIRGMLRSFGLKMGVVSKRNFEARVLELAGDRAMLMRALNPMLTARRALAVEYTKLQKVAMDFARDDEVCRRLMTVPGVGPIVALTYRATIDVPSRFRRSKSVGAHLGLTPRAYQSGEVDWTGRVSKSGDAMARAALYEAAHILLVRVKRWSSLKAWGMRLVKNRGHKRAVTALARRMAVLMHRIWVEGTVFIWKTGDGQALGPKPVPAV

SEQ ID NO: 53974 - protein, 342 aa, unidentified
MKHTTIAVDLAKSVFEIAVSDQPGRVRERRRLTRARFLSVFIDRRPALVLMEACGSAHYWGRRIQALGHEVLLLPPHASRPYVTGNKTDRADAKGLLEAHRNESIHPVPIKSVAQQALSALHRLRSRWQATRTARINTVRGLLREFGVTIPLGAQHLVARVRREIRSEVSQVPAALYPVLEDACREIRELEQRVTTVERQLKQLARQTPVVKQLLEIPGVGLLTATALIAFVGDVQRFRTGRHFASYLGLTPREYSSGKKRRLGRISKRGDVYLRMLLTHGARSVLWAARRREEPDRLRVWALKVERLRGHNKATIALANKLARIVWAVWKRGSVYREVPAA

SEQ ID NO: 53975 - protein, 402 aa, unidentified
MTRGQAWAGVDVGKEHHWVAVVDDKGAVVLSRKLVNDEQAIREKVAEIDQLADEVSWTVDLTTVYAALLLTVLADAKKPVRYLAGRAVWQASAVYPGGESKTDAKDARVIADQSRMRGTDLPVLAPDDDLVTELRMLTAHRADLVADRTRTINRLRQQLVGVCPALERAAALTSDRGWIVLLARYQRPKAIRNSGVSRLTKILTNAGVRNAASIADAAVTAAKAQTVRLPGEDVAAGLVAELAQGVIALDDRIKATDADIEGRFRRHRLAEVITSMPGFGFRLGAEFLAAVGDPTLIGSADQLAAWAGLAPVPRDSGKRTGRLHTPQRYSRRLRRVMYMSALTATRCDPQSRAYYQSKRDQGKKPIQATICLARRRTNVLYALIRDNRTWQPDSPPITESAA

SEQ ID NO: 53976 - protein, 309 aa, unidentified
MKQSVVYIGIDVAKAYLDVAWAGVSRRFPNETNGHAALKRWLKQSAAPVQLICEASGGYEQALLESLARSEVKVTLVQAVRVRQYARAAGILAKTDQIDAKVLAAFGTAMQPKPTPPLSAEQKRLREYEAQRRHLSKVLLAEQNRLAGLSCAELRSLSRSLISKIKKQIETIDAEIADLIAQDQVLCAKAQKLTAISGVGARTAALLLAQMPELGQLNRGEAAALAGLAPFNHDSGSIRGKRAIFGGRRALRSGLYMAALSAARFNPILSSFYQRLRAKGKPHKLALTAVMQKLLLALNSTLKPIACSA

SEQ ID NO: 53977 - protein, 344 aa, unidentified
MEYIGIDLHKNSSSLCILTEEGELIEKRIKTERSAFFAWFGQRARARILIESSTESEWVARLLEEFGHEVIVADPNFAPMYATRSKKVKTDKRDARTLCEACRLGAYRPAHRTSDEQRETRAKLAVRETLVRTRAKYISLISAFARREGCRIKSGRSHNFIARLQDAQLPDHLMTLIQPLVTMIETLNEHIKEADEQLAELVKQNQVVKRLCSVPGVGPVIATTFAATIDNAARFQQARQVRAYLGLVPSEYSSGERQQRGRISKAGNNRARSLLVEAAWSLLRWKTEQNKALREWAERIAQRRGKAKAVVALARKIAGILFAIWRDGTEFDPALVAGKLKAQT

SEQ ID NO: 53978 - protein, 435 aa, unidentified
MKIIYNNAAGIDIGSTNIYIGMESSEVRVFGTFTGDFKRAGAYLVENKVTSVAMEATGSYWVVLYDILIEYGLDVWLVDGRQTRQVPGRKTDVKDCQWIQELHSYGLLNRCFVAEGDLKEVRGYQRLREDHIRSAAMHINHMQKAMIEMNIRLPEVLNQVQGASGLAIICAILGGERNPQTLLSLCHGSIIKKKSAQLLASLEGFYTDRGLFALRQAYEAYMFYQKQIAECDTALNQVLDRINKDKGDREVGARKPIRHNKPQINDLGKHMLDLFEGRDATTLPGITDYAWLRIYSETGTDLERWPSEKHFTSWLGLSPGQNDSGKKKKNAKKKGRPSAGQIFRIMAQGLLESKKIAFGAFGRRLKGRRGPRIAIKAVARKIAAQYWRLMVKGKDFVDQGVANYEKVLLEQKAKYLKKLALELNVEITEPKISNS

SEQ ID NO: 53979 - protein, 308 aa, unidentified
MNQPKHTYIAIDIAKADLEVLAAGKRVKAANTPAGFRQILGIARDLEAPLVVFEASGGYERALMEHLSGQNVPVAMISPARLRAFAGSEGVKAKTDPIDARMILRFAQEKKLAPMRIIEGKRRELADLMDRRSHLSEQLTREKTRLQKAPELLHASIRRMIHHVEKEISLIEKQIEELIAADEAMSEEAECIQSIKGMGKVNAWTLMGYLGEIHHLKRNQLVALAGLAPFNRDTGKSSKNRFISGGRAKVRKTLYMAATCAAVHNPVIKAYVQKLRQRGKPYKCAIVAAMRKLLLHVQSLLKNQPLPA

SEQ ID NO: 53980 - protein, 407 aa, unidentified
MIFVGVDWAEAHHDVHVADEEGRRLSKARLPEGVEGIARFHELVGAHVEEAQEVVIGIETDRGLFVSALVATGYQVYAVNPMSTSRYRDRHSTSGAKSDAGDAEVLCDMVRTDRHHHRLVAADSAEVEALKVLARAHQSMVWSKGRQSNMLRSTLREFYPAALLAFDDMSSADALEVLRIAPTPTLGASLSRSKIGAALRRGGRQRRVEERAVEIQAALRSEQLAAPPAIEAAMGISVAASVAVLAEMVAQIGHLAEELSSNFEAHPDAEVVRSLPGLGTILGARVLGEFGDEPNRYANAKSRKNYAGTSPITRASGTKKTVLARHVRNRRLADAIYLWAFASLGASPGARAYYDARREAGDGHHQALRALGNRLVGILHGCLTHHLAYDESIAWGYRPDNELAKAA

SEQ ID NO: 53981 - protein, 381 aa, unidentified
MCEFIEKWDEQVFRIGETVAMKKPSKHLIAEVPRSVAKVGMTIGIDLGDVWSHYCTLNEDGEVVDRGRFRTTLSGVGKWFTDVPRARVAMETGTHSIWVSEQLRELGHEVIVANVRELRAISHSNRKSDTVDAEKIARFARVDPEILRPICHRTVAQQEALTLIRARNLIVRLRTAAVNSVRGLAKPCGYRLPASSTLCFAKRCMSVLPPGLAQALGPVLEQIAAMTVKIQQYDRTIKRLTETEYPETQALLQVYGVGQLTALTYVLTLGSKERFKRSRDVGCYLGLRPRRSQSGDRDPQLGITKAGNIYLRSLLVECANHVLGPHGRDSTLRQWGLHLASRGGKQSHNRAIVAVARKLAVLLHRIWITQEPYIPFYAVAG

SEQ ID NO: 53982 - protein, 427 aa, unidentified
MYVCGPPEPDGTCPVRTFATTTREIQACAAWLKQREVQSVAMESTGVYWIPVLEILEGAGLETLLVDTRPLSRVPGRKTDVEDCQWIQTLHSHGLLQSSYRPTEEISQLRTIVRQKAALVREQADWVRRMHKCLDQMNVRVHHAVSDTQGVTGMRIIRAIASGERDASKLAQLRDPGCRHSEAQIAEFLTGHWRSDHLFNLEQSLLMYDGIGDRIASYEKEIQQRMDRLTPVPRKNDVAPPPLNRNKRKAMKRRDQEEKRQKLYRMVGADLTTIDSVGVETAEVIISEYGVDLSKFSTEREFVSHLKLAPYRPVSGGAVLKKKRKPSKGTRSAEALRNAAATLKRSRSALGAYFRRIARHKDSSVAVFASARKIATLIYRMLRWGQKYVDIGQEAYEKHRQDLKLRALTSTVAQLGYQLVKTEAATS

SEQ ID NO: 53983 - protein, 399 aa, unidentified
MFAVGIDISKSKSVAAILNQDGSMHTSPFEFHHTQPELDAFIKYILNSKQSATILMENTGHYHYPVLKAFQEAGLPVCMVNAYQIKKFGDMDLRKAKTDKKDAVRIARYALEKSYSLVPYTSMEQKYEDLRFLARQYNQRMLTLKTNKVFLLNLLDETMPGITNILPLTTRTPETSLSVLFINRFKSYDRIKKMGKSRFLDAFEKIARKSRNRQTKTYGLAIYEAALRNITTRGENEYTLAAQDQCLELVCESQKAADSIILKMKTLAETLPEYAVLRSMAGVGDRLGPLILAEIGDIRRFHSGKALNAYAGNDAPPYQSGTFESHNRHISKRGNAALRKYCFEVMQALKLTRPQDDPVYLFLLKKEQEGKPYNVAKMAGVNKFLRIYYARAMETLKQQ

SEQ ID NO: 53984 - protein, 432 aa, unidentified
MLGVGIDWAEQFHLVALGNPDDGVSEVVRIEHTAPAVAALIARLARVEPDPTEVRVVIETSHGMLVEALVDAGYTVLPVNPDLIARRRGPARKKDDTEDARIACLLALDRFTTLRPLIPHGPVAAELRAIARDDERACRDERRLLNRLRADLIATFPAALAIAGDDLGAPTFLRLLQSWPTAAELRAATREEITTLARAGRHGWPDRFADRIEQALNSTDVFTARDYLVRAKADTIRLCAVQLLAIGAQRRSWEKRMGELLLGAPRGGRARQPRPAPEDGGSPRPHSFPGGEIYLSFAGLGDRLAARVAGEIGDHIDYFTSPNALQCYAGKAPVTRRSGNSEFVVAHRLACNRHLRDAVQTWAFCSLSSSGWAREFYDSHRARGHTHHATLRALGNRWLEVLWHCLTRGALYDEALHTANRNRALAPKPAAA

SEQ ID NO: 53985 - protein, 399 aa, unidentified
MKENLPLELRVGVDVGCHSHNVAIGLSTGEILEEFSIIHHQEGFRQFFSRIEKNEKIYGCPVAVAMEGYNGYARPLDSQVRAHNYRLFNINNLKLARFKEIFPGAAKTDDIDARKALELFQLRDHLPIAKDVLQEVRATPQENEILKRLSRRRRRLVNERVRVLNSLQADLQSVCPGMLEITGDAGNLWFLRFLTSAKDLRKLARMRKATICKIPGIGQKYSDSICNWQKSATFSSETEWVGDMVQQDAERVLSLHGQIATLETRIAGIAANSNIAQTLKTIPGFGPTTTAELAGEIGTIERFETDSSLALYIGMSNLDNSSGKHKGSKAPKQVNERAKAAMMIAVDRHRKYVPQSQKYYDKKRTEGKKHNQAVRALGRHLCRVIFKMLKENRGYFLSQ

SEQ ID NO: 53986 - protein, 425 aa, unidentified
MEVRFPRCAGIDVHKRTVVACRIVLTDDGEWLRETRTYGTTSADLLRLSDWLAAGECTHVGLESTGEFWKPVFNILEGSFEVWLLNAQRVRAIPGRKTDVRDAEWIAELLRHGLVQPSFIPPREQRELRELTRQRTNFVRGRATLVNRVQKVLESTNLKITSVISNIAGTSGRAILAALLGGEADVAVLAELAKGKLRKKRAQLRQALGGRLEPHHRFLLTELLAQIDGLDETIARFDAEIGRRCAADEREAVVELLDTIPGIGRAMAELLVAEIGLDMTRFPTPAHLAAWAGVAPGSNESAGRQRSGRTRKGNTWLKTALVQAAHGAARTKGTALAAKYRRVAARRGAHRAIMAVAHRLLLIAYHVIARHEPYRELGPDYLERRRSSGTVDRLVRQLRDLGVEVTVTAEVDPPSQTDARLAAMS

SEQ ID NO: 53987 - protein, 343 aa, unidentified
MNAYVGLDISLKRTSICVVDEDGGIRLEGTVASDPDAIANFVQARAPATRRVGMESGPTSVWLWRELTERGLPVICIDARHARAALSMQINKSDRNDAAGIARIMQTGWYREVQAKSPDSHATRALLNSRALLVKIQRDLENQVRGLLKMSGLIVGRAKDGVFAQRTQALLASHPVLAEVALPLLVARESVHKQLMTIECRVRRLAHANMQARAFMTVPGIGPVTALAFLAAIDDPNRFRRSRAVGAYLGLTPRRYASGEVDWSGRISKCGDTMVRTYLFEAAGVLLTRVQKWCALKAWGLRLAKRAGMKKARTALARKLAVVLHRMWRDGTQFRWTAQPAAS

SEQ ID NO: 53988 - protein, 341 aa, unidentified
MQIAVLGIDLGKNSCSLVGLDQNGAVVKRRRMRPGSIAEFTRSLPACIVAMEACCGAHHLGRQLTAQGHTVRLMSPEYVRPYVKAQKNDDRDAEAIAEAATRPTMRFVTLKSEAQLDLQILHRARERLVGERTALINQLRAILLERGITVPQGRRKLEQYLAALPEPEDDTAVSPRIRQLIEDMRTEWQALDQRIAALDAEFTTRAREDADARRLTTIPGIGVLNATALTAAIGTGETFARGRDFAAWVGLVPRQVTTGGKPRLLGISKRGNKYLRKLLIHAARAALPALASSAAPLGQWLRALVQRVHKNVAVVALANKLARIAWAVLRRGVAFNAAVAA

SEQ ID NO: 53989 - protein, 405 aa, unidentified
MPYILALDVSMGHSYSVLYKDDTCLFEDEIEHTQRGFHALLEEIQHLPERPLIVFEATGIYSRPVEKFFQDHHFSYCLLNPLEAKKQMEESTLRSWKTDKSDAHRLAQTHLKNQRQPKEVQSNFYLEMRDLARFYQEIEKKITRLRMDLHNCLQLTFPELEQFFSNRLTPYALTLIRLFPHPDFVLASTRTKIKNKLINETRKKISANRAEQKADQIIHYAQCAYPAVEKDSIHCQKTIYYAELLQDLLEQKEALATQMIKKAEGSPCFLLYKTFPGIGALTAALLLGELGDITRFKTHKQLNAFVGIDIRRYQSGKYTGQDRINKRGNPKARKIIFFTIRNMIRQQRAAPNHIVDYYYKLKKQPIPKKDKVATVACMNKLLKCMHAMVRAHTEYDYAYAVSVDH

SEQ ID NO: 53990 - protein, 343 aa, unidentified
MKLHVLGIDLGKTVFHLVGLDSTGNVVIRKRCSRGQLLNFTANLEVQLIGMESCSGSHFLGRALREQGHQVRLMPAQYVKPYVQTNKSDYLDAGAIAEAVQRPRMRFVPIKTEEQLDLQALHRVRERWVMRRTAVVNQIRGLLLERGLTLPKGRSHVEEFLPRILEEAELNLSGSFRVLLAQLGVELGQLSERIAEMDGAIERRAREDEACQRLTTIPGVGPVTATALVAAIGNGAAFRKGRDLAAWVGMVPRECSTGGKQKLLGISKRGNAYLRRLFVQGARSVLQYHQKQAPALASWLRQLLARKHQNVVVVALANKLVRTAWAVLCTNQPYRATIPATLS

SEQ ID NO: 53991 - protein, 325 aa, unidentified
MQSQTNYTGVDISKLFFDVAVVTASGYRYYKFSNDLPGFIGLLKVLPADSRVIMEASGPYYLRLACYLHSKGIGISVVNPLVIRRFCQMRMSRTKTDKKDARMIAEYGKTETPCLWQPPQQHVITLQQIEAFLSNLNKEHTALSNQLGSFEISGMLDKGLKKAIEKELKHKQGLIETLTMQMQKITEIYYSEMLADLESIPGMGKKTAMMLIVLSGGFNRFDDYRKLSSYIGLCPRIFESGTSVKGRARICKMGMSQIRAMLYLCSWSAKRCNKACRELYERLIAKGKAKKVALIAVANKLLKQAFVIATKQTKYNENYSNIICF

SEQ ID NO: 53992 - protein, 450 aa, unidentified
MAKQRKRKHGKVDRSLPVMRPNAGGVDLGATEAVVAVPADRDVESVRSFPTFTQDLHALVDWLQQCRVDTVAMESTGVYWIPLFQILEARGIEVHLVNAQHVHHVPGRKSDVLDCQWLQYLHSVGLLKASFRPEHAVCEIRSLMRHRENLVQMACVHVQHMQKSLDQMNLQIHHVISDITGVTGLAIVDAIVAGNTNPKELAKLRDYRIKASMETITKSLVGDYRPEHIFTLKQSLTAYRYYQQLIADCDQEVQRRIRDFDSQDADPTATSDAAGSPDTRPAGFDLHSHLERIFGVDLTRIPGFDTLRIQTIFSELGADLSKFATDDSFCSWLNLCPKDGTSAGRRIRGPKIKTRNRVTLAFRLAALSLHNNKSFLGDYYRAQRARHGALKATKNAAHKLARIVYHLITTRQQYDETVFAKLETRNQQRRLRKLQSLARQYGYTLVEAHP

SEQ ID NO: 53993 - protein, 343 aa, unidentified
MGIDIGKNSFHVVGLDQRGAIVLRQKWSRGQIETRIANMPPCLIGMEACVGAHHLSRKLRAHGHDARLMPAKYVRAYSKGQKNDFRDAEAIAEAVQRPTMKFVATKTADQLDLQALHRVRERLVRQRTGIINQIRAFLLERGIAVRQGLRFLRTELPSILAKRSDVLSPRVMRIIEDLAGDWRRLDERIEGLSADITSLVEKDAACERLMTVPGIGPIISSAMVAAIGNGEVFSKGRDFAAWLGLVPRQISTGDRTILGKISKRGNRYLRVLFVQAAWVVLIWPQSWERHELKSWIEAAKKRLHNNVLAIALANKLARIAWAVLNKGRNFECAKTNAMAPQPA

SEQ ID NO: 53994 - protein, 474 aa, unidentified
MSKSKPQPTSGGGSEPGIAKSKRGSQKKATEPAVFQPNAAGIDIGAREIYVAIPADRDEHPVRKCGTFTSDLDQMAEWLVSCGITTVAMESTGVYWIPVYEAVERHGIEACLVNPRNMKNVPGKRTDFHECQWIQHLHSLGLLHAAFRPESEVRAVRALMRHRNDLVQMASQHIQHMQKALTQMNVQFQHVISDLTGLTGLAILDAILAGERDPAVLAKLRDPRIKATEETIRKSLEGNWRAEHLLVLKQRLSLYRSYRDQIHACDQEIEKLVAAFTPQADPAIQPLPEDRKKRQRQRKKNGGSPDFDMRTEAYKLFGVDLTQIPGLMTLVFMLFSEVGRDMSRWPTAAHFVSWLGLCPDNDISGGKVLWRGARRTKNRAGALFRNAASSLYREQGPIGDYLRRMKAKLGKNAGTTATAHKIAVIFYTMVKTQVEYDASLWAKRDVMREKRLEARLHKQAAQRGYKLVPVESAA

SEQ ID NO: 53995 - protein, 343 aa, unidentified
MAQQTIIGIDLAKHVFHVCMVTPTGTLKTNTAVARGKLLALIARQPPALIFMEACGGAHDWARRFCAMGHEVRLLAPQYVTPFRRGQKNDPNDALALTEAGQRPNIPTVPIKTIEQQDLQALHRVRERLVKHRTAVVNQARGLLLEYGIVIPQGIARLRKRLPRVLEEADNGLSFLMRDLLQSMQSELSALDTRITDVTCQLTRLSHELEACQRLQAMEGIGPLSATALVAALGNGHDFQTGRQVAAWLGLVPRQHSSGGTMRLGGITKGGNSYVRRLLIHGARSVISHVRDKPDAKSAWIRQLVTRIGVNKACVAVANKMARVAWALLHTGEQYRKPVALPL

SEQ ID NO: 53996 - protein, 351 aa, unidentified
MLIVGCDYHPSVQQIAWIDTESGECGESRLLHSNGEAERFYRTLKEQGANVRVGIEATGHARWFERLLAELEYELWVGDPAQIKAKRVRKQKNDRQDAQLLLKLMMEDRFPRVWVPSVENRDLRQLLWHRHRLVQMRTRVMNQLQAVALNEGVRRKKALWSQAGRSQLESFRLGPWATRRRQDLLQLLDQLNSSIAPLTAAVEQQAAQHADAQRLMTHPGVGALTALAYVLIIGSPQRFRCGKQIGSYLGLIPCEDSSASRQRLGHISKQGNVLLRFLLVEAAQATVRVNTDWRREFLHLAMRRERRIAKVAMARKLAVRLYWMWRKGWDYEQSLQFGSHAGQPVVGYGVK

SEQ ID NO: 53997 - protein, 340 aa, unidentified
MKITTVGLDLAKSVFQVHAISNTGDVVVRRSLRRAQVIPFFTKLPPCLIGMEPSHHWARELVALGHEVRLMPPAYVKPYVKRGKSDAGDAEAICEAVTRPTMRFVPIKSVEQQAALALHRTRDLLVRQRTQVVNMIRGLLAEFGIDIPKGITHALAFVRRAVAGDAHEVPDLATKVIGALAEQAIEVQGRIRQLERDLLAWYRSNDLARRIATVPGVGLLGATALAATVTDPTHFRSGRQFAAWLGLTPLNNSSGGKERLGRISKMGDQYLRRLLVAGMTSLVRRNKHHPSAADPRMNALLARKPVRLVTVAMANRAARAIWAIMVRGEVYRAPVVGSAA

SEQ ID NO: 53998 - protein, 360 aa, unidentified
MVVAPALIYFSLGRVLLMDVVYNRCCGLDVHKKSITACAITPKGKEIETFDTMTNDLFQLVDWIKNKRCTHVAMESTGVYWKPIYNLLELEEIQPMVVNAAHIKAVPGRKTDVKDAEWIAKLLRHGLLQHSYIPNREQRELRELVRYRRSLIEERAREISRIQKVLEGANIKLSSVATDIMGVSGRAMIEAIINGVNDPQTLSSLAKRGMKKKKDDLERALVGSVGPHQKMMLKTQLSHIDFMDQQIELLSEEVRQRMQPYEEDIELLDSIPGIGIDISNQFPSAPHLCSWAGMVPGNNESAGKKSPEKPEKVIKKYEQHLLKQHIQQPEQKTPILLPNTNVWQHELVKNAQQSRLDIPY

SEQ ID NO: 53999 - protein, 357 aa, unidentified
MTTYYIGADVHSNSTELAIEKRNKIVARYSVPTTIPAISNVLDSLQGKKHMALEEGPMAGWLYRNLCRKVDKLIVADPRRNKLITSDGDKDDKIDAAKLAALLRGKYLRSVYHSDSDARSELKHWVSLYHDRGKDAVRNINKIRARCRMYGLTIPRLALRDPSHRGQWLFKINQPVLARQLNMLWIGYDATAKQTRMAKQQLLQLSKRYPVIHLWEELPGIGLIRATTSFAYLDTPWRFKKKNALWKYCGVGLQRTTSGTDKKGRPKPARLQLPWAVNRTLKNMILGAAISAINQKDNVFKAYYERMVQDGVISSNARHAVARKMLTVMWGMWKTNSRFDERLCQESNRPTASALSR

SEQ ID NO: 54000 - protein, 349 aa, unidentified
MRCFQPPTETRFYAGVDLHARSLFLSILDRDGQERFARNLPAAPAPFLKAVGSFRDGLVVGCECMHCWYWLADTCREHDIAFALGHAWAMKAVHGSKTKCDRHDALAIARLLRGGNFPLAYAYPKERRGLRDLLRARLRLVRQRAELYGHVHTARRQANLPPVSSDVKYKSKRAAITADIADPFVRRRVETHLALLEPLDTTIRRLEAEIEDAAREHYATELAVLQSTPGVGLVLSLTILLEIDTVGRFDTRQQFCSYARLCGAVQESAGQRTGAGNRKAGNAWLKWAFSEAAVLSAQKDERVGAFLQRLASKLGKAKALSALAHKLGRAFYHMLRTKEVFDVNRFVRH

SEQ ID NO: 54001 - protein, 379 aa, unidentified
MRTVCGLDVHKDSIFVCILNENGILFQDKIGVLTPDLERLVDVLHEHDATEVCMESTSIYWMPVWRILEPYFSLKLVNPYFIKQLPGKKSDVKDAEWIATCLLKDLIRGSYVPEDRIQQLRQYDRRIFDLNKDIVYKLTKLDAALQRCNIRISNYVSTTDGKSYQKVVEKISEGITDPKVLVGLIHGRTINRVGTDVITASLTGVITQTDIDVIGQMREEVLLAQKHRDECLSKMEELCNKWFPKQMKNLQTVPGVSLRSATSVIAELGTDMSSFEDAAHLVSWSGLKPRNDESAGKIKSRKITHGNKFLRKTLIECTWSASKTRGCFYNAFCYHQTVVRRKNKMKVQVAIARKMLTAIWFILHDNVPYRDYTPDIAAE

SEQ ID NO: 54002 - protein, 416 aa, unidentified
MNAAGIDVSSRKSTVAVLRPFGEVVRLPFDVAHNTEGLASLAEQLKALDGEARVVLEHTGRYYEPVAKALHEAGLYVSAVNPLLIKEYGANSLRRVKTDKADAVKIARYALDNWADLRDYTPMDTIRYDLKTLNRQFQLASKQRTASANNLIALLEQSFPGIRKCFDSPVRSDGTQKWVDFIHTFWHVECVRKQSLNAFSERYRKWCKRHGYIFKQGNAVEVYSLSKNAVVLVPKSEVTKVLVQEAANQLTSISRSVETYRAEMERLASTLPEYPVVMAMYGVGKSFGPQLMAEIGDVRRFERKQSLVAFAGIDPMPNQSGDKNVRSNKSSKRGSPYLRKTLFNIMGIYLKCSPQDEPVYQFLDHKRSEGKPFYVYMTAASNKFLRRYYAQVRDYLSTLDDLPPVDMDSTGLKPSD

SEQ ID NO: 54003 - protein, 377 aa, unidentified
MASSILAPPAKEIEPSPQHRVLIGIDTHKDNHVAFAIDYRGASLAEIIFPACLLGYEALLEWALELVHGVMPGLAFGIEGTGSYGAGLSRYLMAAGCTVRDINRIEKSTRRRRGKDDSIDAEAAARTLLSGTATTIPKAGNAGVEMIRMLNNVRESAIHSRTKAINQLRALLVVADPALREELAGMPTAALIQHCSALQPELNGNPRATTHNCLRLLASRWFALTAEIEELSTELDQLTKTVAPELRDAYGVGLECAAVLLVAAGDNPERIRSEASFAALCGASPLPASSGNSTRHRLNRGGNRRANRALWRIAITRMRWHPATKEYVERRTGEGKTKREILRCLKRYIAREIFQLLRSMTLGDPLPRKGSVAVVVA

SEQ ID NO: 54004 - protein, 365 aa, unidentified
MEKLYIGVDFHARQQTICYLKTETGELVITELKHTDKESVRAFYQQFPRPVVVGLEASGYSPWFEALLEQLGCEIWLGHATEIRRRARWRQKNDRRDAQLIWELMVHDEFPRLHRPVLPSREVLRMLRYRQKLTQLRTMAKNSLQAIALQAGLAKGPQLFTGAGQQQFRAVSLSPVLHWQREHWFALLQPLNQQLLETTIWFKAQSKDDPDVTRLRTHPGLGLLTALCLVHTLQPVRRFSNARKVAAYAGFDPVERSSAERQRFLGISKAGSRLLRYLLVEAAHTAVRYDEDLKRFYKRLAQRRGRPKAKVAAARKLLIRAYIMLRDEIDYAEFRRRAVAARLARNRQRPNVPEVLIGQPASSRH

SEQ ID NO: 54005 - protein, 349 aa, unidentified
MLHVGLDLSRKRVDVCLISSEGELIQHFRAPADRDGLYGLTRRVAAYGQPIRGVVESMNGARFVHDELVRFGWEVLVADAQRVKGLAPLACKTDKVDARVLAELSFRDLVPAIWLPTPELRAERERARWRLHLVKHRAILKNRVHASLIAFGHQVPMADLFGVAGRRLLAELDFPEPWLGHVQASLELIDDLDHRIGEIERWLRRSGADHRYIPLLMSAPGIGWITGFTIAAEIGDISRFSSPVKLTGYTGLCPRVSQSGEVDRRGPLSKHGPRYLRWGLMEAAIAASSHPLYRERYQRTKRRLGRQRGAKVAQIELARKLTEAIWYMLTRNQPFKPFAPAGAIIRLTA

SEQ ID NO: 54006 - protein, 368 aa, unidentified
MSTLFVGLDVHKNSIVIAVAEAGRDGDVRSIGTIPNTPSDIHKMLKRLSRNGQSLDCCYEAGPCGYGLHRQILEAGHACRVVAPNRTPLRPGDRVKTDRRDAIILARMHRAGELEAVWIPDQAHEAMRDLIRTRAAAKLQEKRMRQQLLSFLLRHGRFYTAGKQYWTKPHRRWLADQSFEHHAHQIVFQDMVNAVNDAEKRHADLVKLISDLVPQWSLRHLVEALCSLRGVNIIAASTIMAETGDLTRFRTPSQLMAYIGLVPGERSSGDNIRRRGITKAGNTELRRILTQTAWSYRFPARVSRVGMEEYDAAPKSVREVAWKAQIRLCQRYRALIARGKCAQIAIVAIARELLAFVWEIGQLVPIRP

SEQ ID NO: 54007 - protein, 337 aa, unidentified
MERQQQYVGIDLHRRRSVIVRKTSTGEPIETVQIDNDPDVLAAELRKAGEHPEVVLEATYGWYWAADLLQAQGATVHLAHPLGNHWGHRRVKNDERDATDLVDLLRLGRLAEAWIAPPEVRELREHVRYRAKLVHLRGALKSQVHAILAKEGVAVPMSDLFGKRGSRLLDDVALATAFRIRVDSLRELIDRVDLELAMVEECAQRALDGDPGYRAIQRIPGVGPVLAGIFVAEIGDVTRFRSASHLTSWAGLTPMHRESDLKVRRGHITKQGSRLVRWAAVEAVVRQRGHTVVQAHHRRVAERRGSQIERVAAARKLLVPVYYGLRDGEIRCLARAG

SEQ ID NO: 54008 - protein, 317 aa, unidentified
MTKCNTKTAGIDTSKDKLDIAIDASTTCWQVENTAIGWRHVAARLAAAGVTRVGIEATGGYERGVVRYLREKGFTVLVLQPTQVKAYARMHLRRAKNDKIDAALIAACAAGLEAPAVPPDARLEALAGHLTFVEQVEEDIARLKVRLEHVEDARLRDILKADIAGLKARRATEMLRIINALRAHADLARRYHLVLSVAGIGERTAIAIIIRMPELGRISREQAAALAGLAPYDADSGTHKGQRHIAGGRARLRRSLFAAALPAAFRWNKALIELYTRLIARGKCHKAALIACARKLLIYANTVVQRGTPWVQEQVPA

SEQ ID NO: 54009 - protein, 424 aa, unidentified
MNCNQNFKISQVTEGTLVLGIDIGSNTHYARVFDWRGLELSKVFKFKNSFEGFQSFVLWVNDLCCKYNKSKVIAGLEPTGHYWFSLGELLKENNITIAIVNPYHVKQSKELDDNLQTKNDSKDPKVIAKLVIDGRYSFPYIPEGIYGELRVADKLKNDITQQIISIKNKIHRWLSIYFPEYEKIYSSIDSKSGFLLLKETPLPKDIVELGSEGIVERWKQTKLRAVGLDKAKKLEEAAKKSIGCKNITSSARFEIKLLIEDYEYKQNQLNSITEELNKLCEKIPMIKEIAEIKGIGIATAISFVAEVGDIRRFKSAKQVQKYAGLALKENSSGKHKGLTRISKRGRKKLRTILFRATIPLIGFNKEFSSIYNYYIERKDNPLKKKQALTAICCKMIRIFFTILSKGIKYDETKMLHDIKRPVAA

SEQ ID NO: 54010 - protein, 416 aa, unidentified
MSGKREIACGVDVHNRFIVATILSSDGLKLQDRFETNLEELLKFKDWLKENGCHKVALESTGNYWLPIYHVLEGSVNFILANAYQIKHVPGRKTDTLDSEWIAEICLKNLISPSRIFCRNHRELRSLTRARESLIKVRTKIKNRVTHELEAACIKLSSVLSDVFGKSGRHIVDGLLNGMDLEEILESIPSRKVKAIKEEIRGTIQANLSSLQIFLIQSHLDMIDAITKQIVEIDSKISDQLSTRNEDMRIALSMPGMGFVSASTILAEIGDFRDFSSPDKLAAYCGLVPSVYQSAGKLINGHITKHGSPHIRSMIIEVAHAIIRTRRDTKLKKFFLRIKARRGTKIGVVALARKVLCILYHLLIHQEIYHDDLLGKPRKIKHLSAYSTISMSLDEMIKTIIKAGYEVRKNEYLEGG

SEQ ID NO: 54011 - protein, 286 aa, unidentified
MSKIREKIHIGIDVSKHHLDAACGQKKKRFEFTKEGLKHLLEWCQSNASDMELHFIFEPSGAYEIPLAEFLSKHDILWSRPNALRVRQFAKASGVLAKTDRLDAEILAAYGEKFTPEAQQLEASAIRELRELMKRRQQITKLMTQEKVVLESVQDGFCKAEIKNSIRRFERDIARIDERISKHLSKEKQLEQAVEKLQQVKGVGLQSALVLTAFLPELGHVNRREIASLGGLAPVTRESGMWKGKRKLGPGRVQVRRVLYMAALSACRFNPQMKELYHRMKADGVN

SEQ ID NO: 54012 - protein, 444 aa, unidentified
MKANKVSALRVKRGLHRVNGAEPQVVGLTPQTTDIRKTDTMKTYILRQTKPVEPQKSSRAPRPKPAPPVAAKGPILFIGLDVHNDSIAVSLAPSDSMEVRRYGIIGGEHDDVLKLAHKLQAAHPGTLLKFCYEAGPRGFALCRCLRAHGLDCILVCPSKVPRKPGERVKTDRRDADDLARLYRAGELTGIYVPEPEDEAMRDLIRARFQVGKQQHRARQQLKMYLLRQNLRYVGKSSWSPAHLRYLAKIKMPFPVQQIVFQEMLDVISEATARLERYDQEIARAVPGWRWEPVVRALMSLRGMALLHAATLVAELGDFNRFEHPGQLMGYLGLVPSEHTTGNDRQQGGITKMGNAPARRALVEAAWQYRAPARLSPHLKKRQEGLPKAITDIAWEAQRRLHHRYTHLTRVGKKKSQVAVTAVARELTGFVWAIARQVHPRPAQA

SEQ ID NO: 54013 - protein, 344 aa, unidentified
MNVSKTVVGVDIGKRVFQLHWIDAHTGEIVSLQLKREKFLEHFANRAPCRIGMEGCGGSQHWARQLSSLGHEVKLMPAKAVRPFVGGGNKSDAHDARAIWTAVQQPNVKAVAVKTEEQQAMLALHRMRQQLVKFRTAQINGLRGLLTEYGEVMAQGKAGIRKGISEALQHLSDRLPVMVIDTLREQRERIDELDNQISHIERRLKTWHKNDKACQRIADIPGIGLLSATAAVAMMGDAKAFKSGREFAAWLGLVPRQTGTGGRLRLLGISKRGDTYLRTLLIHGARSVLTHAKEPAAWITQLRQRRPLNVATVALANKMARTIWALLAHERTYRKGFVSQPVYC

SEQ ID NO: 54014 - protein, 382 aa, unidentified
MDNNKSVSTAGDEPASAEQGSKGVLKLGLDMHYRQVTVAMQQEHGPIKAVGKLSHEGFWAWVEKKHKEGWQIYSCYEAGASGYWLHRDLVALGVKNEVVAPKPTGQDRRQKTDRRDSAELLDCLDQYVRGKKTALSPVAIPSPELEQNRALVRFHRQLMADRGRYESRGKGLLCAQGIELRGKWWSSEAWKELQTHPRCKDWIEQQLRSWRGKLFALNAQQAQVRQRIEALAPDELPKGLGAYSAVALECEMKGMAHFDNARAVSSYTGLCPGIHSSDGRGKEGSINRCGNAAVRWNLVETMWRFAHWQPNYEPARQLRLALGKSKRAKKRLVVKAARQLAVDLWRLQTGRATAQELGLVMQTNRREPGRPPRSGVQKERPL

SEQ ID NO: 54015 - protein, 407 aa, unidentified
MDVIIERACGMDVHKDNITACVMTTEGKEIRTFSTKTVFLLQLIDWIKEHKCTHVAMESTSVYWKPIVNLLEAEGIEFLVVNAQHMKALPGRKTDVKDAEWIAQLLRHGLLKPSYIPNRNQRELRELVRYRRSIIEERARQINRIQKVLEGANIKLGSVVSDIMGVSAKDMLRAIADGEEDPEKLANFARRTLKKKKEELELSLNGYIHNHQRLMLKTILKHIDFLTEQIDMLDQEVAQRLSSYQEDIERLDSIPGIATRMAEQMMAELGNNIKEQFPTAAHMCSWAGLVPGHNESAGKRKSSKTKKGNKYLKSALIEAAHSVRGSKNYLGALYRRTASRKGTKKAGIVVAHAILRIAYYLLTRKEMYVDLGEDYFDKKRQQSIVRHSLRRLESFGYIVSIKEPEAS

SEQ ID NO: 54016 - protein, 438 aa, unidentified
MNENVAGIDIGSKHFFVGVGSEDGKGEVKNFETYTEGCNELLSHLQQKDIKKVAMEATGSYWKVLYSILTNAGIEVTVVNGRHVKHVPGRKTDVKDCIWIKELHNHGLLRGSFIPDSNVETLRYYMRIREKYIENKSDACRRMDKALIAMNIRISNVISDIHGKSGMAIIKAILDGQHDAEELVKLCDIRIISQKKEEVLKSLNGFYKPEHLFALQCAYDEYMFYINKMQQCDKKVEEIIISMTADKPEIKTKEQFKRIYHNKPAIKDIDIKVMQLYNGKNLTVLPGITSYTLLRFFAETGSDYTAWPTNKHFTAWLALASSKYQSGKTRKYKKIKCNTMAGQILKEAAQSLLKSKNSALGLWGRQVAARRGPSVAIKAMARKLAVWIYNIVMKGMQFVENGIKQYEEKQKHRNIKWLKKQAAKYNLALVDLDTAQVA

SEQ ID NO: 54017 - protein, 392 aa, unidentified
MPADRPVLPDWTTGKENAGFMVILGIDAHKRTHTVVAIDNNGRRLASKTFGTATADHLALLRWADQLDTNDHPTGSDLIVSDPRTATDKPRRWAVEDCRHLSRRLERDLLAAGEQLTRVPPKLMAHVRDSARTFGKSDPIDALAVARAVSREPDLPTARLDDPDRDVRLLGDHREALVAERTRVINRLRWHLHELDPGWDPAPRSLDRVSAYDKITVRLGDHDDNLAGSAMLVARLARRLVERARTLTVEIDELTAELTQHVQALAPTLLAVPGCGVLTAAKILGETAGIDRFTSKDAYARHNGTAPLPVWSSNKARHRLSRTGNRQLNAALHRIALTQARCHPEAKTMIARRRANGDGGMEALRVLKRRLSDVIYRALHTDLQSKVINPAA

SEQ ID NO: 54018 - protein, 368 aa, unidentified
MLYDVRGFQTFVGVDLHKCTVTLKAVSAAGESTAHLTISTKSVEKIERWLRELPQPVWLAVEACPFVEWFIDRYRDCVARLDIADATELASRRGKRRKNDPNDALDIARRLARGECPLGFIADPTLMQLRKLGRHWRQLSRLISRSKHALKSMLNAANLRGPKFDGAGAQRWLLAQGHLLKPVQQQAFSDYLDHVLLVERQREKLRRQMHYAPRSEAFAQTQLLLESVPGIGDIWGLIIAAEVGPFDRFPNSDALEFWAGLTADLKESAGRTQSGNITKAGSAPLRWALCQAAITLCQCDARQEAIRQRLIRRIGKAKANVAMGRRLLRTLYAMVRDQKPYRCEQPIDRTTRLNKARAARKTQADKAA

SEQ ID NO: 54019 - protein, 337 aa, unidentified
MKYCGIDLRSNNSVIVVIDEEDRVVGQKRLPNELARIVVFIVQWRDELAGVVIESTYNWYWLVDGLQAAGFQAHLANTAAIKQYDGLKHGGDEADARHLAQLLRLGILPTGTILPRDERAVRDLARKRIQLVRGRTTHILAIENIMARQFGARMTSNQIKRLSADDIDQMPIEADVRLAMNANLAVIGALDAQIEVLERRLRERVKPRPEYAFLTSVPGIGQALSTTILLETGPIDRFASVGNYASYARCVDSAHTSNRKKKGEGNVKNGDKYLAWAFVEAANFARRYCPEAKRFYERKKAKTNNIVATKALAHKLARACYHILREGRPFDVTRCFA

SEQ ID NO: 54020 - protein, 413 aa, unidentified
MLLVQVFCGIDWAEDHYDMALVDQAGVVLTERRIDDDASGYQLLLALLGEHGDDQCEPIPVAIETPRGLVVACLRRTGRQVYAINPLSVARYRERHSVARTKSDRVDAQLLANILRTDRAAHRPLPADSELAQAIAVLAHAQQDAVWNRQQVANQLRSLLHEYYPAFVEAFKDRRPGGLAHPDACAVLAVAPTPTQAVRLTRPQLSAALRRAGRQRGIAAATVRRQAIFRRTSLRQLPMVEQAMGCQALALLKQLEAAAQAADELAEATRLVFQQHPQMATFTSFPGLGELPAARLLAEIGDDSTRFADARGLKAYAGAAPVTRASGKKLIVLHSKVKNQRLAAVGYLWTFAALRLSTGARAHYDRRRVAGDRHTAAQRHLFNRFLGCLYFCLQTGQTYAEAQAFPVAQPIAA

SEQ ID NO: 54021 - protein, 454 aa, unidentified
MQKQDSYDYYVGIDCAQNKHDFAMKNNQDKFLIKKGHFSNTLQGYEKFLNTVLSKCLNKDKILFGMEVTGIYGTNLYERLKSDGYHVVMISPDSVKNYRDYKRLNKTDKIDSACIAELLLNGDAQIVHVEKNGYTDLKAYIRRRNALKVTCTQETNRFLAKVCLYFPDLLKVFPSGRATLKAIFSIYPTPYSIIEADFDELVSVLQKASKNKFGVDKANELIHAARNSIVVRKSISDGELYNIHSLIDSIDSLESEIRNLEKIIDSKAEEFPAYHVLLTLTGCGKITAATIVAEIGDISRFHKASQIVSLAGLYGDNSKSGSSVNKRGKISKKGSRYLRHAIYMVAEFARRNNPIFKAYFTRKKNGDRTKHTLAVNAVANKLCKVIYSLMKNQSTYIIQYRDLAKLSESTQNEFFQNAETDFSAKTRRKKYLYEDEYGELHEFVFKSLKTALIE

SEQ ID NO: 54022 - protein, 323 aa, unidentified
MMGLPNSLCVGIDVSKNSLDIASNQTISPLSVSNDVDGFDAIIAELKQHSIALVLMEATGGLEAAVACSIQAHGFDVAVINPRQARDFARSMGYLAKTDRIDAAMLAQMAEVINRHPERARFIRNLPDAEREVLTAMVVRRRQLITMLTAERNWLHPSHPQSRKSISTIIDALKDELKRINKSMEVHISTHFKTLAEILGGVKGIGAATIATLLAEVPELGHLSRREISTLIGLAPFNRDSGNMRGRRTIFGGRANVRSALYMATVVATGHNPVIKRFYNRLVESGKVKKVALVACMRKLLTILNAMIKKNEPWDSSHHYLSQ

SEQ ID NO: 54023 - protein, 342 aa, unidentified
MQITTIGLDIAKNVFQVHGIDASENVVVRKQLRRSQVLAFFKALSPCLIGMEACATAHYWARELTTLGHEVRLMPAKDVKAYVKRNKNDAADAEAICEAVRRPTMRFVQAKSAEQQGRLMQHRTRDLLMRQRTQLINALRAHMAELGIVAAQGREGIKQLLTIVASERDARLPVDAHASLVVLAAGLQAVQTMIGSIERRIIIQHRSNEASKRLKSIPGIGIVGATAIAATVPDPRAFRSGRDFAAWIGLVPRQDSTGGKQKLGPISKQGDQYLRRILVVGAHAVLKRARQQPEKYPWLTRLLARKPFRVAAVALANKMARVAWALLAKGGTYRAPALAAPA

SEQ ID NO: 54024 - protein, 350 aa, unidentified
MLADLVEHVIGVDPDRDRIAAAVVVAGTQAEVARSEFPTTAAGYRQVMEWADEYSRSESRVWSIEGAGSYGAGLTATLEVETEWVIEFDRPSTRPTRDGAKSDGLDALRAAREMLGRTKWSTPRSRGAREGLRAVLVVRSGAQAARTAAINQLKATVLTAPVELRDQLRGLTRTALVDRCARLRPDLNGDLETFGTKTALKALGQRIQTLTEEARHLEEAMRPLVNATGPQLLDEPGIGVILAAQVIISWSHRGRCRNEAAFARLGGVAPIEATSGQNQTRFRLSRGGDRQLNRALHQIIVIRSQYDARTQTYLDRRTAEGKTKREARRCLKRYLARHLYRLLENPPMAA

SEQ ID NO: 54025 - protein, 342 aa, unidentified
MEISTIGIDLSKTTFHMIGLSTRGEVVLRKKLSRKQLLIYTATRTPMLIGMEACAGAHYLARALRDQGHDARLMPAQYVKPYVKTNKNDYLDAEAIAEAVQRPTMRFVPVKNDAQLDLQALHRVRDRWVARRTAVMNQIRGFLLERGIAIRKGPSYLAAQLQIIFTDGDSSFSGRLLHLICELKQEWDELERKIEEASAELARVAREDDGCHRLMEVPGFGPIVSTALVAAIGNGISFRKGRDLAAWLGLVPRQHSTGGKTRLLGISKLGNEYLRRMMLHGARSVVMQMERKPSALGEWLTSLSARSHRNVTVVALANKMARIAWAILSKGTHYCAPALVAA

SEQ ID NO: 54026 - protein, 335 aa, unidentified
MKQVTTVGIDLAKNVFTLHGVDAAGNTVLRKTVRREKVMELVAALPPCLIGMEACTGAHEWARRFSAYGHRVGIMMARFVAPYRKSSKNDSNVAEAICEAVSRPIMRFVPVKSAEQQAILSLHRVRQGFIEQRTATLNRIRGLLAEFGVVLPQRPEQVRRAAVLVAEALPALARDAIADLREHLAYLDERISGYERQLIALAKQHEPARRIQDVCGVGPLTASALTASIASGHEFPNGRQFAAWLGLVPRQYSTGGKTRLGRITKRGDAYLRTLLMLGARAVLHSVAQKTDRLSRWAIAVRARRGYHRAIIAVAAKNARIIWALLANNRSYTMQP

SEQ ID NO: 54027 - protein, 314 aa, unidentified
MNIEERFAGVDVSKAYLDLSLGTDGRVERFTNDEEGVAAVIGHLVELQPTLVVLEATGGLETLLAASGRAAGLSMAVVNARQVRDFAKATGRLAKTDKLDARVLAHFAKAVRPEVRPGRSEAEQELAELVARRRQLVEIRAQEKTRLSMAGPRQKESLKEHIAWLDERITQLDGESGNRLKESDSWKTQADLLQSAPGIGSVTMLTLLSCLPELGKLNRREIAALVGLAPFNRDSGFQRGRRMIWGGRAEVRSVLYMATLTATRGANPIADLYKRLLEKGKPAKVALTAAMRKLLIILNAMVKQNKHWSCPQNA

SEQ ID NO: 54028 - protein, 334 aa, unidentified
MKSDAVYIGVDVSKAKLDVYIPPKKEGLRAEIKELENNPTGLRKLRSIARSVKGIICVEPTGGYELELIAFMHKFDVPVAYADALRVRQFAKAEGNLSKNDAIDAALISRFAAKVGVRIIDKKDLDIVELKRKTKFRQALIESRTALISRLDTEFDDVIKEMIKAQIKHLNKLARKIENSCIEIINNNERIKELLPRFTMIGGVGDLTAVSILAQLPEIGRLDDAQLNRLVGISPEQRQSGTKEWQRRIGGGRKDVRNALYMAATAGLMWNSILRDYYRKKRAEGHSHKWAMVPTMRKLLSLLNRIARDPNFIPLPEPESTRKNAGAGRKKKSA

SEQ ID NO: 54029 - protein, 401 aa, unidentified
MIDTGDIDVFLGLDVGKGEHHATAITPAGKKAFDKRLPNTEPKLRELFAKLQAKHGTVLVVVDQPASIGALPLAVARDMGCPVAYLPGLTMRRIADLYPGEAKTDARDAFIIADAARAMPHTLRAIDGEDETIAELEMIVGFDDDLAGEATRVANRLHGLLTQIHPSLERVLGPRLQHPAVLALLERFGSPAQIRKAGRRRLVTLLRPKAPRMAERLVEEIFTALDEQTVTVPGTEAAALIVPSLATSLTAVLDQRKLLAGRIEELLEAHPLSKVLTSMPGIGVRTGARILIEVGDGSTFPTAGHLAAYAGLAPATRSSGSSIRGEQPSRRGNKQLKRAFFLSAFAALADPASRTYYDRKIAQGKHHTQALLCLARRRADVLFAMLRDGTFYEPQPSASVT

SEQ ID NO: 54030 - protein, 344 aa, unidentified
MENIALIGIDLGKNSFHIHCQDRRGKAVYRKKFTRPKLIEFLATCPATTIAMEACGGSHFMARKLEELGHSPKLISPQFVRPFVKSNKNDFVDAEAICEAASRPSMRFVQPRTESQQAMRALHRVRESLVQDKVKTTNQMHAFLLEFGISVPRGAAVISRLSTILEDNSLPLYLSQLLLKLQQHYHYLVEQIKDLESQLKRKLDEDEVGQRLLSIPCVGTLTASTISTEIGDGKQYASSRDFAAATGLVPRQYSTGGRTTLLGISKRGNKKIRTLLVQCARVFIQKLEHQSGKLADWVRDLLCRKSNFVVTCALANKLARIAWALTAPGRDRTLLMKFEQADRL

SEQ ID NO: 54031 - protein, 391 aa, unidentified
MSMYFIGIDISKYKHDCCIISAANQKVVSKVIIKNNKAGFNELLTIIHSLANPADIRIGFESTAHYALNLELFLENSLLTFMEVNPVLISEYKKSKTLRRTKTDSVDCESIARWLMTVEYKPHSKGFYHAYSLKSLTRLRDKLIRQRSFYLVKITNVLDHTFPEFKPFFNERLSKTALYLLENYGSAEKMARMNSASYEKLRSVSRGKFSPQQFLRLKELAVNTVGVNNSIFDVELNSLLSLYKSLVKEIDTIKKEINQLIEEVHPHYMSVPGIGPLSAAVIYSEYGDISNFTNPGQMLAFAGIEPGINESGTESHGGKMVKRGSSQLRYTLINCCLPLIRFDMTFATYYAKERGEGKPHRVAITHVAKKLIRVIYALESQDIDFNAQELR

SEQ ID NO: 54032 - protein, 339 aa, unidentified
MAILFVGIDLAKNVFAIHGVDEHGKAALVRPSVQRARLHQLVAALPPCTVGMEACSGAHHWARLFAQHGHTVRLMAPKFVTPYRMSGKRGKNDAADAQAICEAVQRPNMRFVPIKSQDEQARLCVHRVRQGFVEQRTATINRLRGLLSEFGIVLAQKAATIRREAAAHLEDLPGWANTAVGDCLSEVHRLDERLAEYERHVSRMAGEDARSARLMQLQGVGCTTASALVSTIGDARDFKNGRQLAAWLGLVPGQYSSGGKTRLGRITKAGDGYLRTLLVLGAKAVLAAARNKHDRLSRWALALEVRRGYWKAVIAIAAKNARMAWAVLAKGEEFKLIEA

SEQ ID NO: 54033 - protein, 402 aa, unidentified
MNCVGIDVSKGKSMIAVMRPFGEVVVSPFEVRHTANELSELAGLLKSLDGETRVVMESTGNYHAPVAWLLHDAGLYVSVVNAMLVHDYGNNSLRRAKTDKKDAIKLANYGLDHWLTLPRYVPEEDTRLLLKACYRQYQQYSKVQTMLKNNLISLLDTTFPDANRLFTSPPRTDGSEKWVDFVATFWHCECVCGLSEKAFTTKYQKWCRKHGYNFSEDKALDIYASACGHFGVIPKTDTAKLLVEQAISQLRTTSAALAALKKEMQSLAASLPEYPVVMGMFGVGPTLGPQLMAEIGDVRRFHSKKALVAFAGIDAPPYQSGQMDVRSRSISKRGSAALRRTLFLVMGVYLQSAPMGEPVYQFMDKKRSEGKPYRVYMMASANKFLRIYYASVKAYLDSLEHD

SEQ ID NO: 54034 - protein, 401 aa, unidentified
MPHSSPTQPTNSAPVLGATGRAVGLDIHPDSFAAAILDGRDPLQARVAHSITKQPLDALCAWAARHTKTADVLIIEASANTFAVAERLQAIGRQVYILESHRAGQIGKSYLANDRVDAVKIARIYLSGLSIKVWQPDAATRQRRELLSTYQRCVQDSTRAQQHLRSFLNEYALRLPKGFRLCRPEALARLLSLKGWSPRQKLLLEEMHGSLIATRERRTRLRRLMALEIEQTPDFLRLYKLAGLSLVTTYALVAIIGDIRRFATSRKLVSYLGLNPSVVQSGTSDTGGALHRHGRGSLRALIVQASKRLLTTTNPLQKWGLTVALRRGRNKAAVAVARKLTTAIWHVLQGHWNKTLEETTTLLTKLDKLATALGLPTLQELGYASKVAFRDQKLEVLRTHP

SEQ ID NO: 54035 - protein, 342 aa, unidentified
MKITTIGIDLAKNVFQVHGVDARGKTVLKKQLKRDQVLTFFINLQPCLIGMEACGSAHHWGRKLQEMGHTVKLMAPQFVKPYVKSNKNDAADAEAICEAVARPTMRFVPLKNTDQQSVLALHRARQSFVRARTAQANQIRSLLAEFGLILPQGIHHLAKRVPELIEDASNELTGSFRYLIQRLLEHLKELDRQVRELEVEIKAWHRANAASSKLETIPGIGPITASALVASIGDARNFENGRQVAAWLGLVPRQHSSGGKPMLLGMSKRGDTYLRTLLIHGARAVIAHSKNKTKIVSWLHKLIQRRNPNVAAVALANKNARIVWALLAHDREFRADYEPVMP

SEQ ID NO: 54036 - protein, 369 aa, unidentified
MKKTIKYIGLDVHKKSISIGIADEGRGGEVRYYGKIENDMNQLDKVIRKLISKGAVLKFVYEAGPCGYTIYRYLNNNGMKCDVIAPSKIPIQSGNRLKNDKRDCLSLARLHRAGELTVVYVPNKDDEALRDLVRAREDAVRALRVAKQQLGAFLLRHDTVYSGKSKWSKAHFNWLADITMPHPAQQIVFQEYIDTVTSCSNRVERLTEQVRQQSKQSRQHELMQALQSMRGISLIVAATIAAELGDLTRFESPGKLMAFLGLIPSEHSSGERVSKGSITKTGNRHVRKALIAAAHAYRFPARKSRAIRLRQENLPEGVTDISWKAQCRLCTRYHYLTAKGKNANVTKTAIAREIAGFSWAIAQELSKAA

SEQ ID NO: 54037 - protein, 397 aa, unidentified
MSKYIIVGCDMSDRNLMLEYAEDQGAPKRRSFSNDAEGREAMVRLLKAQAQAGGGARIVFAYEAGPHGFGLADVLEQEGIECRVLAPTQLPQSASSRKQKTDEKDALRIFEALRGHLLAGNDLPEVWVPDPITRDDREPLRARLDVGQKATRTRNQVRMLLKRHSVTPPPEVGARWTLKHLAWLRGLTAAASPLKEGTRAVLGSLLRQWEALEREAESLDGAIERLADQPRYRAQACALDAMVGVGVLGAMVFLTEMGDLRRFPNRRDVGSYFGLAPSSHETGKRTDCKGPITRQGPARLRQVLSQIAWTRARLEPKEKEVYARLVRKNPKKKKIALVACMRRTGIEMWHVAFSAQTPQTATPPSRSPEGGKRQFALPAMPRKYRRRSEAEERRLAV

SEQ ID NO: 54038 - protein, 360 aa, unidentified
MRHLSAKLLVARISSNGEPSMGEVTTIGLDLAKHVFQVHGVDAEGATVLRKQLRRAQVLVFFSRLPRCVVGMEACATAHHWARELRSLGHEVRLMPAQYVKAYVKRNKNDAADAAAICEAVLRPTMRFVAVKTAEQQAAVLLHRGRERLVRQRTGLVNALRAHLAEFGIIAPQGLRNVGRLIAIVRDEGDARLPALARQVLEVLAAQIEQLEAAVAAIEKQLMAWHKSNPVSQRLATIPGIGPIIATALAATVTEPSGFRSGREFAAWLGLVPRQNSTGGKVRLGGISKRGNRYLRRLLINGASANLLRSKATNADPWVIALRRRRPSLVVAVALANKTARIAWAVMQRKENYQHMAAAA

SEQ ID NO: 54039 - protein, 418 aa, unidentified
MKLFIGIEASLKNNQCCVVDDKGKKIMQLNVSNNLSGAQELEKNIDQKACQLNIDDKLEELKIATEASSLYDFHILEFLSQSEILARHNTKLYRFNPRLVKAFKPSLKLKDKTDPNDAYAIAEYLRFREDTAEEYRAKLDHLPLQRLTRFRCHLVNQLVRERNYFLNQLFLKFSAFGKGQPFSDTFGATAIAVIEEFMTPDAIANADDEQLVEFVIKHGKNRFPNPEEIVKELKYVARESYRLRPQLADSVHRILCLSLSNIRALKASLKELDDTISKQLNAFSITLTSIKGIGAVYAAGIFAEIGDINCFPSEAQIARLAGLAWIRHQSGNFEAETTRLDKQSNAYLRYYLVEAADSLRRHNPEFSAYYQKKYAEVTKYQHKRALVLTARKVVRLVDCLLRTNKLYQMNMPVTSTDD

SEQ ID NO: 54040 - protein, 420 aa, unidentified
MKVVYQTCCGVDVHKSFLVATIIKTISGVEPSYQKKRFSTFNNSILQFKNWLIENQCRDVCMESTGKYWVPVFNLLEDDINVTIANPKWVKAVKGNKDDTKDSKWIGDLFRLGLVPGSYIPCKPIRILREFTRYRYKLISCRTSEKNRYQNALTVCNVALDSVVSDIFGKSATSVIDYLIEQSNNSINHEEIASRLLRSLKKKSDSVIESIEGYQMTDSQKYRMRLVRAHLDYITSSINDIDTMLDSLIAPYENAVQLLCTIPGVDRNSAITVISEIGTDMTPFSNSKRLCCWAGLTPGNNESAGKKKSVRITRAGVYLKPALVQVAHAAVKSDKSPYYKQKYERIMKRRGKKRAIIAIARMILTAIYQMLSTGEAWNPTDLYKIDIPEPLKEKQKEKAIKQAKKLLIREGILSESQLAS

SEQ ID NO: 54041 - protein, 364 aa, unidentified
MQKISTMQASGKNIFEGQLIIGLDLGDRSSAYCVLNEAGGIVLEHKLATTPEAMKQVFGSLPRCRIAMETGTHSPWVSRLLTALGHEVIVGHAQKVRLITKSRKKDDRLDARTLARLARIDPQLLSPVKHRSAQAQLHLTEIRARAVLVSARTALVNAARGLVKSYGERLRKCDTQQFLRETSGLSTRLREALEPLLREVESLNERIQEYDRRIVKMGKQTYPETALLKQVKGVGDLIATAYVLTIEDPHRFRKSRDAGCFVGLQPGRRNSGESEPQMRISKEGDEYLRTLLVQGAHYILGPFGKDSDLRRWGQKLSARGGKNAKKRAVVAVARKLAVLLHRLWVSGEVYEPLRNSQKAMSAAA

SEQ ID NO: 54042 - protein, 343 aa, unidentified
MQTTTTIVLDIAKSVFQVHGVDAAGQVVIRRQLKRRYVLSFFQKLPQCLVGIEACASSHHWSRELQALGHTVRLMPPAYVKPYVKRQKNDATDAEAICEAVTRANMRFVPTKTPEQQSGLVLHRTRHLFIRQQTSVINAIRAHLAEFGIVAPVGRRGVEELLAVVADPNDKRVPEIARACLSAFGAQLRSIKEQVLEFDRLITAWHRSNEMSMRLDEAPGVGPVLATAVVATVADPKVFRSGRNFSAWIGLVPKQHSSGGKDRLGSISKQGDRYLRSLFVAGALSVIRYAKIHGTKHRPWLTALLARRPTKVAAIALANKLARMAWAMMARGERYRQPVALAA

SEQ ID NO: 54043 - protein, 402 aa, unidentified
MNPVVGLDISKEESHGQAFLARGKPFRGTFHFEHTRDGLANLHQVLKDVETASRLRPLLILEATGHYQSPVVQFLEEHHYIYIVINPLISNRLRKSHLRKVKTDAADAYLLGELYYKEEFEPFKKRGVQLLNLRYLTRQYESLSKMCVQTKLQFQAVLDQVFPAYKGVFGAMYSRISLRFLSKFPTSYSVLQTDEITLKAKMKELLSSKRGRSEGWINQRVQRLLDAAKQNPFQQTMYASHLINLKVLITLILQYQEHLAELEQNIDALAEEIEEHELIQSIPGIGHKIAATILSEIGEVDRFDHPKKLVAFAGIDPSVFASGKFTATRNRITKRGSRQLRYALVMAVQCGLIRSRNMRLKAFYDRKRAEGKPHKVALIACANKLVHWLYAILKNKKEFRPI

SEQ ID NO: 54044 - protein, 410 aa, unidentified
MTASVAGIDVHKRVLMVVVLTPDQAGVEADSLPSRRFRTTIQELRHLVAWLQQLGVQEAVMESTAQYWKPVWLVLEQHFRLYLAQAWSNRAPRGKKADFKDAQRLIRRHLAGELTLSFVPDGEQRLARTLTRRRTQLTRDRVRIQNQVESLLEETQVKLSSLVSDLFGASGVRILQAISDGVADPVKLAQLGDARLQHTPEELAEALTGNVSPWHRQLLKQHLEQLRLVDKQLQELSGLTASALKIHAEAIERLVQVPGIRVVAAQQIVAEAGPEASAFATAGRFSSWIGVCPGSQQSAGENHSSRCAKGNLYLRRVLCLAAQAAVRTKNSSFQQRFRRLLPRLGYTKAIWATAHRLAIVIWKILHDRVAYKEYGLETTPQARKRRIQRVQRELRALGYDDQLKLLAPQP

SEQ ID NO: 54045 - protein, 350 aa, unidentified
MRSLGKFPNRPEGVRKLIAKVGGGGNLKVCYEAGPTGYALYWQLTKLGVECEVIAPSLIPKKAGDKVKTDRRDAEKLAQSYQAGDLTPVWVPTPEHEALRDLVRQRAAAKSDESRAKHRLVKVLLRHGLREPNESRAWTHPWWRWVQALKFEHEPRQVAFSDCVAEVLHMGERLARLDQAIDRLVESAPEHMRAVIEALQAFRGVAKLTAVTVVTEVGTFQRFRRPTEMMGYSGLVPCEYSSGKRESKGGITHTGNAHLRAVLVEAAWHARHRPWLNLRLKKTLPSLPAGVADIAWKAQERLHRKFTKMLYSRKHAGVVATAVARELVGFMWAVGCLVEAQHRDAQAQAA

SEQ ID NO: 54046 - protein, 416 aa, unidentified
MHIVYSRCCGLDVHKKSITACVLLRDATGQGCQEIRRFETMTRDLLELADWLQSHQITHVAMESTGVYWKPVWNILEGQFEVVLVNAQHVKAVPGRKTDIKDCQWIADLLQHGLLRGSYVPPPPIRQLRDLTRLRTSLRQDHTAVANRMQKILEDANIKLASVASDWLGVSGRAILAQMLAGEEDATKLADLSRRRLRAKLPQMQLALQGRMTDHHRWMLRVLWDQLEFLEAQLAKLDVQIQEQIGEYQEALTLCTTIPGIEEVAAANLIAEIGTNMDQFPSAQHLASWAGICPGNHESAGKRLSGKPHKGNAWLRRSLCQAAWAASHTKATYLSARFRRLAARKGKKRAIVAVAHSILVIVYHVLKTKQPYRELGVDYFDRTRAAQLKRYLVKRLENLGLQVTVQSREEVVSLAT

SEQ ID NO: 54047 - protein, 342 aa, unidentified
MSVSYVGVDLGSSTFHQVAINHSGAQTLNRELVTSEANLVKAFSDLHGEIHVHLEAGELAPWASEIIRPLVAGVVCSHPQTNAWIARDRDKSDRIDAYKLASLLRLNEFKEVHYPREPLRRDFKALVQHYDELTQQQARWKTKLKARLRMQGIIVRGEEVFSARGRKAVLEQVKSNVVRTAIKQLYAVLDQSIASQTEAQMLMLRAAQALPEIKILRTAPGMGPIGACRFSAYVHTPQRFSSTRKLWKYCRLSVSHRSSNGKPLRRPRLDRMGCGRLKDVSRKAFAAALRSRADNGFKRAYYRALETTHDATHARLTVQRKIVSTLRAMWINQTPYCDELMR

SEQ ID NO: 54048 - protein, 331 aa, unidentified
MQSKEFFIGIDVSKLTLDVSVNGTKNHVRITNSSEGFKQLGSWLKSLNIGVSDSWFVFEYTGGYEYRLVQFLQAKGICFTRVPGLQIKKSLGMQRGKNDKIDSRRIAEYGYEKREKLKEHKACPAAITRLKLLLTQRSGFVDDKKAHEHRLKELEAMMDLKAGDAILKQYRQAVEFAVKMIAKTEAEIMKLFSKEKAMNKNFELITSIPGIGKVNGWMTIAYTENFERFPDGRTYGAYIGVVPYDHSSGTSIRGKSRVSHMANKTLKADLSMAAKASVLHDPEMKTYYERRTALGKRHMGIMNEVKFKLVLRMFAVVNKGEVYVKNLKPAA

SEQ ID NO: 54049 - protein, 318 aa, unidentified
MDKDITRTAGIDTGKDRLDVAVHGGGDPFGVDNTPAGWQSLAARLAEAGVRRVGIEASGGYERGIARHLQAQGFIVVVLQPLQVRSFAKLHLQRAKNDRIDARLIAACTHLLDGQKAKAADPRLDGLCDQLTFIEQVEADIARLKTRLEHIRDDRLRDIVTADIDRLRARRADELKRLIAALRTHADLARRFDLVLSVPGIGERTALALVLRLPELGAVSREQAAALAGLAPFVQQSGRWTGETHIAGGRSRLRRSLYAAALPAAFRWNPALKALYRRLVERGKPHTVALVACARKLLVFANTVVARGTPWTERPVAA

SEQ ID NO: 54050 - protein, 403 aa, unidentified
MDTTVSDFMKGRYNLMIYIGIDIAKFNHFAAAISSDGEILIEPFKFTNDYDGFYLLLSNLAPLDQNSIIIGLESTAHYGDNLVRFLISKGFKVCVLNPIQTSAMRKNNVRKTKTDKVDTFVIAKTLLMQDSLRFMTLENLDYIELKELGRFRQKLVKQRTRLKIQLTSYLDQVFPELQYFFKSGLHQNSVYALLKEAPTPNAIASMHMTHLAHILEVASHGHFGKEKARELRVLAQKSVGVNDSSLSIQITHTIEQIELLDSQLFHTELEMANLVTCLHSVIMTIPGIGVVNGGIILGEIGDIYRFSEPKKLLAFAGLDPSVHQSGNFQAQRTRMSKRGSRVLRYALMNAAHNVVKNNATFKAYYDTKRAEGRTHYSALGHCAGKLVRVIWKMLTDEVEFNLE

SEQ ID NO: 54051 - protein, 435 aa, unidentified
MRKPDRQGFSTGLCYDLERFVRSYGATGEVMTALLQDIRATGCPMSQASDLTRCLAPYDQATTLIAVIELSLSSWLIAGMVPGLERQPLKKIAPDEAELLRLLERWREEAVKAGSVINRLSVAFEAGRDGFWLARWLRTRGIDAHVIHSSSVAVSREHRRAKTDRLDTALLMRVFIGWLRGERGHCSMVAVPSIEEEDAKRPNRERENLVGERTRIINRMKSALARLGIRGFKPELRKALQRLDTLLTPEGTPIPVNTLDEFRRDLARLALVRQQIDAIERTRIARLEAAPKTGPHAMVRLLANILGLGIETADMLVNEVLSRNLRDRRAVARYAGLTGSPDESGKKRRERGLAKAGNARVRRGLIQLAWRFLLFQKESALVLWFRARTESAAGVRKTKLIVALARKLLIALWRMVTTGEVPAGVVLRPSTQSGP

SEQ ID NO: 54052 - protein, 349 aa, unidentified
MGEVSTIGLDIAKNLFQIHGVDADGTVVIRKRIGRARVLEFFADLPPCRVGMEACATAHQWARELRKLGHDTRLMPPTYVKAYVKRGKNDAADAAAICEAVTRPSMRFVPIKEVEQQSVLMLHRARDLLIRQRTQLINALRAHLAELGLVAAKGREGLHQLVAVVTECGNERLPGNARFACQAIVTQLHAVQIEISGLDKRITQTHRANADSKRLDTIPGFGVILSTAVAATMADPKAFRTGRDFAAWIGLVPRQNSTGGKQRLGSISKQGDRYLRRLLVVGATSVINSARARPYKYPWVVELLGRRPTKVVAVALANKMARIAWAVLAKGKPYRAPTCSSNAVALAPA

SEQ ID NO: 54053 - protein, 320 aa, unidentified
MTYIGIDVSKDSFVAAYPKKSGYSTKTFLNTTSGVRQFISSLPEDCHCVMEATGNYSMLLLYLLQQANITVSMENPQKIKHFARAMLSTTKTDEIDAKLIAMYGEKMNPAPYKIPSESIILLKQKRTVLRQLKKQLTAILNLQHALSALPKQDPTSKVTVEKTISFLRKQISKMEEEITNLSNNEFNRQMTLLTSIKGISNTIASALITATGGFSYFSSAKQISRFLGLCPTYQQSGTSVNVKGHINRNGDTYLRSQLYIAACASLRCNTACRETYERLRAKGKSGKGAIIAIANKLIRQAFAIVTNNRPYIDGYVSTFA

SEQ ID NO: 54054 - protein, 462 aa, unidentified
MSKLSKSNTALEEARPFQAMSKVNDNTAGVDIGAHEIMVCIPGPENTQLVRSFGNYTVDLYAIAKWLGEHAIHTIAMESTGVYWIPLFEELEQHGFQCLLISSRSLRRVPGRKTDVIDCQWIQTLHTYGLLSGSFRPEADLVALRTLLRHRARLLEHRAPHILHMQKALLQMNLQLSQVLTDITGETGMHIIRAIVGGERDPYKLAAMRNHRCKKDEEEIAKALTGTWRAEHLFVLEQSLALYDFYTQKITECDTEIEKNYSVIRPGLQSNESPERITDRRFSSKHRSKNAPKSEQELRAHLKRICGVDLAAIDGISVSLAQTIASEIGTDMSKFPNEKHFCSWLSLAPKNEISGGKVLISRTLKSKNRAGQAFRLAVVSVMRADCMFGVFYRRLKSRLGPAQATVATAHLIARVVYRMLKYQVEYEPLSVAEYEKRYRNQQIKYLERRANKLGLQLMPVAV

SEQ ID NO: 54055 - protein, 343 aa, unidentified
MSGAYDGRQIVGMDLHRRRSVLVRMSETGEHLETVRISNDPEHLREVMTRAGEAPEVVLEAAYGWYWAADALAELGATVHLAHPLGVKMFGLRRVKNDERDAADLADLLRMGRLPEAWIAPPATRELRGWVRHRAKLVALRSGLRCQIHAVLASAGMQVPMSDLFGVSGRELLTTATLTVESRSRVESLLRIIGALDFEIDLYTKLVASRLRTDPGYHAIQAIPGVGPVLAAAFVAEIGDITRFHRPAELASWAGLTPRHHESDTTVHRGRITKQGSRLVRWAAVEAVQRVPARTRLGQRRDRVAERRGHNIGVVAAARDLITLVFYGLRDHHVRCLPTKAAP

SEQ ID NO: 54056 - protein, 311 aa, unidentified
MKKVYIGIDVSKSTLEVDLLDGSTRTFANDKAGHRLLARALSALGGKGAVAVYEPSGGYERAMALSLSCSGVALCMASSSRVRQFARSQGIAAKTDALDAQVITRFAQASRLEPKALSGSALSAVRELLRRRESLVEMVKAETCRGSQQAQRVCLSQGKRMVALLKRQIAELEKEIRRIVAEDADLANKVGRLESVKGIGWLTAATALVELPDLGTMGPRQAAAMAGLAPFARDSGKSFGKRHVSGGNFHLRKALYMPAQCAKTHNAHLRAFYLRLRENGKPFKVAITAVMRKMIVLMNRLLADPNFQPSL

SEQ ID NO: 54057 - protein, 341 aa, unidentified
MKNKSFIGIDISKNVIDASIFCEGTPIKDFPHAVFNNSRKGFGEMCTWLKKNHVVLSNCLFGMEFTGSYSMELEKFLYARNYQFCMLSTHVVKHYPMGSKDKSDKIDSAKIADFLYRYNGTECVKPYKMPDKTMQRLKTLMNERKFLVEQRTCFMNRRQLCITKEDAQLYDGYIKKFSRDIENIELEEQKLLATDDSLLSTYKNLLTIPGIGFVNAINAIVITRNFTAFETARQYASYVGVAPHSHTSGTSVRWRPRPSARCDGQAKADLSMAATVAVQYDAELQSFYNRKLGGKQDSDTKRKALNAVKFKLVLRMFAIGKQNRKWEPLDSKSSNEKLAIS

SEQ ID NO: 54058 - protein, 384 aa, unidentified
MSATPKGAADVVMTGVRSPESADVEVVLGVDTHLDFHVAVALDNLGRRLGELTVPTTTKGYKRLVSWAEDFGPVRCAGVEGTSSYGAGLARYLTATGVAVVEVERPKRRHLRRNGKSDPIDAEAAARTVLAGETAGAPKSADGRVEMIRALRTARRSAVKARGQAANQLQALVVTAPDALRERLRRLSTRRLVAAACRFRPGTQPETPEAATKLALRSVARRHEALSEEIAELDVQLDRLVAEAAPELLALPAVGTDHAATLLIVAGDNPERLRSEASFASLCGASPVEASSGKVVRHRLNRGGNRDANRALHMICMVRMGQDRRTREYVARRTAEGKSKREILRCLKRYVAREVYRVLVVAVEASPLTTGYPGASSGRLSVMS

SEQ ID NO: 54059 - protein, 392 aa, unidentified
MYIVGIDIGKNHHEASIVSPEGKQIGRSLRFATTHKGADSLMSFIFKNIGNSPCVFGMEATGHYWYPIYSFLKAKGYTIYVINPIQSDSLRKMYIRQTKNDSIDSFLIAEVIRFGQFGTTSMADENILAMRQLCRYRDSVISSRTEIKLRIGTIMEQIFPEYEKQFSSLWVSTSMGILEKYLTPENIENAPIDELFEIIKDKSHNKLTMKKAFSIREAAADTFGIKIAQDAFSFQLKQLIDRMNFLDKQIEALDIEIMKYYEQFDCYLHTIPGIGIIGAATILAEIGDISRFKNSSALVAFAGIDPTVRQSGEFNSTHNHMSKRGSPYLRHAIFLAATTCSFHNSPLNAYYKKKRDQGKHHLTATGAVARKLTTIIYAVLRDSKPYEPKKFC

SEQ ID NO: 54060 - protein, 355 aa, unidentified
MEGTKYIGMDVHKDSISIAVLNSSGKLVMESIIETKAITILEFVHGLRGSLHLTFEEGTWAAWLYDLLKPHVTKLVVCDPRRNGYLKQGSKSDRIDARKLAELLYSNMLRPVYHGEHGVRSLKELARSYLTITKDQARVMTRVKAVYRSWAIPCAGKQVYGQRHRLEWLGKIQEPGVRRRAEFYYAELDALRSLRLVVRSELLLESKKHNVSTLLSQIPSIGPIRAALLIALLQTPDRLRTKRQLWAYSGLAIETHDSAENQYVNGQLQRSKKQSSIRGLNSNHNPDLKNLFKSASAVAAVKTGPFQKFYAALIGKGIKPEMARLTLARKIAAITLIVWKRGVSFDARYLNPQTA

SEQ ID NO: 54061 - protein, 404 aa, unidentified
MHRFAGIDWASAEHAVCVIDEHARVLHRAMVAHTREGLAELVAALRKLAKGSVLPIAIERPTGLLVDTLVEAGFQVVPIHPNAVKASRPRYAAAQGKTDHGDAFLLADLLRTDGHRFRPLRPLSDETRALRALVRTRDDLVAERLSLANQLRALLERFWPGANAIFAEVDPAIALAFLRCYPTPQSAERLGEKRLAAFLERHAYSGRRSAAELLARLRAAPTSLTGEAEANASGELVLALVAVLEPLVAQIHRLTTAVEHAIETHPDGALFASFPRAGRVNAAQILAELGDDRARFVSEEHLAAEAGVAPITRASGKSRAVSFRWACNKRMRSAITCFADNSRHDSAWAAGVYRSARARGCDHPHATRILARAWIRVLWRCWQDHRPYDPALHRAAVPAEAAAV

SEQ ID NO: 54062 - protein, 425 aa, unidentified
MNYKQNEKINQVKESTLVVGIDIGSTTQYARAFDWRGIELGKVFPFSNSREGFESFKAWMQHLQDKYRKSDVIVGIEPTGHYWFDLGAYLEDEGILLVMVNPYAVKQTKELDDNSQSKNDRKDPKVIAKLVTEGRYSAPYTPDGVYADLRIMVANRKRLIREMTQIKNRFARWFAIYFPEYTDVFGDYEAQSSMLLLKKVCTPEAIVELGAEKINQIWRDAKLRAVGMKRATTLCETAKRSIGLKKGSSAARYEMKLLLEDYEYKKAQLDAVMEEIEKLCRKIPESEQMLAIKGIGVITVAGFLAEVGDVRRFESPRQIQKLAGLSLRENSSGKHKGQTTISKRGRSKLRAVLFNAAIPLIAKNPEFKSLHEYYTTRANNPLKKKQSVIAISCKLIRVFYAILAKGVTYDAQKLISDIHRQPQVA

SEQ ID NO: 54063 - protein, 343 aa, unidentified
MKSYVGLDVSLKQTSICVVDERGSFVREGVVISDPEAIAAFVRLNAPGAARIGLETGPTTTWLWTELKRLDLPVICIDARHAKAVLKMQINKSDRNDAAGIARIMQTGWFKEVRVKDIDSHLVKALLVSRALLVKIKRDLENQIRGLLKNLGLVIGRGKFNVFAVRTEELIEDRPELVAVIRPLLAARKAIEEQVHNLDRRVLKLARHDMQVRRFMTVPGVGPVTALCFTATIDDPTRFKRSRSVGAYVGLTTRRHASGEVDWSGRISKCGDAMLRMYLFEAAGVLLTRVPKWSALKAWGMRLARRNGLRKAKVAVARKLAVILHRMWIDGTEFNWSKKEASA

SEQ ID NO: 54064 - protein, 393 aa, unidentified
MRELWAGTDAGKGEHHCTVIDINGTKALSRRVPNNEPELLELIADVLAISQNMTWPIDLNAGGAALLITLLVNHDQKLLYIPGRTIHHASAAYRGDGKTDAKDSYVIADQARMRSDLQPWAAGDDISVDLKILTARRYDLTADRTRAQTLEYFPALERAFDYSGSKAALVLLTGYQTPAGRRRMGTSRLAAWLKNRKVRNSATVAATATVAAESQHTSVPGEKLSAAMAVRLAKGVMTLDDEIAEIDALIESRFREHSHAEAILSLPGMGPLLSAEFIAITGGDMSAFGTCDRLAGVAGIAPVPRDSGRISGNLHRPRRCNRRLLRVFYLSAQIAARCCPVSKKFYDRKRGEGKEHKQAVLALARRRLNVLWALIRDNRTFELNPPRVGSAAA

SEQ ID NO: 54065 - protein, 438 aa, unidentified
MSNKVIFNLDELFISVGIDVGADFSWMSIALPNQQFVGKPYKILHNSIDSLTTAVSKIKEAEELYSLESRIFLESTGIYHYPLFCYLRDKGFNCSVINPIITKNSTNINIRKVHNDRFDSKKAALVGLKPDLKVSLMPSDLALNCRNLCREYYDLMDNRSAYVNKLQGELRMAFPQYLGIFSKVTINTSLTLLETYTSPSAFLEADKQEIIGIIKSTARFGLTYAQNKYNAIIQAATDANQFGYIIDSNIKRIRLYISFIRKYDEEINSILESLHELVDANEDSDFVKQIHLIETFKGAGFLSAVSIMGEIGDFSAFSKPKQLFAYFGLDPSVKQSGKFEGTKVQMSKRGSAIARRVIHTLTLQSISISRNREAKNPVLREYYLKKCDSKPKLVAMGAVSHKVCNMIFAILRDNKPFKIIAPQEHIQQYNAAKCDIAA

SEQ ID NO: 54066 - protein, 345 aa, unidentified
MQTITTVGLDIAKSVFQVHGVDAQGKVIVRRQLKRRYVLAFFQKLPPCLIGIEACASSHYWSRELQALGHTVRLMPPAYVKPYLKRQKNDSADAEAICEAVTRTNMRFVPTKTVEQQSCLMLHRTRHLFIRQQTAVINAIRAHFAEFGIVAPVGRTGVEELLKIASDGNDKRLPDVARVCIAALGAQLQMLKARILEFDRLIMAWHRSSQVSKRLDELPGVGPALATALVASVADPKAFRSGRDFSAWIGLVPKQNSSGGKNKLGGISKRGDRYLRSLFVAGALAVIRYAKKRGSKNRPWLAALLARKPTKVAAIALANKIARMAWAMMAKGERYKQPAALAAVW

SEQ ID NO: 54067 - protein, 366 aa, unidentified
MKKSSTVAIERIQIFKENQLTIGLDLGDRISHYCILNEAGEVILESNLPTTPKGIEEVFGRIPRSRVAFETGTHSPWVSRQMTQLGHEVIVAHARNVQMISESSRKDDRLDARTLARLARIDPGLLGPVRDRSAKAQIHLTVIRARATLVGARTALVNAARGLTKSYGARLPKCGSEQMNRETAKGLSQELRETLDPLLAEIESLNERIAEYDRRIEKAAKEVYPEVALLRQVKGVGTLIALTYVLTLDDPQRFRCSRDAGCFVGLRPGRRNSGMSEPQMHISKEGDRYLRTLLVQGAHYILGPFGQDSDLRRWGLKLAERGGKNAKKRAVVAVARKLAVLLHKLWVSGEVYEPLRNNHKVVVAAA

SEQ ID NO: 54068 - protein, 410 aa, unidentified
MRKENIIYVGIDLHKETHTAVMLNCWNQKLGEITIENKPAEFHKLTRKVSRFVTEEKTSIYGLENAYGYGRILAVWLVEKGNIVKGVNTAMSYAQRKSVPMYQKSDSYDAEAVALVLINMLDRLPDAIPDDKYWTLSQLVNRRDNINVHQQKLKNQLHEQLCMAYPSYKKFFEDIGRPTALYFFGEYPSPVHLRGKTAEGLAGELRPVSHNNCSVKKAEKILELVRTDGETLRDCQESRDIITRGLVRDLQHYREQMLEVETAIKELLPYFHCTLMTMPGIDIVTAAEILSEIGNIERFPNASKLAKFAGIAPVNFSSAGKGKDVCPKQGNRRLQAIFYFLAIQMVQVSPSGTPRHPVFREYFQKKQDERKNKQQALICIARRLVNIVYGMLKNHTEYREPERRTEEETV

SEQ ID NO: 54069 - protein, 449 aa, unidentified
MSGPQVIDDEEHERVHERVAAIDVAKDSGMVCTRLPHPARPGARRSTVWTVKARMGAIRTLGRQLSRDGIEVVTLESTSDYWRIWFFVLEACGLAVQLVNAAQAKSLPGRPKTDRLDAMWLARLTEMGLLRASFVPPKAIRDLRDYTRMRTRLIQERTRCFQRLEKLLESALVKVSSVASKLTTISAQDMVKAMVAGQRDPLVLASLARTSMKAKREELAEALDGMFDDHHGELAGMLLDQIAFLDQRIAALSARAAGLATAMPAAWGVDGDGTTGLEAGAGPDAAALPVVARLTEIPGVSPDLARAIIAEIGLDMSRFPTAAHLVSWAGLCPSARQSGPRTRAGKKGQGDTWLRSALGQAANGAARTATFLGERYHRIARRRGKVKAQVAVARSILVIIWHLLSDRAARFTELGHGYYQARLDTDRKLRNHIRQIQALGFDITITKAA

SEQ ID NO: 54070 - protein, 424 aa, unidentified
MKVTYQTCCGVDVHKSFLVATIVKTTGGIEPSYQKKRFSTFNNSILEFKQWLLDNDCHDVCMESTGKYWVPVFNLLEDEINVVIANPKWVKAVKGNKDDTKDSKWIGDLFRLGLVKGSYIPCKKVRILREYTRYRYKLVSCRSSEKNRYQNALTVCNVALDSVVSDIFGKSSTSIIDYLLEQSGTSINHEEIASKLLRSLKSKEDAVIESVEGYQMTDAQKYRMRLVRAHMDYITAEINDVDKMIENMISSNPDFENAVQFLCTIPGVKRDSAITIISETGTDMSQFSSSKRLCCWAGLTPGNNESAGKKKSVRITRAGVYLKPALVQCAHAAVKSDKSPYYKKKYESLVKRRGKKRAIIAIARMILTAIYQMLSTGEQWNPSDLYKIDMPATLVEKQKAKAIKQAKKLLQREGLLPPDEPLAS

SEQ ID NO: 54071 - protein, 321 aa, unidentified
MTKDRKIYGIDISKNVFDVYCLATGHSQLKNDEKGFKNFLKTLPPTALVVMEATGYYHYRLAQFLHKNGVAVSVVNPLSVKRFIQMKLAKVKTDKSDAKAIYEYGIMNDLPIYSALTDVQAECLQLFRLLDNYIKQRTATKNKLHGEDVLGVPSSFVYRSLKRQLKHLNKEIDQLEKRLLELVKQDQQQQLTLLKGIPGMGLKTALFLIVITDGFRKFETASQLCSYVGITPTIRESGSSVRGRSRISKVGNKKLRNLLFLCAFSACKHNKACRDIYERIVAKGKSKKLALIAVSNKLLKQAFAVAKSGLPYDENFVSKLA

SEQ ID NO: 54072 - protein, 417 aa, unidentified
MNNIIMVPNTLILGIDIAKDNHYGQFIVNGEYIKKPFLIKNTKESFDCLFEIMKELTEKYGTVHTLVGMEPTGHYWKNIAYYLKNRGISLCLVNPYHVNKTKELEDNSPTKNDKKDSRVIARLIYQGQYLTCMFDDELYVNLRIASNSRQDLKKQLIREKVRLIALLDEYFPELRKLFSDILGKSSLEILKKCPFPKDIRGTGIDKITELLKGATQNRVGIKKATLVCEAAENSIGVPVGLDGARYRLNLIIKNLENIQKQIDDIELIMQKYLIQTGYSEYILSVKGIGIVTASSFLAEIGDVSKYDDYKQIQKVAGLNLKETSSGNKKGKTEISKRGRPNLRNILYQASLVMVAKNEAFKEVYEHLTKRNNNKLTGKQAIVALSVRLIKVLYVLCTKKELYSNDKVHGLESYQKVA

SEQ ID NO: 54073 - protein, 394 aa, unidentified
MKLIGIDIGKNKHFFCIMDQQTGEIISQPISFSNDKEGFDFLIQKIKSYSKDSVLIGMEDTGHYHFALLKYLLDLQYTVALINPKTTDFNRKMQGGITKNDKLDTINICDVLDTPERKKQYRISKVNSFDLYEQKQLTRHHHNLKEEENVYKNRLQKCIDIVFPEFNKLFNSKYGTVYMNILKTFGSAENVANTDIRTIRKCFEIEGRGNRISLTPERLKECARSSIGISSSAEVIQIKHLTAQIELIEEQLTEIDKKIEEFSIQNNSPILSIPGISHFSGTSILAELGDISNYSKPSQIIKFAGVAPLHYESSQFNAQHTSITKKGSKYLRKTLYQIILPVIRHNQVFYKYYQLKISQGKGHRCAQGHCVRKLLRIIYHLLKTNQQFDPQLLR

SEQ ID NO: 54074 - protein, 307 aa, unidentified
MSTATLVGIDLGKHSFHLHGQDKAGREVFRKKTTRQQMMRLLGNLPSCTVVMEACAGSHLLARQLMAFGHEVKLISPQFVRPFVKGNKNDFIDAEAICEAASRPTMRFVTPKTEAQQTLSVLHRMRESLVRDRTKTANQAHGFLLEFGISLPKGLSLVRWLPCTLGEHELPPRLATLLKRLHEHFCYLDEQIRALDKEMDNQLAADDLGSRLLSIPCVGPITASLLCAEMGDGKQYGGSRDFAASVGLVPRQYSTGGRANLLGISKRGDKNLRRLLVQCARVYLQRLAFQQGALADWVRSLRERRHS

SEQ ID NO: 54075 - protein, 421 aa, unidentified
MSYRIAAIDIHKKVLMVVVVTAAEEVADATGEALEFACRRFGTGSSERSQLVAWLQQRGVVEVVMESTAQYWKPVWLDLEPHFAKLHLAQAHSNRAPKGRKNDFGDAKRLGRRLLAGELLLSFVPDAEQRNWRTLTRSKQQLVRDRVQLHNQLEALLEEMRIKLSSVISDLLGVSGRRILTALAEGEADPVKLAQLGDERLKCTQAELTDALRGAPMPVHLAVLRLFLKRLTLLDEQIRELDKLVAEELKKHEEAVLRVTEIPGFGVDSAQQIIAEVGVDAETFPSAAEFSSWVGVCPGSNVSAEQNHSSRSPKGNRFVRRILTQAAQAAVRKKGCHFQSVFRRFLPKLGYNGAIWAIAHRLAGVLWKILHNGVRYIEQGNETNPRAKKRRAQKLAQALRRLGYAVTLTPISPDAPVADQG

SEQ ID NO: 54076 - protein, 427 aa, unidentified
MNEIESNSIDRFRQFKKEIRGSKEHLIVGLDIAKRKHHGFLGDANGRTLLKGLIVENSAEGFRHLLTQVRFYMDREGLSRVVFGLEPTSVYHKPLAEHLIEQGHLVVYATNEAIKKNRSLIDGRWDKNDTKDSANVADLVAQGKCHYYDLPELRLRDLRILLLFRKRLKKQLHSCRVRIRNNLVAQYFPELDELWNTAEAENLAIVQWYLDPARIRQLSCEQFIAKVTTHNGGLRQQRRLRCIWEAAGTSIGCQPGPALALEAELVVDALKFVRQQLDRVERAIATLAEGFEEYSYLKTIPGFGPYVAAMTLASIGNPHRFENRAQLIRLAGLDLSANRSGEKSRSAVPVISKKGKADFRYALYQAALVASSLTTDFRAYYHRLLEGRQRESGIRTKMLVKIAAKMLVIAWTLMKRKEPFNPAYIQA

SEQ ID NO: 54077 - protein, 340 aa, unidentified
MNATTYGMDVAKRVFQMYWVDGDTGEIVNRRFGREQLIQYLSRRPPGRVAMEACGSAHWWARKIKALGHDVVLMHAKFIRPFVQTNKTDAADARAIWTAVQQPGMRTVAAKTEEQQAMLSLHRIRCLLVKFRTMQVNQLRGLLYEFGASFRAGRVAGLAEIRARMAELEEALPGTMMCCLQDQLRRIDELQTEIDQLERRIDAWQKHDAACRAIAAVPGIGKLTATALVATMGDAGTFKSGREFAAFLGLVPRQSGTGGKVRLGCISKRGDPYLRTLLIHGARSVLWHTKVPTAWQSAIQARRPANVAAVAVANKMARTAWAILAHGRVYQRDHVGVRPA

SEQ ID NO: 54078 - protein, 378 aa, unidentified
MAKHRLAFVAFDSAKEKHAVAIADDGRDGEVRYVGEIANSPDTIKKLVRRLSRQYEQLHFCYEAGPTGYGLHRQLSDLGHVCDVVAPSMIPRRSGDRVKTNRRDAITLVKLLRAGELNAIWVPDIVHEAVRDLTRARETAMIDLKVKRQQLLSFLLRHSRNFPGKKNWTKMHARWLATQKFPHPAQQIVFQDQIEAINAAQVRLLALEQQLREIVPTWTMAPVVAAYQALRGVSFLVATTFVAEVGDVRRFAAPQHLMAFLGLVPSEHTTGDTVRRGSITKTGNRRARRVLIEGAWTYRYPARVSETLRSRLEGLPVGVRTIAWKAQTRLCARFRRLIANGKTAPVVATAIARELAAFLWAIGHQIAPMAPENHQLKA

SEQ ID NO: 54079 - protein, 341 aa, unidentified
MSDYSYFCGIDLAKNHFSLHAVDQNAKVILHKSVTRSKLLTTIANMPLMRIGVEACGGAHYWARTLNKLGHDARIMAVKYVIPYRTKGKNDLNDAVAICEAVQRPSTRFVPVKSPEQQAILSVHRMREHWVRERTALMNRMRALLSEFGLVIPVGRSSLMKQVPLMLEDAENELPHLARTVIADAYHHLGELNQRIADTEQVFDSFAKVSANVQRVMKVRGIGPQTATAILASIGNGSQFDKSRDFSAWLGLVPKQYSTGGKPRLGRITKHGDKYLRTLLVHGARTVIANLGDKQDKLSQWCRGVLERRGMNRAIVALAAKNARIIWSLLHNQTEYENYAA

SEQ ID NO: 54080 - protein, 409 aa, unidentified
MQVVHEVCCGLDVHKKTVTACVVWATGRRRQTREFGTFTRELLELSDWLRASGVTHVALESTGVYWKPVWNLLEGQFEVLLVNAQHIKAVPGRKTDQKDSEWIADLLQHGLLRASFVPPTPTRELRDLTRYRASLTQEINRIANRIQKVLEDANIKLASVATDTLGASGRAMLEAIVNGEQDSQRLAEMSRGLLRNKIPQLQQALEGRVTAHHRFLLRELLDHHYFVESKMKRIEQEVAERLGPFQSEVARLCTIPGVDRVTAWGLLAEIGLNMNQFPDAQHLASWAGLCPGSHESAGKRKSGKIRKGSLWLRRCLCQGAWAVSTKKNNYLSALYRRLAARRGTKRATIAVAHNLLVIAYYILRDGTCYRDLGPDYFDRLNPEGLRRRLTKRLEGLGFKVTLEPLAQVA

SEQ ID NO: 54081 - protein, 371 aa, unidentified
MTQSNILFIGMDVHKDSIVISLADDNRTDIRRYGSIGGSLDDFKKTLRKLVATGKTLFFCYEAGPTGYELYRYITSQGHQCIVVAPSLIPKKPGDKIKTDKRDADNLTRLLRSGDLTAVYVPNAEDEAIRDLSRAREDAVLVFKCAKQRLKSFLLRHNIRFNGSANWSEKHLHWLAESVNMPYPAQKVVYQEYLNSVTEANDRVKRFDKEILFHTKQWRLYPIVQSLMALRGVRMVVAVTMIAELGDLTRFENPKQLMCFLGLTPSEHSSGDKNKKGAITKTGNQHARRVLVEAGWSYRFHAKVSKEMQKRQDGTPLKVRDIAWKAQLRLTKRFRMMANNGKPRNVIVVAMAREIAAFMWAIAQEVPIAPR

SEQ ID NO: 54082 - protein, 343 aa, unidentified
MKEVTTIGLDLAKNVFQVHGVAGSGETVIRRQLRRRQVLPLFKKLPPCLIGVEACATSHHWARELQALGHEARIMPANYVKPYVKRNKNDAADAEAICEAVTRPTMRFVAIKSPERQSLRKVHRTRSLRVRQHTMLVNAIRAHLAEFGVVAPVGRRGVTALLTIISDREDERLPVLARTCLESLVAALTTVEREVASNERRIHLWHRSSEISRRLETIPGIGPIIATALIASVSDPSVFKSGRELAAWIGLVPRQNSTGGKERLGRISKQGDPYLRWLLVAGAMSVIRHGRKTAFANNPWLGDLLHRKPTKVAAVAMANKTARTAWAVLATGEAYRRPAVREA

SEQ ID NO: 54083 - protein, 405 aa, unidentified
MGDIVEVAWVGIDAGKVSHHATLVDADGTIVWSRQVRNDQAAVEQLIAKAAATATTVRWAVDLTSAGAALLLALLIAAGQRVVYVPGTVVNRMSDTFAGEAKTDARDSYVIAETARLRRDLTELITPNELVAELALLAAHRADLMADWVRGVNRLRELLTRVFPALERSFDYTTRSALILVSRYSTPDAIRDADADQLAAYLRSEEAHRPSIPGMVAKAHAAAAAQTVRLPGEAATAALITRQARKLLDLDREIKDFDKQITERFRAHPQARIIESMPGMGPILGAEFIAITAGDLAAFGTAARLATYAGLAPVPDDSGKRKGVRHRPRRYHRRLRHVFYMAAFSSLKTDGPSREFYARKRSERQRHTRAMIAPARRLVDVLWALLRDNRTWQPEPPTPLPATAA

SEQ ID NO: 54084 - protein, 482 aa, unidentified
MKAKPPEKIQETTNPSTRGHWNEMNRKQRREMMRQIQSEDISLEVVHPDAAGIDIGNESHYVAVPPSRDNQPVRCFACTTTELKAMADWLKQCGIRTVAMQSTGVYWIALYDILEQAGLEVYLVNARETKNLPGRKSDVQESQWLMKLHTYGLLRNSFRPSQEIRTMRTYWRQRNDLVQSAGRHVQRMQKALTQMNIQLANVLSDVSGVTGQAIIKAILGGQRDPHKLAEFRHPRVRASEEEITRSLEGHWQEDLLFVLQQEQDGYEFCQKQMAECDRQLNHYLEQREDRSQGAPLPEEKRKGRRKKKSGNKPQFDLRTGLFRMSGTDLTRIDSIDVMTATTILSEVGWDMSKWETEDHFVSWLRLCPDNRISGNRVIGKGRLPTNNRVTIALKMAASSLRLSDTYLGAQFRRFRTRLGAPVAIKAMAAKLARLVYRMLRYGMKYVDKGAATYQTQHRQLQIKQLKWKAATLGYQLIGVPAA

SEQ ID NO: 54085 - protein, 427 aa, unidentified
MPYRIAGIDVHKKMLAVVVADVEVDEEFHFERQKVGTTPADLRRLADWLVEHEVEEVVMESTAQYWRPVWEALEQHWRPRRRARDGAPRLAGTLHLAQAQSNRGPGGRKRDFPDAERLLKRLVAQELTLSFVPDVEQRLWRTVMRRKYQVTRNRVQLQNRLEALLEEAHIKVSSVVSDLLGISARRMLQALADGETDPAALATLAAPRLRATPAILCDAFQACPTLHPVYRRLLKLTLEELRVIEDHLGQLDQQMADLLAAHHDAVQRLAEVPGLGVDSAQQIIAEVGATAAPFPSAKHLASWMGACPGNEESAGVNYSHRCPKGNRQMRRVLNQAANAAVKAKGTIFAVVYRRIVPRLGHAQAIGAITHRLCRLIWKILHQRIRYEERGPAVSTEAKKVRARKMIRELRSLGYRVELPTPPLGHPA

SEQ ID NO: 54086 - protein, 413 aa, unidentified
MLDSSAVESTAADGVFVGIDWGNAHHQMCVLDTTGQVIAQARVTHDVAGLGEIDRLLSRHGTVAGIAIERSEGLLVERLQQQGHRLFCVSPKMSARGRERYRLAPTKSDAFDAFVLADMLRHEHRHWRSLSVPSPLLAELRALTRDRERLIWNQRDVENQLRAVVLTYHPGVLHLFSSLDRDITLAFLRDYPTPEHASRVGPARMAAFCARHGYSGRTRPELLVERLRTNLVSASAGTTAGKAFSAGLFVDQLELLNTQVRAITKRTRELVVTHPDAEIFLSFPGMGHVTAATMLAEMGEDRTRFPTADVLLAETGTAPVTRSSGRTRTVRFRYAANKRMRHAIDWWAFVSVRENDWAHDAYQQARGRGQLHNRALRGVGARWTRILWRCWTDHTTYDPAVHIKSQPATTLTA

SEQ ID NO: 54087 - protein, 343 aa, unidentified
MKKITTIGIDLAKNIIQVHGVDRRGKAVMKKQLKRNQVISFFANLPACRVGMEACGSAHHWARKLEKLGHMVKLMAPQFVKPYVKTNKNDVADAEAICEAVSRPTMRFVPVKTGEQQAVLALHRARQGFVKARTAQANQIRGLLGEYGIIIPQGIVHVAKRVPDILEDGENELPGVFRQLLGRLAEHLNELDRQVGELEVQIGSWHRDNEASKRLAQIPGIGPITASALVASIGDAKSFKNARQMAAWLGLVPRQHSTGGKPKLLGISKRGDAYLRTLLIHGARAVLRVAERKANYADSWLANLLSRRPKNVAAVALANKNARIVWALLAHDREYEAEYELAA

SEQ ID NO: 54088 - protein, 400 aa, unidentified
MLSIGIDVSKGKSTVCGMKPGGEIVYAPFEVQHTREGMSELVLLLHNSGEEVRAVLESTGSYHCPVVAALLENGIFVSVVNSLRMKRFCSQSIRKVKTDQIDAMQIALYGLAYWQELQPTKLPEDTYRELQLLARQYYQMTSLLIKAKVDFNAICDQVLPGMQELMNDHAGRHKLSDFVLRYRHTTHILEMGETRFRKDYCKWAEKKGYRNCERMAVLIFATAQNGIPVLPNAPSTQIVITEAIRVLHTVEASRDAILTQMQALAKTLPEYSLVREMPCIGDTLAPRLIAEIGDVRRFHSKRALIAYAGIDAPPYQSGKFCANNRHISKRGNRYLRKTGYEVMQSYVMHKPANDPIFTFIEKKRGEGKSGKLAMVAGLNKFLRVYYGKVTELYRSLPAIE

SEQ ID NO: 54089 - protein, 378 aa, unidentified
MNRIIKIGMDVHTTNYTLCIFEPSFEHDGTVHCITQVKPEVKNIIHVIETFKKKHENEELNIVCGYEAGCLGYSLYHELKEKGIECVILAPTTMKTEKGGRKLKNDYRDAKMIAECLAYGGYSAVHVPTELDNSVKEFIRMRDDIKENLKSIKQQIIAFLTRNGKQFEGKSFWTRKHIDWINTVSFSEPLLQDTLKEYMIEYNHLCDRVETLDRQIEEISLKEEYVEKVQQLQCLIGIKTHTALSLIVETSDFNRFKKGNMYSAYLGLIPGDDSSGGHEKKLGITKAGNSHLRKLLVEAAQGYTRGKVGFKSKDLKSRQEKCSSEVVAYADRANERLRRKYYRMTLRGKRFNVAKTAIARELACFVWGIMTDHIDLCS

SEQ ID NO: 54090 - protein, 355 aa, unidentified
MCGLKHQKEKRSMDYFAGLDVSVKETSVCIVDDAGKIVREARVASEPEALLQVLTNTIYRFKRVGLEAGPLSQWLYSVLAEAGLPAICVETRHMRAVLKAQINKTDRNDARGIAQMMRVGLYRPVHVKTLRSQKLRMLLTHRKLLQSKAIAIENDLRATLRNFGLKVGMVGTVKFEARIKELVENLPDLAVLVEPLLIVRRVVREQLGILHRRLLAIVRDDDVCRRLMTIPGVGPVVALTYRVTVDVPARFRNSKAVGAVFGLTPSKYQSGENDRTGAISRCGDEMMRMMLYEAAQSMLVRSTKWSWLKAWAMKVARHRGMKKAIVALARRLAVIMHRVWVDGTEFRWTREVAAA

SEQ ID NO: 54091 - protein, 355 aa, unidentified
MDAIETEPEVILGVDTHLDCHVGVVIDVRGRVQGTLSIATNAEGYQKLLDWALSFGCLHRAGVEGTGTYGAALTRVLEGRGVRVIEVNRPDRSRRRLRGKSDPTDAESAARSVLAGQAQALPKSQNGLAEALRTLSVARRSAVKAKTPAMNQLRSLLASAPPWLRERVLQAKPAQCVAACEALSECDSKTSPELASLQLTLRLLAKRWVALEQELQVLDRQFGRLTKLAAPRLLSRFGVGPQTAATLLLTAVDNPTRLRNEAALAALCGVSPLEASSGKTQRHRLNRGGQRQANNALWTIAMVRMRSEPRTQIYVDRRTREGLSKKEIHRCLKRYIVRELYPLILADLKDSRCLT

SEQ ID NO: 54092 - protein, 363 aa, unidentified
MEHYTSIGIDVGDKTSRICVMTKAGGQRRVVEERAVATTREGLSECLADKDRSWPVTFETGVHCRWMREHIAAMGFKVYVANPAKLKQLTESDTKNDRNDARALARYTLADVDMLHPVFLRPESHQRMIRLLEARQVLVRTRTKIINELRGFAKSMGFRIPRKDAGCFHRLDRSAWPAALQDLAWPMFGVLEVVALKIKAYESQMRELADSAEFREDVGRVRQVVGVGFLCSAAFVAFLGGNYGRFAKARDVGPYLGLVPRQDQSGDVDRQLPITKKGSGMLRTLLTECAQVVLKDGVRATDLKLKGLRIFGRGGANARKRAVTAVARGLAVTMAALLKHPEREYVPLSERARELAGQAEVAI

SEQ ID NO: 54093 - protein, 337 aa, unidentified
MATSKPMRMVGVDVSATWVEVSRGAADEAVATRQCANTAGGHRELARWLTQGGRRARVVLEATGLYSLDVALTLERTPGIEVMVLNPRVSKEFAGAWGQRARTDATAAGGLREFAARMPFTPWTPPSAAALALRALMRRVVALIEMRVQEQNRLHAMSVTGALPAVLRADIRQHIAALGRQIARLEREARALVEPAPALRAGYRHLRSVKGIGQRSALLILSEVAVLPGSLTVRQWVAQVGLDPQPIRSGTSVHPPVRISKRGNVYLRRALFMPALVAVRCNPAVQRFGLELAAKGKAPLQVLVAVMRKLLHAIYGMLKTDTDFDGEKFRRSASTAT

SEQ ID NO: 54094 - protein, 323 aa, unidentified
MTLVVGIDIAKRTFDLAILQPNGKHRTKSKLSNDQAGFVVFEDWLQRHAEPGAWIVMEATGIYHEALAEHFHALGYRIAVLNPAQIARYAQSQLQRSKTDKLDAKLIATYGQRHLDHLRAWQPEPLSLRQLRALTRHLEDLQALRQMELNRLDVSRENVKDSIQAIVQRLNEQIEWTLKQIKQHIDDDPDLRGKRDLLVSIDGIADKTAALILAELGEIERFTHSRAVTAFAGLDPRLQESGAFYGRTRISRTGSARLRSALYLPAVVAMTYNPAIKAQVERLRARGKMGKQTVCAAMRKLLSIAYGVLKSGKPFDPALAIAH

SEQ ID NO: 54095 - protein, 458 aa, unidentified
MRKKKGKLPKVGFHEQLRPMRTDAAGIDVGASEIWVDVGIENDEDPVRSFHTFTADLNRMAKWLQQCGVRSVAMESTGVYWIPVCQILEDHQVDVVLVNAAHAKNVSGRKSDVLDCQWLRTLHCYGLLSASFRPAQDIGVLRTLMRHRQMLVECAASHVQHMQKAMTQMNLQLHHVISEITGLTGMRIIRAIVAGERNPARLAELRHEQTKADQATIAKALEGNYRAEHLFALTQCLELFDDYQKRIEQCHEQIAAHLRSLESKVGPGQPQTEPRQRKRKRRNQPGFDVRGQAYRISGVDLTQVDGIHETAALGLIAEIGVDMSPWKTEKHFASWLTLSPNHKISGGKVLQRSTRKSASRARNILCMSAQTLFNSRSALGAFSRRLRARIGAPKAIVATAHKLALLIYRMLKFGRDYLDIGQQRYEQQFKERTMKSLARKAKELGFHLVPNAHEQAVP

SEQ ID NO: 54096 - protein, 341 aa, unidentified
MAIKVIGLDIAKNVFQVHGVDEAGLVVVRRKLRRCDVLKLFSSIEPALVGIEACHTGHYWAREIMALGHEVRLMPPQFVKPYVKSQKNDAADAEAICEAVQRPTMRFVPIKSAEQQAALLLHRTRDLLIRQRSSLISAVLAHFAEFGIVVHRSTRDIDRMLALLGEAQRGLPELAREMLGILAAQLREIAVRVQVVEDQLMAWHRSNEVSRRLSTIPGIGPITASAIVATVADARQFKSGRQFAAWLGLVPQQRSSGGKERLGGISKRGDGYIRRLMIHGARAIVGWRKRSPRTRDHWIDGLLGRRHINVATVALANKSARVAWALMVRESSYNHRLARAA

SEQ ID NO: 54097 - protein, 340 aa, unidentified
MDAIGIDTHKATLAACLVDELGTVLDERTFDNDPTGHRALLDWASASPEATIGVEGSSSFGAPAARFLIAAGRVVREVPPQLSRRERIRTRRPGKSDPTDALAIARVTAREHELPPVRLVDASLEIQLLVEAREDVVAETTRVRNRLHADLRVLAPGYGATAANLTAVRHRATVARLLRRLDGIQPELARTRLARLRALATEEHALAVRIADRVAGHPLLELPGAGVLVTAKLIGEVGDIRRFRSSDAFAALAGVAPIPASSGQTQRMRLNRGGNRQLNRALYTIALAQAWHHPPAKAYIAKKRAEGKSWREAIRALKRQLVRTVFRLLQTGARSLVAAA

SEQ ID NO: 54098 - protein, 421 aa, unidentified
MKGLRAKRVRTVKEGTLIATVDIGVANNTGYCTTLDGRSTKSFRFDNTKEGFEKFWCMTITSKNRFGCDEVLVGYESTGPYAEPLVHYLANKQVNMVQVNPMHTKKMKEVNDNSPLKTDDKDPRVIADIIRLGRALTIVVPEGDAAYLRRLNNARERHVGEQTAFLNQLQQLVFLIFPEFKKVLKDMKGKTAQHILKRYTIPERIGTLSKEALGEEMRKRSMGKFGIKDAESLIGLARETVGIKEGLAGIFMDIRHILMQLEAEVRFISEIEAEMGAILKRIPCSVRLLSIKGLGTVSVAGLIGEVGDFSKFSTQSEIMKLAGLDLYEISSGKRKGQRRISKRGRSLLRKILFYAAIQMIRKNGIMYDYYARLTGRGMERMRALIAVSRKLLRIIHAIVRDNRDYVEQYQAPERRVIKKAA

SEQ ID NO: 54099 - protein, 456 aa, unidentified
MPESERKQRKSTKQLSIVYPLAAGIDVGATAHVVAVPAERDGRPVRTFRTFSADLHRLAEWLAEVGITTIAMESTGVYWIPVFEILEAHGFQVLLVNARDVRNVPGRKTDVNDAQWLQQLHQHGLLRGSFRPRDGVVRLRAYLRHRERLVDYAAAHIQHMQKALMQMNVQLQHVVTDITGVTGMRIIRAIVSGTRAPEQLAEYRDVRCAASPQTISAALNGNYRSEHVFALRQALELYDFHQTKIAECDDEIEAVLHRLNHDRDRPEKPLPEARHAKSRNEPRFDVRAGLYTLLGADLTQIHGFGPYTVLRLVAECGDDMRKWPSGKHFTSWLSLAPGNKISGGRLLSSKTKRSSNRAAVLLRIAAVNIGRTQTALGAFYRRLAARTGKAKAVTATARKLAILFYNALRFGMSYKDPGTSYYEQRYRQRVLHNLQRRAQSLGLTLVAKTATPDAVS

SEQ ID NO: 54100 - protein, 371 aa, unidentified
MNSIVYVGMDVHKEQYTLCCYSYDTDKVEYKQTIPSDYKLVLKYMEQIRSRYEGEVSFVCGYEAGCLGYSLYHQLKDHAVDCKILAPSTMAITNTHHVKTDKRDAANIARCLAFHTYSEVYVPNNDDNDVKEYIRMRDDQKLYLKKVKQQILAFVLRQGKRFEGGKTYWTIAHLKWLKTLELSDLQREALDEYLLTYEYLTEKISRFDERIEELASVERYEEKVKHMSCLLGIKTHTAISMIVEVGDFERFEKAPKFASFLGLVPSEDSSDTRVNRYSITKAGNSHLRRLLVEAAQSYTRGNVGHKSVALKQRQKGNPPEVIAYADKANERLRRRFYKMTLNKGVNRNVAATAIARELACFIWGMMTEHVS

SEQ ID NO: 54101 - protein, 471 aa, unidentified
MPAGQQVEVDEHEQIVERVAAIDVAKASGMVCTRVPHPDVAGKRVTTVWQVGAATNQILELAEQLAGQGIQRVVVESTSDYWRPFVYLLEARGLVVWLVNAHQVKHLPGRPKTDKLDAVWLCKLNERGMLRPSFVPPAEIRQLRDYTRLRADLTHERSRHKQRLEKLLEDALIKLSSVATDIFGVSGRAMLEALIQGERDPEALAGLARGRLRVKHAALVAALTGRFDEHHAFVARMLLDQIDALGGQIERLTTRIEQAIAAIPAASPPAPDPGGGHGAAAGDAIGPARSVPGPIEQVDPQTGEVLAAALPVVDRLDEVAGIGRLAAQVIIAEVGLDMAQFPTPGQLVSWARLSPRTIQSGATRRAGATGHGNPYLKAALGEAATAAAKTDTFLGERYRRLVKRIGKLKALVAIARSILVIVWHLLADPTARFHDLGADYYASRIDTTRKTRNLVRQLEALGHKVTLQPAA

SEQ ID NO: 54102 - protein, 318 aa, unidentified
MTQDLFIGIDISKAKLDVAASPGEHSWSVSNTEEGIQELIAKIRQLGTPKIVLMEATGGFERRPLAMLGAAGLPVAAINPRNARDFAKSLGLLAKTDKVDAKALALFAEKIQPPCRPLPDAQTRALQDLIVRRRQMVDMISAEQSRLAIVENPKVRRELVQHIAWLKKRIHIADYDLDQAIKNSPAWQPKSDLLKSVPGVGPVTTSTLLALLPELGALTNKQVAALVGVAPFNRDSGTMRGRRCIWGGRTSVRNVLYMATLAATRFNPTIRAFYQRLCKLGKLRKVALVAAMRKLLGILNAMVRDQTPWRSDNVEISS

SEQ ID NO: 54103 - protein, 341 aa, unidentified
MEHYAGIDVSLEYSSVCVVDGSGKIARETKVASEPAALIGWLGSLGFGLGRIGLEAGPLSHWLYMAMKQAGLAVELLETRHVRDAFKAMPVKSDRNDARGIAQLMRLGWFRPVHCKSMAAQVRAILTARKLVQGKLLDVENSLRGILRGFGLKVGKTTRTSFAGRIRELVKDHPNLKMIGEALLSVRAVLLGEFNAFEKQVRAMSRLNANAKLLMSTPGLGQIVSLTYASAIDDPARFRSSKRAGPLFGLTPKNYRSGETDRSGRISKIGDASVRAALYEAAHIILTKPIKGCPRLKSWAMRIARRAGMNKAKVALARKLAVILHRMLVTATPFNDAAAAA

SEQ ID NO: 54104 - protein, 378 aa, unidentified
MKQNSTRRQSPKQALKQSPKQSPRQSRKSCQAPMAIGMDLGDRTSRYCVLNDCGEVVKEASAATTKKGITQVFTPLKRSRIAIEVGTHSPWVSRLLKSLGHEVFVANPRQLKLISQSSRKDDRVDARTLARLVRVDPELLRPIQHRSAEMQMDLMVIRVRAALVEARTALVNSARGLAKSVGERLPKCDAKCIGSGLLRSLPKPLQDTLEALLLQVEALSVRIEKCDRQVEQIARTKYPETKLLQQVSGVGPLIALTFVLTVADKERFQKSRDVGCYWGLRPKRSQSGQSEPELRITKEGDVYLRKLLVQAAQYILGRQGPDTDLKRWGARLAVGGKRMKKRAVVAVARKLAILLHTLWSGGEVYEPLRNNPARQVAA

SEQ ID NO: 54105 - protein, 400 aa, unidentified
MRTVFGIDVSKASSEVAILVNGEKIHGYTMLNDAIGFNRLLNDLKTVHNPEIIFEATGVYSRRLRAFLEEYGYAYTQLNPLEAKKQLDSLRVRKTDKIDAEKLAHSQFILNRKPTYAQEEVYQHLRDLSRFYQNLTEDIVRAKNRLHKVLQVTFPELENLLSTPTGEQYWNLVMAFPCKEFVVNLSQNELCKIIRQSTSKRISEKRIAYLTDKLIKLAKQSFCAVKKISPMLEEVRYYAQELLRLSEHRQVVLDDMVALAQPLPEYDILRSIPGIAETTATSIIGELGDIRRFQSTNQINAFIGIDLRHYESGNFLAKEHITKRGNPYARKIFFKCIHNIASASHTNPCHIADFYEKRKRQSTIALTKPHAIASIHRLIRTMYYLITHNKLYDYSLTQNR

SEQ ID NO: 54106 - protein, 331 aa, unidentified
MGLYIGIDVGSRSCAMSWRDKGRVAGSWDIIQTPKGRKAAVKKLLSLKPVAVVMEATGVYYLDLAIELAAAGLPVSVINPKSFHNFAKLTLTTSKTDGIDAQLLAEYGERMTPRLWVAPTPIQLELRAIGRHINRLTCHRTRAKNELHALQATETSMALLIEDEEEAIAMFDKRIERFRVAGRELISTCPTLSAQFKHMIAAPGMGEVSVFAALAELTTLPTTLKSSQVSRHAGLDVRLTQSGTSINKPGRMSKAGNAYLRSAMFMPSMTAVRCDPYVKAFFEALVSRGKRKMQAICAVMRKYLTGLWACMRSGEDFDTAKLFSEKHFVKA

SEQ ID NO: 54107 - protein, 491 aa, unidentified
MKMLYDRCAGLDVHKKSVSACIRISKGKETSQETRTFGTFTADLEDLRDWLLKHKVTHVAMESTGVFWIPVWNVLEQCEANFVLTLINPQHVHALPGRKTDRKDGERIAELMQYGLLKGSFIPPPAIRELRDLSRRRTHLQGERNRVINRIRRLLETANIKLGSVVSDITGKTARMILGEICRGNCTPEELAKLAQASLKNKRAELIGSLKGFYSEHFRWLLTEAVQDLAYLDRKLEPLDQQLAKRLLPHGDLIRRLCTIPGVDFTTAAVIIAEIGLDMSRFPDAAHLVSWAGVCPGNNESAGKRFSGRVRKGNRYLRRVLTQSAWSITHKKECFLTSLFWRVAARGGRTKAAIAVAHRVLAIAWHIIKIEGEVYREVGGSHQDRLRPQRSARRLVHRLEQLGFEVNLKAKAREAAPAPESVTLPPSPVNRRSHRSLSSTPASSTSHQKPEAVAADPSICRRCARWGIACIHLRNANRRPSAVVYPDESIT

SEQ ID NO: 54108 - protein, 339 aa, unidentified
MKPIPVGVDIAKSVIQVHFVDEETGEIVNKAIKRAKFLEFFANRTTCLVGMEASGGAHHWARRLMAMGHQVKLMPGEFVKAFNIRNKNDMADAHAIWRAVQQPSKAVAVKTEMQQAMLTLHRMRSQLMKFRLMQTNALRGLLAEYGEVMGTGAASLAKAMPEILARLTERLPTVLIDSLREQFSEIDTVNQRIDALERRIRELSKNNPAVKAISEIPGVGLLTATAAVASMGDASAFRSAREFAAWAGLASRQVCSGGKINLHGISKRGDRYLRTLLVNGAHSVLLHAKKPSAWVTQLRERKPINVVAVALANKMARTIWAVLAHGQPYNSDHVRIKTA

SEQ ID NO: 54109 - protein, 393 aa, unidentified
MYKYFICIDVGKFTHWANVMTPEGEILVDPFPFTNDSKGFKKFYKTVDRYLKKDHLVGMEDTGHYGDNLRMFLLNRRATVAMINPVSTDAMRKASLKSAKTDKEDTKNIGIVLLNPKLYRIVRKSDIDPHTMRELTRYHHNMQEACTRYKEQLQKDIDKVFPEFNSLFSASYGPSYMRILEQCQSAYVIAHTDIRTLRSLIRPKGSKGRTLGFSAQQLKQLAKNSIGQPDIIIEMEIRHLVGLITKIDEDLREVDKKIEEYSRELNSPILSIPGISHFSCTSIVTETGDIDKFDNPYQLISYSGTNPIVYQSGQYNARLTRISKKGSKYLRKTLYQIIQPVIENNPVFKAYYLKKISQGKSHRCAQGHCVRKLLRVIFHLLKTGQTFDQALLH

SEQ ID NO: 54110 - protein, 420 aa, unidentified
MDLIVKRCAAIDVAKKEVVTCVRTPGPDGGERRKQVRTFPAFTQDLEAMADWFSAEGVTQVVMEATGSYWKPVWYVLEERGFELMLVNARHVKIVPGRKSDVLDAEWLAELLEHGLLRGSFVPPAVIRELRDLTRYRKRLVQSHTSEAQRIEKTLEDAGIKLDIVASDILGVSGRLMLKALVAGERDVDVLADLAKARLRSKRAELHKALRGRFREHHALMIGMALEHVEYLEASIATLEERIDALFATNTSEAGVPFTVARDRLCTIPGIAERGAESIIAEIGVDMSRFPTAGHLASWAGLAPGNNITGGKRHSGKTTKGDRWLGEILNQCAWAASRKRDSYLSAQFWRLARRIGKKKAAVAVAHSILVICWHLLTNDCDYEDLGGDYFTSRINPDKQRDHHIEQLQSLGYRVILDKVA

SEQ ID NO: 54111 - protein, 424 aa, unidentified
MAVNGWLCVSSYSCKTVRIPPVILLVGYPALRRDLSIICSEEHKTRRHAVKKVYIGLDVHKESIVIGVATGDRVFIHGKCSSDIQRFLKALRGLLKKYDLSKEDVAICYEAGPSGFTLARHLKRIGYKIDVIAPSLIPTKSGDRVKTDKRDARKLARLYRAGELTPVHVPDPEDEVMRDLGRARTDAIDNRTRARQRLTMFLMRNGHHYTGRSSWTEAHRRYLRELVLIDPIQKLILEEYLQTVDLAEKRVEALEEHMRIRSENWARNDFVLALQALKGFRFTAAMIIASELGDLTRFSHPSQLMAYLGVVPSENSSGNKRNQGAITKTGNTHARWILVEIAHAYRTAPKVSKELSRRQEGQHGKVKTLSWKAQNRLHKRYIRLRMRRLHENKVKVAIARELVGFIWELAHVMKNIKEPSQIPA

SEQ ID NO: 54112 - protein, 351 aa, unidentified
MDILAMDLSKSNTVFCFYNKDSGKSRYGKVKTTPQQIHDLIVQHSPDRVVFEICSAAGWVFDTADGLCAEVQVANPNTQAWRWKNVKNKNDKKDALKLAQLSAMNQLPMVHMPKPKVRQKRALIQYRQTLVARVVQIKNSIRSVLDKQGYCLAGGRTGWTNRGLEFLKRLSLPIERCDIDNLWRGQLYVELEMLCSTQKALADVTCKLDELAKSDKNIRLLRTATGVGARLAEAIAAFIDEPERFKSGKQVGSYVGLTPRQYQSGSMNRQGKISGQGNKLLRALLVEVSWLGLRHNAWLNRTYHRFLRSSPSRKKIAITAVARKLLVRCWAMLRDGRPWRDTEAETEKQAA

SEQ ID NO: 54113 - protein, 307 aa, unidentified
MQTMYYIGLDVHKRTISYCVKDGSGAIHAEGTIPATRFDLDRWMRALPQPWTAAMEATVFTGWIYDHLRPHAAALKVAHPLMLRAIAAAKKKNDRIDANKICDCLRCDFLPECYMASTAIRERRRTLRYRNLLVRQMVQMKNKISGLLMEAGVSYNKQRLHKTGYFRELLATNPDIDEGLVSLLRLCRETVVRLQRTEIALVRSLERDSLLIDRVERLMTIPAVGPITALTWALEVGDVQRFSSIKKAISYCGLCGAEKSSGNTVQRTPLSKQRNKHLQTTLIEAAKMAPRNSPELAMLYAWKSGSI

SEQ ID NO: 54114 - protein, 344 aa, unidentified
MPHYAALDVSQETTCVCLVDETGRVIGETKLPTCPDAIAAWLGKRAVDLTRVGLETGPMAVWLWNELHARGLPVICIDARHAHAALKVRPNKTDRNDAAGLAQVVRTGWFKQVQIKTRASYEVRSLLTARDALIQIRVKLENEIRGLLRTFGIVFGKAAGGFSRRADELVAGELEASPPMRRLVETLLQTRGAVLDQIKVLDGQLTATAKIHPVARLFMTAPGVGAITALSVASAFDQAERFRRSSSAGAYLGLTPRRYESGEVSHNGRISKHGSALTRKHLYEAATTLLTRTTRFSRLKAWGLRLAKASGFKKARVAVARKLAVILHAMWKTQTPFRWGEAVA

SEQ ID NO: 54115 - protein, 401 aa, unidentified
MTETNDQIGVYLGLDVGKGEHHARGLTPAGKTVFDKRLPNSEPKLRSALEKLQAKHGTVLVVVDQPASIGALPLAVARDTGCPVAYLPGLTMRRIADLYPGEAKTDARDAAVIADAARTMPHTLRDLAPDDDTIAALAMVAGHDDDLAAETTRTRNRLRGLLTQLHPALERVLGPRADHPAVLKLLQRYPTPARIRKAGRSRLVTLIRPEAPRMAQRLIDEVFTALEEQTVVVAGTEAASTVIANLADSLRRTLDQRKHLETEIGALLEAHPLSAVLTSMPGIGVRTGARILIDVGDGSGFATAAHLASYAGLAPATRASGSSIRGEAPPRRGNKQLKRAFFLAAFASLSHPPSRAYYDKKIATGKRHGQALLCLARRRCDVLFAMLRDGSFYQPATTQAA

SEQ ID NO: 54116 - protein, 406 aa, unidentified
MSTKPGSLSCIGLTDANGRTEYKEKRFSSFSRGLRDLAAWLASYNCTDVCMESAGKYWIPVFNVLEKTCNVILAHPKYTKPQKGNKTDRKDAKWICDLFMCDMIKPSFIPPAEIRHLRDLVRYRFKLTNMLTGEKNRAQNCLTVSNLKLDDVFSDVSGKSSRSITEYILSHPGETFDVTPFVDRRCKTPIEEFQAAVDGAVSPEQAIKLRQCLDHIDELEMHKKEMEREILRVSDPYSDALELIRTIPGFDKNPFTAIQVLSEIGGDMSVFPTDQHLVSWAGCCPRNDQSNFKIKSTRISRAGSYLKPVLVQVANALIKSKKHPEITERYRRIKSHRGHKKAIIAICRMLLTAIWHILTDLKPYTAEGYLAPRPVKTEKILTTSQALNLLKLRGYVIKDDLPVTAS

SEQ ID NO: 54117 - protein, 398 aa, unidentified
MNNVAGIDVSKGKSMVSVLRPFGEVVAKPFSIGHTGSELKELADYLKSLDGETRVVMEHTGRYYEPVARFLHDEGVFVSAVNPKLIKDYGNNTLRKVKTDKADSRKIARYGIDNWAELRQHTPMDTIRMQLKTLNRQQSLYTKTKTMMKNNLIALLDQTYPGVNALFDSPVREDGSQKWVDFATTFWHVDCVRNMSLTAFAERYRKWCKRHGYNFSQSKAVEVHAGAQDLIAMLPKDALTKTMVRQAIDALNAVSASLERLKAEMQALAAQLPEYPVVMAMHGVGDSLGPQLMAELGDVTRFTHRNAITAFAGVDPGADQSGTHEAKSTRVSKSGPPELRRALFLVMDCLLKTQPQDDPVYRFMDKKRAEGKPYLVYMTAGANKFLRIYYARVMQALN

SEQ ID NO: 54118 - protein, 342 aa, unidentified
MKMTTVGIDLAKTVFQVHGVDDHGKPVLRKKLDRSKMLEFFIQLPPCLIGMEACGSAHYWARKLTAMGHTVKLMAPQFVKPYVKTNKNDVADAEAICEAVTRPNMRFVPIKTDEQQAVLSLHRVRQSFLKVRTAQANQIRGLLSEFGVIIPQGIVHIARRLPEIMEKSDLPGSFRELLQRLYDHLKELDKQVDEMDAKIQQWHRESERSRKLAEIPGIGPITATALVASIGDARSFKNGRQLAAWLGLVPRQHSSGGKSVLLGISKRGDTYLRTLLIHGARAVIRFAENKPATCWLNKLINRRHKNIAAVALANKNARIVWALLTREEQRFRADYAPAAPGL

SEQ ID NO: 54119 - protein, 387 aa, unidentified
MPQSNDLSRSLAALDQDSTLIVVIEMSQSSWLVAGIIPGINRQPLKKLAAAESALLGLLHRWRDEATKAGRTVSRIVVAFEAGRDGFWLARWLRTRGIEAHVIHATSVAVSREHRRAKTDRLDTELLKRAFLGWLRGERGHCSMAAIPTLEEEDAKRPNREREGLVGERTRIINRIKSTLARLGIRGFKPTLRRAPERLAALLTPEGTPPPPNTLAELCRDIARRHFVIGQIREIEAARLERLEQHPQQGAHAMVRRLAQVIGVGVETADMLVHEILSRNLRDRRAVARYAGLTGAPDESGARRREKGLARAGNSRVRRGMIQLAWRFLMFQKNSALAQWYRARTADARGTTRKTMIVALARKLLVALWQLVTTGEVPQGVVLRAAA

SEQ ID NO: 54120 - protein, 409 aa, unidentified
MICIGIDWADDKHDVCIRDARDRRILAEFTITHDVEGVEQLDQTAAALGFQPADCLVAVETPHGLLVGYLLQTGYIVYAIPPLAVDRYRDRHRCSGAKSDKIDARTLSDILCVDREYHRPIPEDSPLAQEIKLVSRQRQKLVQEQTRFKNQLTACLKAYYPAALGLFSGLDCAIVWTFLRAYPNAETAAQASLAELEEFFDQHGYTCKRKIPEIYTQLQTPVIPVAEWQVRVLQRHMLLLVDLMATLTPQIKAHERELTRLLDQHADAFIFRSLPHAGDVTAAWLLGEIGDCRDKFENASAMQALAGTCPVTIQSNKRRYVKFRVGCCKLFRNAVQQFARLSARGKKGSPWAKGYLSDQLARGHSVSRATRALGNRWLAIIFRLWQDRVAYDEKIHLRNRALRGHRIAA

SEQ ID NO: 54121 - protein, 374 aa, unidentified
MKNGRPKGIMIYPINHYPQGGRPMRKIAYLAMDVHAKHCVLGDMDFRGNFKGIQTFPTSEKNIIKGLKGVKATKKYLTLEEGNLSYWVAQVAAPYVTEVIPCDPKENALIYRGSKKNDKVDTKKLCRLLRLGELKRVYHPETDDRAIFKAAAQHYIDLRDQQIALKQKIKAMYRHWGVIDVAGEALYSTAKRDDYLRQIKHLLIRNQVSRLYHVMDQTESMQDRALKAMKQLGRKYPEIKQFQEIPGIGAILAHFFDAFIQTPHRFANKRQLWRYCRLGVTDRTSDGKPLGFKRLDRSGISELKSLSYRAWMSALRSDNEVRRFYSTSLQRTFNRVHARLNTQRKIIAAMYGMWKRGETYNPKLFLDSPQSGAV

SEQ ID NO: 54122 - protein, 391 aa, unidentified
MLNDAPQPVQAAIRTDLGAIFVSMELSRRTWLITSLSPGAGEKMSKHSVPASDVPGLLHRFAELKRKAAARSGRDFPIIVIQEAGLDGFWIHRVLQSEGIESHVVDPASILTSRRARRAKTDRIDGETLVRTLMAFKRGEPRVCSMARAPTPQEEDRRRVCRERRILVGERVRHVNRIKGLLFAQGIFGYEPLRKCRRERLEDLRTGDGRPLPVHLKAQIIRELDRLELVLAQLKAVAAERDTLLKTASDEMPAPPAMLVQLKGIGPEIAAVLWSEGLFRRFDNRRQVAAYAGLAPTPWQSGSIDHEQGVSKAGNPRLRTTMVELAWLWLRNQPTSALSLWFHERVQSLSGRMRKTIIVALARKLLVALWRYMTAGVVIEGAVMKPASATI

SEQ ID NO: 54123 - protein, 412 aa, unidentified
MKQQAERAAGLDVHRDNVVAATRVNEPSGEVAVTKKRFPTTRRGVRELAAFLSEAGVTRVAMEATGVYWKTIYYALEGLFDELWLCNAQHVKNVPGRKTDLGDAEWLADVAAHGMVQPSFVPPPEIRELRELTRYRKTQVDARAREIQRLEKTLQDAGIKLTSVASAVWSVSSRKIIEALIAGERNPAVLASLVLGKLRPKIAQLEEALDGHFGPHHAIVCRQVIEHIDFLDGSIAALSEEITARLIPFEAAVTLVCSITGIAELSAQAIVAEIGVDMSRFPTAGHLCAWAGVAPASHESAGKRRPAGTRHGSTWLKRVLIEVARAASRTKGSYFSAQYSRIARRRGPNKAAVAVANSILAVIWHVLTNGCIYEDPGADYFERRHDPAVEAKRLQARIEALGFDVTLTLKAA

SEQ ID NO: 54124 - protein, 361 aa, unidentified
MKRQLQDNQEAFAGQEFFIGIDVHNKQWTVSVRSNHMALDKPVVVDPSAEKVAGFLRKRYPGGKYYAVYEAGYSGFWPARSLEESGIVTTVVNPADIPTMQKERSTKTDRVDSRKLARSLENGELKGIYIPDRLTEEYRQLARYRSRLVREQTRLKNRIKAVLSQFNYRCPLDLEGNRWSGAYLNWLSSVRFETSYAQMAYEEQLCQLQESRERLSRVLRELKRMTKEHESLGHLVKLLQTVPGIGFVTAVLLVTELVDMDRFKRLEDLASFVGLAPSVHQSDERSYSRGLTKRQHKELRSRLIESAWVAVRKDPVLTMKFGKLSQRMNKKKAIIRIAKKLLSRIRSVWQTQKPYVYGVIE

SEQ ID NO: 54125 - protein, 319 aa, unidentified
MERTEIFVGIDVSQNSLDVAELPERAEMAEAKVWTTLNEQSAIDELVERLLTISPQLIVLEATGRLEMAAAGAMAAAALPVMIVNPRWVKSFARAVGIVAKTDKIDARVIARFAEKMRPEPRPLKDAQTQELQALLSRRRQVVDMLTAEKNRLKRAPMRIIKSIDTHILWLEQSLKEINKDLHRSVRSTPIWCVKDRIIQSVPGVGPVLSTTLLAELPELGTLNRKQIAALVGVAPFNCDSGAFKGKRRIWGGRASVRAVLYMAALAAIRSNPVLRAFYKRLRQTGKIFKVAITACMRKLLIILNSMVHNSTVWRLERV

SEQ ID NO: 54126 - protein, 400 aa, unidentified
MRAVFGIDVSKASSAVAILVNGEKVHGYTMSNDALGFARLLGDLKTVHKPEIIFEATGVYSRRLQAFLDEHGYAYTRLNPLEAKKQLDSLRVRKTDQIDAEKLAQSQFVLNRKPTYVQEEVYQELRDLSRFYQNLTEDIVRAKKRLHKVLQVTFPEIETVLSKPTGEQYWNLVTAFPCKDFVLDLSKDELLESIRQSTSKRISDKRVAYLAEKLIALANQSYCAVKKTSPIMEEVRYYAKELLRLSEQRQTVLDQMVELAQPLPEYDILLSIPGIAETTATSIIGELGDIRRFQSANQINAFIGIDLRHYESGNFLAKEHITKRGNPYARKILFKCIHNIASASHTNPCHIADFYEKRKRQSQTTSTKPHTIASIHRLIRTMYYLITHNKLYDYRSTQNQ

SEQ ID NO: 54127 - protein, 340 aa, unidentified
MKEVTTIGLDIAKHVFQAHGVAYNGDVVFRRKLRRNEVIEFFTGVPSCLIGIEACATAHFWARQLLDLGHQVKLIPASYVKPYVKRQKNDAADAEAICEAVTRPSMRFVPIKTEDQQSVLMLHRVRELLIRQRTMLVNALRGHLAELGIVTQLGVKGVGMLVGLVEDEDHDMIPGIARTALLPITQQLRDNGLQIDEMDKQILAWHRSNELSQRLETIPGIGPISASALAATVADASLFKSGRQLAAWLGLVPRQNSSGGKERLGKITKQGDPYIRRLLVVGAAAVLRFSRNAKSTTAIWGAGMLSRRPYTVVAVAMANKMARIAWALMAKGTKFNGTAA

SEQ ID NO: 54128 - protein, 347 aa, unidentified
MKFYTQQHPHYCGIDLHARTMYLCILNQAGAIVLHRNMKADSDSFLKAIAPFRDQIVVAVECIFTWYWLADLCAREGIAFVLGHALYMKAIHGGKAKNDKIDAQKIAVLLRGGMIPQAYVYPQDMRSTRDLLRRRMHLMHHRSQLLAHIQNTNSQYNLPEIGKKIAYKSNRAGVAERFADVSVQSSIRFDLRRIDFYDGLLNEVELEILRHAKLHDANTFRLLDTVPGVGKILALVLLYEIHDISRFPTVQDFVSYCRLVKPKKESAGKTYGFIGAKIGNAHLKWAFSEASVLFLRNNPEGQAYVARLEKKHSKGKALTILAHKLARAVYYMLRRNEAFDMKRFLNR

SEQ ID NO: 54129 - protein, 426 aa, unidentified
MRVLYDRVAAIDVHKDMVKVAIRVPGAKRGTRKTDVLEFRTFYGVLQAMARELRRRGVTHVVMEASGVYTDPVYYALRELDFEEVMVINPAHAKALKGHKTDAKDAIRLLDLYECGLLSGSYIPDPDLREVRDLARYRMKTVQARTSEIQRLQKTLETAGIKLSSVVSDVTGGSATAMIEALISGERRGSVMAGLAQTRMRTAGKMADLSMALAGRFTDHHALMCRLHRDRITIFDDAVKDLDAKIAPLVARYAREAELLKTLPGFGDVIVAGWLGAIGPAPHQHFATASRLASWATLCPGNYMSAKKSKGGRTGDGGAYIKPLLTQAAWAAVRVPGRLQARFHRLVRKFGGPRNKGAQKRAITAIAHTLLKIAYSVLKTGKPYADLGADFYTRRESPDARQDYLMRQLQKLNPGCVITITPAEAA

SEQ ID NO: 54130 - protein, 420 aa, unidentified
METIGTKKMKFVNEKTLIVAVDIGKVSNQGYARCPNGQEVKPFEFFNNGEGFKKFWERIRQAKETYHLDAVVVGFESTGPYGEPLVQFLSKRPVGLVQVNPMHTKRLKELEGNSPEKTDRKDPKVIADIMGLGHALTVIVPEGAAADLRRLTQARERAVQRKTALWNQLQSLLVLLFPEFLQVMKDIKTQSARYLLGHYPTPQEVCRLGLEGLTALLKQVSRGKLKLERARAVYEAASESVGLQEGQMAICLEIRELLGSVAATEGFIAVVEQEMAQALEQIPYSPFLLSVKGVGKVTVAGLIGEVGDFRKFHTLAEMMKLAGLNLFEISSGQHKGRRHISKRGRPLLRKLLFFAAINLVRQKGLMRPFYQRLVGRGMQRIKALVAVARKLLGILFALVRDQRVYIPDYGKKGAVELEAA

SEQ ID NO: 54131 - protein, 369 aa, unidentified
MEWMPPPDGIECAIVMFPNVTAEEKASMGEVSIIGLDLAKRVFQVHGACPNGRALLRKKLSRGQLLPFLSQQSRCIVAMEACASAHFWGRAIQELGHEVRLIPPIYVKPFVKRQKNDAADAEAIAEAAVRPNMRFVALKSPEQQAGAMVFRTRDLLVRQRTQLVNALRGHLAEHGVVAPQGVTNVRVLEAAIEETEVSLDLLVVEMARLYLEQISSLSSKIEALEKLLQQAAAKAPTTARLLTVPGIGHVTAMAIEAFAPPMETFRRGRDFAAWLGLVPLQRSTGGKQVLGKTSKMGQRDIRRLLITGAMTVVRWASRKAPLEGSWLFRMLERKPRMLVAIALANKMARAVWAMLTKGEDYRNPVAVVA

SEQ ID NO: 54132 - protein, 402 aa, unidentified
MRFFVGIDWASQAHAVCVLDDAGRRHWQGSVPHTAEGLTELLGRLRRFLHRGPLRVALERPSGLLVDTLVEAGVEVVPIHPNALKASRPRYSAAGGKSDPGDAFILADLLRTDGHRFRPLRAPSDDTRALRALVRGRDDLVAQRVALANQLRALLERFWPGAAALFADVDSPIALAFLSRYPTPLSAARLGEKRLAQFLGQHAYCGRRPAAALLARLRAAPASQVGEAEAEASGEVVRALIAVLTPLGAHIQQLSAAITAALPQHPDGPLVQSLPRSGAVNAAQILAELGDDRARFPTAEQFAAEGGLAPVTHASGTHHTVVFRWACNKRLRRALTTFADNSRHASPWAALVYQRARARGCRHPHAIRILARAWARILWRCWQARTPYDVGRHRAAQALAAA

SEQ ID NO: 54133 - protein, 407 aa, unidentified
MKRYCLGVDWGDEFHKVWVSDPQGKKVAEMKVEQTPKGMSEFGRWLRERQGEGIELWAGTEKPHGRIVDFLLDHGVVVYPINPKALDRARDRFRMSQSKSDSFDAYVAAEFVRTDHAHLRALQPNSAQAQELKMLSRDHHRLGRHKTRLLNQITITLKEYYPRPLEVFDLESNIALDFLTQYPTPQALSKLSRRQWNRFAKRQHHLGEARCKELWEKLSQPQLAIPEHVVRAKAQLLAVLIIQLKSLIEAINSYSEKVQRFFASMPAAKLGKTLPGGKSGTTVPMLWAELGDAKSRWESFRHLQAEAGEVPVTKSSGKSRAVQFRFACNKLLRYASYWLSFNSLNRCEWANQYYRDQRAKGHSHHEALRALGAKWLKIIFVMWRDHTPYNEDYHLANIARQAIRQRA

SEQ ID NO: 54134 - protein, 339 aa, unidentified
MDHVAIDLGSRKSQICVRNSEGEILEEKRWETLELKRYLEGRPKSRVIVETCAEAFGVAEAARELGHETRVVPATLVRTLGVGARRTKTDQRDARVLSEVSCRIDLPSVHIPKAQSRERKTACGMRDALVGARTKVINTVRGWLRGQGRRLGKGSRVTFTARVRVACGPELPDYVERQLRVVEALTVEIDEADKSVEAQTDGDDTCRRLMTVPGVGPLTAIRFVAALDEVGRFANAHQVESYLGLVPGESSSSERQQRLSITKAGPPELRWVLVQAAWALRTRCRQPAAVPLQLWAHRIELRRGKRTATVALARKLAGILYAIWRDGTEYDGARGAQMI

SEQ ID NO: 54135 - protein, 370 aa, unidentified
MRHSSTLYVGLDVHKESIAVAYAPEERGAEVVFLGTIGTRQCDIDKLIRTLTSKATQLVFVYEAGPCGYWLYRYLTRKHLTCWVVAPSCVPKKAGDRVKTDRRDATQLARLMRSGDLTPVYVPAVEDEAIRDLTRAREDAIRDLKAAKSRLKAFRLRQDIRYEGRATWGPAHLRWLAEVVCPTPAQQIVFQEYVRAVSEHQERLQRLEAELRDQVEVWHLAPVVQALQAMRGVQFTVAVTLMAELGDLSRFENPRQLMSSLGLTPSEYSSGERRRQGGTTKAGNTFARRALIEGAWAYRYPAKVSRHLQLRLEQLPQAIQHISWKAQVRLCKRFRHLTARGKHANQVVVAIAREMAAFIWAIAREVPMTL

SEQ ID NO: 54136 - protein, 371 aa, unidentified
MSEVTRRLMVRVGVDIAKQVVHVHAVDGAGRRVVARALKRDQFLPWCAQHLPAGCLVAMEACSGAHHWARQLMAMGFAARLIAPHLVTPYRMEGRGGKNDATDAAAICEAASRPQMRFVPIKTTVQQGLMALHAIREGFKQDRTAWTNRIRGVLAEFGLVFGKSPKVLRAALPDVLEDAGNELSGVARMALQQALDHWRGLDDAMQWCDRQIKEHVRSCDAARRAARVIGIGELGASAFTASVADFHQFKSGRQFGAWLGIVPRQNSSGGKASLGRITKRGDDYLRTLLIQGAKSAVMSVDKRDDPTSRWLKQLIERVGWQKACVAMANKNARILWAVMTREQGFDPQHVSAKPEAKQKPAPALAAVPVAA

SEQ ID NO: 54137 - protein, 378 aa, unidentified
MDVIYPRCAGLDVHAETIVACALWEEDGHIQKDIQTFSTFSKGLGDLLEWLEDHGVTHVAMESTGVYWKPVFAFLEGYVDLTLANPQRIKNVPGRKTDVSDAEWIAKLLRHGLVEKSFVPPADIRELRDFTRLRKKWVGQLTSEKNRIQKVLESSNVKLGSVLSDLFGVSGKDILARLLEKGYVDKDELDECLRGRLKKKKQAVYDSLLGTLTEHELRLLRLLWKHVEELEQLIEEVDQHIDRLLEPYREEVNLLMTMPGVKKQTAAVIIAEMGTDMSVFETPERAASWTGLSPGNHESAGKRKSTRTTKGNPHLRSALCEAAWSAARSKTHPLSRKFWSLAARCGKKKALIAIARRMLVIIFCMISRKEPFRQPQLI

SEQ ID NO: 54138 - protein, 362 aa, unidentified
MRDTTIDEAEGRLTVGLDVGDTYTQACVLDNDGDVIEESRVATTPKAFRRRFATMPPARLVLEAGNHSHWASRLLGELGHEVIVANPRMLRFIYGSDSKDDKADAAYLARVGKLDPALLHPVVHRSEQCQADRALLRSRQALVRTRASLITHARGMVKIFGAKLPHCSTDAFVRKASDHVPDILRSALDPVLEIIASVSVQIRELDRKVEALAQEGYPETRLLSQVPGVGDLTALAYVLTVEDPARFARAREIGSYLGLRPRQADSGVLKPQLRITKAGDEMLRGLLVECTQHMLGSLGPDSDLKRWGLKLAERGGKAAKKRAVVAMARKLSVLLLRLWVTGEVYEPLRNARRRGELLPSPS

SEQ ID NO: 54139 - protein, 349 aa, unidentified
MIARPDAACFVGIDLHKDTLTACVLRGRDREVSYVKLACKCRDQIRSFFASLPQPSAVAIETVGFYRWLWTELEPLAGQLVLCDARGARALAGRRIKTDREDALNVALLLADGRLPLAWAPPENVQLLRNWTRHRNGLTRQHAKVLHHVKSTLNRLNFPGPVRLDAAALQRYLLAGVERFSTDDLMMLWQHQRRLIEIEQDRAQSERRLSELMRAPELSRLRTILESVPGVGLVTSATVIAEIGDFSRFADSKAIGRYAGLAPTVYASGNSSRLGHISKTGAPDLRWVLQQAAWTAIRCDAGFKKTWLRIAKTAGKKAAAVAIARKILVLMWTLQRKDEPYKSRDPVAA

SEQ ID NO: 54140 - protein, 461 aa, unidentified
MSSRKRSRRSSGRTRQASRLEPVHPDAAGIDVGSRSHFVAVPPDRDEQPVREFEAFTGDLYRLADWLQECGVKTVALESTGVYWIPLFQVLEQRGFQVLLVDARRLKTVPGRKTDVKDCEWLQQLHTYGLLAGAFRPDDQSCVLRSYLRQRAMLIEHAAHHIQHMHKALEQMNVKLNNVLSDITGQTGLAIIDAILAGQRDPVALAKLRDPRCKHSEETIAKSLHGHWRDDHLFELQQAVELYRTYCGKLAECDARIESYLSSFEDKSDGRCLPPKKPKRNPHAPRFDAREHLFRMTGVDLTRIDGLEANTVLKVISEIGTDITRWPTEKHFSSWLCLCPGNHKTGGRNKSGKTRRSANRAAAALRLAAQSLERSPSALGAFYRRMKARLGAPQAVTATAHKLARLIYHMLRHGTEYVDIGQAAYERQYQARILKNLNRRAAQLGHILVPVNNLLPQPRTS

SEQ ID NO: 54141 - protein, 474 aa, unidentified
MPLRVDEENGDVLLMSLTGLVSQNSEEDVVVQGSGLSRGDKRRNAKLARLRALVRADHAIVAIDLADRKQAVVVCDHDSQVLARKTVKVRAWELGPVLDWARSVAGKHRFAGVTVGCEPTGHRWMVLGQLAAQRGITLVCVNPMLVGRAREAEDYTRDKSDDKDAMLIARLVAQLHCYAPECAEETWARLRQLGARRERLVTEATACVQQLRDLLECAWPGVLEAAAKPFESTNWCAALAMVLDRCGGHPERLARLGLARFEAAVVRELARWGGQRRRRPIIEAVFVALVDPNGVMAQRRGALERASWVLSDWRVAKTRLAEVETRMTAVLDELGLTEFVTSIPGVSAVGAAAILAETGDPARFDSPRALVKHAGLCPRDNSSGIFSGRARISRRGRPRLRLAAWRAAWGAMQHNPVMAARHRYLIAREHNRLTDGQARAAIAAALLRWLHVVVTRRVHWDAAIAGAAEVPAAA

SEQ ID NO: 54142 - protein, 351 aa, unidentified
MTAKKRRVTGGVDTHGKTHHAAALDQNGRILGDQQFPNTTTGYQALLSWLGEFGRIVKVGVEGTGAYGAGLARHLRAAGITLVEIDRPDRKTRRMKGKSDPIDAIGAARATLSGQATGIPKTRIGPVEAIRALRVARRGAVKARTAALNQLHGLITSAPHQLCATLTGQRGNTLITTCANLAVDDTVLTDPGQATAAALRAIATRVQALTAEITQADKRLRPIVTRTAPRLNTLPGVGPEVAGQLLTTAGDNPDRLRSEAALAHLCGVAPLPASSGRTDRHRLNRGGDRAANNALYTITLSRMRHDQPTRAYVERRTKQGLSKKEIIRCLKRYIIREVYTALLADYATLTP

SEQ ID NO: 54143 - protein, 351 aa, unidentified
MKILAMDLGKNKTVVCIYDQTSGKHNYQTIRTCPQQIHDLLVEHKPERVVFEICSAAGWVFDITKCLCIDTQVANTNGQAWRWKNIRRKNDREDALKLAQLSAMNQLRTVHIPNRQVRQKRALIQYRQSLVARCVQIKNGIHSILDKEGLSMASGKSGWTKESIGELKAMALPMEKCDGDNLWRGSLRVELEMLAKVTELIKEVERKLDEIAQDDRQVRILRTIPGVGPRLAEAVAAYIDEPGRFTSSKQVGCYAGLTPRQYQSGNSNRVGRISGQGNKVLRALLVEVSWLGLRHNDWMRRTYQRILRGSNSRKKIAITAVARKLLILCWAMLRDGTTWRQDKVKVSNVAA

SEQ ID NO: 54144 - protein, 311 aa, unidentified
MEHSRVIGIDVSKDHLDVHVRPTGEAFRVRCDDAGFAALIERVRPLAPTVLVLEATGGYEVTVAATLAGAGLPVAVVNPRQIRNFARATGQLAKTDTLDARVIALFAEAVRPAARPVPDAQAHALGELVARRRQLVEMLGAELNRRRLLRDGRLQRHLDAHIAWLKDALRRLDHDLTTLIRSTPAWRETEDLLRSVPGIGPVTACTLIADLPELGRLDRRKIAALVGLAPFAHDSGAFRGRRMIAGGRAHIRRALYMATLAATKHNPPLRAFYQRLVAAGRPGKVALTAAMRKLLTILNAILRDRRAWLSP

SEQ ID NO: 54145 - protein, 397 aa, unidentified
MNRLLYIGMDVHKESFTLSTYHVTLDESELTQDFIGAPLKITDATASGVEKYVKNLKTMLNIKSTDNVRIQCGYEAGCLGFDLYFQLKAKGIECVILAPSTIQKSANAKKKKNDPLDSKAIAMALANKTYKSVHVPDKDDLNVREYLRMRNAHRDAVKKVKQQILAFLLRQGIKYSNTNWTKAHITWLHGLKFDHALLKETLDEYITSLENYVAKLERLDKRIEEFAQGDKYQEKAAELGCLLGIKTQAAMTMMSEISDFSRFRTASEFASFLGLVPGENSSGEKTQRTSITKSGNSQCRKTLIEAAAGICRGKVGHKSKELVRRQALCNNPIAISYADRANERLRSKFYRLNLRNGKPANVAKTAVARELACFIWGIMTDTYNGKVPRNDEYALGK

SEQ ID NO: 54146 - protein, 423 aa, unidentified
MMKLKYSICCGLDVHKNVIVATIVTTNKDGISEYLQKSFSTINSDIQRFHNWLIENNCYHVCMESTGKYWIPIFNYLENDIDVCLTHPKYVKAIKGKKTDKKDSKWIADLYKFDLVRCSFIPPKDFRQLRELSRYRFKLVCMKSSEKNRIQNCMTISNVGIASVLSDPFGKTATEIISYLLEHTADSMDEKAVRKLIKKGAKSKSDEIIEAIKGYTIETDQAKKLELARGHLEYLDDMITQTEVELYVRIKPYYEFVEFVSTMPGMTELSSTIVLAETGVDMDIFDDAKHLCSWCGLSPANNESAGKKKSVRIAKAGDYLKPMMVQCALLQLRAKSSLILQSNMVESKKRRGHKKAIIAIARMMMVCIYHMVSEKKPFTPTDYEELMDPQNHVESVVLNENNVFAYLESLGYDSSKLVKRNDN

SEQ ID NO: 54147 - protein, 456 aa, unidentified
MHKFYLGADVSKGYADFVIIDAKKQPVEKNFQLDDTFEGHCLLYNKLYTFCKDHPDSIIYAAVESTGGYEKNWYHSLVKFQSTLSLNTAHLNPFGVSHNRKAGMKRNITDKISAQNIAEYMIAHPEKVSYQPQDYLASLRKQWGFVKMLTKQSTQLLNQLESVVYNANPEALIYCKDGMPDWILKLLKSYPTASRLAKAKIKSVAKIPYISSERARNLVAAAKKSVACTTDKVTEQLVIATVKQIIHLKKVIKRQSEIMANECSIHEVELLKTFKGISDYSAIGLILNMEAVERFASTKKLASYFGIHPVYKKSGDGTWGIHMSKKGRKEPRHILFMVAMSAIKCNPLIRSIYLKHTQKGMKKMAAIGVCMHKILRIVYGMLKHNRAFDPDIDRRNREKIVQCKADVCRDKNRRYQDYDPKAPISRRQKMQRKERELSHSDKHTKSGISAPVPKAA

SEQ ID NO: 54148 - protein, 353 aa, unidentified
MKCDQYMGMDVHQATTVVVVLDVEGRLVLESIVATEAAAILRLIRSLSGPLHVTFEETTQAAWLYEVTRAYVAEVIVCDPRRNKLLSEGSKADKPDARKLAELLRAGMLRSVYHGHEATRKLKEFVRAYETLSADTGRTMVRIKAIYRGRGIRTAGRGVYQIQQREQWLEQLTEPGVRQRVSWLYEQLDQLRPLRRRAKQAMLAESRSHRAVALLRSIPQLGPIRSALIVATVDTPHRFRTRQQLWSYSGLAVVTHMSSEYEIKQGRVVRSRKPIATRGLNRNCNRRLKEVFIGAATGGSQAEPYRSYLEKLKQTGMRAEMARLTLARKIAAIALRIWKKGETFDPKKLNGTT

SEQ ID NO: 54149 - protein, 341 aa, unidentified
MKNKSFIGIDISKNVIDVSIFCEETPIKDFSHDVFNNSRKGFGEMCTWLKKNHVVLSNCLFGMEFTGSYSMELEKFLNARNYQFCMLSTHVVKHYPMEPKDKSDKIDSAKIADFLYRYNGTECVKPYKMPDKTMQRLKALMNERKFLVEQRTCFMNRRQLCTTKEDAQLYDGYIKKFSRDIDNIELEEQKLLATDDSLLATYKNLLTIPGVGFVNAINVIVITRNFTAFETARQYASYVGMAPHSHTSGTSVRWRPRPSARCDGQAKADLSMAATVAVQYDAELQSFYNRKLGGKQDSDTKRKALNAVKFKLVLRMFAIGKQNRKWEPLDSKSSNEKLAIS

SEQ ID NO: 54150 - protein, 337 aa, unidentified
MSKVTVFVGVDYHQDSIQVCVMDAAGTTLANRRVGNSTEEVAAVVLPHGNDVRLAVEACSGSAALADELVTRWGWSVDMAHPGYVARIKQSPDKTDFCDARLLADLERVGYLPRVWLAPFAIRELRRLVRFRQQLVGQARNAKLRVQALLRENRTKCQDMHPWTKRWVAWVRAEAELSAESRWVAERWLREIEHLAREIRLVEKRLARLTSDDPVVEFLAGQKCVGLVTAATIRAEIGRFDRFRNGKQLSRFCGLAPRNASSGNRQADAGLIKAGNPQLRAVLVELAHRLKRWEPRWAKLALTMRMRGKKGSVIAAAIANRWVRWLFHQMQTVSQTT

SEQ ID NO: 54151 - protein, 360 aa, unidentified
MGAINIKSYEESAMENIIAMDVASEVTCVCAVNKRGKTIFEGSVATEIPALREMIRKVPRHRTLVFEEGCQAEWLWSELQPVCDDVLVCDPRANRQRGQKSDRIDARKLAERARLGALNRVWHAGKELQDLRQAVFSYRTLTTHSIRVKNQIKGVFRSWGVRGGGGAYEPETRRKTVSKLPTKASRSRTDRLAKLLDVVTEERETALVEMIKLARQRPRYKEFRTIDGIGPKFGAFLVATLGDANRFRTRKQLWAYSGLAIVTHDTGQYEVVDGNIRRKNRQVQTRGLVRTYNRTLKYVFKQAAMTLSRTKWKEYYNSLLERSKNANNAQLTLARKLATIVLHIAKTGGKYDVTKAFKKQ

SEQ ID NO: 54152 - protein, 418 aa, unidentified
MADEIMAEETIRWFAGLDWGSATHQACLLDEAGTVVGERAFAHGGAGLAALCDWLVSLAGDPGSVAVAIEVPHGPVVDALLDRGFAVYAINPKQLDRLRDRISVAGAKDDRRDARVAAAGLRTDPHLFRRVLAGDPSVIELREWSRLAEEVQQERVRLGNRVRQQLWRYYPQLLALSDDVTAEWVLALWNMAPTPAQAARLREATLARLLRQHRIRKLDAPAVLAILRQPAIPVAPGVTEAAVLHLRSLVARLRLANQEFRQAERKLEELCTALSETQPTAQDSGPGDATILRSLPGVGPVTLATLLTEATGPLARRDYPALRTLSGVAPVTKRSGKSCIVVMRYAAQVRLRNAVFHWARVAVLNDRRCRGRYEALRARGHSYGRALRGVGDRLLGVACVLLRRGTLFDPDYGSSASA

SEQ ID NO: 54153 - protein, 343 aa, unidentified
MNVTTIGLDIAKNVFQVHGVDGHGKVVLRKKLSRGKVLEWFANLPPCLLGIEACPAAHYWARELLKLGHSVNVMPAQYVKAYVKGNKNDGNDAEAICEAVSRPGMRFVAINTEAQQDIQMLHRIRSRVIGERTALINQIRGLLGECGIVFGQGPGQVRRGIAVLLAGEDPRLSTMARALVLGLQAELRELDERISHYDARVKATCLGDVRSVKVQALPGIGPLTATALVAAVNDGKQFQNGRQMAANLGLTPREHSSGGKQRLLGITKRGNTYLRTRLIHGARTVLRHAMGKTDRLSRWALAIQARRGANVAAVALANKLARIAWAVLARDRRYRVDWAEQSV

SEQ ID NO: 54154 - protein, 392 aa, unidentified
MVVSVGIDVSKDKHDCFIVSSEGEVLADVFTIPNTMDGFHCLLQRIRDCTAPQDKIKVGLEATGHYSYNLLGFLLDNGLATYVLNPLRTNLYRKSLSLRKTKTDRVDARTIASMLLSDAGLKPYTNTAYHNEQLKSLTRYRFDKVKERAKLKSSIARLVCILFPELEKLVPSLHIASVYALLEEFPGAKQVAAAHLTRLKALLETASKGRYKRDTALEIRDTARNSIGSQMPAKSLELQHTIRLIHELDGEIAEIEEQIQSIMEELHSPITTIPGLGFRMAAMILAEVGDFTRFDSPDKLLAYAGMSPSTYQSGQLKNCYPHMEKRGSRYLRYALYNATKYVCHWDPAFADYLAKKRAEGKHYNIAISHAAKKLVRLIFAMENSRQPYFSAA

SEQ ID NO: 54155 - protein, 375 aa, unidentified
MGDHSEAFVAFDTSKLRNAVAIADGGRAGEVRFLGEFESSTTATSKLVRKLAAKYQRVTFCYEAGPTGYELHRQIKVLGHECIVVAPSLIPKKPGDRVKTNRRDAVSLAKLLRAGELTAVWVPDCRHEAVRDLTRGRDTAVIDLRSKRQQLSAFLLRQGRWYPAGKKTWTKTHMNWLASQKFEQPERSIVCEEMIFAIRQAQERVERLEQAIRAAVPDWSLAKVVTALMALRGIDLISATGLLAELGDLSRFRTAPELMGYLGMGCSESSTGDTIKRGPITKAGNRRARRTLVECAWSYQHPPRIGIAKQEKVAAAPPKVREIAWKAQSRLNRRYRALIRRGKLKTVAITAVARELAGFVWAVAREAGSAEPATK

SEQ ID NO: 54156 - protein, 480 aa, unidentified
MKDQQLVGRPRKTGKRKRLSPALLERIEPDAAGIDCGASSHYVAVPSDRDPQPVRQFRTFTADLRRLADWLVKCGIKTVAMESTGVYWIPIYEILEERGLQVVLVNARHLRNVRGRKSDVTDCEWLRDLHSVGLLHPSFRPAAEIVELRAYVRHRHKLVEAAATAIQRMQKAMTQMNLQLHHVLSDLTGLTGLAIVRDILAGVRDPQALAAHRDRRCHASKGEIAAALTGNYRAEQLFVLRQNFEAYEFNLRQIAQCDAAIEALLATLAARCQPPASALPAARPRKKPSKNEPRLELRSPLHRITGGADLSQIDGIGPYGALQLIAEIGTDMSRWATAKHFTSWLTLAPNNKISGGRLLSSKTQPSANRAAAILRRAAMSLSRSASALGAYYRRLAYRVGKAKAITATARKLALLVYRVLHGDITYHDPGAAAYQQHNRTRVVRNLRQRAQQLGFALMNIQTGEVLGQTASKRVAPSPVS

SEQ ID NO: 54157 - protein, 312 aa, unidentified
MERAYVGIDVSKDRLDVHVLPEGESFVVARDGEGLAELVERMGTLGPERIAVEATGGFETVVAAALAGASLPVVVVNPAQVRHFAQALGRRAKTDPIDASMIARFVEATRPDLRELPDVATQLLADLVARRRQIIEMIVAERNREKRVVVMRIRKSIARLIAALEKELAEIDAEIDASVRGSPAWREKEDLLASVPGVGPITARTLIAELPELGTLDGKRIASLAGLAPFTRQSGQWKGKAMIAGGRKSVRSALFLASLVACRHNPILKAFRQRLIDAGKPKMLVVIAAARKLLTILNAILRDKQPWRPETA

SEQ ID NO: 54158 - protein, 387 aa, unidentified
MTNTQYHSTIVPRDYDIFIGLDVDKKRMAVTCVDHGTLQKSLSLPYSGKQLLNYTAKHFPGQRVAFVYEAGPTGFGLHDELSAAQHPCLVVTPAMVPSAPRKRVKTNRLDSKKLALGLRGGDLQGIHVPTQSYRELRQLVQLRDTQAAQVRATKCRIKSLLLFEGIPFPEPHEKWTVAALQGLATLPCNATVRFKLDQLMEALQFHYQMAAKVQKEVRRFCNQDSELRQSVELLRTIPGVGTITATHAIARLGDWRLIKNERQIAGFLGLVSSEHSTGEKEKRGEITRIGDQRLRNKLIQCAWTAIKKDPELRAFYRRIYARHPPKVAARKAIVAVARKLTTRLYAVLKKQRPYEIRADLATTPLTVEETVGLRERLDIAQNDELYL

SEQ ID NO: 54159 - protein, 354 aa, unidentified
MNIKYIGMDIHKETISIAVMNGDGKLVMESIIETKTSTILQCIQGLHGDLHVTFEEGTWAAWLYDLLKPHVTELVVCDPRKNALMKEGNKSDKIDARKLADLLRGGYLRSVYHGENGLRTLKELARTYLTISKDLTRVMNRVKALYRSWGILCGGQQVYAPRHRAEWLNKIGEAGVRRRAEFLYQQLDALRALRQAVRRDLLAESRKQSATKLLRQIPSIGPIRAALLIALVQTPHRFRTKRQLWTYSGLAIETRDSAQYRYVAGQLQRSKKPQQLRGLNQNHNHDMKAIFKSAATMASSREGAFQAFYQGLLMKGMEPAMARLTLARKIAAITLILWKKGAHFDAEQLKPQAA

SEQ ID NO: 54160 - protein, 370 aa, unidentified
MKQMKSFVGLDVHKATISISVAEDGRSGRVRFIGVVPNTPEAVHKMAKQLAKHGELDFCYEASGCGYGIHRQLTGLGHKCTVAAPSMIPRKPGERIKNDRRDSEKLAILHRSGDLTPVWVPDTTHEALRDLVRARVDASMHLMRARQQLLAFLLRHGRGYPTGEHWTQRHRSWLAGQTFQEHAHGIVFQDYLETVWTAQERRDALIERISAMVASWSLGPLVEALRGLRGVDLISAVTFIASTGDLSRFESPRLLMGYLGLVRSEHSSGGTIRRGGITKTGNREARRMLIEAAWSYQYPARIAKDKAEILVRLPKKIRDIAWKAQTRLCTRYRSMIARGKKPTVVVAAIARELSGFIWAIGQEMRANMAT

SEQ ID NO: 54161 - protein, 411 aa, unidentified
MRYYLGVDWADKTHAVWVVDDEQGAKVARRAVPYTAAGLSEWGRELDEWRAQGIELWAAIERPEGRVVDFLLYHGVVVYPVNPKALDRARDRFRPSAAKSDPFDARVLAEFLRTDHRHLQALQPSSEAAQELKYLTEDYRRHVRQQTRLVNQLTATLKAYYPRALEVSELTTALARQFLQAYPTPVAVTALTAKRWQRWASAHRLSDVRTHELWGILQRPQLPVPDHVVRAKARLMLTLVEELTAVVAAVGQYREAIDAFFAGLPEAQWIRTLPIGNHGVTAPTLWALLGDAPRRWESWQHLQGHAGTVPVTIRSGQQRVVRFRFACDKALRYVVDQVAFLSLGKSEWARAYYDQQRARGHDHHPALRALGAKWLKIIFVMWDRQIPYDEEHHLATMTRQQLRQRGQKKVA

SEQ ID NO: 54162 - protein, 468 aa, unidentified
MNEVRLGIDVACRADHRASLADERGEFIWSSWKFRTTTADLERLWAKIPNGASVTVILEPTRNAWVPLSAWLQARGATVILVPSEQSADLRDYYNKHTKTDRLDSRVLARLPLLHPEGLRGIDNLGPAQSLRRAVRHRFSLVKRRSAASLRLDALVELLGPGWADCLGSATASKTALVILEKYADPRALKRLGRARLAALLIRSSSGLWREDKADELLAMANETLALWSSGGIDFTELAHDISSEVRVLRRLDDEITAADKRIALLYDQADPLGIVASAPGLGPVLSAAILANAGDFNRFANLAGVRSFTGFVPKIDQSGLVAGHKGITKAGDAGLRQALYLAADHARHIDPTLAQRYYRLVMVEGKHHNSALCSVSAVLITRIAACWRKGELYQLRDEDGEAITEAEGKAACTDRFKIDPKVRAARRRNTPAKVLKNRAAGRGRKESTRKVAPATDPPRKEASENVA

SEQ ID NO: 54163 - protein, 346 aa, unidentified
MTVTIVDEARAVTGGVDTHADTHMAAALDTIGGLPGVQEFPATQDGYARLLAWLRGFGTVHLAGIEGTGSYGAGLARHVAAAGIRVVEVDRSDRQDRRRQGKSDPLDAVSAARAAQSGRASGAPRGRDGQVEAIRALMVAKRTARAQRTQTTGQARALIITGPDGIRTRFTGQTPAGLVAELAALRPRPGSMVRYHTLLSLRELGRRAQFPGAQLERLDELLIPLVTARAPGLLSLYGVGPDTAAMLLIAAGDHPGRLRSEAAWAHLCATAPIPASSGKVTRHRLNRGGDRQANHALWRIVITRMGSHPPTRDYVARRAKEGLSKPEIIRCLKRYAARQVYPHLRG

SEQ ID NO: 54164 - protein, 388 aa, unidentified
MEAQTVNTLPPVAVDHDPVRCLLAIELSKKSWIVAITTALSDKISRYTLDGCDWKGLLELMERIRTRVAREVGRPVEMISCYEAGYDGFWLHRLLERHGVRSHVIDPASVQVDRRGRRAKTDHIDAKRLLRSLMAYLRGEPKVWSVLRVPSVAEEDDRRLHRERDRLIAERGQHVNRIKGLCAIHGIYDYEPMRRDRMLRLEQLHTGDGRELPPRLKAEIARELQRLELILEMLKEIEAERDAIALTEKVSAHTNTKTIQNLVKLKAIGAEIATVLTGEVFYRPFNNRHQVASYVGLTPSPFQSGSKCRDQGISKAGNPKARSTMIELAWLWLRHQPDSPLSIWFQERVGTRKGRIRRITIVAVARKLLIALWRYLETGVVPTGAVLN

SEQ ID NO: 54165 - protein, 403 aa, unidentified
MNSVGIDISKGRSTIAVMRPFGEVVISPFEVRHTGSELSKLAKQLKSLDGETRVVMEATGNYHASVAKLLHNAGLYVSVINAKLVHGYGNNELRRVKTDRKDAVKLANYGLDRWLTLPRYIPEEDTRLLLKNCYRQYRQYSKVQTVLKNNLISLLDTVFPNANRLFSSPIRGDGSEKWVDFVAEFWHCRCASEKSERAFTSKYLRWCRKHGYNFREAKAHTIYAEASGHIGVMPKSETTKLLVKQAVSQLRATSTALAALKQEMQSLASVLPEYPVVMDLFDVGPTLGPQLIAEIGDVRRFYSKKALVAYAGLDAPPNDSGDVTGRHKSMSKIGASSLRRTLFLVMSVYLLTAPLDEPVCQFMDRKRAEGKLYRVYMMASANKFLRIYYATVKAYLESLEHTA

SEQ ID NO: 54166 - protein, 420 aa, unidentified
MTVYLERGYNHKEFLWSKNSIIFYERGIRMILVGIDVAKDKHDCFIMSSEGEVLYKSFTIANNMEGFNELYQKISSTTDDLSKIKVGLEATGHYSYNILGYLLDKGLTTFVINPLHTSLYRKSLSLRKTKTDKVDSHTIASMLMSDVNLKSYSETLYHNEELKSLTRYRFDKVKERAKLKQSISRLVTILFPELEKLVSTLHMVSIYALLSEFPSAKAIANAHLTKLTNLLYEVSKGRYTRETAIMFRESARNSIGSYMPAKSLELKHTIKLIGELDNEIEEIEAEIKRIMDEINSPIRSIPGIGLAMGAMIVAEIGDFSNFDSPDKILAYAGLSPSTYQSGQLYSTHAKMEKRGSRYLRYALFNATKFVCNWDPTFSAYLAKKRAEGKHYNVAISHAAKKLVRVIYQLQKSGQSYIKAA

SEQ ID NO: 54167 - protein, 428 aa, unidentified
MSRRRKPAPAPAPITGRPIQAIKTEDVAVPAGPFPVFHPNAAGIDVHSKEHFVSVSEDRDEHPVRAFGCFTPDLIGLIDWLKACGIEHVVMESTGVYWVNLYYMLEDAGFSVCLVDPRLAKRVPGRPKTDVGDSVWLRKLHTYGLLSPCFVPTQRVAEMRAYWRQRAAHVQKAAQEIQHMQKSLELMNLHLHKVLSDISGVSGMRIIEAIVQGEHDPRVLAGYRHAQVRASEDEIVRAMTGHYREEHLFTLSQALQVFKFYHQLIQECDAHIQECLGEMPDHEAPKPPTAQHLPVHDEPKRLSRRKNQAHFDLRAELLRVTGIDVRGIDGVDALTLQTVISEVGLDMSAFPTEKHWCSWLCSCPRHHMSAGRRKGRQKGRSATRVLVGLRIAAQSLHDSKSALGAQYRRAQAKHGSSFAIAVMANKLS

SEQ ID NO: 54168 - protein, 504 aa, unidentified
MKLLYRRCAGLDIHKKTVSACIRIRVPGRKEPQIEEAVFGTFTQDLERLRDWLKEHKVKQIAMESTGVYWIPIWNVLEPEKYRFELSLVNPQLVLALRGCKTDRIDAQRIAEFLQYGLLRGSFVPPRSIRNLRDVTRMRVHVQQDRNRLINRIGRLLETVNVKLGSVVSNIVGKTGRAILHAIANGQGSPERLAELAVGSLRHKKPALALALDGRYSSHFRWLLGELMEELERLDGKLAELEWRISDYMQEHQELIRRLCTIPGVNRVSAWTLIAELGTDASVFPDAEHAASWAGLCPGNSESGGKRQSGRTRKGNRYLRRMLTQDAWAVSHKKDCFLTALYYRVASKRGMKKAAVAVAHRILVIAWHILREGGEYREYGGDYFDRQNPRRTAERLTRRLEQIGYDVVLQPRTELPPDAASKDPRGPGRPCKCAERGIECNHHPRPDQPSADERRTPTRPQPPPVPPAVTQQCSRCRKWGIPCIHARNAKISPLDLGTPSKPST

SEQ ID NO: 54169 - protein, 345 aa, unidentified
MKIVGCDLHTRYQQIAMLDTETGEVIERRLEHANGEARAFYAGLQGPVRVGIEATGHTRWFERLLAELGHELWIGDAAQIRAAMVRKQKTDARDAAHLLQLLVEERFPRIWRPTMAERDLRQLVWHRQKLVWMRNAVGNQLHALAMGEGVCRKKQLWTKQGRAELQALNLGAWASYRRQELLEMVDQLDGSLEKLDRAVEEQSQQNEAAVLLRTHPGVGPVTSLAFVLTLGPVERFKRSKQVVSYLGLNPREHSSGGKQRLGGISKQGNPMMRSLLVEAGHSAARLDAELHKDYQRLKLRRGSGVAKVAIARKLAVRMYWMLRQQANYAQLVRMQGSPWATLVEK

SEQ ID NO: 54170 - protein, 347 aa, unidentified
MGQITRIGMDTSKQIFQLHGVDESEQPVLRKKLRRSEVLAFFAALEHPVEIGMEACGGSHHWARELIKLGHRVKLIAPQYVKAYVKRGKSDAADAEAICEAMSRPTMRFVPVKSAEQQASLMLVGVRDRLIGNRTQLSNAIRGLAMEFGLIAPRGLDKIEPLLERIAQDETLPQLARALFARQGREYAQLQAQLKQIQADLVAWQRKDEQAQRLAQIPGVGLIGSSLLVMKAPDPQSFKCGRDFAAWLGLTPKNHSTAGKQRLGVITRAGDPALRAVLVSGAMAVIRHARAKGATASPWLLRLLARKAPKHAAVALANKIARVAWKLMVTGQAYDPRRAAQPVAPAA

SEQ ID NO: 54171 - protein, 411 aa, unidentified
MIKENYMYVGIDLHKETHTAVIIDCYNQKLGEITFPNRPADFPKLVAKVKKCNTAGKEVVYGLENAYGYGRALAVWLIDKGYFVKDVNTAISHRQAKHRGAMYRKSDSDDAKAIALATLNMLDKLPDACPNDAYWSLGQLVHRRDNIMKQRTRLVNQLHEQLCIAYPSYKQFFNDISRPTALYFWETYPSRKYLKGKSVEDLRAELVPVSHNKCSTKTCEKILDAVASDKVKNNNFQDARDMVTLSIVSDLQHYDSQLAEVDKMLEQMYKMLGCTLTTIPGVNVITAVKILAEIGDIKRFGNANKLAQFAGIAPLHLSSSGKGKDVATKQGNRRLQATIYFLAIQMVQVSSKGTPRNPVVRAYYEKRKAEGKTSQQALICISRRLISIIYGMLKNGTEYRMPEVENAGENM

SEQ ID NO: 54172 - protein, 344 aa, unidentified
MLYVGLDVHKEFCQACVMNAKGVVRSNEKFKSTQEELDEFLSRFKDAKFVLESTGIWEFIYEGIESKGFEVVLAHPLKVRAIAEARVKTDKVDAETLAHLLRANLIPRSHVPSRDVRNLRQLVRLRAYLVRQSTGFKNRIHAELRRRGIRPPDYLRKIFSGRGVKWIRSLDIPTINASLNCLDGIGEQIDKLNEMLLDEFEQRRNAQLISTIPGIGFYGALLIASEIDDVRRFPHPSRLCAYAGLVPVVRQSASSVRYGSISKDGSKYLRWILTESIHIHKRVCPDSQLSKSYQKIARRRGKQVALIATARKLLNVIYWMLVRDEEYHCHGFNPDEKAAPRSAC

SEQ ID NO: 54173 - protein, 416 aa, unidentified
MKKGQNTRGYERYMALDIHREYILVGGWNEEKEWVLTPRRVGLEKFPEWAKKNVGAGDIVVLETTTNVWSIYDIVAPLASRVLVANAAEVGEIANARVKTDKEDIKRLLKLLVGGIVPEVWVPPLHVRELRAFTSYRGRLVKTGVMIRNRLQSLLHKHNLQLSETGLLDQAWWEAQKNISPLEKLQIRQELVLLQEVEKLKVAVDEELQRQSSSSTWGKQALQIMQLPGVGFIVAMTVLAAIGDISRFENAKQLVGYAGLGAGVHDSGKTHKEKKITKKGRRELRWAMVEAAWRAVRISPFWKAEYEKHLDRMRKPNQAIVVIARKLLVAIWHVLSKEETDMHASEEDLAYKMLVLSWSLSEDVRMGLTYKQFAKYALMKLGVETDITRFVRKNVPRRLAPRDEVLARMTELGLSA

SEQ ID NO: 54174 - protein, 455 aa, unidentified
MLKPQVIPDEDHEVVYERVAAVDVAKASGVVCMRTPDPARPGRFVNRIWDNVPATRARIAELGRELLSCQVQMVTLESTSDYWRVWYYVLESIGLAVQLVSASQAKNLKGRPKTGKLDAMWLARLTQWGMLRPSFVPPAAIRRVRDFTRARTDLVRERARVLQRLEKLLEDAMIKITSVARDGLKAKSVVAMVAALTAGERDPRTLADLAKGPLRGKRDQLAEALDGMFDSRHGVIAQMLLDQVAFLDQRIRQMEDQAIAALAQVTESWGVDAAGQTGPGCGTGPDSPVLAAAYRLAEIPGISVWLAIVIIAEIGLNMAVFPTPAHLVSWAGLCRSASQSGTRHGKGKQKKGNSYARAAAGQAALGAAGTATFPGERYARIARRRGKAIAQVAVARSIMIIAWHLLSGPAARYRDLGPDWHASRTSRDKKIRTHIHALKALGVTVAITDAEQQAA

SEQ ID NO: 54175 - protein, 426 aa, unidentified
MKVMHDRVAAIDVHKDMVKVAVRVPGERRGTRKTDVLEFRTFYGVLEEMGRELRRHGVTHVVMEASGVCTEPVYYALAGLDFTEVMVINPAHARALKGRKTDARDAIRLLDLYECGLLSGSCIPAPDLKEVRDLARYRMKTVQARASEIQRLQKTLETAGIKLSSVVSDVTGVSATALIEALIDGERRGAVLADLAQGRLRTAGKMAGLSMALAGRFTDHHALMCRLHLDRMQALGEAVAGLDAKIAPLAARHAREAGLLKSLPGFGDVVVAGWLGEIGPAPHQHFATAQRLASWATVCPGNCMSAKKSKGGRTGDGGNYIKPLLVQAAWAAVRVPGRLQARFRRLVRRFGGARNKGAIKRAIMAIARTLLKIAYQVLKTGTPCTDLGAGFYASRETTQARQDYLIRQLQKLNPGCVITVTPAEAA

SEQ ID NO: 54176 - protein, 347 aa, unidentified
MRFYTNLHPYYCGIDLHARTLYVCIIDDKGETLVHKQIGDDPDALFKIIEPYIGNIIIGVECMHCWYWVADWCEEIGVDFVLGHALYMKAIHGGKAKNDKIDSYKIAKLLRGGNFPIAYTYPKLMRATRDLLRRRMKIVRHGAQLKAHVKNTTSQYNLPPNNLNLRYPKKRDQMRDKFSDPSVQQNIDLDINLIDCYEKELCRVELHIKKHAKQHNATEFNLLKTISGVGDILALTMLYEIGDINRFESVQTFASYSHLVKCKAESAGKTYGTQGNKIGNAHLKWAFSEAAILYIRNNESGKNFIAKLEKRMAKSKALSVLAHKLGRAIFFMLKNHTVFDENKFLNV

SEQ ID NO: 54177 - protein, 341 aa, unidentified
MKRTLYCGIDLHSSNGMFMILDENDKVVFKKRLPNKLPTVLDALKPFRKKLAIVAVESTFNWYWLVDGLMDAGYPVCLANPAAIDQYDGIKQANDLTDATFIAHLARLGVLPTGYIYPKEDRPVRDLLRRRSLLVKYQTSTKLSLQNMFMRQTGQSFGYADICKLSDNELRLLLSDNENLLFVTSQQLDLTRQLKKKIKQFEKMIQAKAELKPEYELLLTIPGVGVILALVIMYETGDIQRFAKVGNYTSYCRCVRAHCTSNGKVKGRNNSKNGNKYLSWAFVEAVHHAKGCCPQARKFYDRKFSKRNGALATKALAAKWSKAAYYIMKNQEAFDLTKMFG

SEQ ID NO: 54178 - protein, 343 aa, unidentified
MKLSRVGIDLAKNVYQLHGVDRHGKTVWKRRLKRNQWLDALLDKTEPGCEIGMEACASAHHWGRELQSRGYTVRLIPPQFVKPYVKSNKNDARDAEAICEAMSRPNMRFVTVKTVAQQDIQATHRIRSELMSHRTAKANQIRGLVAEYGLVAPRQLSSLRAAIPCWLEDAENGLTGDFRSLLHGVWNDLLLLDDRVGEMDKLIKQLAKNHEACVRLQQLRGVGPLIATALVATVGDARQYRKSRQMAAAIGITPRQHSSGDRDRMLGISKRGDIYLRTLMIHGARSVVAFAKHKDDRLSRWVTNIAAKRHPNVAAVALANKTARMAWAMLRNETDYDPDFAIR

SEQ ID NO: 54179 - protein, 406 aa, unidentified
MTYRVFVGIDWGSQEHAVAVLTRDGTGAQERKVAHTGTAIAALVDALITLADGAPESVAVALEVPRGSLVEACLERGFHVYALNPKQLDRFRDRYTVAGAKDDRRDARVLASALITDVGAFRRLDPEDARLIQLRELTRLEEDLDTERRRLSNRLREQLYRVAPGLLTLCPGADEPWLWTLLTRASTPAGAAHLPRAAVARVLHQHRIRRLTPDDLLAVLRAPRVPAAPGVLRAVEDHLAVLLPRLRLAAEQQQTCATRLEQLLDELGQTQEHRDVAILRSLPGVGRKISATMLAEASRPLAARDYHALRTQAGSAPVTKQSGQRRRVTMRRGCNPRLRNAVHYWAQVSAGHDAVSAALYARLRARGCSHGRALRGVADRLLAVLVAMLRHQTLYDPERRRISAAA

SEQ ID NO: 54180 - protein, 389 aa, unidentified
MKYVGIDLHKKTISGCVVVKERGKKKVAARKRLECRDEAGIKSWFSELGKFEVVVEATASYEWFVKLVEPLACRVVLAHPKKLRIIAESKRKSDKLDAQVLAEFLASDEIPLAYRPGPRVREHRALVRWRNYIQRRLTSVKNKLRHILAAYNADVPHLFTVEGREHLATVKLSASDRFVSEQLVAELEQHQQRLVTANRQLREFAATAPLAEREARAVLDSIPNVGPVTTDVILAELGDWRRFHSQADVACYAGLAPGFRESAGKAKQLGITKEGSRLLRWVMIEFAWRMVGASRKWGGHYHRLEARVGAKKAIVAIARRLLGMIFALLRTGQKYALALESPPPASCRSKSPRDTNPSDPSCLRGQPRQASSLGAGVNYGGPLSVPETE

SEQ ID NO: 54181 - protein, 343 aa, unidentified
MQTVTTIGLDIAKSVFQVHGVDAEGKVVIRRQLKRRYVLAFFQKLPPCLIGIEACASSHHWSRELQALGHTVRLMPPAYVKPYVKRQKNDATDAEAICEAVTRANMRFVSTKTPEQQSGLVLHRARHLFIRQQTAVINAIRAHLAEFGIIAPVGRRGVEELLNVVADPNDKRVPEIARACLLAFGAQLRRLKEQILEFDRMIRAWHRSSETSRRLDDCPGVGPALATALVATVADPKSFRSGRNFSAWIGLVPKQHSSGGKNRLGSISKQGDRYLRGLFVAGALAVIRYAKIHGTKHRPWLTALLARRPTKVAAIALANKIARMAWAMMAKGERYKEPIALAA

SEQ ID NO: 54182 - protein, 335 aa, unidentified
MIVIGADTHKGSHALAAVDEGTGRVRGQREIKADEHGHVAAVRWARGLDEERVWAIEDCRGVSRRFEQALLAAGERVVRVAPHRMGASRKGEREPGKSDQIDALAVARAVVKDGIEKFPVAYLDEQAMEIRLLLDHRSDLVADRTRTVNRLRWHLLQLCPELERSVKSGAFDQSRVLDRVDRRLRQMPAGARVRVARDQVAHIRRLNRQAEQLKRDLLELIRAHRPQLLAEIGCGPLVAAILIGRTAGAQRFHSDASFALLAGTAPIPCSSGQRTQHRLNRGGDRQLNHALHIIAITRAQHDPATAAYLARKQTEGKTRSVSPSLISVGHVRPGR

SEQ ID NO: 54183 - protein, 358 aa, unidentified
MNEDRRTTTQEAVVGGVDTHKDAHVAAVLGSTGALLGTSEFPATLAGHADLLRWMVSFGDVSCVGVEGTGNYGAGLTRFLLAEGARVVEIVRPDRRARRFNGKSDTLDAENAARAVLAGDRTSAPKHRDGAVESLRALRVARTSATKARRAALQLLRNTIVSAPDGLRESVSGLTRTVLVRTCAAWRPNREVAHEPTTATRIALRSLARRILHLEEEIADLDGLVASLVARINPRLTEASCLGTEIAAQLLVTAGENPERMRSEAAFAMLCGVAPLPASSGKTRRYRLNRGGDRAANCALHMAAISRLRVDPRTRDYAARRAAEGLSKKEILRCLKRYLARELYKLLLPLPPDAPRMA

SEQ ID NO: 54184 - protein, 410 aa, unidentified
MPKIVYPICCGIDTHKSFVVACIASTDTALITTYKSKRFSTFTGDLRRLAEWLRQNSCADVCMESTGKYWIPIWNILEPTCKLVLAHPKYVKAIKGKKTDKRDAKWIADIFKHDLINGSFIPPADIRQLRDLVRYRFKLTNYTTGEKNRAQNCFTVSNIKLDDVFSDVFGKSASAITERLLESNEPFDVTPYVSKKCKTPISEIQAAVDGTMCANQAEKLRIIRSHMDSLELCKANLESEILSVAEKFLPQMNLVMTVPGIQSFAAVAIIGEIGVDMSVFATSRHLCSWAGLAPQNDQSAGKKKTTRISRAGLYLKPLLVQCALTAIRKKSNPEIASRYNAIKKRRGHKKAIIAIARMMLTAIHNILKKNESYNAELYRQSDKPPVQREVSVEQAIFILQRQGYLVTAAT

SEQ ID NO: 54185 - protein, 343 aa, unidentified
MIHVGVDLHKRFCYMTALDSRGKQLNAQAVANETAALRAYFKQFRKPVRAAVEACSFWPAFRAAVGKQVELRMVHPMRVKAIAAAKLKNDRIDSATLAHLLRCDLLPEAWMADEPTRELRQQVRLRATLVRQRTRLKNQVHAILHQHGLKAGGGTDLFGKAGRAWLQQVRVGEKAQDALAIYLKLIDEFTVHVEQQDGEVKEFVSGDRRAQWLMTIPGIGRYSAMLLLAEIGDIERFAHPRALSNYAGLVPWVRESADKRRSGGITRVGSPWLRWIMVEAAQVAVRTSPAVKDYFERLRRRKHRNVAVVAVARKLLITVWALLQHGECFDEARFVCGCVKDGA

SEQ ID NO: 54186 - protein, 412 aa, unidentified
MEQIHDRIVGLDVHRDQVTACVRIPGPRGGARTEKGRFGTTTGGLNALAEWLSGHAVTLAAMEATGVYWKPVYYVLEDRFQVWLCNAHHVKNVPGRKTDMSDAEWLADVAAHGMVRPSFVPPPPVRELRELTRYRKTQVDARAAEIARVEKVLQDAGVKLTSVASKVLTQSGRAMIEALIAGERDPAALAGLAKGKLRPKIPQLTEALDGHFGAHHAIVAARILTHLESLDDAIAVLDGQIAARVAGRYQSAARLLADVPGLERRSIEVIIAETGADMSCFPSPAHLASWAGLCPGNHESAGKRRRVATTPGNQWLRRTLIESARAAARTRDSYFGAQYRQIARRRGPNKAAVAVAHSMLDVIWHMLTTGEVFTDLGADYFTNRQDKEHQTQRLVKQLEKLGYTVQLAAATA

SEQ ID NO: 54187 - protein, 431 aa, unidentified
MNYNQNHKIAQITPKTLIIGIDIAKHHHVARAQDYRGIELGSTCFFDNTQEGFSYFIEWINQLKETNKMESVISGMEPTGHYWLNLAHILKEKQIKFVTVNPLHVKHSKELDDNSPTKNDVKDAKVIAQLVKDGRYAEPTIPQGVFAELRVAKKLRDLLTVDLQIVQGQVHNWIDRYFPEFFTVFKSWEGKAALHLLKLEALPHEYKKYTEEELLVYLRKEVKRSIGMKKIQALKKAANRSIGIRQGAMMAKMELRTLIQKYELIQAKFEELDRSLDTLLQDIPGVSQMLEITGIGRETVAGFYAEVGDLNEYSHPRQITKLAGLSLKENTSGKHKGRTKITKRGRKKLRALLFRASMILVAKNKAFKALHQYYTTRPDNPLKKMQSLIALCNKLIRILFSIGKKQFVFQEEKMLKDIPHMNAFIDVQLVA

SEQ ID NO: 54188 - protein, 358 aa, unidentified
MSNGSRVQLKMTAGLDLGDKYSHMCLIDTDTSEVIEEGRLRTTPETLRRRFDSEQPLKIAIEVGTHSPWVSRLLEECGHEVLVANARKLRLIYGSKRKTDKLDAENLARLARLDPKLLYPLKHRSEASQAHLAMIRSREALVGSRTQLINHVRGAVKSFGARLPRCSARSFHKKVAEDLPKELVSVLGPLLETIGELTERIREYERKLEEITSEHYPETELLRQVAGVGALTSLTFVLTLEDPHRFSKSRSVGAYLGLVPGEDQSGDSDPQQQISKEGDEMLRRLMVGSAHYILGPFAPDSDLRRHGLKIAERGGKNAKRRAVVAVARKLSVLLHHLWVTGELYEPLHNAQRSGDQAA

SEQ ID NO: 54189 - protein, 341 aa, unidentified
MRTLYVGMDIHKNFIQATAMDQAGNIIKEQQFKSDAKEIKRFVKSLKTKNVQAAIEATCTWYHVYETLDALGVETTLVNMRRTKTIAESKIKTDKLDAKTIAHCLRTGFIATAYIPPKTIMEQRNILRHRMSLRKEITRYKNKIHAILLRNGIQHSDYSDLFGVGGMRFLRNITLPDSEQYSLTSYLNIIETLIHEKTQTAEKIETLCKHNPQAMLLTSIPGISYYSAIIILTEIGEIHRFPHPKKLCSYAGLVPRTIQSGSHVYHGRILKECNQNLKWILDQCAHIHIRHCPNSVITKLYYRVENKTGRNKAIVAASRKLLTCIWYMLMKGETFKYSNDD

SEQ ID NO: 54190 - protein, 346 aa, unidentified
MAIITVGIDLAKNIFAVHGIHAAGKPELVRPSVSRAKLLDLLASLPPCLIGMEACSGAHHWARQLQKLGHTVRIIAPKFVAPYRLSGKRGKNDAADAAAICEAVSRPHMRFVPIKNEEQQGQLMVHRARQGYIEQRTATINRIRGLYSELGIVMPLKAATVRQQGHQHLEALPGWARTVITDLLDEVQHLDTRIAQYDRHIASMARQHSQAQQLMQLGGIGETTASALISTIGNGHDFANGRQLSAWLGLVPGQYSSGGKSRLGRITKTGDRYLRSLLTLGARAVLAAAMRKTEAGGYDKQDSISRWARSVAERRGYWKAVIAIAAKNARLCWAVLSKGEHFKLPT

SEQ ID NO: 54191 - protein, 319 aa, unidentified
MTHSIGIDVGKTELVACIRDTDGKTAIPAPFPNSSVGLAKFVVYLKANDVSPDDPVLLESTGPYHWKAARTLADEGYFVKVANPIHTKQMARLSIRKRKTDKVDATHLAFLAQQGYGYRFIETEEMARKKALVRHYWKLRQSASDHLRHDNYLKEYRGIDDQSVSKFMVKRCLALKKLIIREWSKGNDVKYLDSIPGITPFLAATILAELLPLERFKTIDQIVAFSGLDPSVKQTGGKSGHHGSISKRGSPTLREALFLAAFGSFQREPMQSLYVRYKGRGLHHNTVLCILGRKILRISVALLKKRRVFDAKYLSTEEN

SEQ ID NO: 54192 - protein, 346 aa, unidentified
MKHSVGLDVSVKETAICIVDEAGKVVREGKVATEPQAIIAFLSSAGVEYARIGLEAGPLSQWLVNRLSEAGLPVICVETRHMKAVLKAQQVNKSDRNDARGIAQMMRVGLYKPVHVKTLASQQARMLLTSRKLLRDKLQDMENELRGTLRNFGLKVGVVSSGHFEARIKELVAGQPPLEMIVVPLLAVRRVVREQLAKLDKMVLDQVRDDKLCRRLMTVPGVGPIVALTFRATVDQAQRFARSKTVGAHFGLAPRRFQSGERDYDGRVSKCGDAMMRTALYEAAQVLLTRTRTWSWLKAWGMQVARRRGAKKAIVALARRLAIVMHRMWVDGTEFRWRKEADTAAT

SEQ ID NO: 54193 - protein, 349 aa, unidentified
MIVIGIDAHKRSHTAVAVDERSRKLAEKTTGTTPAHHRELLSWAQELGGGEVLWAIEDVRHLSRQLEIDLLVAGQSVVRVPTKLMAHARDFARTYGKSDPIDALAVARAALREPNLPTARLDGPERDLRLLVDHREDLVNERTRICNRLHWHLHELDPSKDVGDKMLGRYRVLDELTAWLGSQSRSTVRRIAAELVDDIRRLTIRIKDLEKEITAMVNNMAPTLVGLDGIGALSAAKILGEVAGIDRFDDKAKFAAHNGTAPMPVWSSNNVRVRLRRTGNRQLNCAIHRMAITQMRMNNEAKAYLEKRMANGNTKTEAIRSLKRRLSDVVYRALTTDSNQQASTTPVAA

SEQ ID NO: 54194 - protein, 349 aa, unidentified
MMLHAGLDLSRRRLDYCLLNEQGERVEVGAAPPDADGLGGLARRVSESYGRVPIRAAIESMNGARFVHDALERHGWEVEVADAQKVKGLAPLACKTDRIDAWVLAELSRRDLVPAIWLPDFAQRAERERARFRLYLVRKRSSLKHRIHAQLLAFGHPCPVSDLFGRRGRELLERLQFPEPWHGGVLAALVMIDDLDRQIAGIDVELRRLGASHRYIPLLMSVPGIAWVLGYTIAAEIGDITRFATPAKLAGYTGLCPRVYQSGHTDRRGHLTHAGPRYLRWALMEAATHACRHPAYRARYLRTKRRLGRQRGPKVAQVDVARRLAEAIWHMLTRNQPFAPAGATRPLAA

SEQ ID NO: 54195 - protein, 343 aa, unidentified
MNYYAALDVSLRSVHLCVMDEAGEIQAEGQVDSEPQDIDAFLRKLGLEITRVGLEAGTLTQYLTYGLRDAGYQVVCMEARQVKVALSAMRNKTDKNDARGIAQLLRTGWYSPVYIKSIESHQIRALLSSRKAVLTKCVDLENEIRGLFKVFGIKLPPRLGHGSFDRAVRETIENDRALGHALLPLLDARLVLYHTFRELDNRTRHMAHQDPVCQRLMTTPGVGFVTALTFKAAVDDPTRFKRSRTVGAHFGLTPRRFQSGEMDNPGHISRAGDPDVRCTLYVAANAMMTRSSRWSPLKVWGMQLARQRGHKRAVVAVARKLAVILHRMWLDGTTYRWGTEGAP

SEQ ID NO: 54196 - protein, 316 aa, unidentified
MAMRVSKSIVGVDVAKIELVTYQVDLELLTSIANEKPAIKRWLKTLPRTTAIAVEATNIYHVDLVELAYESGFDVYIIDGFQLSNYRKSIGGRSKTDASDARLLARFLKNEGEDLRPWSPPPAVYGKLQSLLRRRASLVQAKTSLTQSWANDASLKAAFAAFLKSIERLDLLVKKKLKDALREAGLLEQVARCQAVEGIGFLTATALVMAYSRGDFNSGDSYIAFLGMDLRANDSGQKNGRRSLTKRGCSEIRRLLHNAAMSASRSSAWKEFYDHHRSRGKATTQVFVMLARKLARVAFALMKNQSEYQTKGRIVA

SEQ ID NO: 54197 - protein, 435 aa, unidentified
MSSLSKINPHCAGIDIGNESIFVGIEDCDVTSFGTFTDDYINLIAFLKEHNITTVVMEATGVYWITLFEMLETAGISVTLVNGKQVKYLPGRKSDVADCQWLQQLHSFGLLRPCFIPDDITRTLRTYTRLRADHLSLASSHIQHMHKALTLMNIKVQNVISQLHGVSGMRIMTAIVLGERNPERLADLCEKSILKTKRERVVASLKGNYKSEHIFALKQALCAYDFYQNQITECDKQIEALLNDHTDTLPPPTILTPPKPIRHNPPQIDDLHTKLMKMTAGNDPSQITGLTDKTLLELIAETGTNLQKHWITEKHFASWAALSPNMHQSGKTNKRRKIKKNSRAGQIFREAALSIAASKHAALSAFYKRMKAKKGFLHALKATARKIAVLYYRIMTKGLAFVEHGIQLYQQRLKEQQLRLLHKKARSLGLLLVPG

SEQ ID NO: 54198 - protein, 452 aa, unidentified
MSNKKVALEIVNPHAAGIDVGSRSHYVAIGQSAEDVKEFGVYAEDLKELADWLLENNIETVAMESTGTYWQNLFATLQQAGLKVILVNGKFTKNIQGKKTDVKDCQWLQKLHSIGLLTGSFLPDHATEQLRTYCRHRSSLIDTAADTTRRMQKYLRLLNLRLDIVVKDITGLTGLAIIEAICKGETNAEALSSHRHGNCRKSKEEIEKSLQSNGRQDYLFALQQEFEMYKMLQKKITECDAAINNLLIEQISNDENKKRLKAEKKVHKRINKNAPKNIDINQLAYQHFNGIDLMNIEGVSHNTVIALMSEVGYDGLKKFESAKQFTSWLRLSPNNKISGGKILSNRIAKGSNRLKIALRNAANAIGNLKDTHLSNFFKRVCFRRGRPAAISATARKLAVVIWNMIVKGIPYQSPTTYEFLDQKRKRKVQEMKKLIHKFDIKTHELGLQLIRL

SEQ ID NO: 54199 - protein, 354 aa, unidentified
MVTVGIDPHKHVHVAVAVNADGKRIGKPLTVSNDVSLIAVLLKWIRSIEDGVPVTWAIEDGRGFARRLADGLLLAGHEVVWVPTRLAAAHRKLHAATGAKSDQIDATAVAHAAIANPGLDRHRIDERVRELRVLVDYRTDLIKRRTMAINQLKAQLHVWLDHTPGDLARARNLEAVTALVNTASLRTHVRQALIGMITEIAEINKRVHDLDTAIKQLVTPLAPALLEVVGISHNSAAVLISEIGDITRFATSAKLARYTGCAPIPVYSADNERHRLHRGGNRRLNSVLYTAAIVQKRRHPPAQALLARHESAKGARGARRILQRHLIDVIHRAMTTDRTAWQHHVTHHQPANLT

SEQ ID NO: 54200 - protein, 370 aa, unidentified
MKKDTSRNKQQIRSKAERGTREGLEFYIGIDLGDKNSDVCVLDRRGELSKEFRLRMKEEDFQTYFASIPRSRVAVEAGAQSRWVAEVIEKCGHEVYVANTRKVPYIHQSDNKDDPGDACKLAELLYFKPRLLHPVQHRSREAQADLSWIRAREVLVESRTQLINAVRGMSKAFAQRLGTCSTEAFTAKRAGQIPEAIRGAVAPLLETIDHLNEQIRSYDEMEAHIARERYPKYELLKQVNGVGIHTALTFMLTLGDPERFQKSRTVGSFLGMRPRQRESGESKPQLGITKAGDMFLRKTLVNCAHYILGPKGKDSDLRRFGQRICLRGGKNAKKRAVIAVARKLSVLLHRLWIAGEVYEPLRNSKQAAAA

SEQ ID NO: 54201 - protein, 320 aa, unidentified
MLSFCGIDVSKDRLDVMVLPDEYSSSVPNDPAGWAILVEQLRGFSITAIGIEASGGYERGAVRSLQAAGMPVRQVNPFKLRQFAKASGVLAKNDPLDARMIASFVGIMPTRPAQRTTPAAEQLVEMLAVRRQLSAEKTAAENASRLLEDLMLQRLSRRRIARLAADIELLDKRLVEIVATDATLAHRYRLLTSMPGVGPVLACTLIALLPELGGMSRKQVAALVGVAPYAFESGTLKGRRCIWGGRANVRQVLYMAAMSASNWNPALKLFHDRLKGAGKLPKVVIVAVMRKMITTLNAMVRDDIGWADRLSGRHSVTTAR

SEQ ID NO: 54202 - protein, 338 aa, unidentified
MGYFVGIDLHGDNNYIGILDEEDRRVFKRKNRNDIKEITRVLEPYQEEIKGIVVESTFNWYWIVDGLHEAGYRVHLANTAAMQQYEGLKYVDDTRDSFWLAHMLRLEILPEGYIYPKETRSVRDLLRKRMMLVQQRTAHILSMQTMVSRNKGVSISSDTIKTMSDEEVEGLFGDEHLVMSAQCDHEVVGVLSGQIDKIEKAVLKEVKLKKPYKKLLTVPGIGEILAMTIMLETGDIERFREVGKYSSYCRCVSAKKVSNGKNKGKGNRKNGNKYLAWAYVEAAHFHVRYCEEARKWHQRKASKSNAILATKALSNKLARACYYIIKEQAHYDKKRMFG

SEQ ID NO: 54203 - protein, 331 aa, unidentified
MYFSQFIGVDISKDTLDAAIYPAKDKKMDFLHFDNTSKGLCEMLAWLKRRGIKSSEMVICAEHTGVYTNPLIAFAEKKGLALSLNSPLDIKHSMGIARGKNDAVDAGRIAEYAHRHQDKLKLYEKPSETIIKLQYLLTERRLYMRQRTALLNINSAMGKYETAEARSRNESAIHHIEKMVKKVEGQMTAIINDDPEIKRNFDLISSVKGIGLINAINTVVYTNNFKSFETPRRYACYIGVAPFDYTSGISVKGKTQVSKICRTQQKAELSMAARSAIIHDPGLRRYYQRKMKEKGGGKEAHGVVLNAVKFKLILRMFAVVRSGEPYKVLNY

SEQ ID NO: 54204 - protein, 456 aa, unidentified
MPRKTKKKTQKRKIVKLESLKKLNLNAAGIDIGADEIYVCVPEDRDAQTVRNFGTYTQDLFEVSRWLKECDVDTVAIESTGVLWIPLYEHLSEQGFDVCLVNAKHIKNVPGKKTDVLDCQWLQQLHTYGLLQGSFRPKEEMVQLRSLVRQRAMLIESRSRHIQHMHKALQQMNVRLDRAVSDVTGKTGMSIIRAIIDGEKNSRQLATFRDGRCRLSEEEIAKALEGNFRDDHLFALKQAVELYDFYTQKIVDCDIKIESRYAILHPEFHQDLPALPAAKKHNKVGNQPHFDLQSDLYQLCGVDLTAIEGVSTLTVQTVISEIGLDMSVWPTAAKFARWLGLAPNNQITGGKVIKRGTSKVTNRATQALRMAAQSVYRSDGPIGRFYRRIKRKHGPQVAITATAHKLARIIYALLKSKTPYQPQLLDDYEVKREKYRLHLLHKQAQKLGYDLTPIQS

SEQ ID NO: 54205 - protein, 385 aa, unidentified
MQASNVSTPIAGHSGTIFVTIELSQRCWLVTMHSPDKNRFSRHKLEGGDAVGLLGLIERIRVRAAQALGSTPRVVSCYEAGYDGFWLHRWLEAAGITNFVFDPASIAVEQRARRAKTDRIDGELLLRTLMAYCRGEPRVVRIVRVPTPEQEDARRATRERERLIKEQTAHTNRIKGLLRLSGLAAGNPRRRDWMAWLERQRDRNGEPLRPQLMAELGREHARLMLVGEQLKELSRASEDEPVSAAAAEMAQRSAKLQRLKALGPVFTGTLAGEVFYKDFHNRREVAAYVGLAPSPWRSGRTNREQGISKAGNPRARAKAIELAWLWLKHQPESALSRWFHERTGQGRGRIRRIAIVALARKLIVALWRFLTTGLVPEGAVLKAAA

SEQ ID NO: 54206 - protein, 287 aa, unidentified
MNKHSILFIGLDTHKEFNEVAYIEEHRGAQPVHLGRVSSSKIAVQKLVRQFESKYPGATLHFVYEAGPCGYWIYRLITSLGHCCYVVAPSLIPKKPGEKIKTDKRDALKLAKLLKSEDLTPIYVPEPEDEAVRDLSRAREVAMKDLKDAKYQLKALLLRNNINYKGTANWSQKHLRWLTELVLPHPAQHIVLQEFLQTITERISRLERLDNELTHHVHQWRYYPVVKAIQAMRGVRLLVATGVVAELGDLTRFDHPRKLMSYLGLVPSEHSSGGKRHYSGIVNLATH

SEQ ID NO: 54207 - protein, 370 aa, unidentified
MGKSLLYVGLDVHKMSVDVAIAEAGPAGEVRFYGRIGGDLEALDKVTRKLQAQGAELRFAYEAGPCGYQVYRHLTARGLECLVAAPALIPRRPGDRLKNDRRDALALARLLRAGELTPIKVPDEDDEAMRDLTRAREDAICVERRARQRTVAFLLRHGRVYQGKTTWGRGHWAWLLQQVMDHPAQQIVLQEYLDAVREASARVLRLTGQIRDLVPQWRQAPFVAAYQALRGVSLIVATTVVAEVGDLDRFNNPKELMAYLGLVPSEHSSGASVRRGRITKTGNSHARRVLVEAAWAYRLQARVTRHLLKRQEGLPERVRQLAWKAQLRLCTRYRRLLARGKARQTIVIALARELAAFLWAIGRAVAQATA

SEQ ID NO: 54208 - protein, 395 aa, unidentified
MFIVGIDIAKRSHEAIIITEDGQVVRKAFSFRNNCTGYNLLLEQVRRLTLVKSQIVFAMESTVHYWLALYARLLKDGYTVMVLNPIQSHSLRELYIRKAKTDARDSLIIADLVRFGRCKASNVPQDKILALRELCRSRAYLVDMAADLKRKLIALLDRIFPEYESLFDSVFSKASIAVLSKYSTPQKVKNANLGKLTDLLMESSNGHFGEWKAHQLKEAACSSFGIDDSGGVYSTLLGMFLEQILSLTAQADSLEKQISVFFQEFNNPLTSIPGVGTVLAATILSEIGDITRFSSADKLLAYAGLDPSVKQSGEFKSNQNRMSKRGSPYLRRAIWLASTVAVHRDPMFQTYYEKKISEGLHYMNVIGHVSRKMTAVIFAVLRDGQPYQPILQSAG

SEQ ID NO: 54209 - protein, 365 aa, unidentified
MSSVPSAAELIHLGMDTSMNEIVAGVLRPGEEMPVVSRIPNDEESIRRLIGRFPDRWLLSACYEAGPGGYELHRLLTSMGVACDVVAPSLIPKGASDKVKTDRRDSVRLTLMHRAGLLTAIRVPSPAEEAVRDLVRARGDLLDDRRRMQQRLNAVLLRHGRTWRGAKWTYAHRVWVDKQVFDEPALAEAFALYRGGLDAREAELRAAEARLAAWAGRDPLAGQVARLGAYRGIAQLTGLTLAAEVVDWRRFASARAFMGFAGLTPTEYSSGSRTRRGHITKAGPEGVRTALIEAAWAYRYRPAIGVTLVRRQAGLPPETLARSWKAQQRLHARYKKMTARGKPAGVAVVAVARELAGFVWAEMTS

SEQ ID NO: 54210 - protein, 348 aa, unidentified
MRFYTNTHQYYCGIDLHTRVMYLCIISSGGEIVLHRNMKADPESLFKAIEPYRPDIVIGVECIFTWYWIADLCAEEGIPFTLGHALYMKAIHGGKAKNDKIDSGKIAAMLRGGMFPMAYVYPAKMRALRDLLRRRNYMVRRRADLLSHIQNTNSQYNQPGFGRCHIAHKCRREEVLSHFRDPAVLAGIKADYALIDQFSVQIRALEQAVLDGAKQHDPQALFLIRTIYGIGKILSLTILYEIGDISRFPRVQDFASYSRLVKCSRESAGKRYGTSGSKIGNVHLKWAFSEASVLFLRCNPEGLKYKKRLERKHGKAKSLSILAHRLGRATYYMLKRGKAFDMKKFLSA

SEQ ID NO: 54211 - protein, 381 aa, unidentified
MPESATNTSNSEPPLFLPVVALNDVTGGIDWARDDHAVAIVDGRGREIHRHTVEHTTAGLRQLVNTLGKHGVVEVAIERPDGPVVETLLEAGLTVVVISPNQVKNLRGRYGSAGNKDDRFDAYVLADTLRTDRARLRPLVPDSDATIALRRSCCARKDLASHRVAAANQLRVHLRNVLPAVVGLFRDLDSAISLAFLTRFTIQDQADWLTPKRLGDWLSKQGYSGRLDPAVLHQRLLDAPCGATGEHATAQAHITAALVAVLQTLTEQIKILSTQIDHQLDAHTDAHIFTSLPRAGRVRAARLLAEIGDCRAKFPTPESLACLAGAAPSTRQSGKARVVAGKTASPTTPTNTAPCNASSPLKTKRLDIGFLMPTCPVRSPP

SEQ ID NO: 54212 - protein, 437 aa, unidentified
MLSYLNLNAAGVDIGATEIYIAVPGDRDPQPVRCFSTFTEDLHAAADWLKACHIETVAMESTSVYWIPLFQILEARGFQVFLVNAHHVKNVPGRKSDVSDCQWLQYLHSVGLLRGSFRPEQAVCTVRSILRHRDGLVQMASSHVQHMQKALDQMNLQLHHVISDITGRTGITILEAILAGERNPHQLAKLRDRRVKATEETIAKSLVGDYRREHLFTLRQSLESFRHYQELIAACDREIAQSLEEFESKLDPPPGSPSPSKDGSKAKASEPRFDLQTHLHRIFGVDLTQVPGIHVLTTQTLLAEIGPDLSSFPSGPEFASWLGLCPDNRVSGGKVLSVKTRKVKNRAATALRMAAQSLHRSQSYLGHFYRRMRAKLGAPKAITATAHKLARIIYHMVTTGHAYDETICAQNEVQNRQRMEARLRKQARELGLQVVAL

SEQ ID NO: 54213 - protein, 410 aa, unidentified
MQVLYERCAGLDVHQKSVVVTVMLTAPTGQVSKVTRTFSTMTADLLALDSWLAQQQVGQLAMESTGVYWYPVYNLLEEGRSVILVNPQHMRAVPGRKTDVKDSEWLAELLRHGLLKASFIPPKPIRQLRELTRYRKRLVQERTQALNRLQKVLESANIKVGTIATDLLGVSGRAMLEALIAQEHTPVQMANLARGRMRSRIPALRQALEGRVTDHHRFLLRQMLNHLDFLEQAIQQVQTQLEHQLAPYAEAMALLQTIPGISATSAAAIIAEIGVDMSQFPSAKHLASWAGLCPGNKQSGGKRLQAGTNPGNRWLRGTFGEVAWVVSHTKDNYLVAQFRRLAHRRGKYKAVIALAHTILVIIYHVLRDKRPYTDLGADYFDRLETARVERYHVRRLEQLGYTVTLAPVVA

SEQ ID NO: 54214 - protein, 344 aa, unidentified
MSSVIPKTVFVGLDYHSESVQVCVLDRDQKLLANQSCSNDWRAVVAAVQKRCGEQVNVQAAIEACCGAADLADELIAQAQWSVNLAHPGYVARIKQSPDKTDFSDARLLADLERVGYLPRVWLAPEEVRELRRLVRYRQALTKERKNLKLQIGATLREARKKPPVELNSWTKAWLAWLEETAVLSRNARWITRHRLTRLATLAKEIRAVELRLEQQTAQDPLVRKLLTLPGIGLVTAVTIRAEIGRFDRFRTGKQLARFCGLTPRNASSGQRQADAGLIKAGNPQLRTVLVEAAHRLIRYDERWTRLAAQLCRRGKPVSVTTAAIANRWVRWLFHQMQPGQLAA

SEQ ID NO: 54215 - protein, 389 aa, unidentified
MKIFVGIDIAKLNHFAAAISSDGEILIEPFKFTNDADGFQLLVSKLESFDKNSIIIGLESTAHYGDNLVRYLVAEFYQVCVLNPIKTCQMRKNNVRKTKTDKVDTFVITKTLMMQDDLRFITFFDLDMMDLKALGRFRQKTIKQRTRLKIQLTTYVDQVFPEIQYFFKSGLHQHAVYALLKEAPSPKEIASMHMTHLANLLKVNSHGHFTKEQAKELRVLAQKSVGANDSAISIQITQTIQQIELLDSQLEKIEAEMTDIMKFNDSVIMTIPGIGYINGGMILGEIGDIHRFSNPNKLLAFAGLDPSVYQSGNFQAKTTRMSKRGSRVLRYALVNAAWNVVRNNATFKAYYDAKRSEGRSHYNALGHCAGKLVRVIWKMLTDEVEFNLE

SEQ ID NO: 54216 - protein, 440 aa, unidentified
MAVRKREDDVFPNAAGIDIGASSHWVAVGPRVTERPVREFGVMTDDLNALADWLISCGVDTVAVESTGVYWIPVYEVLEQRGLQVWLVDARQMKYVPGRKSDIQDCQWLQKLMSLGFLRAAWRPASEVCVVRAVARQREVLLTEQASWIQRMQKALVQMNIQLTEVLTDVMGMTGQAIIRDIVAGQRDPRILAQHRNSRVHASLEDIVKALTGNWREEHLFVLGQALAMYDDIARYLGECDAKLQGLLVDLGQHNVDLGKLPRAGSKVRQEYDTRQTLANWAGVDLTRINGLGLSAVMRILSELGPDLGRFANVKHFCSWLGLCPSSKISGGKVLSAKTKRSTNRVRQALKMAAMSLSHSNSALGAFYRRLCTRMAKPQANAATAHKLARMVYFMLTRGEDFVDKGQQHYEEQQHQRSVAALKRRAAALGFQINPMPATA

SEQ ID NO: 54217 - protein, 331 aa, unidentified
MFPVGIIVSKETVDLCMLYDGMKGRVKTRNIRNDSSAVAHLLRWLRLQHCGPEDVHVVMEATGVYHERLATALHDAGFYVSLANPHRSREFARGMGIMTKTDKVDAYMLACYALLIKPHRWEPPAADIRHLSALLRRRDVILADAVREENRFEKYQSTETPADVVSSCIRMAQLLREEVRSIERQVKAHIQASQDLKRDYALLTSIKSVGPQLEMHMLVVLRSHHFESADQAAAFLGVVPVEKRSGTSVRGGPRMSKIGPPQLRAKLYMSALCGKIHNKRMRNIYEAMCLRGKPKMVAIGALMRKLVHWCYGVLKTGTAFCDGGPRAALNT

SEQ ID NO: 54218 - protein, 417 aa, unidentified
MEVVHPRCAGIDVSKQDAKVCIRIQGSNGRKTSSTVTTWGSMTNQILALRDHLAAQQVTVVIMESTSDYWRPFYYVLEADFEVLLVNAREVKNVPGRKSDVSDAAWLADLGAHGLLRASFVPPEPIRQLRDLTRTRTHITRERTREVQRLEKLLESAGIKLSSVATDITGVSGRLMLQALIDSNGTADPAVVADLAKRRMRSKVPVLTEALNGHFTAHHAFLTLLFLDRIDGHTKDIELLSERIDELMTPFLPARELLESIPGFSQTVAEVFIAETGGEMRQFPTPEQLASWAGASPGSNESAGRVKSTKTRPGNRYLKGALGVAALNQARSKSKKTYFSAKFRHLAPTRGPMKAIVAVEHAMLTAAWHMLTNAEFYRDPGADFYTRHDPTKTKARAVKQLEALGYGVTLQPAAQAG

SEQ ID NO: 54219 - protein, 359 aa, unidentified
MSTITIGVDLAKHLFSVCEMDGVGHILRRRELRRDAFALWLAELPSKTVVAMEACSGAHYWARRCLEYGLQPRIIAAQFVTPFRKARRTKNDRADAEAIATAARQGNMRFVPVKSVDQQVRLSWHRVREGYKTESLAIGNRIRGLLAEFGVIVAQSDLALRRLLADLDAQIGLPAEFKELLRDLAGHWTSLRKALDACDARIEAHARDDERCVRLRAIVGIGPITADAAVATVGNAREFKQGRQMAAWLGLVPTQHSSGGHTQLGQISCRGDAYLRTLLIQGARSSLQRAKVVAIEKATPEQLWIRTLDGRMPFGKVIVAIANKHARQVWAMLAYDVDYDPCACLNHPMHQHTYAAHAA

SEQ ID NO: 54220 - protein, 441 aa, unidentified
MNNNEEKQSVADRPSTVQDIVLWIGIDWADQKHCLVTCRLDGSGSQLHWVDQKPERLEEFFLDLRRKHPTGRIGVVLEQSRGALLYALLKYSFLRLYPVNPRCLADFRKAMFASGAKGDPPDAGLLCELGCKHGERLRELELEDEATRQLRLLNEHRRGIVDDQTALTNQLRSTLKCFYPVALDLFGDEVIAPIALAFLKRWPNLAAAKRAKPGVLRSFFRQHNSRSEEKIQQRIEALAQAQPLTEDQAIIAPLELLVQTLIVRLQAVQSSIAAYDERIAVVFASHPKAEVFASFPGVGPVFGPRLAAAFGTSTSNLPEAGSMLCWSGVAPVQQQSGKSKVVQWRWARPKFLHQTFVEYARSSVMFCGWAREFFDSRVEKGWSRFRIYRALAFKWIRILWRCWMDNVAYDEAKYLAGLQKRGVKLYASLYAAPATSGQKNS

SEQ ID NO: 54221 - protein, 464 aa, unidentified
MGCAIGIDPDSTGVVCALVNGSSVINKSFSATQEGLRQLLKWIGRQDEVLVAIEGFHGQSQPLEKVFRDSGLVFHSFRPADTEKFRKAVLGQNKDNQKDAESVARYALALESQGRLERYRRVWFPDMELQLLTRSLDVLSTQITAEVNRLWKFLRYASVDLYLVLGGKNPEVDYSEQKALKNQGILNLLIHQPDIGAWKDLDDQQMLQAMGGGNYKGRQKLIAALRCLAPQLPSLSAPLALILKTAAHRLQRLLDEHIDLKRGLEDLVHERPQIQALTAIKGVGIPTAATILAEIIDIRRFSVEDSLAGYCGLGMKLHSTGQTERMMPSRQFNHRLKDAFMTAALNYVRYNPDSHLAGYHRNLIKHGMKATEATKRVARALVRAVYRTLVNVVAQNSESQDAKGGESEVASEQSRSGQSRNSNTSPSTPKSSEAKRLAAVKLRQADATESRTRRKRRVIPKQTA

SEQ ID NO: 54222 - protein, 418 aa, unidentified
MNEEGNTRGTRRYVALDIHKHYCVVAGVDRDGKVLLQPVRVEHADLEGWLKKNLRASDHVVLESTTNAWHVYDLLAPLVERVVVANPIKVKQIASARVRTDIRDTLILARLLAANLVSAVWVPPAHVRQLRQLLSQRRQLVETHIQIVNRMHSVAHRHHLKHERGKRFNEKTTAWQKDKRLSSVEQFQLELEMENRAYIEKQIGRIGKEVAKMSHQKPWAESMTYLMQLPGFGVITGMTVLAAIGEVQHFESARHLASYSGLTPGLEQSGTKYREKGLTKEGRKELRWALVEVAQRAVKSDPLWTRRFQELQKRMHRNQAIVAVARRLLELVWYVLTRHQPYRHFSHERIAYKYLTWAWQMDDEARDGLTRQQFARYYLMRLGIGHDLTRIALNPKYPRKLASEAELLALQPELNHIE

SEQ ID NO: 54223 - protein, 323 aa, unidentified
MQGKVLLEARSAQPVYVGGDVCKDHLDVYLHPLAHRCRVTNDRNGLRRLKRLLAEHDVKLIVMEATAKYHRLAHRSLSQSGLAVAIVNPLRARLFAEAIGTLAKTDRVDAKMLAILGEALGPQARPPAEEALEALQELVHARNTATAERTALANRLAASQVALLRKELRQRLKSLDGHIERLDAAIVARIAADPALARRYEILISIPGVGPGVAANLLVDLAELGSLDRHAIATLAGVAPFADDSGEATGQRHIKGGRASPRRALYWAALSAARHNPDLSAFYKRLVEAGKKPKVALTAVMRKLVVLANTLLKENRLWVDHCA

SEQ ID NO: 54224 - protein, 439 aa, unidentified
MILIREVADAPVIMGISKSAGLKFPCGEVRIVNPLFVGIDVSSKSNVAYLMNPDGSKHSIFSVQNNLGGAKLLSERIVSALSSMRLNDVVIGLEATSIYGNNLVYALREDGSLGRFQRKIHVLNPKQVKKFKESYPDLPKNDFVDAFVIADHLRFGRIAKEVYMDDYRYQALRTLTRARFDVIQNLTREKQRFANYLFLKCSGMAQDKNIPNTSATTIALMEHFETVDDLANADLDELTAFIAKTGRGRFADPDVVAKAIQTAAKGSYRLPKTVNDTVNQAMSVSIASMRALKEQVKVLDKAIEQQFEIIPNTLTSIPGIGMVYSAGIIAEIGDIHRFNSQASVAKFAGLVWHKNQSGGFEAEHSQMIKSGNRYLRYYLLEAANSVRRCDSEFRRYYDLKFKEVNKFQHKRALVLTARKLVRLVFRLLKDNRLYIPPEG

SEQ ID NO: 54225 - protein, 389 aa, unidentified
MKKQYLNVASVGMDVHHKFSTVVMRDGKGDVLCRERLDHVGRSLLRRRLTGWPKRVPYVMEASFGWMWLSDEMVAKGLKVNLANCFKLEQMRKARGESKTNGKDAALLSELPFEARQWWRVWLAPAEVRNEREWLRLRMDLVKLQTQTKNRINAIFHRYGIFHEFSDLFGSKGRGLLVHLCQYGRTDEVELPDGALAALRSHVRLLGQVRTRLAEVTRKIRVRLERTDLARRLDGIPGFGEVLSHTVIAEVGRIERFRNHRALASYSLLAPISMDTGEPSGKAPLGRHLGHRGNRTLQWAFIEAAHGAVRSGGRWRAMYDRHTDGGRRNKNQGYIKVARSLVKVVYAVWSKGVDYTPSAPSPARRKRRAKSRRSRSGKGQPFQPMAAVR

SEQ ID NO: 54226 - protein, 373 aa, unidentified
MKKVRFLGLDVHADTIAVAVAEPDGEVRSLGIIPNREESVRKLVKKLGPAEQLQACYEAGPTGYVLYWQLTALGVKCEVVAPSLVPVKAGDRVKTDRRDATKLARSYRAGDLTAVWVPNQEHEALRDLVRARETAKQDQLRARHRLSKFLLRHGRRVPLGIKVWTQRYQDWVKEQVHFEQPAQEYTLLDYLHEVEHMGDRIRRLDLAIAEAVKLAPPRMQEVMQALQALRGIAQISAVTIVAELGKISRFDRARQLMGYSGAVSSEHSSGKRMQRGQITKTGNAHLRRIAMEAAWAYRHRPAIGPRLRKRQEGLSEEVKEIAWKAQHRLHKRYRNLSAAGKEKQKVVTAIGRELLGFIWAIGVQVERNSKQVA

SEQ ID NO: 54227 - protein, 341 aa, unidentified
MAVAGGLDLHRGQLTFDYVDTGTGESWRGRISPADRESLRGWLRRFHGVPDVEFAVEGCTGWRYVVEELQRAGITPHLAEPAETAGLRGRKRRAKTDWADARHLRDLLLDGRIPESWIPPGHVLEARALVRLYKDLLEERTSWQQRVHATLFHQGIPVVPKLGTADGQQRLDAAELSAAGRRAVQAGLRQIERLTQEMASLRRELARLSSRQPGCRALRRAHYGIGGLLSVAVWAELGDCRRFSSSDDAVRHTGLDITIYDSDGKRARGHIARQGPPVLRWALYEAALYASRPASPDYAYYCGVRDRIDGQRALLSVARKLARRCYHTLRDLGEDALAPAA

SEQ ID NO: 54228 - protein, 408 aa, unidentified
MEVVHPRCAGLDVHKRTVVACRLTPGPAAEPAREVRTFGTTTRELLALADWLAEASVTVVAMESTGSFWKPIYNILETGFELLVVNAAHLKAVPGRKTDVRDAEWIADLLRHGLLRASFVPTRPERELRELTRYRTSLIRDRASEVNRIQKVLEGANIKLASVASNVAGVSGLAILRALVEGQTDPAALAGLARGRMRSKRPALEEALAGSIGPHQRFILATMLRRLDELDRHIADVSTEIEVRLRPFDEAIGRLVTIPGVGRRTAETLLAEVGADMTRFPSARHLASWAGMCPGNHESAGKRSSGRTRKGSPWLRRILVDAAHGAGRTTTYLGAQYHRIAARRGGKRAAVAVGHSQLVIAYHVLRRGEPFHDLGANYFDERDREHVRRRLTHRLEALGYQVTVAPAA

SEQ ID NO: 54229 - protein, 387 aa, unidentified
MKAITLYLGLDVHKDSITIAIAQAGPQGEIRLFGTITNDLHALEKALIRIRKAHPGAHLELTYEAGPCGFVIARRLQQLQVPCLVAAPSLIPKQPGAPFKTDQRDARSLARLLRAGELTAVYVPDPTDEAIRDLCRARTDAVDDQRRCRLRLKSFLLRHGYRYQGKANWSQPHMRYLRELVLPHPAMKAILEEYLQGIDAAHDRVQRIELSLLARLEEWRLKPAVHALMAFRGFQLVAAMITVSELGNIHRFAHPRQLMTYLGLVSVEHSSGPRQRLGGISRCGNGHARWLLTECAEHYVLPPKVSKELSRRQQDQPRHVRALSWKAQNRLHLRFTRLLARRVQRNKVKVAVARELCGFVWALLRTQECYRQATGGAASKGSTACAA

SEQ ID NO: 54230 - protein, 351 aa, unidentified
MSQEKYIGMDVHQATISVAVLDSRGKLIMESILETKAATILEFLQALHGSLSVTFEEGTSAAWLHDLLKPHVTRLVVCDPRKNALLKDGSKSDRIDARKLAELLRGNQLTSVYHGEHGMRTLKELGRSYVTITKDLTRVMSRIKALYRSWAIPCSGTSVYAPRHRAEWLGKIPEPGVRLRAERFYQQLDLLQPVRQQARRDLLTESRKHHAVKLLRQIPSIGPIRLALLQTPHRFRTKRQLWAYSGFAVETHDSGEYRSVRGKLQRNRERMTVRGLNGNHNRDLKNLFKSAAVSASTHPGPLRDFYVARVEKGMRPTMARLTLARKIAPITLTIWKKGAEFDAQQLQRPTA

SEQ ID NO: 54231 - protein, 398 aa, unidentified
MIYVGVDIGKDRHAAAAVSEAGESAMPPFYFTQDAGGFAALFGALEKLGGPGAVAVGMEATGHYWKVLRHALVKRGYRVDVINPLITSREASSDVRGRKSDKLDAIAIANVMRKGGYSPAPAAGATDALRTLARYRRTLVARRSDAKNRLAAALDAAFPEAAKTLSGLSGAAAMAAVRAFPSARLAAKADIRTVTSVFKKASGGRLGREDAKKFREAARHSLSLGMDTEGEEFVIPQTVDEIRALDSQIDRVERRMQEEPRPELAARLMSIKGAGKIQPLAIAAEIGDPARFAGADMAGKVLAYAGCDPRVRESGKWKGRTKMSKRGSPTLRNALYLMATTVRMHTPYFNEIYKKHTAKGKHHNVALSHVIRKIVDIMCGMYKTNTDFVSPETEVKPC

SEQ ID NO: 54232 - protein, 332 aa, unidentified
MRYFLGLDVAKDSFAAALLDETGQVVKTANFTNDPAGFSQLVAWLPAPAQTIAVCEPTGVYNQHLKQALATAFESLHEINSQTLKQYAFSQVRTKTDQADALAIADAARTLFLSKPETLARSRVSWSPERENVALWLAEYDRLRKAIASLRQQIGVLDHHAAPDAPQLQRRREQELKRLLAQQDQVKQRVERAYKKLDDDQARLIDSIPGIGPISTAATLVVVRDVARFRSADALKAYLGIYPRRNQSGQRERRSHLAHHGNALMRHVLWNAAKAAVIIKHDANPFRQLLERLMAKGRSYNYAIGAVCRKLVQVIYGVLKSQTSYQFPSIPA

SEQ ID NO: 54233 - protein, 336 aa, unidentified
MSELATVGIDLAKSVFQIHGVDGNGRVLVRRQLRRGQLLAFFQKRPRCLIGMEACAGSHDWGRRLQDMGHDVRLMPPSYVKPYVKRGKTDAADAAAICEAVTRPSMRFVGIKSEACSSVLVLHRTRDFLVRQRTQIGNAIRAHMTEFGVIAAKGAQNVSRLKEQLDRLPLAARLPITLLFEQLAETSERIERLTEEIKETHEQNEASQRLATIPGVGMLSATIIAATTPDVSNFDCARDYAAWLGLTPKPHSTGGKQKVGRISKMGNRYIRRLLYLGAMAQIMLRCRLKRELGSDWLSSMLIRKKTKIVAIALAHRMARTIFAVLRDGLRYEPQAT

SEQ ID NO: 54234 - protein, 351 aa, unidentified
MPRTATVHAVTAIGIDMGKNTLHMIGLDSRGAIVLREKVSRGRITSRLANVPSCLIGIEAGLATHYVARELAALGHNVKQVPPTYAKPFRQGHKNDFRDAHSVAEAVQRPTTRFVPAKTDEQLDLQALHRVRSRLVSERTAIINQIRGFLLERGIIIRQGLRFLRQALPDILAKRTDVLSPRMVRIVADLASDWRQLDERIEPVTDEIETLAKSDDGCRRVMTVPGIGPIISSAMVAAIGNGAAFARGRDFSAWIGLVPKQMSTGDRTILGRITKRGNGYLRTLFVQAARVILLRPASWPKHSFGVWLARAAQRLHRNVLAAALANKLARIAWTVLAQERNYEARVTKAAV

SEQ ID NO: 54235 - protein, 358 aa, unidentified
MASIPPTSRVVIGGIDTHKDLHVAAVLDTAGMVLGTEAFSTTRAGYRALTRWLRSHGDVRLVGIEGTGSYGAGVTRHLTEAGIRVLEVDRPDRSDRRRRGKNDTLDAENAARAALAGRRTSTPKTKDGKVEALRVLRLTRTTAVKSRRAALQLLGNHIVSAPEELRDQVRNLTRMQLIRTCAAWRPDTAGFRDPVCTTRIALKSLARRILELNDEIADLDQLIIALVGELAPRLVATTGIGVETAGQLLVTAGDNPQRLRSEPAFAMLCGAAPLPASSGKTQRHRLNRGGDRDANSALHLIVITRMRVDQRTKDYVARRTAEGHSKLEIIRCLKRFVAREIYYLLKPPPRANAKSRAA

SEQ ID NO: 54236 - protein, 405 aa, unidentified
MDITPIHRRVIGLDVHQNKITACALIEQADGRVAVQQREFGGFKRDRRALAAWVHGLAPDIVVMESTGIYWKSPYAALENVGIAAWVVNARHVKNVPGRKTDISDAQWLATLARAGLVRASFIPPAEIRHLRLIARQRQKLGGMLAAEKNRLHKVLADAGIRLNVLLSDLHGQSARAMVKALLGDEPIHAILERAGRLRASREDLFEALQPEELSAKHRFVLNEIMAHIEYLEATMARFEQQLLVGLAPWEPQMRLLETVPGIDRLGAAMLLVEIGTDMDSFGSAERLASWVGICPGNNESAGKRKSARTRKGNAWVRRLLCEFAQAASRTRCALKDKFSALAIRKGHKRSIVALAHKMLRIVYAMLANTTPYQDRTVDYEALMVGRNAPRWLKMLAKHGYIATA

SEQ ID NO: 54237 - protein, 347 aa, unidentified
MKVLIGVDPHKASVAVAAIDEALGELVERASFPQDRTGLRALERWAKRFPERRWALENAGGLGRHLAVRLAASGESVVDVPPKLSARVRVLSSGNARKNDGVDALATALAASGNECLAAVDPEAASEALRLLSERREDLVAERTRALNRLHALLRDLVPGGVARTLSANRAARILRGIRPKGGASARLRRRLASEVLRDIRTLDRKIADLNGRIEAEVEASGTTLTEIFGIGSILAARIIGTVGDVTRFPTKAHFASYSGTAPLEASSGEVVRHRLSLAGNRHLNYALHMVATCQARSDARGRVYYRKKMAEGKSRKEALRCLKRRISDAVFRSLMADSQAPSRSAA

SEQ ID NO: 54238 - protein, 340 aa, unidentified
MDTLNLLGLDIGKSTFHLIGHDAKGKEVLRKKLNRSRLLEFAARLKPCTIAMESCGGSHWLARKLLSFGHQVKLIAPQHVKPYVTGNKNDYIDAEAICEAASRPKIRYVAIKTVEQQVLSTQHRLREALVGHRTQTINRIHGFLLEFGIELPATKAAMNQVHEILDDPAAELPQQLKSFIEHLLEEMKRLNDEIKAIDRSIKEQVDTDDAGTRLMSIPGIGPIIASALLADVGDASNFHSSRDFAASLGLVPRQYSTGGQTVLLNISKRGDKYLRKLMIQGSRAVLVHIDKRTDALGVWCRDLLIRKHPNKVACALANKLARIVWAVLARGVSYNAQSMT

SEQ ID NO: 54239 - protein, 345 aa, unidentified
MTTMNYIGLDVHKKTISYCVKDASGRIQQEGKVGSTRRELDCWMKTLPQPWTVAMEATIFSGWIYDHLLPHATQIKVAHPLMLRAIAAAKKKNDQIDASKLADCLRCDFLPECQMMPRAIRDRRRTLRYRHLLVRQMVQMKNRVSGLLMETGVEYNKQRLHKVSYFRELLSANGEVPPSIRPLLKLSRETIERCQKTEYALVSSLQRDPALADRIKRLRTVPGVGPITALTWALEIGDVSRFRSIKQAISYCGLCGDERSSADKAMRMPLSKQRNKHIQRALVEAAKLAPRQNHEMAVIYDQERQKGNSNRATLAVARKMVAYLLAVDRQQRDFVPAEERGTSAA

SEQ ID NO: 54240 - protein, 376 aa, unidentified
MTKLRFLGLDVHAETIAVAVAESGEEVRSLGTIPNRLESIRKMIGKLGPVKELRACYEAGPTGYVLYWQLTTLGVECQVVAPTLVPTKAGDRVKTDRRDAEKLARCHRAGDLTAVWVPDEAHEALRDLVRAREAGKKDQLRARHRLSKFLLRHGCRQPDGMKAWTKTYLAWVKSHVHFDQPALEAALQDYFHEVEHAAARLERPEKSLDEAISKAPEQIRAVIEALQALRGVAQLTAATIVSEIGSFSRFEPRRLMGYSGLVASEHSSGNRLKRGAITKTGNAHLRRVIVEAAWAYQRRPWIGGYLLRRQRDLKLTEEVKEIAWKAQHRLHKRYVKLTAGGKNKNQTVTAVGRELLGFIWDIAVRTERAGEPTRAA

SEQ ID NO: 54241 - protein, 338 aa, unidentified
MNSNIVGLDLAKSIFHLYSLSAEGKPVKKKLKRHELLAYVAQMPVSLIGMEACGGAHHWAREFMKLGHEVVLLNARFVKAFAIGNKNDFNDAEAIFTAVTRPNKRTVVVKNLQQQEMQMLHRLRQDLIDQRTALTNRIRGFLSELGVVLPQGVNQVRKQLPLVLANTEYGLPSLSRELFAELYAGLSKLDDDIKAQDRRINRLCEQNALSRRFLDVPGIGPITATILASDIGDGKGYAKSRDYAASLGVVPRQHSSGDKQVLLGISKRGNRYLRTLLIHGARSVIRCCTGKTDPLSRWLQALVERRGFNKAAVALANKNARVLWAMARQDSAYEAAAA

SEQ ID NO: 54242 - protein, 445 aa, unidentified
MSESFPSPIAEPEWAALAAIDWADQKNFWRLLPAGSQRFEEGELENTPEAVDAWAASLEQRFSSRPIAICLEQSRGPLVYMLSKYPHLVLFPVHPTTAARYRETFTPSGAKADPSDTASLLDLLLRHRERLRALQPDTVETRLLHFLVEERRQTVDEKTRQNNRLKDCLKLYFPQILQWFDDVTSPLVGDLLERWGDLEQLQRAHPGTLRKFFHQHNCRSQELMEERIQAIYQAIPATKDQAVLEAGTRIARGLVALLAPLRHNIAAFDKRIAELVNSHPDGALFASLPGAGEVLVPRLIVAFGTRRDRYQNAEEMQRYSGIAPVKEASGKSEWVHFRFACPKFLRQTFHEFAGHSIVKSEWAKAYYEHLRKDEKKDHHAAVRSLAFKWIRIIFRCWKDGKPYDEEIYLRSLRRRGSLLSDALGLPTRFGWKTVAGFQKFSENNT

SEQ ID NO: 54243 - protein, 395 aa, unidentified
MFIVGIDVAKRSHEVCMITSDGQTVQRPFSIRNNCTGYNLMLEKIRKHTNIKSQIVFAMESTAHYWLALFTRLRKDGYHVILLNPIQTSAMRDMFIRKIKTDAKDSFIIAELIRFGRYAESNVAQDRLLALKELCRNRFYLVDMAGDLKRKLIALIDRVFPEYEAQFDTIFCKSSVAVLKKYPTPQKLSNAHLDKLTELLWNSSNGHFGEWKARELKELARNSFGVEDCDGAYSTLILLMLDQIQSLSGKADALEKEISRLFQSFDTTVTTIPGVGPIIGAVILSEVGDISRFSSADKLAAYIGVDPSVNQSGEFQAAHAHMSKRGSPYLRRCIWMASQVAVQRDPMFHAYYEKKAAEGLKYMTIIGHVTRKMTAVVFAILRDHKVYEPILSTAA

SEQ ID NO: 54244 - protein, 373 aa, unidentified
MLKLRHVGLDVHCDSIVMSVADNGSAPAEIWKRLEYSEPRVLAELRKLGPLHQLAVCYEAGPTGYGLARSLMAAGVDCRVVAPALVPGVRGRVKTDRRDARKLAHFLRSGDLTEVWIPDPQTEAIRDLERARDAARVAARRIKQQLLKFLRRQGRRFTEGKTNWTKTHWAWIRRQRFEHEAQRRVLADAVQAVEQAQARVTQLDQDIAECIEGWRLLPWVRSFQAFFGIELLTAVGVAAEVGDFRRFPTAAKFMAFPGLVPSENSSGERRRQGGITKTGNRHLRRLLIEAAWHYYDAPATASARLVARREGVPAEVVAIADKALKRLRKKSHALQRQQKSSKTIAAALARELAGFLWAAALATPTPQADGARR

SEQ ID NO: 54245 - protein, 451 aa, unidentified
MNKKVSMQIINPNAAGIDVGSRSHFVAIGQGKEDVKEFGVYNEDLQAIAAWLLLHKVTTVAMESTGTYWQSLFAVLQNAGIQVILCNGKFTKNIKGRKTDVQDCQWIQKLHTIGLLSGSFLPDEATEQLRTYCRHRANLLDNAADTTRKMQKYLRLLNLRLDVVVKDITGLTGLAIIEAICKGEVNAQVLASLRHGNCKKSQEEIAKALQTNGRKDYLFGLKHEYKMYQSLQSAITSCDVEIEKMLTEQINNNDDKRQHIIDKKIHKRINKNSPKNIDINLMAYQYFEGVDLLAIEGVSHSTVLSIMSEVGPEGLKKFDTAKQFASWLRLVPNNKISGGKVLSSKIPKGSNRLKIALRNAANAIGNLKDTPLSNFFNRINFRKGRVSAISATARKLAIIIWNMIIKKQPYNNEHGYEFLDQKRKRKVKEMSKLIHKFDIKTDELGLQLSGL

SEQ ID NO: 54246 - protein, 375 aa, unidentified
MKDFTKFVGLDVSKDSISVAVADTGRGEPRFLGNIPHTPEAIRKFMKKIGTPEQLHVCYEAGPTGYGLFRFLISLGIDCVVVAPTLIPRRTGDRIKTDRRDSLRLAQLLRAGELTPVWTPDEDHEALRDLVRARHDAKEDLQRARLRLVQFLLRHDLRPQKGTRNWSVKHREWLDSLRFEKSSLQIVFQEYLHAIDEVTDRMKRIEAEIHVQAMSSVHAPVIQALQTMRGVAEVTATTLVAEIGQFSRFSSPRQLMSYAGLVPKEYSSGATRWQGSITKVGNAHIRHVIVESAWAYRHSPSLKGKLCARQEGQDPEAKRIAWKAQHRLHQKYHQITSRGNAGKKAAVAVARELIGFIWAIGCEIEKKHSEAGLVA

SEQ ID NO: 54247 - protein, 362 aa, unidentified
MGLDVHKESIAVAVAEPGRAEPVYRGEIANQPKRIEKLIAKLSEAYAGAVLQFCYEAGPCGYVLYRQILACGHDCQVVAPWRIPRTPAERIKTDRRDALKLARLLRSGDLTAVWVPDQDQEMMRDLSRARDDMKGQERKARQQLNAFVLRHGHHWPRGKSRWTPAHYNWLESLRFERPWQQVVLQDYIDAAKAASARVAQLSDHLMQALPEWSLAPVVDSLVALRGVDKLAAIVLLAELGDISRFASPRELMAFLGLVPSEHTSAARRRQGGITLTGNGHARRMLVESARQTLHLKRKAVNASEPAKQIAWAAQKRLCARYRTLTQAGKNTKVVCVAIARELAGFIWDIVRQEMPRLGRQEG

SEQ ID NO: 54248 - protein, 369 aa, unidentified
MRLDEGGGIDVHKETFKVAACHENEAPQERTFGTFTKDIYAMRDFLLEQKIKHVVAESTGVYWKPMYRILSAAGIEVSIVNPTRVKQMPMEKTDKKDARWLAKLLMNDMIKKSFVPDEQQEQLREFSRMHTKYIRQMTRVKNQVVRLLESCNFKIRSIVSDISTQTAQKLINAISNGQTDTDLLIALCHHSVRKRQGDERLKLALEGRFTKYMQQQLRMLLDDLHYFEKQKMQTENVLKELFTNEQMEKIKKLDEVEGVSQQQAEIIMAEIGAGIDSFSQADQAAKYAGLTAGQRETADQQKPVRAVPGNKHLRVVMVQIAAGCNGTNSMVSGKSQKRILEGRVSTSQKKNRRKKGHTGNSQKDVQGHL

SEQ ID NO: 54249 - protein, 345 aa, unidentified
MTRPSTAAVATLGIDLGKNVFHLIGLNERGAITLRQRLSRRQLEARLTTMSPCLVGMEACVGAHHLGRQLRALGHEVRLMAAKYVRPYSKGQKNDYRDAEAIAEAAQRPTMKFVAIKTVEQLDLQALHRVRERLVSQRTGIINQIRAFLLERGIAVRQGPRPLRSELPLILTMDKLSPRMVHIIEALASDWRRLDERIEALSSEIAALAEDDAACQRLMTVPGIGPIISSATVAAIGTGDLFNKGRDFGAWLGLVPKQMSTGGRPLLGRISKRGNRYLRVLFVQAARVVLRLGPETWERHGLKRWIEAAATRMHHNKLAIALANKLARIAWSVLHHGRDFQISKL

SEQ ID NO: 54250 - protein, 450 aa, unidentified
MMEPVEIQDEEHEQILERVAAVDVAKATGMVCTRVPDDARPGRRVSKVWEVPATTNAIIELGEYLAGLGIQKVTLESISDYWRPFYYLLEAAGLDVQLVRAQDVKQAPGRPKTDKLDCVWQAKCTERGLLRPSFVPPAEIRQLRDYTRLRVDLTRERSRHAQRLEKLLEDALIKLSVVATDIMGVSGRAMIEALIGGERDPQVLAGLARGRMKVKHAALVQALTGQFDDHHGELARMLLDQYDALSGQIARLTARIEELIAAIPAARGVDAGGATGPGAGEAPDAAVRSAIARLDEIPGVGRHGAQLILAEIGLDMSRFPTAGHLASWAKLSPRTIQSGARSRGGRTGKGNPYLKGLLGEAAAAAAKTDTFLGERYRRIVKRRGKLKALVAVARSILLIIWNLLADPAATFHDLGAGYYAARTDKDKKLKNHIRQIEALLGHPITITKAA

SEQ ID NO: 54251 - protein, 412 aa, unidentified
MQDILECCMGLDVHRDTIVACLLTGPIGAVPECEVRTFGTLAPELAKLRDWVVANNCQTIAMESTGIYWHPIYELLEPCFDSEIHLLVVNARHMKNVPGKKTDIRDSEWIATLLRAGLLKGSFIPEKTFRELRHFTRYRKKVIADITAQKNRINKFLHSSGFRLSMFLTDIFGASGRNIMRHLVAHGSIDREGMDRCLKTQTRNRLEEILISANGTLSAHQREFLSMMLSYLEQIESHKKQVEEAIDSEILKHSEALSLLCSIPGIDVTSAAAIIAEIGIDMTAFPSAGHLCSWAGLTPSNNESAGKRKSAHIGKGNNYLKSMLCEISWVICGKRKLYLSGWYWRIKQRKGAKRAVVALARKLLSIIYTMLKTGVPFNEDCFEQRRKQCEQKRTSRMIHELTKLGFRVESIT

SEQ ID NO: 54252 - protein, 426 aa, unidentified
MVALRSRREQLDEVSLPLKEVTVTDPQIRVGIDVGCKAHRVGIANTKGKILEEFDISHTDAGFQEFFRRIEEHKEKLNLPVAVAMEGFNGYARPLDRLIQEHGYTLYNVNNLKLARFKEVFPGAAKTDPIDTRKILELFHLKDHLPLAKDALQEVVSTPPVNDKLKRLSRRRRQLVNDKVRVANRIQSDLQAVCPELLAITNKLSNLWFLRFLTCRDELTQLARLQRSTLLKVRGIGQKYASIIQQWQRKASFSSEVSYVGPMIISDARRILELLSQIHILDEALAELADRSELACRIASIGGFGKTCVAELAGEIGTTERFSSEGSLALYVGMSPLSKDSGQHHGSKCPRQVNHRAKGAMMTAVARHIDHVSESKAYYDKKRTEGKKHNQAVRALGRHLVRVIWSMVNNERDYELRTPGGETNVT

SEQ ID NO: 54253 - protein, 313 aa, unidentified
MMASQDVFVGIDISKDRLDVHVRPLGVGFSVSNEAAGYAALIARLRPLRVKRIVLEATGGYERALWLALSEAGLVAAVVNPRQVREFARAAGRLAKTDRLDAAVIAHFAETFAPRLGKPDPVADRLGEHVRYRRSLQDELVALEHQRRRLETPALRERADRRHAALRAEVKEIECEMRAIVDGDPAKKALFAGLTALKGVGLVLACTLIANMRELGSLSRHQAAALIGVAPLNHDSGTRRGYRAIAGGRRRVRNVLYVATLSAVRYNPAIKEFYRRLSASGKPPKVALVACMRKMLVMLNGRVRDERAAAAIR

SEQ ID NO: 54254 - protein, 347 aa, unidentified
MEDESIVIGVDAHKRTHTMVATDAVGRRLAETTVEATSDGHLRALEWAARWPARRWAVEDCRHLTRTLEGDLLRAGEQLVRVPTKMMSGARRAAREAGKSDPIDALAVARAAWREPGLPVARLAGPERELRLLVDHRDDLVRERTRIQSRIRWHLHEIDPCLHVRLRGLRSQRVVDRLSEQLAELEGTIVEIVREQLARVRELNQRALELERQIMLLVIRLAPSLLAIPGCGALTAAKIVGETAGASRFRSKAAYARWNGTAPQPVWTGNNVRYRLARTGNRQVNSALHRIAVTQAREPTIGRLYFERRIAQGNTRKEALRLLRRRLSDVVYRTLLTDETAIATAST

SEQ ID NO: 54255 - protein, 343 aa, unidentified
MDHFAGMDVSVKETSVCIVDDTGRIVREVKVASEPDALLPVLTNPAYRLQRIGLEAGPLSQWLFSALAEAGLPAICVETRHMRAALKAQINKTDRNDARGIAQMMRAGLYRPVHVKTLRSQKLRMLLTHRKLLQSKAIAIENDLRATLRNFGLKVGVVGTVKFEARIKELVENHSDLVVLVEPLLIVRRALREQIGILHRRLLAIVRDDDVCRRLMTIPGVGPVVALTYRATVDVPARFRNSRAVGAVFGLTPSKYQSGEVDRTGAISRCGDEMMRAMLYEAAHILLVRTTKWSWLRAWAMTIARRRGLKKAVVALARRLAVIMHRIWVDGTEFRWTREAAAA

SEQ ID NO: 54256 - protein, 342 aa, unidentified
MELKTIGIDLAKAVMQVHGVDERGKATLKKQLRRDQMLPFFANLKPCLVGMEACASAHYWARKLEAMGHTVKLMAPQFVKPYVKTNKNDAADAEAICEAVSRPNMRFVPGKNSEQQAVLSLHRARQGFVKARTAQANQIRGLLAEYGIVIPQGIRNIPKRLPVILDDGESDLPGVFRQLLQRLGDHLKELDRQVGELELQIQLWHRECAASRTLAGIPGIGPITASALVATIGNAKAFDNGRQLAAWLGLVPRQHSSGGKSSLLGISKRGDSYLRTLLVHGARAMVRIAERKASTGDGWVGRLVGRRNPNIAAVALANKNARIVWALLAHDRHYDADFRTAQ

SEQ ID NO: 54257 - protein, 463 aa, unidentified
MVAVGIDVSKGRSTIAAVDEGKKILQKPFDINHNKTELAGLVEFIKKFNNVRVVMEHTGVYYQVVAESLVKAGIRVSVVNPVLMKQYGDNTLRKGSTDRTASLKIARYTLDNRDKLRDYSTLDTIRDNLKSLARQFNFEDKTLTAHTNRLYSLLERAFPYIDEFFNSPTKSNGHQKLIDFVIEFWHSDCVSSLSLAKFTEKYRNFCKKNRYCFSEFHVAKIHAISRENVTTLQKDDFTKMLVADAAKQVLAISIRVEKLRAEMIKLAKQTPEFPAVINLYGVGETIAAKLIAEIQDPRRFADKTALVAYAGVDPGKDDSGKKVAKSGRISRTGDALLRKAVFQSVECHLLKSPADEPVYQFLDKKRSEGKKFYVYMTAACNKFLRIYYGRVCEYLNSLESETAANDPGECINTTPIVKNIVAFTCKQDSATQECDMSGLQGLAYTNGAVSEVSCVNQSAHASG

SEQ ID NO: 54258 - protein, 433 aa, unidentified
MRTVALDVHKRFAEVAVHEDGGLRRLGRIEASQLREFAQSLGPADHVVLESTAMTWAIAELLAEHAGRVTVSNPMRTRAIASAKVKTDKIDARVLAQLGAADFLPEVWAPDEVTRALRRRIAHRSSLVRQRTRLRNQIHAVLTRNLIDAPVSDVFGQGGRRWLAEVVLPAHEREAVDSNLRLHDALDGEVELVERGLAEQALADPKVRRLITVPGVGAITALALVAVIGDVTRFPSPRHLVGYLGLDPRVRQSGEKAARHGHISRAGQAHARGLLIEAAHTAIRTPGPLRAFHARIAARRGKQIAICATARKLAVLAWHLLSKHEDYRYGAPTITQRKLRNLQRKADDHGPKISLAGETKRKILERRFLEEAERNYRNYVAVKAKSGAGAATGDTTLKGPRRADDARQAPQSPDACSSRSGSPAPDRILAPRP

SEQ ID NO: 54259 - protein, 445 aa, unidentified
MKSLPVINPKAAAIDVGSEQLHLSIAGDAPVIFGTVTDEVYRLRDYLKEQSVDSVAMEATGVYWLYAYSVLEAAALEVVVVNGRHVGNLPGRKTDMADCQWLATLHAHGLLRGGFVPPAAIRRLQDYQRLRSDHIIGAGSQLQKMQQAMERMNIKLHDVISDLDGVSGLKVVRAILAGERNPQVLLLLCDPQIQKKKGERVVQSLRGTWAAEHLFALKQGLAAWEFYQKLLLECDQQIAAVLREMAGPEPESGEPPAQGKPMGKNAPQIERLHQMLMRICGGRDVTAIAGIGDNLLLQLLAETGPDLKAWPSEKHFTAWAGLAPGSRQSGKRKGTSKRQRNRAGRLFCTGARSLVNSVDKALGGFYRRMAARKGGLAAMKALARKLAELYYRVLRYGLAYAEQGLRAYNAKYAEGQRRLLIKLAVKQGFRLVSLESEALMKKTPA

SEQ ID NO: 54260 - protein, 423 aa, unidentified
MEVMHQWVAGLDVHKETVVSCVRLMTGRKPARECRTFATTTEGLLALLAWLTASRVTHVAMEATGVYWTPVWKILSAGDFTLIVANAAHIKQVPGRKTDINDAMWIADLLARGLIKASFVPEEEIQELRSLMRTRKQLVREQTRHVQRLEKTLEEANIKLGTVISDLMGASGRRMIEAMIAGERDPHRLAGLAERTIKASPKALYDALHGRLREQHRFVLQLHLQQWDAIDAAIRQIDQRVVEQIKRMDAEAADRQPPFRELIPGLCAIPGVSFLSATAILAEIGRDMSRFPTAGHLISWAGLCPGQNQSAGKRKSSRLRRGAPWLKTMLVQCAWAAKRAKNSYYSAQFHRLRSRRGPQKAICAVAASILTAIYHMLKSGLPYRDLGVDYFDRRSPEAKAKRLVTQLAKLGFAAQLQPLAEAA

SEQ ID NO: 54261 - protein, 429 aa, unidentified
MNEVDGIRLKQFRQIRKEIRGSEDYMIVGIDVAKSKNYAFYGTATGKTLLKRMIFENSVEGFEKLLTQEYALKVSHGLTKVIYGLEPTANYHKPLGEHLIRCGRNVVFVAGTAVKNNRRMMDGRWDKNDTKDAAAISDLISQGKFLFYEYPLMSLRDLRNLLSLKRRLKKQEHSQKVRIRNHLLAQYFPELDKYYRNWGKEGLAIVRWCLDPSVIAGLEFDEFVRRVAPNGRGGIPQQERLRAVWKKAIDSIGCRAGESLEVEAKLMVEGLKHIREAIGEVAGKIEEICRGFPEYLYILSIPGFGPDISSKVIGALGNPYRFDNGRQVLKMAGMDLSAKRSGQNSQSATPRLSKNGKADLRYALYQAALIASIKNIDFIRYYTDKLHGREKEKGIKTKMRVKLAAKLLIIAWTLMKKREFFDPGYLSME

SEQ ID NO: 54262 - protein, 318 aa, unidentified
MPEPIHVGIDVAKDSLEVAFGAEAATRSFANEDDGHEALIIALNAHSVELIVMEATGGYETPCACALQAGGFAVAVVNPRQARDFAKAMGYLAKTDRIDAQVLAAFAAVLAKRPDREKVARALPSEEQQRLHAMVLRRRQLVQMLVAERNHLASSHRAARRSIEALIKAIRKQIVEIEGDLASHVARHHAEVAKLLQSAKGVGPNTCMVLIADLPELGKLSSREITALVGLAPFNRDSGTMRGKRTIFGGRAQVRCALYMATIVAMRHNRVIRTFYERLLVAGKPKKVAIVACMRKLLTILNAMVRTGKKWNETYHFA

SEQ ID NO: 54263 - protein, 370 aa, unidentified
MKATDKYVGLDVHQDTTVIAVADGGRVGEVRIYGTIPSDLQALAKVLGKLGGEGVRLHVVYEAGPTGFVVYRRLRQMEIDCIVVAPSKTPQPKGVRQKTDRRDALQLARLHRAGELTGINVPDEVDESIRNLTRARADAVHDLTRAKQRLKALLLRQGYRYPGKANWSEAHQRDLRKLTLPLPALRSVLEEQILAVDQATERVKRLDDLIEAQVPQWRHYPAVQAVMCLRGFRLNAATVIVSELGDVRRFAHPKNVMAFLGLVPKEETTANTRRLGSITKAGNAQARWCLIEAIQKALTPPKVSSHLSLRQEGQPAAYKELAWKIQVRLHKRGWHLLQRGVMKAKVNVALARELAGFIWDLLRQVPAPEA

SEQ ID NO: 54264 - protein, 317 aa, unidentified
MSKGITICAGIDTGKRKLDVALEAGRERLEVDNNAAGHQVLAAWLERHRVKRVGIEASGGYEQDVVAELRCKGFVVVMFQPAQVRAYAMFHLQRAKNDEIDAALIARCTADAKKIHAPPDPRLAPFAHDLTLLDQITDTIAGHRNRRETCRDPRIRQFWKEEIARLKKLQRAELKRLVAAIRQHPDLAQRLDLINSVDGIGLPTAVTILVRMPEIGRITREQAAALAGLAPYDDDSGEMVGVRHIEGGRKRLRIALYCAALPASLRWNPQLIALYQRLIAAGKEHKRALIACARKLLIFANTVVARGTPWMAQPNPA

SEQ ID NO: 54265 - protein, 317 aa, unidentified
MSEKVLVAGIDVSKERLEVWVLGAELGVCVGRDADGLRVLAEWLGEAGVTIVGLEATGGYERAVIDALEAAELFRVRLLNPLRVRRFAEAAGRRAKNDGIDAKLIARFAATFEEDRAPREPELRRIGDHLTLRRHLIDAMIALEGELEHLAAPGLRRMLKELMRLIERRRDALDKQIAALIAAVPALAEKAARLRSVPGVGPVLAATLVALVPELGRVGRREIASLVGLAPFDNDSGKSRGERHIAGGRKTVRNVLWMAAGVAKRHNPVIRAFAERLAAKKPPRVVRTACMRKLLVILNAIMRDGSQWRPKELARAA

SEQ ID NO: 54266 - protein, 323 aa, unidentified
MNKDIKYFGLDISHLVFDVTDSDGNYHQFKNNVTGFKKFVKHLDVTSHCVMEATGYYHYQLAYYLQENSIKVSVENPLAVKRFIQMKLSKIKTDKSDSKLICEYAKQVDLKLWQGNSKHQIECLQMTRLLSVYTKQSTMLKNKLHGEEVLGNPSKAVVRSIKRSLKQIKKEIETLETKLLLLVKQVHQDVLTRLKTIPGIGNKTAVMLVVLTDGFDRFKSGSELCSYAGLTPIIRQSGSSVKGRPRISKIGNQKLRNLLFMCSFNACKYNKACREIYERIVAKGKSKKLALIAVCNKLLKQAFAIAKSGLIYDDTYRSALVKN

SEQ ID NO: 54267 - protein, 344 aa, unidentified
MIIIGCDYHPSFQQIAWVDTEIGEVQERKLMHADGEAERFYRQLTGPVRVGLESTGNCHWFVDLLAEMGQEVWIGDAARIAAKQVRQQRTDRRDAVHILDLLIKNDFPRIWMPSKQERDQRQLLIHRYKLVTLRVRVKNELQHLAMNQGMQKGRKLWSQAGQKQLLELPLAHWAGMRRQDLLELLKKLDQQILVLDHAVKKAAEDNEKARLLMTQPGVGPITSLAFVLTIGNASRFQRGKQVASYLGLIPREYSSGGKQRLGGISKQGNRFLRMLLVEAAQVAVRYDPKFRKQYQHRCHYKPKAVAKVAVARKLAIRLFWMLRTNTKYPEVVRIESSSRVALAE

SEQ ID NO: 54268 - protein, 311 aa, unidentified
MKTYIGIDVAKRFFDVYDLAGETHHRFDNDQLGITSYVKQLRRQVPKLIVVESTGGYERELGIALHDAGFQVAVVNPKRIRDFARAQGRLAKTDKIDARIIAEYAASMHPPARGVWDKHTRAIKALVARRRQLVEMRTAEKNRVEHADTTAIDRSITAVLKTIERELASIEQQLHDQITRIPELKQKMDQLKTVPGIADTTATMLVAEVPELGRLNRRQIAALIGVAPINRDSGTFRGKRMTGGGRREVRARMYMPTLVAIQHNPVICTFYQRLVSAGKSKMTAIIAAMRKLLTIVNTMIANNQQWRTNTP

SEQ ID NO: 54269 - protein, 389 aa, unidentified
MLLVGIDISKYKHDCCIINSDGVVIRESFSFKNDADGFALFLYTLNSLPDSEDIKIGFESTAHYALNLKLFLEKAHYAFIEFNPVLLAKFNKSQSLKITKTDAIDCYSIARWLGKVEFKPHTSGFYHTYSFKSLTRLRETLVKQRSFYLIKITNVLYVIFPEFKPFFNNRLGATALYLLENYGSSEKISRMNSASYDYLRKLSCGKFSIQKFIKLKELATNTVGESNEMFLMQLNSLLSLYRQCVSEIESIEFQITKLINNINPHYMTIPGIGPLSAAGIYAEFGDLSKFNLPAQMLSFAGIEPGYYQSSTSEHGGHMVKRGSSHLRYTLINLCIPLIQYNYVFAAYYDKKRSEGKPHRVACSHLVKKLIRVIYHFEMNDIDFDSSKLC

SEQ ID NO: 54270 - protein, 404 aa, unidentified
MTSEVAEETAEQDVFGGVDSHADTVHVAVISDNGGHLADAEFTTTAAGYAAALAFLSAHGHVRAIGVEGTASYGAGFTRVARSHGHQVIEVNRPDRAERRRIGKSDPIDAYAAARAALSGRAQAAPKDETVAGIRALHNAARSAVKARTAALNQITHTLITAPESIRARYGQLKGTARTDALARLRPTGDAVHVAVLTALKSLARRVKELTAEHDALTKALDSEVTTHNPGLRAAHGVGPDTAAQLLVTAGGNPERMRTEASFAALCGAAPVPASSGRTNRHRLSRGGDRAANAALYRIALVRMSSDSHTRAYVARQTAAGRTKKEIIRLLKRAIAREMFRCLTTTVTTPGIADLRPLRQTKNITLTAVAQHFGVWPTTISRVERGLRRDDDLAHAYRDWLQAA

SEQ ID NO: 54271 - protein, 318 aa, unidentified
MLIRYIDIAKRNFVIAVSSLSKTKTETNNPKGIAHTIEYLKKHKVALVVTESTGGLEIPAAKAIRRAGIAVIIANPRQTHQFAQSQPLTKTDAKDAKMPAFFAQMTAQKEDSQTMPYQPPTEAEEVLEALVNRRNQPADMRTAEKNRLHQVHETQVGSVKQLIAHFDRLIDELDKQIDDHTHTHFDGKAQVAEQIKGIGSITTATLMAMLPELGRLSHKRIASLAGIAPHPRESGETKFKSRCFGGKSAVRKALYMATVAATRFEPLIRDFYQRLLSEGKPYKVAVTACMRKLLETFAKFLSLPTAETQTQVFVYFRS

SEQ ID NO: 54272 - protein, 309 aa, unidentified
MATSSYVGIDVSKSRLDVAVLGEERECPVDNTQAGIAKLVQQMQELQPELIVVEATGGYQRAMVEALFQAGLPVAVVNPARVRQFARACGLLAKTDKLDARVLAEFGQRVQPRRYEGKNEAEKQLSALLVRRKQVEEMLKAEQNRLRTTSASLKSSVEQVLACLKEQKKRLDEQIQQFLNEQQAWQEQSAILRSAPGVGPVTTATLLAELPELGKMDRKKIAALVGVAPMNYDSGRKRGYRKTKGGRGEVRSVLYMATLVATRRNPVIRTQYQHLLKRGKEKKVALTACMRKFLTILNAMRRDQQPFRM

SEQ ID NO: 54273 - protein, 343 aa, unidentified
MQVSTIGLDLAKNVFQAHGVSAEGKVVLKKQLRRGQVLSTFAKLPPCLVGMEACAGAHYWARELRKLGHDVRLMPARDVKAYVKRDKTDAADAAAICEAVSRPSMRFVALKTPEQQGRLMQHRVRDLLLRQRTQTINALRAHMAELGLVAATGRQGLGLLLAILADAKDERLPQDARASLKLLASQITALQAQIDTLDKRLHAQHRQCPASRRLETIPGIGVIGATALAATITDPKAFKSGRDLAAFIGLVPRNNSSGGKQRLGPISKQGDRYLRRILVVGAHSILKQARARPDKHPWLARLMARKPGKLAAVALANKTARIAWAVLARGETYRAPTAPAAAG

SEQ ID NO: 54274 - protein, 352 aa, unidentified
MTTDGKPDEETEMPLYGGIDLHANNSVVVLLNEQDQVIYQKRLPNHLPTILEPLSRHHREIEGVVVESTYNWYWLVDGLMEVGYRVHLANPAAIQQYNGLKYTDDHSDARWLAHLLRLGVLPEGYIYPKGERAVRDLLRKRAHVVRQHTANVLSVQNIMARNTGARFSVKRIQALTKQDLTTLLAEEAQVLAVTSSLAALDCLKHQIKTLEQSVHKRLHHTPAYEQLLTVPGIGTILAQTITLETSAISRFPAVGNSASYCRCVDSTKISNGKRKGTGNVKNGNPYLAWAYMEAAQFALRFQPAAQRFYPRKLAQSRNNTVLARKAVAHKLARACYYMMRDFVPFEATKAFG

SEQ ID NO: 54275 - protein, 315 aa, unidentified
MLYDGIKGRIKTRNIQNNRHSAENILRWLRLQHCGPEDVHVVMEATGVYHERLATELHDAGFYVSLANPHRSREFARGMGIMTKTDKVDAYMLACYAFLKNPHRWEPPAPEIRYLGALLRRRDVLLGDALREENRLEKYLSTDTPADIISSCMHMAQLLREEVSNIERQIKAHIKVSPALRRDYTLLTSIKSVGPQLGMHMLVVLRSHDFSSAEQAAAFLGVVPIEKRSGTSVRSRPRMSKIGPPQLRAKLYMSALCGKIYNKRMRNIYDEMCLRGKPKMVAIGALMRKLVHWCYGVLKTGIVFNDGGLKQVLST

SEQ ID NO: 54276 - protein, 421 aa, unidentified
MKKRIYKQIPVNSFLASSIDLDALAGKLVFAIDVAKVDMVAAIATGSGQVLSTISWKAPMQNAKIIEILVGFKALGLNVQTVLESTGTYGNVLRFALETAGIPVFRVSGKRTFDAREVFDGVPSLHDAMSAAILAKLHTEGLSSMWTADHGDRRQLTAAIAIMDLHQERYLQLVHRLESWLARHWPESTSIFEVTSAALLALLARIGPPADVAMQKKASFKLMKGMGHGLIKEDKIEMLIETAVSTVGVPCEGLERDALMAIACEAHKSIRAYKGAKLVVERLSVNTAANAMAPVVGKTTAAVVFAEAGDPRDFKSAGAFVKAIGLNLREKSSGTIKGRVSITKRGPNRVRQFLWLAANRWVQSDPLAAQWYARKKQRDGGFGSKAIVALMRKLAKALFHVARGATFDSRLLFDRDELKAT

SEQ ID NO: 54277 - protein, 396 aa, unidentified
MSDARAQQVANDPVTNLFRERSKATAPGLAKEVWVGVDTHKDVNVAAAVDESGRTIGGDQPASISAPTTPEGNSDLLAWARGLGETVVAFAVEGTGSYGASLTRFLQGKSQIVVEATRPKREDKAVRRTLGKSDAIDALLAAQRLHRLELRISPKSRVGDVECLRMLRVARKTAVKARTQAINSMKALVVTAPDDLREQLSGLTKDTLPDKCASFRPKGYTPDAAAKTALRSLARRIHALEDEIKALDTEMAAIIKKAAPKLLARQGVGTDVAAALLVTAGDNPDRMKNESSFAAMAGVSPLPDGSGKTDGRHRLNTGGNRDANNALWRIVLTRMNHDPRTKAYVARRTLEGKDKKFIMRALKRYVAREIYAALMADQPGLAARSSPASEPTPDAA

SEQ ID NO: 54278 - protein, 313 aa, unidentified
MTKTTSTNPTDYIAIDVSKATLQIQDDQRTFAVDNDAEGHSKLLKHIKTRKNPLVVFEATGGYERGLCEFLRKEAIPLTMVNPARVRDFARSEGVRAKTDPIDTKMILAFAKSKALCAMEAPSETCTKLAALLDRRGHLVEQLAREKNRLQNSEKLILRSIQRMIKILEKEISALDKAIDELVGSEPGLQSRSKLIQSIQGVGKITAWTLLAYLTEIEHLNRNRLVALAGIAPFNRDSGKFSGKRSIIGGRAKVRRCLYMATQSAANCNPIISAYVQRLRERGKPYKCAIVAAMRKLLLHIQSLIKNPKLSTC

SEQ ID NO: 54279 - protein, 380 aa, unidentified
MTETTRTTECTAPGPTLFVAFELGSTKWTLACTTAVGQKARLRAITAGDLEAVRRELDAARARLGVPLTTPVRSCYEAGRDGFWLHRWLVAQGIGNVVVDSSSIEVNRRARRAKTDRLDVQKLLLLLVRWAGGERKVWSVVHVPTPEAEAARQLTREIETVRQDRTRARNRLHGLLATQGIRCPLRRRFPERVPTLQTGDGQPLAAVWQARLLREWGHLQTIEARLATLRAARETAVTTGEDRVAAVARQLCRLRGVADASAAILSTELFGTRTFANGRQLGALTGLVPVPYRSDQRIQDQGISKAGRAELRRVSVQLAWCWLRWQPDSALAQWFKRRFAAAGGRSRRIGIVAVARKLVIALWRFVAHGVVPEAAPLKVA

SEQ ID NO: 54280 - protein, 345 aa, unidentified
MREIICIGVDTSKYIFQLHGVDAAEQPVLRKRLGRKQVLEFFAKLPPTKIGMEACGAAHYWARELSQLGHEVKLMAPQLVKPYVARNKNDARDAEGLCEAMSRPSMRFVPVKSAEQQAVLMLAGIRDGLIARRTQLSNTIRGYAAEFGLIAAKGLDKIEPLLVRIAQDESLPAMARELFAMQGRDYAQLQGELKAIEARLLAWHRANALSRRLAQIPSVGPIIATALIMKTPDPHAFGSGRHFAAWLGLTPKDHSTAGKTRLGKITRAGDETLRRLLVAGATAVIRQARLGRGNPSRWLLGLLGRKPPKLAAVALANKVARIAWKLMLTGDSYDPARINAAPAIA

SEQ ID NO: 54281 - protein, 540 aa, unidentified
MSVRQSSPPVTPISQKGAATAELSAAERLALLAGGQTDLPEITRRRQDFRSVQRFFGLDIHRDYMVATAVDRDLRVVYGPTRVGWDKFPAWITQHLTRQDAVVVEMTTNTWTVYDHLHAHVHSVTVVHPPHVKLITQMPVMNDKKAAEALAILHAAGLLRGVWVPDQTVRDRRQLVAQRQDRVRATTQAKNRLHAILHRHQFERPDSSLPFSPKRHDFWRNLPVSPVEKLAIELDLETIDQAEAQRARIEAAITEAALSDERLPFLVQIPGISSLGALTILAAVGPIERFPSPKKLVGYAGLGGRVHDSGTTHRTGKITKAGRRDLRHALVNAAQAAVRSDDHWQGELKRLEPRIGHNKAMVAVARKLLVVVWHVLTKREADRHADLNKVARGFIDLAYREVGARNLPDNQTAPEFVRRNLDTLGLGKDLQRVTRGGHEYVLPQSSLPGAAPAAKPTGRSQPQNTRAAQAARAAEAARKRAELAAKRAEAEARMGRPRKQRADKGTKRGPNRITKDKQTPAPAKTKAVPRSVTKPAAKTK

SEQ ID NO: 54282 - protein, 378 aa, unidentified
MSKVRFVGLDVHAETIAVAVAEPNGEVRSLGLIPNRPEAIRRLVRKLEPVEQLRFCYEAGPTGYVLYWQLTALGAKCEVVAPSLVPRKPGERVKTDRRDALKLARCYRAGDLTPVWVPDAAHEALRDLVRAREAARGDLLRARHRLSKFLLRHGWRRPESIKSPWTNAHLEWIKTKVHFEQPAQEIVLTDYVHQVEHLVARIERLDQAVLEAARSVPPAMRAVIESLQALRGVAQVTAVSIVAELGEISRFAKARQLMGYSGLVPSEDSSGERKRRGAITKTGNAHLRRVIVEAAWAYQFRPWLGGYLLKRQVGLSEEVKEIAWKAQHRLHARYRKLLAQGKNKPQIVTAVGRELLGFVWAIGVNVETKMRERKQVAA

SEQ ID NO: 54283 - protein, 345 aa, unidentified
MALFVGLDVSLNTVSICIIKADGSLVWEGKTASEPVALLKALSRWRKKIKLIGIEACPLSEWLYGALVESRLETICVETRHAQRFLSSRPNKTDRSDARGIADMMRLGHYRPVHVKSKASQLLRTTLIARKKFVDHMLAIEDTIRGLLRVHGLKVGAVHRCTYAARVETLLVDAPQLRAAIEPLLQARNMMRKQKALLDRHLAQVARKDDVCKRLMTVSGVGPIVSLSFKATIDDPNRFKNSKAVAAHLGLTPRVYQSGELDRSGNISKCGDKLMRYGLYEAANSHLRISKKWSTLRAWGVKLAKRIGSKKACVAVARKLAIILHRMWVEGTDFRFGRQPAAVAA

SEQ ID NO: 54284 - protein, 362 aa, unidentified
MVNHIFVGIDLGDKNSVARIAVNRERAERLGFVNNSRGRARLFQELRRRAEAIGAQIVMAYEASSCGFILSDEAEAQGHRCFVLAPTKLEKSVEQRKHKSDDRDADDVLEKLRGHVLAGNRLPTVWIPGQQMRNDRELVRARVEVGEKQTRVKTQIQMLVKRQGLEKPSGSGSGWTIRYRQWLKALTECEALGSGVRMALESLLRQLSFLEAESQRMDQPILQLAEQARHKPIIEKLTEEHGVGLMTAMVYRTEIGYAGRFGRGRHVGKFVGLTPTSHESGQQQDRKGHISRQGPPRLRKILCQATWVHIQHDPEAKRFYQQLVSRNPKKKKIAVVAMMRRLAVRLWHRMRQAELGMIPMGQ

SEQ ID NO: 54285 - protein, 419 aa, unidentified
MSCLTGPAGAHPPGRKGSTIMANEDRSIGGIDSHLDTIHVAVIAANGREVDDQEFPTTTSGYRRAVAWLAEHGPLRAVGVEGTSSYGLGICAALTDAGIKVVEVNRTRPAERRRQGKTDQLDAYRAARSVLSGEATTDPKSASIEPLRALQVARRSAVKSQQAAGRQLGALLVNAPVRLRDRYRDLKVPKLVAALANTRPGQVGDPDDADVLAALRSLARRHQALAEEISSLQDRMAARVTAANPALLSIKGVGAVLAAQLLITAGDNPERLRSSSSFAALCGTAPIPVSSGRTDRHRLSRGGDRAANCALHQIVTVRMTTDARTRAYRDEHVARGWTKKAVYRSLKRAVVREIFRALVGRYDVPDHRDLRPARQTKNLTLAAAATCLHVWPSALSELELGTRRDDGLANIYRDWLLAA

SEQ ID NO: 54286 - protein, 355 aa, unidentified
MMQSQIIATPKLFIGMDIHKKSWSVHLRTDLFDHKGFSMPPDSLKLVDYVTSHFADHEVSLTYAAGCCGFSAARYFLNMGWTVKVVNPNDVPRSDKQLYQKTDKLDCRNLCKQLQQQQLHGIYIPTEPEEQLKSLLRQRNQVVKQLRKTKSHIKALLLFHGITIPEQFENPNWSKDFQSWLKNIPWQHSTGTACMNSKLRILELLNNEYSQTSNELRAYCRKYHKKDYYLLKSVPGIGGLLAAAILAELGDIRRFNNEKEFSNCIGLVPGIDQSSERDNKIGLTPRCKPLLRSYLIESSWVAIRRDPEIQAYYRKHTGKNPKNVVVKVAHKMCRRILSVIKNETPYQLNYKNTKK

SEQ ID NO: 54287 - protein, 385 aa, unidentified
MQTPNDLSQSRIVLKQDSTLIAVIEMSLSSWLVAGIVPGVERQPLKKLAVDESALLKLLNRWREEAEKAGRKIERIAVAFEAGRDGFWLARWLRARGIEAHVIHASSVAVSREHRRAKTDRLDTDLLKRAFLGWLRGERDHCKMVAIPTTKDEDAKRPNRERQSLVGEQTRIVNRMKAALIRLGIRGFNPKLKKAAGRLEDLRTPEGEPIPPNTLAELRRDMERRRLLSDHIRQIEEARLERMEQAPGDGPHAMVRLLARVIGIGIETSDMLVHEVLSRRLRDRRAVARYAGLTGAPDESGSKRREKGLAKAGNARVRRGMIQLAWRFLLFQKDSALAQWYRTRTEGAGKKRKTMIVALARKLLIALWRLVTTGEVPAGVVLRAA

SEQ ID NO: 54288 - protein, 351 aa, unidentified
MLIIGCDLHTRYQVIAMLNSETGELVTRRLQHENGEAGAFYASLPAPAQVGIEATGYTQWFERLMAELNYELWVGDAAQIRARALRRQKTDSRDAEHLLELLSTQRFPRLWIPSPEQCDLRQLLKHRHKLVTMVTTLKNQLHFLVMSQGLCRKSKLWSERGREELESLSLGPWARRRRQELLALLDQLQPQIAELDVAVAQAAAADPAAVDLMTQKGVGPVTALAFVLTLGPVERFQNSRQVVSYLGLNPREHSSGGRQRLGGISKQGNPMMRWLLVEAAQTAVRFDPELRRKYQRLKFRRGGSVAKVALARRLAVRLYWRLRQRKAETQPVRMPGSSGSAVVLPRAGSRH

SEQ ID NO: 54289 - protein, 366 aa, unidentified
MKKISTVQVFGNEIFKEQKLTIGVDLGDRWSFYCVLDEAGKIILEQKVPTTPEAMKQTFSRIPQSRIALETGTHSPWVSRLLTELEHEVIVAHAQKVQLITKSNRKDDRHDARTLARLARIDPELLGPVRHRSVQAQIHLTVIRARAELVSARTALVNAARGLVKSYGERLPKCGTQQVSRELAAKLSTELRDVLEPLLKEIESLNERIKEYDERMEKIAKEVYPEVCLLKQVKGVGTQIALTYVLTIEDPYRFLKSREVGCFLGLKPGRRDSGESKPQKAISKAGDRYLRTMMVQGAHYILGPFGEDSDLRRWGLKLAERGGKNAKKRAVVAVARKLAVLLHRLWVSGEVYEPLRNSNKAMRAAA

SEQ ID NO: 54290 - protein, 408 aa, unidentified
MLFIGDDWAEDHHDIEVQDEAGRRIGRARLPEGIAGIGRLHALIGEQLGEDDEPEQVVVGIETDRGPWVQALIAAGYQIYAINPLQVARYRERHGVSGAKSDAGDAHALADMVRTDRHRLRPIAGDSDQAEAVKVLTRAHQTLIWERTRHVLRLRQTLREFFPTALAAFDDLAAADALQLLGAAPDPAAAARLTRTQIAAALRRAHRRQPEAKAEKLQAALRTPQLDQPAVVTAAYAATVRAAVAVLSTLNAQIRTMEEQVEAHFGRHPDAEIYRSQPGLGVVLGARVLAEFGDDPSRYADARARKNYAGTSPITRQSGRKKVVLARYVHNNRLIDALGRQAFAALLASPGARRYYDQQRTRGLGHHAALRQLGNRLVGILHGCLKTRTTYDEATAWAHHQRHDQAAA

SEQ ID NO: 54291 - protein, 358 aa, unidentified
MKYVGIDVHKKMCQAAVLDDDGTLLDEIRFANDLESIEEFSEKLTTFRDDVKAVVESTGNLWIQIHDRLEEHGFDVALSNPSKTRLIAEAKIKTDKVDARTLAGLLRADMLPTCYVPGEELRSRRELLRHRLNLVKIRTEVKNRIHALLDKHGLRMPGTTPFSKGNVAWLRERSLGFMDDAILRSDLALLETVGVQVEVIEGKIAALAAEERRVRLLMTMTGVGYFTAMLVLSEVGDIGRFHSDKAFASWMGLAPSVHQSGERTRIGGVSGPGNKRLRWAMVECAQAAVRYDPRFRGLYERLSRRRGAGCAIVAVAHEMARVLFFMLSRDEPYRDADGGLVERKLKNMSRKAYDGLRI

SEQ ID NO: 54292 - protein, 430 aa, unidentified
MDLTVPTTMPPERDAQPMPYKWFVEIDWGSQQHQVCVLDRDRCRVGERTVDHDGASLARLADWLWTMSVGQPQRVAVAIEVPRGAMVEGLLERGFHVFAINPKQLDRFRDRHSVAGAKDDRRDAFVLADSVRTDRPSFRRLHLDEPHLLLVRELSRAEETLLEEFRRSANRLRDQLHRFYPQMLQLCSAADAPWLWDLLDLAPTPAHAALLSAEQVPRVLKAHRLRRIRATEVLACFQAPALPVAPGTAEAAQAHCGFLLPCLRVLAEQLRACGQQVDALLRTMADEPGAGERPSDVAIVLSLPGVGRKITAWLFAEAAQPLAERDYQVLRTHSGVAPVTKQSGKRRLVVMRRGCNPRLRHALYHMARVAMQRDAHFSSVYTALRAKGQRHGQALRTMSDRLLRILVAMLRNGTCYDASRIRRESAVQMG

SEQ ID NO: 54293 - protein, 314 aa, unidentified
MEHQYKVCCGLDVHKKLLVACLRTGHKTEIRECGASTREILELADWLLENQCECAAMESTGSYWKPVYNIFESCELNPIVVNAQHMRNVPGRKTDIKDAEWISDLLMNGLLRSSCIPDRQQRELRELCIYRASLIRTRAAELNRQQKLLEGGNFKISGTISNINGMSGETLMQYIISGETFDEQAYAKELKAKRISKRLKASPRELVRDMEGCFTPAQSRLLATVVRHTHDLDRLIEDLDRQIEELLQDEQEEAIELIKGIPGISDRSAQVIVSAIGTDMSRFPTDKHLCSWAGLCPGNHESAGKRKNGRTNNK

SEQ ID NO: 54294 - protein, 399 aa, unidentified
MPQNVPLEIRVSVDVGCHRHSVAIGLSNGELLDEFEIVHQPEGFRDFFSRIEKYEKQYTCPVAVAMEGFNGYARPLDSLVRARDWRLFNINNLKLARFKEIFPGAAKNDEIDARKGLELFQLSEHLPLAKGVLQEVAATPQENNILKRLTRRRRRLVNERVRVLNSLQADLQAVCPGLLAITRDAGNLWFLRFLTSASTLPKLARRRHSSLLKVPGVGVNYAGMIQQWQSQAHFSHEAEWVGEMIREDAARVLELHGKIKALEAKCEQIADQSKIAQLLDSLPGFGLVSISELAGEIGTVDHFGKEASLALYLGMSHLDNKSGKYQGTKAPKHVNTRAKAAMMVAVDRHRKQVTESQRYYDKKRAEGKKHNQAIRALGRHLCRIIYKMLKEERPYQMRD

SEQ ID NO: 54295 - protein, 346 aa, unidentified
MKITTIGIDLAKEVFQIHGVDTHGKAVLRKQLRRCEMAKFFANMEPCLIGMEACGSSHHWARKLGEFGHTVKLMAPQFVKPYVKTNKNDMADAEAICEAISRPNMRFVPIKNIEQQAILSVHRARQGFVKARTAQANQIRGLLSEFGIVIPQGIKSIAKRMPDILEDGENSLPGTMRKLLERLNDNLKEMDRQVAELELQIKLWHANNEASRKLEAIPGIGPITASAVVATVGNATEFKNGRQLAAWLGLVPKQHSSGGKQTLLGISKRGDTYLRTLLIHGARAVIRFAENKAEPDQWLCKLMARRNKNVAAVALANKNARIIWALLAKGKIYEQDYVTVAKAAAA

SEQ ID NO: 54296 - protein, 315 aa, unidentified
MQGKTLLFHKEIQNTPAAVKSCIKELIKLPDFDLNSAVFCLEHTGIYSNHLLSVLHDKKAPICLESATQIKNSLGNLRGKNDKVDAIRIAEYAYGNRDKLRLWQPKRDVIQQLAHLSTLRSRLVEVQKVIKTPLKEAGSFIKKNQGKQNDKLCSKTLTAIEFDLENIEKAIDVIIAEDPELNRLFKIVSSVSGIGKITAATVIITTNEFKDISDPKKFACHAGVAPFVKESGLFKGKARVSHMANKRLKMLLHLAALNSVRYNEDLKRYYQRRVMEDKKNKMSALNAIRNKLILRIFACVNQNRSYEKNYSRSVA

SEQ ID NO: 54297 - protein, 356 aa, unidentified
MKQVKTLSFAGQDIYCGIDVHKKDWSICIRDDERELRSFSQPPQPAILADHLKRNYPQANFQAVYEAGFCGYWIQQALSQQGISCIIIHAADVPTTDKDRRQKTDRVDCRKLAQALKEGSVKAIHIPNQQIIEDRSLVRGREQLVQDQTRYKNRILSWLHFFGIAIPEGYKKSTHFSKRFISWLEQLPINENAKSSLQAKLGALQGIRNQLLLANRSLRKLAQSERYQKKVELLRSIPGIGITNAMIFLTELDDINRFKSFDHLSSYVGLKPDIYSSSDTTIIKGITHRCNLLLRDSLVESAWKAVAKDPALLMAYKEYKKRMHYNNAIIRITKKLLRRIRYVLLHQTPYVTGIVE

SEQ ID NO: 54298 - protein, 362 aa, unidentified
MGESTTIVGFDQHAATTVAAVLLPGQRTPALHPMTSAVTELREFVRRLRRQGAVRCCYEAGPCGFELQRALQADGVPCDVIAPALIPRRPGDRVKTDRRDASQLAVLYRAGALTAIHIPTEQEEAARDLLRCREDIRADLLRARHRLSKFLLRHGRRFTGTKKAWSRRHDTWLRAQTWPIAALDQTHRAYLRAVDEAVARLRAVEADLQALLTLEPLRARVERLRCFRGIDDLTALTIAAELGDPRRFPTAPSTMAFVGLVPSEHSSGTKRARGGITKTGNAHLRRVLVEAAWHYRHHPFVGHALRQRQRGAPEEVTVRAWAAQQRLYRRYRVLAGRGKPKQHVVTAVARELTGFVWAALTQ

SEQ ID NO: 54299 - protein, 405 aa, unidentified
MIFVGSDWASDHHDVCVMDETGRVLATLRCAESAAGITALHDLLARFAEEPEQVVVGIETEHGMWVTALVAAGYQVYAINPRSVSRYRDRHHVSGTKSDKADAKTLADLVRTDRHNHLLIADDSVEADAIRVMARTHQNLVWARSAHQNVLHAQLHAYYPAALEAFGGDLAHHDSLSVLRRAPTPDQGAALSVAALRSALKKGGRQRNIDARAREIHQALRTTGYLSAPPQLVAAYAATVTATVEILAALNTQIGQLETTLSQSFNTHPDAAIYLSMPGIGETNGARMLGEFGDDPERYATAKSRRNYAGTSPRTIASGKGHVVLARHIRNTRLNDAAMSMAQSALTGSPGARAYYDNLRAQKKTHTQAQRALANRLIGILHGCLTHRTLYDEHTAWGHRINLAA

SEQ ID NO: 54300 - protein, 343 aa, unidentified
MNQYIGLDVSLKDTAISIREDGKRIWRGKCPSDPKLLAQVIRKNAPRARRVVFETGPLSTWFYHALTSEGVPAICIEARHAQKVLNETLNKTDANDADGLAQLAEAGFYKAVRVKSFDAMMTRTLVAAREQLLNMPTQLGNQIRGLMKTFGLIIPKGKGRVFDGDVRKLLDGNTELAKIILPLLEAWHDIRKRAADLGRQLLIVARASQATKLLMTIPGIGAVTAVSYVTAIENPENFRTSRSVGAWLGLTTRRYQSGEVDYDGHISRRGDNRLRGLLYEAATALLTRTSARIESSLKSWGLKLRERLGFKRAAVAVARKLAVIMHSMLKTGEVFNASAGATI

SEQ ID NO: 54301 - protein, 321 aa, unidentified
MSRILIGVDVCKDFLDAHARPAGVDKRFDNNRAGIEQLVAWVRPFAAERIVFESTGHYQKAAVGALLAVDLPAVVVNARQVRDFAKGIGQLAKTDRIDAGILAHFGEVVTTVVRPLPPPEILEFRDMCDRRGQLVRMLAVEKNHRHAAQGAAAKVRKNIDKVMAFLKRQIKELEGRLDRIVADSEAFKAKDEILQSIVGIGPQVSRILLVHLPELGHGSRQSIAALVGLAPFADDSGTSSRIRHIRGGRGKVRIALYQAAVAAIRYCPVMKAFYASLKARGKASRVAIIAVARKVLVLANALLRTGTTYQPRPNSVCPKIA

SEQ ID NO: 54302 - protein, 348 aa, unidentified
MKYYIGLDAHSTTSTFAVVNETGQCILRETVKTSEQSLVHVINRINGERHMTFEESSISQWLYLQLKDKVDNLLICNPTYVAKKQGAKTDFRDALHLANELRTNHLQPVFHDTSHWMEIRTTVSGYLDIVEEIVRFKNRLKAVFRAETIQTDENSFYKNSSRVKEIKNPAARFVAEKLFNQIEFLESEKEKYKEVFERNRKKYRPIRNLMSIPGISIIRANIIAAIVCQPARFDNKHKFWGYCMLVRHIQISNGRVYGNKRFYGRRELRNVFLGAAENVMRLDGELRDRYDALRAKGADHKDAKVNLARQIASIALCLLKNNDTYRENYAEHLKERKKLSKEFFEQSL

SEQ ID NO: 54303 - protein, 358 aa, unidentified
MVDKVTEAAVVGGVDTHKVLHVAAVVDQNNKVLGTQYFSTTRQGYRQMLAWMTSFGTLKRIGVECTGTYGSGLLRYFQNAGLEVLEVTVPDRMERRKRGKSDTIDAECAAHAAFSGIRTVTPKTRDGMIESLRVLKTCRKTAISARRVALQIIHSNIISAPDELREQLRNMTRMQLIRTLGSWRPDASEYRNVTNVYRISLKSLARRYLELHDEIADLDVMIAAIVDELAPELIKRNAIGYESASQLLITAGDNPQRLRSESGFAALCGVSPVPVSSGKTNRYRLNRGGDRAANSALHIIAIGRLRTDAKTKEYVARRVAEGHTKMEAIRCLKRYISREVYTLLRNQNRRINSIPITA

SEQ ID NO: 54304 - protein, 374 aa, unidentified
MGNVIEAYVAFDTSKLRNAVAIADAGRAGEVRFLGEIENTAAAVAKLVRKLAAKYGRLTFCYEAGPTGYGLYRQIKSLGHECMVVAPSLIPKKPGERVKTNRRDALGLVKQLRAGDLTAVWVPDAGHEAMRDLTRARETAVEDLRCKRQQVSGFLLRQGLHYPGERAWTKTHRGWLASQKLEYAEQRIAFEEMLLAMRQAQERIERLEQAIRVAVPDWSLADVVTALMAMRGIDFISATAFLAEIGDLSRFPTPRELMGYLGLVPSENSTGDTVRRGPITKAGNRRARRILVECSWSYQHPPRVGKQKQERVSAAPRAVAEIAWKAQCRLTARYRAMIRKGKLKTVAVTAVARELSAFIWAINREIASPRAAAR

SEQ ID NO: 54305 - protein, 338 aa, unidentified
MRTTYVGMDIHKNFIQAAAMDEKGNILQEQKFNSTIAEINRFIEGLDTQKIKAAIESTCTWYHVYEALDSLGIDTTLVNVRRTKVIAESKIKTDKLDAKSIAHCLRTGFIATAYIPPKEIMELRTILRHRISLKKEMVRYKNKIHAILLRNGINHESSDLFGVGGMRFLRNLKLNESDQYSLESYLSIVQTLLREKDQITQKIEVLCKNNEHAMLLTSIKGISYYSAMIIITEIGDILRFPSSKKLCSYAGLVPSTIQSGDHTYHGRILKECNQHLKWILNQCVHVHIRYCPNSPITKLYCRVQKKKGSNKATIAASRKMLTCMWHMLTKGERFKYNN

SEQ ID NO: 54306 - protein, 344 aa, unidentified
MTYYAGIDVSLRTVNICVVDDDGEQVAETKLSSDVQEIIAYLDELECGIDLIGLEAGTLAQYLTYGLQAADFDVVCMEAQQVKAALSAMRNKTDKHDARGIAQLLRSGWYSQVHVKSMESHHIRMLLTSRKAVLDKCIDLENEIRGLFKIFGIKLPPKLGHGSFDKAVRAVIEADEKFSHALLPMLDARLVLYETFRVLENRTRHLARGDSICEFFMTAPGVGPITALTYKAGVDDPTRFKRSRTVAAHFGLTPRRSQSGEIDIEGRISKAGDAEVRRALYVAANSVLTRSSRWSPLKAWGMKLKKNRGHKKAVVAVARKLAVILHRMWIEEAQFQWGTEGVRS

SEQ ID NO: 54307 - protein, 419 aa, unidentified
MEPSRDPVAEVVHPRCCGLDVHKRTVAACVLLPGPGGMPLQEVRTFGTMTDDLVALRDWLSGHGVSQVGMESTGSYWKPVWNILEGHFQLLLVNPQYAKGVPGRKTDVQDCAWLAHLLRHGLLRASFVPDRGQRELREVSRYRMTLVQERTREVNRLQKVLEGGNIKLAAVATDVMGKSARQMLVGLLAGSSDTQALAELAKGRMREKIPQLQRALSGRFGAHQRFLVAEILAHIDTLDACIDRVTAEIDERLRPFEPLVQRLDAVTGVGRTVAQGILAEVGTDVARFATSGHLSSWAGMCPGNRESGGKRRSGRTRRGNRWLRLLLIQAAHAAGKTKATYLADQYHRLAARRGSKRAAVAVGHSILVIAYHLLRDPDRNFSDLGPDYFIRRNPERAVHHYVKQLIARGYEVTLRQTVA

SEQ ID NO: 54308 - protein, 338 aa, unidentified
MFIIGIDPHRGSHAAVVIDRSEAVLATLELRADRHQRQRLLDWAAGFTPRAWAVEGATGTGSLLAQQLVAAGERVIDVPPKLSARVRLLDNEQSDKSDRHDARSVAITALRKRNLNDVAVEDHVAVLRLFAGRHHDLVAARTRTVCRLHTVLCHLAEGKFPQRLRAEQAEAILSRIDPTTVIATERKALAQELLAELRRHDSDLDELAGKVRAAVKASATTVTDVHGVGPIMAAYILGHTRDIRRFPTAGHYARYNATAPISASTAADNRHRLNPYGNRQLNHAIHVAAVTQVGHDTPGRVYYQRKIAEGNSRKEALRALKRQISNAVYRQLLADANH

SEQ ID NO: 54309 - protein, 412 aa, unidentified
MKDILEISCGLDVHKEKIVACILTGPLGKPTHSEIREFTTLIPDMIALRNWIVSKNCHHVAMESTGIYWMPIYEILEDAFSGDITLLVVNARHMKNVPGKKTDMRDSEWISTLLRAGLLNGSFIPEKRIREFRDLNRYRKSIIRDITSQKNRIEKFLQSSGFRLSSFVSDIFGASGRNIILHLIEHGQIDRTSLDSCLKTQTRKRIDEILMSVNGTLSDHQKAFLKILMNHYESLKEHLHEIETDLEEDMTPFAMQIEQLNSIYGISTTASCAIIAEIGIDMKPFKTAEHICSWAGLCPGNNESAGKRKSASVTKGNPYIKSMLCEIAWVIAGKRNTYLSAWYWRIKQKKGAKKAIVALARKLLVIIYTMLKQGTLFDESCFETRRKNCEQKQLSRYIRELEKHGYHVEAQS

SEQ ID NO: 54310 - protein, 391 aa, unidentified
MCAADQTCSRHREKRRWAVKKSSKANATQARTAAKVKQQPIDWKRVTTVGIDLGDRFSHFCALADDGSVVAEGRVATAPAAMELEFKTAAPKRIAIEAGTHSPWLSRLLKRLGHEVLVANPRKLRLIYENQRKSDRVDAEYLARVARLDPKLLCALEHRSESGQCHLAIIRARDTLVRSRGRLIQHVRSAIKAIGQRVPSGTAECFHKRAAACLPDGLREALLPLIEVIEQLTTRIREFDRKVVELAEDRYPDTGALTQVCGVGSLTALAYILTLEDEGRFLRSRSVGAWLGLVPGQHDSGESQPQWHITKQGDPYLRRLLVGSAQYILGPFAKDCDLRRYGLAIAARGGANAKKRAVVAVARKLAVLLHRLWRTREVYEPFFNSRQPAAA

SEQ ID NO: 54311 - protein, 416 aa, unidentified
MNAVGIDVSSRKSTVAVLRPLGEVVCLPFDVTHDIAGLASLAEKLKALDGETRVVMEHTGRYYEAVAKALHEAGLFVCAVNPLLIKEYGANSLRRVKTDKADAVKIARYALDNWADLRDFTPMDAIRYDLKTLNRQFQLASKQRTASANNLIALLEQSFPGIRKCFDSPVRSDGTQKWVDFAHSFWHVDCVRKQPFAAFCERYRKWCKRHAYLFKLSNAEEVYALAKRAVVLTPKSKVVKVLVQEAANQLISISRSVEVYRAEMDRLAAMLPEYPVVMAMYGVGKSYGPQLMAEIGDVRRFERKQALVAFAGIDPMPNQSGDKNVRSNKSSKRGSPYLRKTLFNVIRTYLQCAPQDEPVFQFLNLKRAEGKPFYVYMLAAANKFLRRYYAKLRDYFASLDTLQSVDPIPTTLKASL

SEQ ID NO: 54312 - protein, 411 aa, unidentified
MQIVYERCAGLDVHKKSVVACLLFPEHGHQRKERQTFSTMTPDVVRLRDWLKEHDCTCAAMESTGVFWKPIYNVLEEHLQVFVVNAQHIKAVPGRKTDIKDAEWIADLLQHGLLRPSFIPPAWQRRLRDLTRSRSRLIEERSRVIARLQKVLEDANIKLASVASDVMGTSAQHMLHALVKGELSPSAMAELARGRMRAKRAQLAQALTGHLQPHHGFLIAEHLAHMDSLEEAIHRLSAEIAQRLGPYEEILVRLETIPGVKRRLAEIILAEIGPEMSHFPSAGHLASWAGMCPGNHESAGKRLSGKTRKGSQWLRTALVEAAHAASHCKECYLSAHYHHLAVRRGKKRAAVALGHTLLVIIYHVIAENKEDEELGGDYLDQVDRQGKEKRLVRQLEKLGFEVSLTPTSPAA

SEQ ID NO: 54313 - protein, 358 aa, unidentified
MQIESKTISFKGQNIYIGIDAHLKSWTLTILTENTFYKTLSQDPSAMNLRNYLDRHFPQGNYYSAYEAGFCGFSVHRELIRFGIQNIVVNPADIPTTDKEKRQKEDRRDSNKIARSLRSGDLTAIYVPDKYIEELRSLVRYRKVLVKEIGKNKNRIKSTLYFNGIAVPRELDSASKYWSGRFTQWLKTIKMDTEYGDFVLHEILENAEYLRGKLLKIDRKFRLLKQSSPYAKTLGLLQSIPGIGPIVSITLLTELDDLKRFNNLDKLCSFVGLVPTTKSSGENEKTGSITPRAKKPLRNCLVESAWVSIKNDPALNLAFNELCKRMKPNEAIIRIAKKLLSRIRYVITNETEYVCSVV

SEQ ID NO: 54314 - protein, 332 aa, unidentified
MENVQKIVGADLSKKSIDLAIHATQEHLRIDNNREGFKKMVHWLKYQKIDPSRLTIVMEHTGLYSYCFEAFLHEKGYRFNKVNPLDIKYSIGLTRGKSDKMDAARIAAFGFEKQGRLKAETPLSQALQALKLLNTSREKLVSTRAGLKASIEEFRNIGLKDSSMALHCQLQVVAQLDKQIEKLDKEIKEVIHQEEKIAKNYALLNSIKGVGPVVATNTIIKTHNFERFANARKFACYCGIAPFENSSGTSVRRRTRVNHMADKGMKTILDLAAKSAIGCDKELKEFYQKRVEQGKSKMSTINIIRNKIVGRMFAVVNRQTPYEQNFLKTSWN

SEQ ID NO: 54315 - protein, 312 aa, unidentified
MADMVRLAGIDVSKATLDVYTAPIGESRTVAYDDAGLAELCRWLVGIGVALVALEASGGYERQVSEVLENAGLVVRRLNPLRVRRFAELRGRLAKTDRLDARTIAEFARAYPEERQYPRDARRERLAEHLLVRRHAQETIVDCTNQLEHLRDAELRRLILSRQAALKRLCARLDKRLAELIAEHDDLVDLSCRLQSVPGVGPVLATTLIALLPELGSLTRRQVAALVGVAPFDRSSGRQSAPKAIHAGRATVRKALYMAAMVASRWNPVIAAFATRLASKPGKVRLVACMRKLIVSLNAMVRDGAQWQPRHT

SEQ ID NO: 54316 - protein, 416 aa, unidentified
MKIVRPICCGMDVHKNIIVATIGITNKKTRITEYIQETFSTLNPDLLNLKQWLINHKCFDACMESTGKYWIPIFNILEDEINIYLTHPKYVKAIKGKKTDKKDSKWICDLFKHDLIKFSFIPPKEIRALREISRYRYKLVGMRSSERNRYQNCMTVSNIGIGSVFSDPFGKSAQAIMKEVLESDIIEDEKILKCIHRSCKNKDKILDSIKHCNIETDQRFKMNESMTHMEELQVHINNCEIEIMKRAAPMFDRFMHITQLPGISTLSAILIISEIGVDMKQFESDKQLTCWAGLAPANNESANKKKSVRISKAGQYLKPLLVQCALGAIKDKEGYFGIKYSRIKKRRGHKKAIIAIARMMLVSIYHMILTGETFNPSDYESFKNPKPPIKQQVLTEESAIEFLKKSGFDVSKLTKP

SEQ ID NO: 54317 - protein, 315 aa, unidentified
MSAPCFAGIDVSKDHLDVHLRPTGEAFRAGTDEPGLARVVARLVGAGPALVVLEATGGYEAPVAAALAAAGVPVAVVNPRQARRFAEATGKLAKTDRLDAAALAHFAEAVKPEARPRPDADTAALAALVDRRRQLIAMRVAEQNRLEHAPPAVAREIRAHLAWLDRRIDRADRDLAAAVQASPVWRAKDDLLQSAPGVGPVVSRVLLTELPELGALSGRRIAALVGVAPVAKDSGRKAGARRIAGGRAGVRSALYMAALAAARFNPAVRAVYRRLRAAGKAVKVAQVAAMRKLLVILNAMVRDHRPWDPAAAAAA

SEQ ID NO: 54318 - protein, 347 aa, unidentified
MEHPIRVFIDTSKALFQLHGVNAAEQVVVRRQLRRSQVVEFFAKLSPTMVGLEACGGAHYWARELRKLGHDVRLVPPQYVKAYLKRNKNDGRDAEAGCEAMSRPTMRFVPIKTEAAQAVQMLAGVRQRLVRERTRLTNEIRGYAAEFGLVAAKGLDKIAPLLARIEADEGLPQLARGAFAELGEELAGLQAVIERAERRLMAWHRQDETSRRLSAIPGVGPVAAVMLTVKTPEPQAFGSGRDFAAWMGLTPKDHSTAGRSRLGVITRAGDEGLRAVLVSGAMSVIQQVKAGRRTPSPWLAELLRHKEAKEAAVALANKTARIAWKLMVSGQAYRPELERQATMPDAA

SEQ ID NO: 54319 - protein, 352 aa, unidentified
MDEKYVAMDVHKASVVIGVRNAAGKMISRATVETKAQTLKDYVRGLSGTIHLTFEEGTQSAWLYDLLRPLVAECIVCDPRRNKLLEDGNKSDEIDVDKLSELLYLGRLRPVYHGNHGTRTLKELAHNYEALVKDQTRVKNRLKAIFRGRGISYEGEEIYDCQQTEPWLAKLSERGVRERARQLYQQLDQLAGWVATARRQMLAESRRHQAKKILQLIPTLGEISVAELIATVDTPHRFRSKRQFWTYCGLAVVRHTSADYHFEQGELRRRAKAGPTRGLNRNYNRRLKRIFKSAALTGSTKGPFKSYYQGLLGRGLSSELAQVTLARKIAAITLTLWKKGERFDPEKLVKPD

SEQ ID NO: 54320 - protein, 425 aa, unidentified
MAMKIVRFNCCGMDVHKNLVVATIGITDRKTNITEYFQRSFSTLNSDLYRLKDWLKSHHCSDVCMESTGKYWIPIFNILEDEINVHLTHPKYVKAIKGKKTDKKDSKWIADLYKFDLVRCSFIPPKDFRQLRELARYRFKLVCMKSSEKNRIQNCMTISNVGIASVLSDPFGKTATEIISYLLEHTADSMDEKAVRKLIKKGAKAKSDEIIEAIKGYNIETDQAKKLELAQGHLEYLDDMITQTEVELYVRIKPYYEFVEFVSTMPGMTELSSTIVLAETGVDMDIFDDAKHLCSWCGLSPANNESAGKKKSVRIAKAGDYLKPMMVQCALAAIKSKKQPYFAIKYGRIKKRRGHKKAIIAIARMMMVCIYHMVSEKKPFTPTDYEELMNPQNHVERVVLNENNVFAYLESLGYDSSKLVKRNDN

SEQ ID NO: 54321 - protein, 474 aa, unidentified
MNIKGRNKKNQAKVVNIFEKQEVIEKAEVLRKGFKAHTWRELETKGKFRKNDKLSFITEDMLILGCDIGSETHYFRAIDSRGRELSSGAFSFSNSEEGFTSALDWASKIAAVNDKKQIVLGLEPTGHYWFNLATWMIVKGVSVVQVNPYAVKQTKEIEDNSQAKDDRKDPKVIANLVKDGNYGMPYLPEGIYADFRRLSMFRDQLNEDRIRCINRLHREMKIYFPEYKDAFGRFDGPFCIELLKKMPFPEDLCAAGIEGIKDVWHAQKLVGKGYAGADNIYSKAQGSIGLKDGSESAKIAVEWFASEVSELTAKIKELNELLEQKCKEIPYAENILDISGIGKNIISGIIAEMGDISRFDDVKEIQKLSGLGLVACSSGKHKGETKISHRGRKRLRYWLFQAAKSAVVHSPEFKELHMYYTTRNDNPLKKMQSLIVIACKILRVIYAILTKGTTYDPKKLLSDIKRPNEELLAA

SEQ ID NO: 54322 - protein, 407 aa, unidentified
MERIVIGVDPHKLSATIEVVDRHENVLASGRFATDKAGYAAMRRQVAAWPERTWAVEGSNGAGRPLAQRLLANGEHVVDVPAKLAARARMLDTGHGRKTDAHDAHSVAVAAVRAKELRVLALDPQLEALRMLVDRRQELARQRTQTANRLQRLLAELTPGRAKKDITTRQAKAILAAVRPPDLVGKTRRRLAVEQLTDLVAIEKRIKSLSKELKGRVADSGSTLMDLPGVGPIVAARVLADVGDVTRFADRNRFASWTGTAPIEASSGEQVRHRLSRAGNRRMNHMLHIAAATQIRLDTEGRRYYRRKLATGKTRMEAMRCLKRRISDAIYRQLVADARRAALNNARESSEADPGGHCGATQKSSAVNLPPHIDTSDQPLPGPATTTLQPGPGLRNSANKQPLGTAS

SEQ ID NO: 54323 - protein, 407 aa, unidentified
MTEILCGIDWASDHHDVALIDPEGNKLGRRRIRDTAAGLGELTGLFAEHGGGPGTVKIAIETERGLLVASLRAAGYQIYPVNPKAVDRYRDRHHLARGKSDAADAMVLAHILRTDAHLHRPLPADSPSAQAIEVLARAHQDMVWSRQHEVNRLRSLLALYYPAALAAFGDLTIRTAMAVLAAAPTPAQAARLTIDDLLDLLASAGRGRRRSEAARLAEVFAAPQMRQPAEVEQAMGDAAAAVITAITAMNAAIARLQERIDQNFDKHPDAAIYHSMPALGHILSARVLGEFGDDPTRWPDPASRRAYAGSAPITRESGKKRLVLARYIRNQRLYDAVRWWAFAALSVSPGARACYDQRRAAGDSHEAALRRVASKLIGQLHHCLAHHVLYDEQAAWGQPADKTSLAA

SEQ ID NO: 54324 - protein, 400 aa, unidentified
MRTVFGIDVSKASSEVAILVNGERVHSYTMPNDIIGFSHLLKDLKTVSNPEIIFEATGVYSRRLQSFLEENSYDYTRLNPLEAKKQLDSLRVRKTDKIDAEKLASSQFVLNRKPTYVQEEVYQNLHDLSRFYQNLTEDIVRTKNRLHKVLQVAFPEIENLLSTPTGEQYWNLVSIFPTKHWVLELSEVELKETIRNSTSKRISENRVGNLAEKLVGLAKQSYSAISKTSPMIEEVKYNAQELIRLTNRREQVLQQLIALAEPLPEYEILLSIPGIAETTATSIIGELGDIRRFKSANQINAFIGIDLKHCESGDFLGQEHITKRGNTYARKIMYKCIHNIASASHTNPCHIADFYEKRKRQSQTTSTKPHTIASIHRLIRTMYYLIMHNKLYDYTLAKSH

SEQ ID NO: 54325 - protein, 362 aa, unidentified
MRYSTSIGLDVHARSIAAAAFVPETGEIIQRRFEYDPASVIEWTRGLPAPVQLVYESGPTGFDLARKLIDAGLECKVGAVSKMLRPTGDRIKTDKRDAVFLARMLAVGNVVEVHVPTPSQEAARDLARAREDARKDLMRARHLLSKFLLRKGIAYEKGRSAWTKTHRKWLSSLSFDDPCERLVFDEYLAGVITMEQRRDRLDAAIGKLSATPGLAGVVNRLKCIRGISTVTAFSIAAEIGDFSRFPNARSFMSYLGLVPSENSTGESVARGKITRTGNGHVRTLLVEAAWHTARTYSPANETAFADMQGASARTARIAAEANRRLHARYLHLRSRGKKANVVDTAIAREMSGFVWALAACEE

SEQ ID NO: 54326 - protein, 428 aa, unidentified
MQQNSIPVERVVGLDAHPDSFTAALVQGPSPRAAIVEKTFDKVPMAQLIRWAKKHTTTSDLIVLEASGNSFHLARSLRAQGFRAEVLESAHLGKLKEAHANNDKISAVRIAKAYLAGTTKSVWVPDETTQKRRDWHHAHRKAVQQVTRLNNSLLSYLSDNGVRPDKRNTILKQSLAQTTEWIRSAKPWSVSQWQVIEIQLKDLHNAMDTRRRWESLLAQEVVQDPLLLSLVRQSGVREVVAFALGAVIGDIHRFAQPCKLVSYVGLNPAFDSSGNESWEGGIGGRGNRGLRNLLIESAHAVLRSREHPLGIWGRKLLARKGELKLVVAAVARRLLISIWYLMMGYAQPLQEITKPLQQKLGVILSHIGKEGLAKLNLTRQALREQMHQSLKTGRVYALNPRRRSHDNTAAAQASLAQDQAELDRVVPA

SEQ ID NO: 54327 - protein, 439 aa, unidentified
MAKKGKKNKPTPENMPMIHPHAAGIDVGAEEHWVCVPTDRDAQPVQKCSAFTCDLHRLADWLTTCRITTVAMESTGVYWIPLFQILAARGFEGALVNARHVKNVPGRPKTDRFDGRWLQKWHTYGLLAPSFRPPEAICQLRSLLRHRDNLIRMTVKHIQHRQKSLDQMHLHLHHVMSDMTGVTGMRIIRAMVAGERDPRTLAQYRDSRIQSSADTIAKALEGDDRAEQVFTLTQSLELSDFTQQHIAACDQEIERVLSPLDSQVDPDEHPLLPPTTTHRQPQRNEPAFDLRTHLYRITGVDLTHVPGFQAPTIHILLAEGGLKRHQWPTDKPCASWLGRCPDHHMSGGTVRSTGRRRVHNRASRALRLAAQSLRPSPSSLGAFYRRMRRTLGPAKATTATAHTRANILSHLLQENTPYRTRGAELPVGHKYSFMENHGA

SEQ ID NO: 54328 - protein, 342 aa, unidentified
MTVITVLGIDLGKNSCSVAGLDEAGRVVLRRRLARDRLAALFDKVPNCVVAMEACCGAHYVGRSAQARGHQVRLMPPEYVRPYVKAQKNDDRDAEAIAEAATRPTMRFVPLKAEAQLDVQALHRARERLVAERTALINQMRALLLERGIVLPQHRRPVAEWVDAPLGEGEDDPLSTRIRLLVTDMRAEWAELDRRIGMFDDEFAASARNDEATRRRATVPGIGPINATALVAAVGDASAFRRGRDLAAWLGLVPKQATTGGKPKLLGITKRGSRYLRKNLIHGARAVLPRLAATQTRLGEWLRDLLTRAHKNTVIVALAAKLARIAWAVLARGGCYEASMVS

SEQ ID NO: 54329 - protein, 354 aa, unidentified
MKCMTKYVALDVHQATTVASVRGESGRVLARAILPTEDPALVEFFRGMRGAVHVTFEVGTQSQWLHDLVSPLVDRVVVCDPRQVTRQGNKGDRVDADRLSELLRLGGLRAVYAQSAHRSDLKELTRTYRTLVEDGTRVMLRIKALFRARGIKAPGSAVYHPTKRVEWLAQLIDRGVRFRAESLYAELDVLRELRPKAKAMMVAEARRDPAWPLLQTIPFYGPVRVALLLATMQTPWRFRTKRNLWAYSGLAVRTSSSADHRIIEGQLMRRRRAPLTRGLNRNHNRVLKDVFKGAATAAASQPGPLQEFYAAMVARGMREEMARLTLTRKLAAITLRLWKRGEQYDPAKLTMQAS

SEQ ID NO: 54330 - protein, 413 aa, unidentified
MIYCGIDWAEKTHDVALVNDTGELLAKRRITDDAAGYTILLDLLAEFGDTEDNPIPIAIETSRGLLVAVLRTGIRQVYAINPMAAARYRDRTSVSRKKSDPGDALVLANILRTDMHVHRPLPGDTDLSRAIAVLARAQQDALWNRQQMANQLRSLLREYYPAALDAFATWANGLCRPEARELLKTAPTPARAARLSRTQISTAFKRAGRKRGIDAEADRIREVFRSEYAHQSPLVEDALGKQLLALLLQLEAACTAADNLAQAVEESFPQHPDADVILSFPGLGVQLGARVLAEIGDDHTRFADARGLKAYAGSSPITRASGKKSSITRRRVKNDRLNHAGYLWAFAALTASPGAKVHYRRRRDKHGDWHAAALRNLFNRLVGQLYHCIQVHEPFDEALAFPASAEAMTATAA

SEQ ID NO: 54331 - protein, 350 aa, unidentified
MVVVGADVHKRSHTFVAVDAVGKQVGQVTVPAVTEGHRKALAWARERFGDELVWAIEDCRHMSARLERDLLASGQKVVRVPPKMMAEQRRVARTRGKSDPIDALAVARAYLREPSLPVASHDEASRELKLLVDRRETLVAQRTATINSLLWRVHELDPAHAPKARSLDLAKHQQALRAWLVTLEGVVAELALEELDDVIALTARANAYAKRITDLTAQAAPTLLAMPGVGPLTAAKLVGESAGAARFHSEAAFARHAGVAPIPVWSGNTAGRVRMTRSGNRQLNAALHRIAITQVRLQGSLGKAYYEKKKAEGMSNREALRCLKRRLARVVYHHLTADRRAAAACQAAAA

SEQ ID NO: 54332 - protein, 416 aa, unidentified
MKIVRPICCGMDVHKNIIVATIGITNKKTRITEYFQETFSTLNPDLLNLKQWLINHKCFDACMESTGKYWIPIFNILEDEINIYLTHPKYVKAIKGKKTDKKDSKWICDLFKHDLIKFSFIPPKEIRALREISRYRYKLVGMRSSERNRYQNCMTVSNIGIGSVFSDPFGKSAQAIMKEVLESDIIEDEKILKCIHRSCKNKDKILDSIKHSNIETDQRFKMNESMTHMEELQVHINNCEIEIMKRAAPMFDQFMHITQLPGISTLSAILIISEIGVDMKQFESDKQLACWAGLAPANNESANKKKSVRISKAGQYLKPLLVQCALGAIKDKEGYFGIKYSRIKKRRGHKKAIIAIARMMLVSIYHMILTGETFNPSDYESFRNPKPPIKQQDLTEESAIEFLKKSGFDVSKLTKP

SEQ ID NO: 54333 - protein, 399 aa, unidentified
MHGDYGVFLGLDVGKGDHHAVGLAPDGKRLHDGPLPNTEARLRQLFDRLGRHGRVLVVVDQPASIGALPIAVARACGHQVAYLPGLAMRRIADLHPGAAKTDARDAYVIADAARTLPHTLRRVDVGDEALAELEVLVGFDDDLAGEGTRIANRIRGLLTQIHPALERVLGPKVQHKAVLELLSRCGGPAGLRKAGRRKLLSIAGPHAPRLGERLVEQIMTALDEQTVTVPGTQTAETILPRLADSLRDVLRQRDQIAGEVERMLDAHPLAPVLTSMPGIGVRTAARILLEVGDGTAFATPGHLAAYAGLAPVTRRSGSSIRGEHPPRGGNKQLKRAFFLAAFAALADPTSRAYYDRKRAEGKRHNAALICLARRRCDVLFAMLRDKIPYQPRPTNPVPA

SEQ ID NO: 54334 - protein, 310 aa, unidentified
MIQNKEKVESRIILGADVAKASIVLKQLRDGHPVCAGVKTIPNNAADITKALINLGQIDLIVCEVTGGYERQLLEAASQLAIPIHRADGARVKAFITSHGVRAKTDAIDAYGLALYGQDRFNSLPRWTPPDPKREELQSLVKHRQALLDQRTMATNRSKAPNSHYLAGFLQDEISFINTQVEKIEQQISDIMKSHATIKAQEKRLRAIQGIGPVSAHTLIAMLPELGHATRKQIACLAGLAPHPAQSGNSFKKYPMTGGRDLIRLPSRPQALLSKPAQQQKTQKTRPRRRRPKTRHHRKRRPQTSPHLTC

SEQ ID NO: 54335 - protein, 410 aa, unidentified
MNPLYVGIDVSSKNNVAYLMKPDGTKHSSFSVQNNRGGAKLMSERIVSALTAMQLSDVMIGLEATSIYGDCLVYALREDGRLGRFQRKIHVLNPKQVRKFKEAYSDLPKNDFVDAFVIADHLRFGRIASEVYMDDYRYKALQTLTRARFFSVQNLTREKQRFANYLFLKCSGLAQEKVLSQNTSATTIALMERFETVDALAYADIKELTDFIVKSGRGRFANPEATAKAVQTAAKGSYRLPKTVNDSVNQAMSVSIAAMRALESQIKTLDKAIEQQFEIIPNTLTSVPGIGKVYSAGIIAEIGDIHRFQSQASLAKFAGLVWSQHQSGDYEAENTHLIKSGNRFLRYYLLEAANSMRRCDSEFRRYYDLKFKEVNKFQHKRALALTARKLVRLVFRLLKVNRLYIPPEEY

SEQ ID NO: 54336 - protein, 356 aa, unidentified
MLQKLNSEIAVIGIDIGKNSFHIVGQDQRGAIVLRQKWSRGQVESRLANLLPCLIGMEACVGAHHLSRKLTALGHDARLMPGKYVRPYSKGQKNDYRDAEAIAEAVQRPTMKFVATKTAEQLDLQAMHRVRERLVGQRTGVINQIRAFLLERGIAVRQGLRFLRAELPGILATRTDVLSPRILRIVEDLMGDWHRLDERIEGLSGEIETLARQDQGCARLMSMPGIGPIISSAMVAAIGSGDAFSKGRDFGAWLGLVPKQMSTGDRTILGSISKRGNRYLRALFVQAAWVVLVKLGPKQWDRYGLKSWIEAAKKRLHHNVLAIALANKLARIAWAVLHNGRAFECVRTNETASQPA

SEQ ID NO: 54337 - protein, 348 aa, unidentified
MQSTAKLPVIGLDIAKNVFQLHIVDSDTGEIQRRQLKRAKVAEFFANCQNSLVALEACGGAHHWARTLLAMGHQVKLLPAKHVKAFVLRDKTDALDAQAIWVTAQQPHISGVAVKSEQQQACLSLHSMRQQLMKMRIMQTNALRGLLYEFGIALPVGHNRLLKSIQGALASAQQANQLPDIVVVSVQEQLKRIDAMQDDIDQLSRRLSSILKQNQQMMAVQGIPGVGILTATALVATVGDVSTFKSGRQFASWLGLTPRQVGTGGKTQQLGISKRGDSYLRTLLIAGARAIVGRSEHSRWIERLLQRRHFNVVVAAVANKMARTVWAVLVKGVAFDQVKWNPTQTATA

SEQ ID NO: 54338 - protein, 386 aa, unidentified
MQKLNDLSRSLTALQPDGTLIAVVEMSLSSWLVAGIVPGVERQPVKKLAVDEFALLKLLHRWREEAEKAGRRIERIVVAFEAGRDGFWLARWLKARSVDAYVIHAASVAVSREHRRAKTDRLDSELLKRAFLGWLRGERDHCKMVAIPTVKDEDAKRPNRERESLVGEQNRIINRMKAAMIRLGIRGFNPKLKKAAGRLKDLRTPEGEPIPPNTLAELHRDMERRRLVSTQIRQIEEARLERLVQTPSDGPHAMVCLLARVIGVGTETADMLVQEVLSRNMRDRRAVARYAGLTGSPDESGRKCREKGLARSGNARVRRGMIQLAWRLLMFQKNSALAQWFRARTENARGTRKTMIVALARKLLIALWRLVREGVVPDGVVLRPAQ

SEQ ID NO: 54339 - protein, 408 aa, unidentified
MNAVGIDVSKGKSMVAALRPMGEVALLPQEFLHTEVGLEQMAYAIIALGENTRVIMEATGRYHEPVAAALHEYGIYVCVLNPLFIKQSGGGSIRKVKTDKADAMKIAKYGLDNWVDLREYTPMDTVRQQLKLCSRQYNLYMKTVVSLQNNLISLTDKTFPGVNELFSSPERADGHQKWVDFVMTFYHCDCICRVSENAFAERYQKWCKRKGYHFSAEKAQDVYLGSCGHFTTLPKNDNTKLLITTAAQQLLAGKMTLAALRTEMTRLAKQLPEYDIVRAMYGVGETTAVQLMAEIGDVRRFPRRSSIVGFAGVDPAVDQSGKHSAKSVPTTKRGSPHLRKTLYQIVCTYLKKSPVDEPVYQFLDKKRSEGKPYFVYMTAAQNKFLRIYYARVKECLEAFDAQQDTSQR

SEQ ID NO: 54340 - protein, 348 aa, unidentified
MTITVLGIDLGKNSCSVAGLDESGRVVLRRRLTREGVVRLGAKLPACVMAMEACCGAHHLGRVLREQGHEIKLMSPEYVQPYVKAQKNDERDAEAIAEASTRPTMRFIELKSEAQLDAQILHRARSRLVGQRTALINQLRAVLLERGIVVAKGRRRLEEYLIGLLDEEGDRPAILSPRTRLLIEDMRLEWSELDRRIGALTAEFVSRAREDQAARRLATIPGFGALNATALVAAIGTGETFRRARDLAAWLGLVPRQATTGGKPRLLGITKRGNTYLRTLLIHGARAALPSLTASQSPMGEWLRGLVGRAHKNKVVVALAGKLARIAWAVLRSGKDYAAKVASRPATA

SEQ ID NO: 54341 - protein, 402 aa, unidentified
MAADQLWAGVDVGKEHHWVCVVDDTGAVVLSRKLVNDEQPTRALVEEIDSLGEHVSWTVDLSTVYASLLLTVLADAGKPVRYLAGRQVWQASAVYRGGEAKTDAKDARVIADQSRMRGDDLPVLHPDDDLISELRMLTAHRADLVADRTRTINRLRQQLVAVCPALERVAQLTSDRGWVVLLARYQRPKAIRQSGVSRLTRVLADAGVRNAATIAAAAVAAAKSQTVRLPGEQVAAALVAQLAQGVIALDDRIKATDADIEGRFRGHPLAEVITSMPGMGFRLGAEFLAAVGDPVLIGSADQLAAWAGLAPVSKDSGKRTGRLHTPKRYSRRLRRVMYMSALTAIRCDPASRAYYQRKRDQGKRPIPATICLARRRTNVLYALIRDNRTWQPDSPPITKSAA

SEQ ID NO: 54342 - protein, 329 aa, unidentified
MSKISKKVIGVDVGAKFLTVSFNDFENRDQVLNVENNQRSILSFLKKFRIEDYCFVIEATGNYSSHILHLSLIQGFESSLINCMSVKHFARMKNIISKTDAEDAKLIRLYGEMFRPDIYIPKSIEIEHLDQELKLLNDLEEEKRRYGVKLKSLRHNPQINPNTEKHYERRLKHLEKEIKQVVSRLPELQNEEFKATKSLLQSVSGIGEKTSLQLMTATSGFKNFNSAKSLSKYFGLAPRIYQSGKKSYSPGKCRTSKTHIRGLLYVCSWTAIKHNKPCREFYERLLSQGKPKKLALIAVCNKLLRICFGVVKNKTNYQPDYQKNFKILT

SEQ ID NO: 54343 - protein, 306 aa, unidentified
MIIASDFIGIDVGKYTLEIFAGREFSIANTEAALADWLAGLSRPELVLFEATGRYDGKLRRALEQAGIAFCRVNPAQARAFARATGQLAKTDKVDAQMLARMAQALRPHPQAAADERRRLLGELARRRDQLVDMRRGELTRQQEMAEPEILTDISAHIELLTSRIAVFDSRIAALIAATDELAQAQRLLRSIPGIGLVTATTLLAFLPEAGHRSPKTIAALAGLAPFNNDSGLFRGKRSIRGGRPRVRVALYMAALTACRSTGLLGQFFRTLTAAGKPKKLALIAIARKILVIANAVLRDQTPFKT

SEQ ID NO: 54344 - protein, 340 aa, unidentified
MTIVMGLDQHRAQITAEWIDTETGEIGRTRVRPADRAGVRRFLGRFGGQRLEVALEATTGWRFVVQELQAIGAAVRLAEPAETAARRGRKKRPKTDRADARHLRELLMVDRLPESWIPPEHILDLRARVRLRHTLVDQRGEWQQRIHAVLYHHGCPHHHGIGLLTAKGRAWLDSLGLPSTAREQVTVALRMIDMLDVQLAPIDTELRAYARRQPGCKALMGHYGIGHLTAVTILAELGDARRFSSSRDAVRYAGLDITVKQSDQRRAPGHLSRQGPPALRWALYEAAQSARRHSSPDRDYYQQAAERLGGNRACLAVARKLLKRSYHTLRELGDEALQPA

SEQ ID NO: 54345 - protein, 338 aa, unidentified
MKLYCGIDLHSNNSVVVILDEADKVIYQKKLNNDLFSILQQLSVYKDEITAIAIESTFNWYWLVDGLMDAGYTVKLVNTAAVQTYDGLKHTDDKDDARWLAHLLRLGILPTGYIYPKEERAVRDLLRKRSQLVRQSTTNILSLQNILARNTAQSLSSYRIKKLDDDQAEKLINDPNITLSLKSNLNVIRCLQSTISDIEAAVLKQSRLRTEFKKILSITGIGEILGLTIMLESGDMNRFPKVGNFSSYCRCVKSERLSNGKKKGEGNRKNGNKYLAWAFIEAANFAIRYNDQVKSFYQKKKAKTNGIIATKAVANKLARACYHVLKDQVTFDVNKSFS

SEQ ID NO: 54346 - protein, 362 aa, unidentified
MPKSTTIIAFDQHAATTVAAILLPGHRTSALQSLTSDSPTILRFVERVRRQGPVQCCYEAGPCGFELQRALAAHQIPCDVIAPALIPRRPGDRVKTDRRDAGQLAILYRAGALTAIHIPTEQEEAARDLLRCREDIRADLLRARHRLSKFLLRHGRRFTATKRAWTTRHAGWLQAQRWPLAALEQTHRAYVRAVDEAVGRLQAVDAELRDLLTLEPLRSRVERLRCFRGIDDLTALTIAAELGDARRFPSAPRVMAFAGLVPSEHSSGTKQARGAITKTGNAHLRRVLVESAWQYRHHPFLGPALRRRQQGAPTAVIDQAWHAQQRLHRRYRRLAARGKPKQHIVTAIARELSGFLWAALTH

SEQ ID NO: 54347 - protein, 456 aa, unidentified
MIMKRKKKVLQVPKLESLKQINPNAAGVDVGASELYVCVPEDRDPRPVRVFQTFTSDLHEIAAWLKKCRVTSVAMESTGIYWIPLYELLEEAGFEVKLVNAREAKNMPGRKSDILDCQWIQQLHSYGLLTASFRPPRDIVALRSLVRHRDRLIVARAVHIQHMQKALHLMNLQLDNVLSDITGVTGMRILRALVAGERNLDTLVSYRDPSCKSSTQVIRESLKGNYQEEHLFPLRQSLELYDYHTTMIQQCDREIEQKYRALPSRVDLQRKPLPPSKKQQKKPRKNAPTFDLRSRLYETAGVDLTAIDGCNAATIQVVLSETGVDMRPWRTCGHFTSWMCLAPHNDISGGKVLRSRAKKTKNRANTALRLAAQALTHSDSWLGAYYRRQRARLGAPKAIIATAHKIARIIYYMLKYQREFVDLGAHHYEAQHRKRQINSLTKKAASLGLLLVPAKA

SEQ ID NO: 54348 - protein, 466 aa, unidentified
MAYSLFNHIQGKNGSRWAEFIRNTGTDHLLVVAIDAAKYTHKAMICNFYGDIFVKPFEFDASLTGIEKLRELIETEKSNRGMKEVIVGIETTGHYYEDLVRRFHSEGYHVRIVNSASTAQERQMLLNGSKTDNLDLMAIVQTIIHGRGTSSELAVGIHHSLRKLTRSRRELVKQRSATQNMIRVHLDHIFREFQGKTVWMDDKRKHIKPFSKLFGKAPRYLMRHHLHPTDILTLGSRGLRKLSKKHNLKMRDDSIEMLLELAEHSISQPKEFLEAEQFLLNQKLDQLDLLDTQIKELEREIEDLFVQTEGAVTLSVSGIGLVTGAELFAEMGDITDFDHAGQLIKMAGTNPIVKQSGGRTPSYYAVSKQGRRAFRNIVYQVGKSLAVNNPEMKKRYIALKDRGKHPGQAYIALGNRMIRLAFSMIRHQNLYHTDQENYSLYDELSKKLHKKNCQYFYEKFVVSQTC

SEQ ID NO: 54349 - protein, 415 aa, unidentified
MKFNTQNAKIKAITEKTLVLGIDVGSEMHYARAFDYRGIEYTKKPFKFSNTEAGFMSLQAWILDLKEKHEKDKVVPGMEPTGHYWFNLGKFLQDNEMKPVLVNPHHVKKSKELDDNNPTKNDCKDPKVIAGLVREGRYMIPYLPDGVYADLRTASNIRFQLQAELTRIQNRISRWFNIYFPEYKKVYGKPDAKSGILILKTAPLPEDILTLGIDGVNQIWRDAKLRAVGKARAKTLIEAAEHSVGSKEGTVSARMEIRMLLEDYESRNIRLQEVMALIEELVAQIPMAEKLLEIKGVGIRTVSGFLAEVGDISRFNNPKELQKLAGLALVENSSGKHKGETTISRRGRKRLRYLLFEVAMSLVAKNPEFRELHVYYTTRRLNPLKKMQSLMAVAAKLLRIFYVMLTKSVDYDPKM

SEQ ID NO: 54350 - protein, 348 aa, unidentified
MLADEVDYVVGVDPHRDSHALAVVQVISGAVLFEAAVAASSDGYAHALTLVGQHAAGRRVFAVEGTGSFGAGLTRFLDARGERVLEVGRLRRERRSGGKTDALDAIRAARSVLAQHRPSTPRAGGQREALRALMAAREGAVNAKRAGLCQLRDLLVTTPEPLRSELRPLTRARLLQRLAATRPERRTDPELRGALLALRSVARRVLQLTSEERELAHEIEAITRKLAPQLLAQPGVGPLAAAQLVLSWSHRGRISSEAAFARLAGCAPIPASSGQTVRYRLDRSGDRRLNRSLHMILVTRRRSHPATIAYIERRMQEGKTRREATRCLKRYLARNLYRLLEHGPPLAT

SEQ ID NO: 54351 - protein, 432 aa, unidentified
MKYKLKQKQNQRITRITESTLVVGADIAKKVHVARAVDFRGIELGKDCTFHNDQNGLAKLVTWMKELEQAHGKTDIVFGIEPTGHYWFPLAAYLQEQNIQIVVVNPHHVNKTKELEDNSQTKSDYKDAKVIADLIRNGKYSEPKLPTKEYAELRILMNLREKVSASLTQVKGRISNWFDRFFPEYANVFKQWEGKASLMTMRAFPMPSDIVSKGARDVLAHWKTEVKRGVGIKRAEKLVAAATVSIGLTEGCMAARMELSTLLGQYDLFSKQLEEIMTKVLEILENIPGAAYMLSVPGIGAITVAGLLAEVGDLNNYDHGQQIIRLAGLNLKENSSGKRKGKTGISKRGRSRLRALLFRAVMPMVAKNEAFKALHKHYTTRSQNPLKKKQSLIALCGKLIRVLHTLGTKQREYNAIDVIGPARQIQMQQVAA

SEQ ID NO: 54352 - protein, 372 aa, unidentified
MKEFSKFVGLDVHKETIAVSVAEANGGEVRYLGEIANTPEAVDKLVKQLRKGGANLFFCYEAGPCGYGIHRQLTDLGWDCQVVAPSLIPKKAGDRVKTDRRDSLMLARLHRAGELTAVWVPDGAQEALRDLTRAREDMKHLQRQAKQRLLAFLLRHGKRYDGKSNWTQAHYRWMGEVKFDHPVQQIVFQEYVDTVKAMTKRVEALDKQIESAAAGSVFWPVIEGLMALRGVNLLTATTIVAEIGDLRRFASAPQLMAYLGVVPSEHSSGGTKSRGGITKTGNGHVRRVLVEAAWTYRHPARKTAILQRRAERTSEAVQEIAWKAQTRLCGRYRLFEARGKLKVLACTAIARELAGFIWAIGQALPQPAAANA

SEQ ID NO: 54353 - protein, 326 aa, unidentified
MMNYLGIDVSKEKIDCCLFINGISGKGKSKIFSNSESGFIKLTDWLSHLNINTNDLLVTLEATGIYHENLCYFLHDLKINIAISNPMRTRRFAQGMSILTKTDKIDSEVLAKYGALAPIKYWKPDSKNFRELRDLMIRRDALSTDLVRESNRLEKSTFTKTSLHVISMIKESIDSLQTRINHIDVIISELIKNDSELTNEMNLLISIPAIGQHTALQMLTLFHGKDFDNAGAAAAYVGLVPIQKQSGTSVRGATRISKSGSSRIRAALYMAAIVAIRFNPHSKVLYDRLLKNGKSKMSALCAVMRKLVYLCYGVLKNKTPYQPDYA

SEQ ID NO: 54354 - protein, 347 aa, unidentified
MAQVALIGVDLAKQVFQAHGAAADGSVIFRRKLSRGRFLSFLAEQPRCIVAMEACATSHGWGREIELLGHSVLLIPPIYVKPFVKRQKNDAADAEAIAEAASRPTMRFVTIKTEAQQARGMLFRTRDLLVRQRTQTINALRGHLAEHGVVAPQGAVQVKRLADAINDDTSRLPALVRDLGELYLEQIESLATKIGGLDKRLRTAAAQAETTRRLQTMPGVGPITAVAMETFAPPMEEFRRGRDFAAWLGLVPRQHSTGGKARLGKTSKMGQRDIRRLLIIGAMAVVNAAVRRGVPSDPDGENAWLPRMLAKKPRMLVAIALANKMARGLWAMMTKEQNYRDPAVTAS

SEQ ID NO: 54355 - protein, 337 aa, unidentified
MQKSFLGIDVSKLSFDVSLIVVLKGQKQSMVISKFDNDSLGLESFRIWLDERNVTFDSNSLLVIENTGIYHRLIWNFCSTNLLPIYIGNAADLKWSFGIARGKNDKVDSMRLCEYAYKNYEDIKPSTSLNKVLITLKDLLSNRSKLLKLKNAIKQTLNELKRSNDKTTQSLMENLNKAALDGLQKSIKQIDAELLKILKQDEAILTNYNYMLSVPGIGKTTAAFIICCTNNFAIKVTGKQLANYAGAVPFDNTSGTSVKGKSRVHFMANKELKTLLTMGALSAIQAYPEFKDYYERKTKEGKKHLQVLTAIKNKMLLRVASVVNQQKDYVNNYKKAS

SEQ ID NO: 54356 - protein, 334 aa, unidentified
MTYELLAIDLGKLSFHLHSIAADGAILSRKVSRSKLAEAVKSISPKTIAMEACASAHHWGRQFREAGREVLLINPRFVKPFVRGSKNDAVDAAAIYEAATRPTMRFVRVKSTAQQDLQSLHRIRERLIVQRTSLINHARGLLAEYGIVLPQGPWRFASQAPSAVEDAALSDLGRELFLELLDQLTDVNDRVARLDRKISEICREREDCRRLSELPGVGPIIATALVASVENGRHFKSGRELAAWIGLVPRQYSTGGKPRLGGIGRRANHYLRRQMIHGARAVISRLASHDDRRSQWLKELVARRGFNKAIVALANKTARVAWALLTRQERYAAQ

SEQ ID NO: 54357 - protein, 350 aa, unidentified
MKKNSKACERHPAETIGIDLGDKMSRYAILNEEGVVVEEGSFRNRVESIAKHFGKRDRARVALEVGTQSAWIAREFTKLGHEVIVANARELKWITSSDHKNDRNDAMKLARLARADRNLLAPVEHRTAEQQAELAVIRARDALVRSRALLVNTARSLAKGFGLRLPAAVTPTFGARALALLPESLRTAVGGLLEQIDGLSLRIRAYDEGVAEVAARHPEVERLASVPGVGTLTATAFVLTLGRKERFAHSRDVGSFLGLRPRQKQSGERDPQLGISKSGDKYLRKLLVQCAHHMLGHFGKDSALRQWGLSKSDGSAARKRAVVAVARKLAVLLHRMWMTGEKFKPFPKMV

SEQ ID NO: 54358 - protein, 391 aa, unidentified
MVCVGIDVAKDKHDCCILDSEGTALVDCFTIPNNMDGFKSLLQTIQDCSQKSDKIKVGLEATGHYSYNILGFLLDNDLPVYVMNPLHTNLYRKSLSLRKTKTDRVDAKTIATMLLSDVDLKSYTDTAYHNEELKSLTRYRFDKVQERAKLKQSVSRLVTILFPELEQLVSSIHGTSIYALLSEYPGAKQISEAHLTRLANILVKTSRGHYRKDKATHIRDAARTSIGSVMPAKSLELKHTIKLIQELTSEINEIEDAIRKIMDELKPPILSIPGMGFHSAAMILAEVGDFSNFNSPDKVLAYAGCSPSTYQSGKLTNCYAHMEKRGSRYLRYALYTATKYVCYWNPVFTEYLTKKQAEGKHYNVALSHATKKLVRLIYALQKSGKAYLAVT

SEQ ID NO: 54359 - protein, 364 aa, unidentified
MQINIGVDLHKTQFTVHVHEWKDESENRQYRTTQEGYNEFISKVKHWQEKGHEVRVGVESTGNTRFFKNMLEDAGCSVTVINTLKFKVVNESVKKTDKHDAATIAEFLSKDMLPESRICSEASEQIRRLLKSRQTLVRTGVVIKNQIHALLTGIGIEDKKASLQSKRGRQRILDALKAAGNVLVVQPLIETLNNLEGNVKLIEAEIEKLTVGDKVVELLMTIPGCGKIGAWTIRAHTDDIKGFSSVKKYSAFAGLVPWVQNSNERVHHGKITKRGPEELRTALVQVVLGMRRCKKKTLAWRLMSRYEMMKKSKGSGKSIIATARKVSCIIWTMLTNEKEFDCSLMLDKKIRRTADSMRNLAYIA

SEQ ID NO: 54360 - protein, 346 aa, unidentified
MDKFDPCGIEVSAQELVVALCRGGREERLRSFPNTAEGHAAVVRFLTGGPQRVRVVLESTGLYGLDLTWTLHRAPQIEVMVANPRAVRHFASALMQRSKNDQLDADVLREFAARMPFQPWTAPSPAAFALCALARRLETLTEQCTAEKNRLHAAHVSVAMPSAVRRDLQRSVRSIQRAIGRLTREAQRVLEGDPLLGSSYRLLLTAKGIGPTSALRLLAETALLSEDLDVRQWVAYAGLDPREYQSGSSVHRKARISKTGNRHLRRALYMPALVAARHEPHLRAFYQHLLAQGKCKMQALVAVMRKLLHAVYGMLKHRQPYDGAKLYRLVVDLPAPSSGHCSAEAA

SEQ ID NO: 54361 - protein, 344 aa, unidentified
MNSTTIAVDVAKAVFEVAVSEHAGQVRERHRFSRERFRRYLGEQPPATILMEACGSAHYWGREAQTRGHRVVLLPPHAVRPYVVRNKTDRTDAKGLLEAARNDEVRPVPVKSETQQALTALHRLRSTWLATRTARINTVRGLLREFGVVLPTGARHVVPTLGPVLEDADGGAPSLLRPALAEAAREIREIEGRIRTVEHQLDAVAEQTPVVSRLRSIPGVGLLTATALVAAVGDVQRFPSARHFASYLGLTPRERSTGQRRQLGAISKRGDTYLRMLLIHGARAVLAHAKTKTAPAPDRLRAWALHLERLRGHNKAAVALANKLARIAWAVWKYDIDFAAAPAA

SEQ ID NO: 54362 - protein, 372 aa, unidentified
MTSIIYVGMDVHTTNYTLCCYSMEDDRFFAEVQVEPDAKNILKYLARIEKQQSRDCRIVCGYEAGCLGYSLYHQLHAHGIDCVILAPTTMMTKPGKRIKTDRRDARLISKCLAFHTYSPVYIPTEVDDAVKEYIRMRDDANSALARVKQQIIAFCIRHGKIHDGKSYWTSKHLEWLSSLDLGSKILSEVLQEYLIRYYQLREQVDMYDMRINELAQAEPYRQKVEKLGCFRGIAAHTALSFCVEVGDFRRFATAQQFASYLGLVPGECSSGDKQQYTGITKAGNSHLRKLLVETAQVFGRSATKSGKSVALKERQAKCDSLTVAYADKANARLKKKYFKIAMRSKVNIAKTAVAREMACFIWGMMTDNISCA

SEQ ID NO: 54363 - protein, 389 aa, unidentified
MLLDHPSNGLTAIRTQFGAIFVSLELSRSNWLVTSLSPGKGEKMSKHGVTAGDVAGLMKLFADLRRKAEARTGESYPIITIQEAGLDGFWLHRVLQQNGIESHVVDPASIATPRRRRRAKTDRLDGETLLRALLAYKRGEPRVCAMVVAPSPEEEDRRRICRERRSLIAERITHVNRIKGLLFAQGISGYEPLRRDRRVRLEALRTGDGRELPAHLKAQIGRELDRTELLLEQIAAVETERDALLAAARKPASEEAAPDPVTMLLALKGMGSNFAAVLWSEAFYRQFANRRQVAAYAGLAATPWQSGGIRHEQGVSKAGNPRLRTTMIQLAWLWIRHQPQSALTRWFKERSPQGRKRAIVALARKLLVALWKYVTQGVVIEGAVMKPAA

SEQ ID NO: 54364 - protein, 418 aa, unidentified
MSSVFDIQHERCAGGDVHKKTVVACRRYPDGRGNFTVETRSFRTMTKDLLALLDWLMEVGCTHFAMESTGDYWKPVYNILEGNLELLVVNAKHIKNVPGRKTDRVDAQWIAKLLQVGLLRGSFVPPVGQRELRDLTRHRTNFVRERTNMVNRLQKVLETANIKLASVATDVMGVSGRAMLQAIIEGTSDATTMADLAKGRMRTKKDDLADALDGRVKDHHRFILAELLTQIDGINETIDRFNTEIEKLMAPFKEGAALLATITGVGEVASQVIVSELGTDMSVFATDAHAAAWAGVAPGNHESAGKRGSGRVRQGNQTLRRTLIQCTHAAVKTKGTYLAAQYHRLAGRRGKKRAIMAVAHSILVSAYHMLKNKVTYQDLGGNYFDKLNRKGTTARLLQRLQDMGLTVTVQEQVSALAA

SEQ ID NO: 54365 - protein, 348 aa, unidentified
MEHFAGLDVAIDETAVCVVDAAGEVVMRASVATDPDTIAQILSPFAASLRRVGHEACSLSPWLQPGLKALGLPAVCLETRHVRAALTAQRNKTDATDALGLAHLMRTGWFKTAHVKSDACYRVRQVLTQRRALKRKFLDLENTIRHSLKSFGVRLSKVGRGGFEAAVREACAEDPLTAELMDAMLQARAALWRQYLKLHAMVLRIVGADEFCRRLMEIPGVGPVTALTFVTAIDDPARFRRSRDVGAYFGLTSRRWQSGTSIDIQGRISKAGDAEVRRSLYEAASAMLTRFKGQTRLKAWGQKLAKRCHKKAVVAVARKLAVVMHAMWRDGTTYADAPLSAVAARAAS

SEQ ID NO: 54366 - protein, 415 aa, unidentified
MAKSMEAIFRCCAGFDVHSETVAVCVRRIDDRGEIHAEVRTFLTMTRDLLALCDWLITEGVTHIAMESTGVFWKPIYNILEGQFQILLVNARHIKNVPGRKTDVKDCEWIAQLLQYGLLRGSFIPPQPQRELRDLTRTRTQLTREMASVANRIHKVLEDANIKLGLVATDVLGVSGRKMIKALIEGETDTVKMADMARGRLRDKIALLEEALVGKVTEHHQFLLKALMDHLVYLESQIERFNQRIEEAARPFEKAITALISIPGYDRVSAQSVIAEIGPDMKPFRTQAHLCSWAHICSGNNESAGKRKSGATGHGNRWLRTMLVQVAWAASHKKGSYFQAQYRRLAGRRGKKRAIVAVAHSILTVTYFILSEGRAYKDLGADHFDRISRDRIRRYHIKRLESLGYKVELTEKKAA

SEQ ID NO: 54367 - protein, 356 aa, unidentified
MTKVKTNFGEQTIYVGLDVHKRSWNVALYLNDQYLRNIHQPPSPQALYKYLQSQYPGARYVCAYESGKFGYWIHRQLVEKDIECIVVNPADIPSAQKDDLQKTDPRDARGIAKALQKGLLKGIYIPCEQQEADRSLVRQRKKIWSDLVRCKNRIKNFLDYTGIELPDKFNNSSWSRNFIQWLKDLPFEHPGHRSTLNYMIREMELLRKELLSISNDIRKLMRSAFYKKRYYLLRTVTGIGPLTAALLLTEIWDMKRFASFYELNSFIGLMPMEHSSGERELKGRLTIRKHRQLRSDLVECAWTAKRTDPALQLYYHQQLKKGKEPKLIIVKIARKLLSRIRYVWLTEQPYQIAVVK

SEQ ID NO: 54368 - protein, 398 aa, unidentified
MNRIWAGIDSGKTHHHCIAIDQDGAKLLSRRVPNGEPELIQLLQDVLVLGDHVTWAVDMAGGEPALLLALLASHNQELLYIPARVVNRASDGYRGEGRTDARDALVIADQARIRRDLKPMRPTDEATIELKILTSRRTDLVRDRTRAINRLRSTLTGMFPALERTLVLTSAGPLVLLDGCQTPAAIRRMGTARLTRWLRARGVRTPEELAATAVGAAEQQRTPVPGEAVIAQLVRTLAADVQVLNEKVAEVDRLIEDRFRAHDLAEIITSMPGIGPLLGAEFLAGVGSDLTFFASPDRLAAFAGLAPAPHDSGKKSGNLHRPRHYHRGLQRVFYMSALTSVRYDPNSRTFYDRKRAEGKRHTQAVIALARRRVNVLWALIRDRRLYEVAPPQATVSPC

SEQ ID NO: 54369 - protein, 329 aa, unidentified
MAKNVFQLHGVDADGQHVLTKRVRRESLLPTLEKLPPCRIGIEACTGSFYWQRQFETLGHSVRIIAPQYVKPFLKHQKNDRNDAEAICTAMRQPNMKFVPRKDESQQDIQALHRARGRLVNHRTALVSQMRGLLLDRGVAIAVSIGRARRAIPEILENRGNGLTDLTREIIGDLFEFLLILDERIKAFDRRIDRVFRASEPCQRIARICGVGPKIATAVVAAVGDGTEFKNGRHMAAWMGLVPRQRSSGNKRVLMGISKRGDKHLRTLLVHGARAVVRVSAKKDDPFSRWVNALRERRGMNRAIVAVANKNARIIWAVLNKGEEFRPSN

SEQ ID NO: 54370 - protein, 456 aa, unidentified
MKKTGYLGIDVSKGYADFLLLDNESEVLEEAFILQDNQEGRQSLKALIAGWMKQGLEELYCGVESTGGYENNWYGYLKSSFKEKKVFVCRLNPRAVKALSDASLNRTITDAVSAETIANYMVKFPKKVDYGLENKAGNETSKEGRLHLTYIKMLTKQKVQLNNQFEKLIYQYFSEVMVYCRHGVPVWLLNMLSKYPTAKTVRNAGVSRLSAINNITPEKALVIVNKAKSSTQEVSNHIGHIIQQTATEILHKVTLIMGEKRYLQGIYSEKEAVKLIGSIPGIGLDSAIAIALEIDDVSRFETAKKMASFFGVHPTYKQSGDGMWGNYMSKKGRGEIRGVLYMTALSALRYNPALAQQYSRFRTNGMKHYPAAGVIMHKILRIIYGILKNKTKYDAETDLKNKEKSAEKQKENEQKQKETKLKNNQKKQRFQQPTTEAPISRKAEQKLKKQIASQTS

SEQ ID NO: 54371 - protein, 408 aa, unidentified
MMAVMIGVDPHKGSHTAVAIGAAEEPLGKLRVRASASQAQRLVAWAAAWPERTWAIEGAGGLGHLLDWQLVAAGERVLDVQPKLGARVRLLATGASNKNDPNDALSVAVAALRSRTRRPVTADDHAAVLRVWSRRHRDLGRAKNQVACRLHAVLCELVPGGVPEEITAAQATRILRSAKPSGDAGQARGELAAELLEDMRRLDAQIREPEKKLAIAVRASGTTVTEIFGVGPVIAATVTGDAADVARFASRDHFAAFNGTAPIEVSSGDRKTCRLSLRGNRRINHAIHMAAITQIRHAHSDGRAYYDKKVAEGKTHKEALRSLKRRISDAIYSHLVADARRAAAAARTEGPGGQPGNDADSSAAGSHPERRLFGQATPEPSPTLRPATPARRNMPPKPSASKKTRRSP

SEQ ID NO: 54372 - protein, 339 aa, unidentified
MGILYVGIELAKNVFAVHGVDEHGKAVLVRPSVARAKLHELIATLPACTIGMEACSGAHHWARLFLQHGHTVRLMAPKFVAPYRLSGKQGKNDAADAMAICEAVQRPNMRFVPVKSQDEQARLCVHRVRQGLVEQRTATINRIRGLLSEFGIVLPQRAATVRREATVHLEDLPGWANTAIGDSLSDVHRLDERIAEYDHHVRQMARDDQRSRALMQLSGIGNTTASALVSTIGNAHDFKNGRQLAAWLGLVPGQYSSGGKTRLGSITKAGDRYLRTLLVLGARAVLAAARTKVDRLSRWALALEERRGYWKAVVAIAAKNARMAWAVLAKGENFKLLEA

SEQ ID NO: 54373 - protein, 351 aa, unidentified
MVTLVRESRRLIVGVDSHKEIHQAAVLDENGVLLGNERFAASTAGYRELEAWLATLGEIDRVGMECTGSYAAGLTRFFRERDVEVLEVNSTHRAVRARRGKDDPIDAEMAARKVLSGEARALAKDTTGAIESIRLLKVARDSAIKSRLVALLQIRDVLVTAPAELREHIDDAGGTRHRVNRAASLRPDVANLDSPLQAAKFALRDLARRVKLFDDEIKEIDVCLAPLVARCAPTLLECRGVGTQHAAQLLITAGQNFGRLTGEAAFARLCGTAPIPVSSGKTNRQRLHRGGDRRANMTLHLIVVARLRLDPQTKAYRERRRAEGLSTRDIIRCLKRYVAREAFNALKQDLL

SEQ ID NO: 54374 - protein, 412 aa, unidentified
MSVEHETIDEKRTPFTAGIDWASADHAVAVVDAAGVQQDRFLIPHTGAGLKQLVRRLRCAGVGEVAIERPDGPVVDALLEAELTVFVIAPNRLKNLRSRYGSAGNKDDNFDAYVLADTLRTDRARLHPLTRDSDATTTLRMTVRARQDLVAARVAMANQLRAHLQTTLPGAIGLFRDIDSTITLAFLTRFPSQDKADWLSRTRLGNWLRSTGYNHLAKLDQLWAHLDNAPAGTRGPEAEARAQITVAMVAGLGALRAQIKALEEQIAIQLAQHPDAAIFTSLPRSGTVRAARLLAEIGDARGRYPTPESLVCLAGAAPSTKQSGKVKVVTFRWAVDKQLRGAVVDFAGDSHHDNPWAADLYQRARARNHDHPHAVRILARAWLHVIWKCWQDGVPYDPAKHHALQRVLASTA

SEQ ID NO: 54375 - protein, 346 aa, unidentified
MYQDNLFCLDLAKKSIQGCLLDKNHQVRFNRTFSRNKLIEWLSRQQPMAVAMEACSTAHYWSRVIERLGHRPLMVPTRTANRYREGHKTNATDALAVGVAARQPTTRFVAPKTIEQQEMQSVERIREHISDDLTATSNLIRALLAEFGLQIPKGKAAFKRHLVELLEDAENDIPMALRTELINEWMRYRQLQLRLKEAERARDLLCKQHESCQRLNQLGGVGPVNAIGLYLALGDRGSSFKNGREAATCIGTTPKQYSTGDEVTMLGISKKCANKRLRSNLIQGARSVIQALKRREPNNAQEAWLKAVIERRGEGRAAVAWASKTIRVAWAMLHHGDEFKSHLNLA

SEQ ID NO: 54376 - protein, 318 aa, unidentified
MLLDDSVQCSVGIDVSKARLDVHVLPEGRSFQARNAPDQFQTLLDRLPEPGACRVVLEATGDLQRAVVAFLVDAGHYVSVVNPRQVRDYAKALNILAKTDAVDAKVIARFGKDVKPRNITEVPEKQAELDQLVGRRRQLVRARVAESNRLRDDMPKLIRESIQRQLKSIAKDVARLNRAILELVRSDDDWKQRFDLLKSVPGVGDATAAALVAELPELGRLNRQEISALVGVAPFADDSGSRQGRRSTRGGRRPLRSTLYMATVAALRSNPVLKAFAKNLRRNGKRGKVVIIACMRKLVVIMNTMVKENSHWKETTPA

SEQ ID NO: 54377 - protein, 380 aa, unidentified
MVPLQHHRGTTMDHYAGIDVSLEYSSICVVDATGQIVREDKIASEPEVLIAWFGSLGYALTRIGLEAGPLSQWLYAAMKKAGLAVELLETRHVRDAFKAMPVKSDRNDARGIAQLMRLGWFRPVHCKSIGAQEIRAELTARKLVESKLRDTANSLRGILRGFGLKVGATTERSFPGRVRELVKGHPVLEAIAESLLSVHEVLLREFNGFQKRVQSAACSNVKAKLLMTTPGVGPVISLTYAAAVDDPARFKSSKKAGSHFGLTPKKYQSGETDRSGRISKIGDASVRAALYQAAHVILTKPVKGCPELKSWGMRLAKRAGQEKAKVALARKLAVIMHRMLADGTPFNLTAKAERMAATAAKAARKVLALPANGATVTEAV

SEQ ID NO: 54378 - protein, 423 aa, unidentified
MTVVYPICCGVDVHKTFFIATLITTEGIQPKYRKRRFSTFNNQILAFKAWLLENNCWDVCMESTGKYWVPVFNLLEDSIHVTIANPKWVKAIKGNKDDAKGSKWIGDLFRIGLVPGSFIPCKDIRILREFMRYRFKLVSCKSSEKNRYQNVFTVCNIALDAVVSDMFGKSAASITDYIITADTFDPKHCVSLLQKSLEKKTSEVVESIDGFQMAAPQKEHAKMVKEHYDYLVNQIGKLDAAIGELSKPFKPAINLLCTIPGIKRDSAITVLSEIGTDMSQFDSSKRLCRWAGLTPGNNESAGKKKSVRITRAGVYLKPTLVEVAHAAVKSEATPYYRLKYERIAKRRGKKRAIIAIARMILTAVYHMLTTGEVWNPVDLSRIDMPPELLEREVQKSLRRAAKLLIAHGILSPDSVQIPEIAPA

SEQ ID NO: 54379 - protein, 357 aa, unidentified
MRSSNVKYIGLDVHKEAISIAVLNGAGKLVMESIIETKASTLVQFLDGLRGELHVTLEEGTWAAWLYDVLKPHVREIVVCNPRRNALLKEGSKSDKVDARKLAELLRSGMLRAVYHGENGLRTLRELARSYQVISKDLNRVMNRLKALYRGWGIPCTGTQVYSRRHREQWLKKILEPGVHRRAELFYQQLDALQVLRRTVRGELLAESRKHQAVKVLREIPFIGPLRAAQLVALMQTPHRFRSKRQLWTYSGLAVETHDSAQYRYVDGQLQRSKKPQQVRGLNQNHNHAMKEIFKSAALSASGRAGPFQNFYEGLLARGMKAELARVTLARKIAAITLTLWKKGEHFDAKYVKSQAA

SEQ ID NO: 54380 - protein, 346 aa, unidentified
MIPVASDVHKGRCWMAMIPPGEDIKMLEPIECTREAWRQRLAELPPDAEIALEVSTSGYFVMSVLEEEGWRKRSHWVHTAGVDSLRKQKSDRLDTRRLVRKLAVHDVEPLPEAWFPPPAIRALRLLARQRCGIARLRAQTKNRVNSLLEMHGLRPQRCVFTAKGRAWLQQQALSQAAQLCFERMFRLYDFLTAERESSEAELLAAAAAFPQVALLQTIPGLGHMLAAVVWSEIGDLDRFDSGDALLNHTGLVPSCWDSGEVSIHGPITRQGPVWLRWALITAANALTRSKSPLGKRYWHLRGCRKHPNVAKAAVAGSVARCAYGVLKHGVPFQAERWGRRPGKLGQ

SEQ ID NO: 54381 - protein, 359 aa, unidentified
MKEVTQVKEALESKESEIFQKKLYVGIDVSKLTLDICVIDDNEEKYLVTQISNNQDGYERLIKSLKRVQEKHGFNGSFDYHFCLEATGIYSNGIVSFLLSKKRLVSVLNPYVSSSFLKARLCRTKTDKVDAEGLAFYALKMKPVAFKQAPEMIRVLQKEVRFLQSLIQKKTQFVREKESLSSEHKAIHDELIIVMNSKIKTQRVLIQSFIKKHPKLSEYAKCLQSIPGIGAQTAWVILSEIVYDSESELPIEAKKQVAHAGLAPIERSSGSSVYSAPRISKTGNRNLRKALFFPALTAIRRCDSLAKTYRHLVNKGKRKKVALVACMRKLLALAVTLLQKQTVFIPHYISQRSLPTPII

SEQ ID NO: 54382 - protein, 401 aa, unidentified
MAKLWAGIDAGKAHHHCVVIDADGNRLLSQKIPNDEPALLQLLATVLEMAGGDEVVWATDLNHGGPALLIALLIGHGQDILYIPGRTVHHASKIYRGEGKTDAKDAAVIADQARMRTDLQPLRAGDEISTGLRLLTARRADKSADRVRAINRLQAQLLEYFPALERAFDYSRSKAALTLLTKHRTPDGIRRAGQARIHAWLKKHGARSSAAVAQAAVDAAKSQHTIVPAQHLGEMIVAALAREILTLNEELAKLDALISEKVTEHQHTEVLLSMPGFGPVLAAEFLGATGGDLTVFQSADRFAGVVGLAPAPRDSGRISGNHHRPRRYDRRLLRVFYLSGLSALKSCPSSRGYYDRKRAEGKSHIQAMLSLARRRLNVLWAMLRDGTTYNPASAATTTMAA

SEQ ID NO: 54383 - protein, 407 aa, unidentified
MTVVTFPVYIERGCGLDVHQQTVVASIAGKDIESETKTFGTFTEDLYALTSWLQNQGITHIAMESTGVYWKPVYYVLEDFFKIILVNARHIKNVPGQKTDKKDSEWIAKLLMSGLLKGSFVPPQSIRELRVLHRHRRKLICERTAEKNRLQNILEDANIKLGSVISDVFGKTGSLIVNALMEGVSDPSALAELAKGSLVQKKEKLKKALNGRVTEHHRFMLRFIAQTIQHINQQIALLEARMASYIADMKQDAELLQTIPGVSEQIATGILAEIGKDMGVFPTHAHLASWAGVCPGNNESAGKKMSSRVTQGNKHLKTTLVEAAWAASHSKTNPVLAVKHRNIALRRGIKKANVAIGHKILKAAYYVLRDKTPFISPLNNKEILEMKRKKKIERLEKELKALRNTSV

SEQ ID NO: 54384 - protein, 427 aa, unidentified
MSTTQNEKIRQVTETTMVIGVDIASEVHWARAFDWRGLELGKVIHFENSAEGFASFQNWASELSAKAGKDQTIVGLEPTGHYWFTLAASLKETPMKLVLVNPYHVKRSKELDDGNPTKNDRKDPKTIAKLVLEGRYQIPYIPESLYAELRTVMNLRWRILKELTSAENRIQRWLKIYFPEYSQVFASFTGAASIALLKEAPLPGDISALGAEKINALWRKLKLRGVGMKRAERLLKASRESVGCTQGLSAAKLEIRLLLEDFEAKHKQYQEVMAQAEALCGQIPAAAELLKIKGLGLITVAGIFAEIGDVRRFESPRQLQKLAGLALKENSSGKYKGQTQISRRGRARLRAILFQAALPLVKNNPEFRKLHHYYTTREKNPLKKKQSLIAICCKLLRVFFVIATKGCAYDREKLLADIRKNQPQKAA

SEQ ID NO: 54385 - protein, 421 aa, unidentified
MKNSAATKLKQVPAGYLRLGVDPHKKHHAAVAMTEDLMVQTKFKFANSRRGFEEALDRARAEMIRTGCRGVIFAIETAGHYWRNFAYFLDEQGVPFRLINQFTLKRRREGKELNKRKNDFRDAEVAAELLGSGEFTETKLPQGVYAQLRAGYNGYRRLAKERNRNINLVKGLLDGLFPEFTQVFKDPCGRTALSVLSTGAIPGVIAGMTEEEFINTVGERHQGRLMRRKLVALHHAARASIGIEAGAQSVSLEISLVVDKLRLIDRQMSRIEKVLITLVDETEEGKYLLSIRGLNYISVAGLLAELGSFRSYKNARQLIKMAGSNPTESESAGKRSSRTPMSKKGRPGLRHCGWIAVISLLRHNPDFRAWAKSLRERPVHAHPLKRKEIVGAALNRLLRLVFALVRKQVFYRVPELAGVAS

SEQ ID NO: 54386 - protein, 350 aa, unidentified
MNPTQVSSKSQVAVVIGIDLAKDHCDVVGYGANNKICLTKCGCSYPKLMEMLSNMPSAVVLMEACKGSMFRARAIASLGHDARLVKGSDVKALRNVNQKNDIRDADYIARLYYVPGTTYVYIKNEHQQTLQFLQNEYKSLQDMRINVGNQIHAGFEEFGYPARKSSVFIKNRLVEYLDKHAEHIPEEAIAALKRQRELWLMLLEKEEDAQRRMEKIANTDADAKRIMTVPSVGPQTAVRLLAHIGGNIARFKNSRQFAASIGLVPKQNSTGGNTTLNGITKRGPKRLRANLVQCAGVALQNAEHLGGNLGEWIRKMKESGKKYGVITCAIAAKLARIIYRLMKDKIVYVP

SEQ ID NO: 54387 - protein, 342 aa, unidentified
MQVTTYGLDLAKRVMQLHWVNMETGEIHRKQLKRRVLLEFFANRQPGIVAMEACGSAHYWGRELRKLGHEVRLIAAQFVRPFVKTNKNDAADAAAIWEAVQRPDMRFVAVKSEEQQSILSLHRIREQLIKMRTMQVNQIRGLLYEFGADLPQGRQRGLKEVPDALADLEKSISPMLLDTVHQQLKRLEGMDKDIADIEKRLMLWKKDQVAVTRLMAIPGVGLLTATAIIATVGDMKSFRSGREFAAFLGLVPRQSGTGGKVRLLGISKRGDVYLRTLLTHGARVVVNFQIKNRNPWIDKLLSRRPHNVAVVALANKMARMIWALLAKGRSYDPQYQGVVAAA

SEQ ID NO: 54388 - protein, 308 aa, unidentified
MAKPVEKITLGIDVSKDKHAIYNWQTEKLTMLPNECSAIKTFLKAFHGPVQIAIEPTSHYHLVMIEEAHALGYEVYLINTRQLVHYRLAVNVRNKTDPLDAWLLARYLEREGSQLRPFKPQDPRAQRLWQLILRRATVVKSRQQLRQSLTGVRLSIKALLTQFQQLLDRIDRQVIVLIKELNWWSDYLYCFSIPGIGLGNASALVAAYHRGSFAGSDAFISYLGLDVKIRDSGYFKGRRKLTKRGEPELRRLLFCASQGARSYHRFADYHQRQLDKGLSKIAARVILSRKLARIAFTLMRNEEMFIKH

SEQ ID NO: 54389 - protein, 339 aa, unidentified
MFIIGIDPHKGSHTAAAVDHSETVIDTLRVVADCHQRERLLAWAVPFTPRTWAVEGATGMGALLAQQLVAAGEHVVDVPPKLSSRVRLLENGKIDKTDPNDARSAAIVAWHNRSLNVVAGLDEHRVVLRLLADRDHQITAQRTRTICRLHALLCLLIEGGTSRALSLQRAEQLLVNIDIDGPVTRERIAAGHQLLEEARVLDASRVEVRKRTAETIIASATTVTDVYGIGPLMAAIIIGRVGDIRRFPTSGHFARHNGTAPIEASPGPKKRHRLNPRGDRQLNHAIHMAAVTQISYDTFGRVYYLRKQAEGKTRKEAMRALKRHISDAVYQRLITDTRR

SEQ ID NO: 54390 - protein, 354 aa, unidentified
MQYIAFDSHKRYTYAVVEEKEKGWVMEKRIEHRRGEIGAFLSQCEVGSPVALETIGSWYWIVDEIEAAGMLPRLVNARKAKMMIASSKKTDRLDAKGLNTLQRTGTLPTVWIPSSELRDIRELYRTRMVLTQMVIRLKNRILSCFSKYGISFDETSDAFNIKGRASLEAALEILPTQTCFAVKELLRQLDLLQEAVKEFEARMLQVQSNDPEIKLLQTIPGVGPILSYVIACETGDIHRFPSASCFASYAGTTPSVHASGGKVRYGHTPSDVNHYLHWAFIEAANVISMRHEVLRFRHTARLYERLRQAKGHDIAVGAVARHLAEATYWILTTKTAYREPNQNKQVVVVSSKEG

SEQ ID NO: 54391 - protein, 395 aa, unidentified
MFIVGIDIAKRSHEAIIIAEDGQVVRKAFSFWNNCTGYNLLLEQVRRLTLVKSQIVFAMESTAHYWLALYARLLKDGYAVMVLNPIQSHSLRELYIRKAKTDARDSLIIADLVRFGRCKASNVPQDKILALRELCRSRAYLVDMAADLKRKLIALLDRIFPEYESLFDSVFSKASIAVLSKYSTPQKVKNANLRKLTDILMESSNGHFGEWKAHQLKEAACSSFGIDDSGGVYSTLLGMFLEQILSLTAQADSLEKQISVFFQEFNNPLTSIPGVGTVLAATILSEIGDITRFSSADKLLAYAGLDPSVKQSGEFKSNQNRMSKRGSPYLRRAIWLASTVAVHRDPMFQTYYEKKISEGLHYMNVIGHVSRKMTAVIFAVLRDGQPYQPILQSAG

SEQ ID NO: 54392 - protein, 326 aa, unidentified
MKMAHSQAVVGIDVSSGKLDAYVHGHDQSRQVTNDAAGHRELVAWARAKRATTAVMEASGGYERDLARALRRAEFAVYVVDPKRVRHYAKAVGQLAKTDRIDARIIAEYGATALAAGRLALPRPDDPQRDRLSALLGARAALIEHRDALQQQSAAMPAGPARQALKDAHASMKLRIKQLERQIGALIAEHAAFAALARRLDTVPGLGPVAIAALIAWLPELGYAGRARISALVGVAPVADDSGDREGKRHIAGGRKKLRNVLYMPVVAAIRCNPVLAAYYKRLLACGKEPKVALVACMRKLLVIVTAMITNQQDWAPHSGAQTAAA

SEQ ID NO: 54393 - protein, 369 aa, unidentified
MTERTTRYLGLDVHKATIAVAVAEASGPPTLFGAIANEPSEVRKLVARLGRGARLLAVYEAGPTGYDLHRQLVSIGVETVVAAPSLTPIRPGDRIKTDNRDALSLARLLRSGDLTSVWVPDPEHEALRDLVRAREDAKAALMRERHHLSKFLLRQGVHAPRGGTWGKRHHQWLNQVQLRNPAHQIVFADYLGAERAAEERVRRLEGAIHECIERSPLLPLVAALQCLRGIAFLSAAIVAVEVGDFRRFSSAPQFMAYAGLVPSEHSSGASRRRGHITHTGNAQLRHVLVQAAHNARYRPSQQSILRKRLEGAPRDLVQVCFSAQQRLHHRYWHLQHRLGTPKAVTAVARELAGFVWAVGQRMTEVPAAV

SEQ ID NO: 54394 - protein, 406 aa, unidentified
MSLCFAGLDWASREHAVCVIDDSGATRDRFDVTHDAAGLRELLARLRRYAPTPARLPVAIERPSGLVVDALIDAGFSVVPIHPNVVKATRPRYRSHGAKSDASDAYLLADLLRTDGARFRPLQPQCDGIGALRALVRGRDDLVATRVQLANQLRSLLESFWPGAAAMFADIDSPIALAYVQRYPTPASAARCGEKRLAAFLAQHRYCGRRSAIELLARLRAAPTGHADELEADAKGTLVQALAASLSSVVAQIAQLTSRIEHAVSELADGPIIMSLPRAGQVCAAQILAELGDVRERFPTNAQLAAEAGVAPLTYESGKHRAVAFRWACNHRLRRALTCFADNSRHASPWAARTYAAARARGCDHPHAIRILARAWIRVLWRLWVDRCTYDPARHRAALVLNVAAG

SEQ ID NO: 54395 - protein, 387 aa, unidentified
MYFVGIDISKFKHDCAIIDEIGDVIMPSWSFNNDLEGFSILREVLSSLQGDIKIGLESTGHYGQNLKLFLESNGFSFMECNPLLISRFVRSKSLRKTKTDSIDAVMIAQHLMTVEYKPYPASFYHMDKLKSLTRFRDSLVRQRSRQLVDLTNVLDKVFPEFKPFFKGKFSVTALYILANYPTPEKIANMNARSYEVLRKRSSGKFTMIQFAQLKTLAKNTVGSSDDYLLQQMEVLLDIYTQLDAKIEEVEAEIIECIIGIDPPILSIPGIGAMSAAVILSEFGDFAKYANPSKMLSFAGLEPGYFQSGQSEHTGHMVKHGSSHLRYALLNCCLPLIKNEPTFAAYYAKKRAEGKPHRVAMTHVAKKLLRVIYTLQTKNIPYNADLVR

SEQ ID NO: 54396 - protein, 340 aa, unidentified
MSYYAGIDVSLEASHVCVIDGSGKIVREAKVFSEPEALITWFRSMGLELTRIGLEAGPLSQWLYAAMRDAGLAAELLETRHVRNAFKIMPVKTDRKDAQGIAELMRLGWFRPVHCKSMEAQETRAMLTARRLVQKALHEVEMSLRGILRGFGLKIGKVAPSQFEARIRELVEGHPSLEVIATAMLAVRARLRHEFNGFEKRLRAMARGNTRARLLMSIPGVGTIVALTYAAAIDDPARFTSSKTVGAHFGLTPTRYQSGETDRIGRISKIGDASVRATLYESAHIIITRPIKGCTALKSWAMRIAKRAGMKKAKVALARKLAVIMHRMLVDGTTFTTQPA

SEQ ID NO: 54397 - protein, 351 aa, unidentified
MLIIGCDFHPGFQQVAIFDNRTGEIEAKRLQHREEAEQFYRSLSGKVRVGMEACGHYPWFERLLEELGFELWMGDAAAIRASVVRKQKTDRRDAEQILRLLLEDRFPRIWVPSLEVRDVRQLLVHRHKQVQTRTRTKNQLQAMALSQGVQKKWKLWTKAGRAELEQLPLLPYAGARRQQLLGALDRLEAEIAELNRRVEEEVRKRPEAVRLTTHPGVGPVTALAMVLTVGPAERFGGGKDVGSYFGLIPREDSSGGKQRLGRISKQGSSFMRFLLVEAGQSAARYDPELKRFYRRLATRKNRGVAKVAVARKLATRLYLMLREEWTYAQLCQAVMQVSPSHSVVEQQKPIA

SEQ ID NO: 54398 - protein, 347 aa, unidentified
MRFYTRQHLHYCGVDLHARTMYVCVLDQEGNVLVSKDIASAPEPFLELIAPYREDLAVAAECMFTWYWLADLCAREGLAFVLGHALYMRAIHGGKAKNDRIDAHKIAALLRGGMMPQAYVYPQAMRATRDLMRRRNYLMRQRAELLAHITNTNHQYNLPALGVRPARPAERSGLAEHFAEVPVRKSVEVDLSLVEHYDRQLLPLERYLESNAQAQDPVALAIVRSVHGMGKVLGLSILYEIHDIGRFSRVQQFLSYCRLVKPTKESGGKILGHSGKKIGNAHLKWAFSEAAVCFLRTNKPAQALRARLMAKHGKGKSLAIIAAKLARAVYFMLRRSEAFDAERFFAH

SEQ ID NO: 54399 - protein, 337 aa, unidentified
MKRYLGVDLHRTQFVVCTRWENGEQEIRQWRIGELSKFVEQLCIEDQIAVEAMGTTALFYDAVVGRVARVVVVNPHQFKVISESVKKTDRKDAQALALYLEKDLLPEVRMKPKQNRELMHLAETRDLLVKQRSALKGKINNLLAMQGIELKREALSSKIALARVLALPVSGMVQLELRVLVEQVRALSESIVELDERLEEEGQQLPGYENLTSIKGIGSLSATVLLTVIGKISDFADENKLASYLGLVPKIANSNESERSGRITKQGNKLARTALVQCGLVAKRYSPYLQGFYERIKQRRGGGKAKIALARKLAKIVYDTLKNQWIFEDFPSFTLAA

SEQ ID NO: 54400 - protein, 402 aa, unidentified
MNAVGIDVSKGKSMVAIMRPFGEIVSTPFEIKHTSSDINSLVKLIKSIEGESRIVMEHTGRYYEVLAHQLSEANLFVSAINPKLIKDFDNDSLRKVKTDKADSVKIARYALDKWQNLKQYSVMDELRNQLKTMNRQFGFYMKHKTAMKNNLIGILDQTYPGVNTYFDSPARSDGSQKWVDFASTYWHVDCVRKMSLNSFIDHYQNWCKRKKYNFSQSKAEEIYGKAKELVPVLPKDAITKLIIKQAVNQLDNASTTVESLRTLMNETASKLPEYPVVMAMKGVGTSLGPQLMAEIGDVSRFTHKGAITAFAGVDPGVNESGSYEQKSVPTSKRGSSDLRKALFQVMDVLIKTHPQDDPVYQFLDKKRAQGKPYYVYMTAGANKFLRIYYGRVKEYLSSLPEV

SEQ ID NO: 54401 - protein, 425 aa, unidentified
MRGDRPWRLMLLWRWARRIGCRLDWHLRAFDPVKEITRRLPPNDQLEARCKPVTSYRSLAGPFTPVSGSASSNVRRIAMSFIGVDLHQNSFTVCRRSSDGTESFETLSLSASDLERFCLSLDADDQIAIEATGNSAWFRDQVLPCAGRVVVVNPSQFKVIRKSVKKTDRNDAAALALFLAKDMLPETRVKSQDEGELASLTQTRDLLVKQRTRLLNKIHALHVRKGLKLKKESLGSKRGLTAIDLGLFSACEAIEIGVLREQALSLSASLARLDREIETIASTFQGYESLISIKGVGPRSAAVLLSSIGNVHDFESADKLAAYFGIVPRVSQSNETDSRGRITRRGNKLARTTLVQCGLIAMRYSPYLKQFHQRIRGRRGSGKAIIATARKLLSIIYDTLKNGWVFDDFTQFLRRDEKIPAGQSS

SEQ ID NO: 54402 - protein, 331 aa, unidentified
MKIKETVGIDVGKMKNEVRIHTNQKYKNFDNTVTGITSMIKWTLASSNYAKEQILFAFEHTGIYSQQISVYLTENGFNYVMLPGLEIRRSMGITRGKDDKIDAKKIALYTYRRKDELKPYELPSKNIKEIKSLLNLREKLVKQRSGYKATLCEYKRFLKRKENTTLFSVHEKMINELTKQINKIENNLMDIVDNDENLKELYKLLTSIKGIGQKTALFMIAYTGGFTRFETWRKFASYCGIAPFPNTSGISIRGKTKVNNLANKKIKSLLDLCAKSSIQWNSEMKLYYERRIADGKSKMGTINIVRNKLLSRMFAVVRRGTPYVDTLAYCA

SEQ ID NO: 54403 - protein, 358 aa, unidentified
MLKVVSWTESGQGPDPAQRVSIGIDLGRSKWAFAVSWDGEVRRQLATPGQLHHLEALLEQYCQCEVQVAYEACGFGYEIAWYLQGRSIAATVVAPVTIERARGARVKNDKIDAAELARKLEKGDLKGIYIPTRAEHQDRQLSRTYVKALKARQRAQVQIRALLQEQGRIGPSPGLGWSAYATWLKTQSDLAEPAKMCVNELGRLREAGAESAKRLKAAILALAKRPEYAAVVAAIRRQPGIGPFTAIRLVVEIGTINRFASAGSFAHYLGLTPCEYSSSETVRRGHILKCGPGYVRSWLLECAWRAIRPGGDEALRKCFERLAPRIGKKRAIVAVTRRLALRVRALWIAGLREAAKVA

SEQ ID NO: 54404 - protein, 342 aa, unidentified
MDYYAGIDVSLECSSVCVVDASGKIVREGKVASEPDALIGWLRSLGYDLSRIGLEAGPLSQWLFAAMRQAGLTVELLETRHVRKAFDAMPVKSDRNDARGIAQLMRLGWFRPVHCKSMAAQEVRAMLTARKLVQTKLLDVQNSLRGILRGFGLKVGKTTERGFAGRIRELVAGHPALEAIAEAVLAVHAVLKCEFDRFEKRVRNMARAHRQAELLMTTPGIGPVIALTYTSAIDDPGRFKSSKAAGPHFGLTPKKYQSGETDYTGRISKIGDASVREALYQGAHTILTKPLKNCSTLKGWAMRIAKRAGMRKAKVALARKLAVILHRMLADGTRFNAAAAAA

SEQ ID NO: 54405 - protein, 334 aa, unidentified
MENVALIGIDLGKHSFHIHCQDKSGKALLRKKFTRTKLMQFLATCPSSVVVMEACAGAHFMARRISDIGHEAKLISPQFVRPFVKSNKNDFVDAEAICEAASRPSMRFVQPRTEGQQAMRALHRVRESLIRDKVKTTNQMHGFLLEFGISLPVGDAVIKRLSLVLAEHEIPEYLSRLLMKLHAHYLYLIEQIAELESELNQSIKADDTAQRIMTIPGIGPITASLLSSQLGDGKQFSYSRDFAASTGLVPRQYSTGGKSALLGISKRGDKNLRRLLVQCARSFMMRLEHQQGRLAEWVRGQLSNRHSNVVACALANKLARIAWAITANQNEYQA

SEQ ID NO: 54406 - protein, 409 aa, unidentified
MEVVITRCGGLDVHKATVVATVRVPGESGRRRVVTETFGTMTPDLIALREWLQAFGVTHVALESTGVYWKPVYYVLEDAFELLLVHMRELKHVPGKKTDVKDSDWLAQLLECGLLRRSFVPPPPIRELRDITRYRVQQTRERSREVNRLQKVLEDAGGKLTSVLTDIMGASGRAMVEALVAGTTDPRVLAELARGQLRKKLPALQRALVGRFRPVHAFLLEQILAKIDYLDEVLERLTTEIDRRVAPFEPMLTALDTIPGIDRIGAISLVAETGGDMTRFPSAAHLCSWGGMCPGHDESAGKRRSGKTRKANRYLRSTLIQAGVAASHKKDSALRTLYARVKGRRGHKKAVVATGHQILEIAYFVMRDGITYRELGADYFQRCGREQTARRHVRQLEALGYVVTVQPTA

SEQ ID NO: 54407 - protein, 342 aa, unidentified
MGETSIIGVDLAKNVFQVHGAASDGSVLFRKRLSRAQFARFMADQPPCLVAMEACASAHHWAQEMARHGHEVRLIAPHYVKPFIKRQKNDAADAEAIVEAALRPTMRFVEPKSADQQARAVAFRTREQLVKQRTEAVNALRSHLYEFGHVAPEGIGYLQRLAKVVDDPDTDVPELARDICRMLLEQIARLTDRINALKSRIAAMSNEAEMPRQLQTMPGVGPITALAVETFAPPMEQFRRGRDFAAWLGLVPRQHSTGGKQKLGKTSKMGQRDIRRLLVIGATAVIRWASRRGAPKGSWLARMLERKPIPVVAVALANKMARGIWAMLTRGESYRGPVLIGA

SEQ ID NO: 54408 - protein, 337 aa, unidentified
MEQAKEYVGIDLHRRRSVIVRRTEAGETLETVHIDNDAQALAAEVAKAGPYPDVIVEATYGWYWAADVLEECGAKVHLAHPLGNNWGNRRVKNDERDATDLADLLRMGRLAEAWVAPPVVREFRELVRYRIKLVHLRTGLKAQIHAVLAKEGVTVPVSDLFGNAGQAFLDEIDLAHAYRVRVKSLGDLIKLIDQEMAMVEKEIRLYVADDVGYRAVQAIPGVGPVLAAVFVAEIGDVSRFPSPRHLCSWAGLTPTHRESDTTVHRGHITKQGSRLVRWAAVEATIRQGGPTPISACRERIGERRGRNIGRVAAARTLLTLVYYGLRDGEIRCLAEAG

SEQ ID NO: 54409 - protein, 456 aa, unidentified
MKIPQSTIRLLTGRLVKILLNREVSTMKSNTQNKKIEAITEKTLVIGIDVGSETHYARAFDYRGIEYSKKPFKFSNTEAGFVTFKEWILDLKEKHEKDKVVPGMEPTGHYWFNLGKYLQDNEMKPVLVNPHHVKKSKELDDNNPTKNDRKDPKVIAGLVREGRYMIPYLPDGVYADLRTASNIRFQLQSELTRIQNRISRWFNIYFPEYKTVYGKPDAKSGMLILKEAPLPEDILTLGIDGVDQIWRDAKMRAVGKARAKTLIEAAEHSVGSKEGAVSARMEIRMLLEDYESRNMRLQEVMVLIEELVKQIPMAEKLLEIKGVGIKTVSGFLAEIGDISRFNSPKELQKLAGLALVENSSGKHKGETTISRRGRKRLRYLLFEVAMSLVAKNPEFRELHNYYTTRRLNPLKKMQSLMAIAAKLIRVFFAMLTKGVDYDPKKMVSDIKRPAVYLQAA

SEQ ID NO: 54410 - protein, 379 aa, unidentified
MQQDSEIYVGLDTSKLKISVALATAGRDGEVRFFGDIDSTPEAVARLVAKLEKRHGQLAFCYEAGPTGYGLHRQITTLGHECTVVAPSLIPRRPGDRVKTNRRDAVTLAKLHRAGELTAVWVPDPGHAAIRELVRAREAAMAELRRARQQLQSFLLRQGRIYTGRAAWTKAHARWLSELAFTQPALYLVLQEHRQAIADAEKRLERLTRQVSEAAQTWSMAPVVAAYQALRGVAFLTAVTFVAEIGDVRRFDSPRQLMAYLGLVPSESSTGEQVHRGRITKAGNSRARRVLIEGAWTYRHPARMSRLLQERQADLPPAVREIAWKAQVRLCGRYRKLMARGKRQTVVTTAIAREMAAFLWAIGHEVEPTAAAPSDGQGH

SEQ ID NO: 54411 - protein, 476 aa, unidentified
MIKSVGIDLACNGEHKVRCLDEKAEFCDGFGFETTPGGLEKLEERIFRDGANPIVVFEPTGLAWVAVAVYLRARHPDCRLVRTQSRNVAALRRYLRRSSKSDKIDAITLAKMPFVDAERLNEVYLPPAKLYVIQRLARQRKRLESDMASRKKRIISILDGYLPGVHIAFSSRWSLQAKAFLNSRLNPLDVVRDGEKALDRFLTIARYRHQKDANESHMVYVACRAAAMIYERSRAAGMIDDDFFAALQEEIGRELRLMDAEEAESQSITQRLTDLYQELHPSDNLSTIPGVGPHTAPVFLAVVGDPSRFRSQAAFANFNGVVPNSKQSSDTESKGLSMTKAGPSVMKWALYQSGQIGRRYDPQLACLYYREIVHNGKNHKQAMGAVMSHIGARILSVLRENKPYELRDVQGKPITWKDARKLILLNYQVPEEIKRDRRRRKTLGGSTPPRKRRETVARRAHEAAEAPQPAVTTISR

SEQ ID NO: 54412 - protein, 315 aa, unidentified
MNIVEPPAYPVHIGIDVAKATLLVDLQGKSRKLPNTPAGHQTLLGLLPGSAFIIMESTGSYHIAALEFLQTAGIPVAIVNPVRVKQFGKARGTLAKTDPVDAVLLSAFGRAFLPSPNPPRDPERVLLGELVNLRDTLGAQVTMWNNLLEHQQSAAARKLSAAQARAATKAQADVELRIAKLIQQSETMAPVARVLQQCKGVGIVTSAVLVAQMPELGRINRRESAALAGVAPCANDSGLHAGKRMIRGGRPRIKRALYLAALSAVRFHPTLSPAYKALRMKGKPAKVALIAIARKLLVILNAKLKEYYATLTPAD

SEQ ID NO: 54413 - protein, 417 aa, unidentified
MDETFAWFLGIDGGYDTHQICLMDATGQVVLERQVAHDAAAVHAAITAVLDRTGAAPAQIAVAIETPRGAVVATCLERGFAVFALNPKQLDRFRDRHTVAGAKDDRRDALVLADSRRTDPRAFRRVQLDDAVVMQLRELAHAEDDLKRDLGRLTNRLRDQIYRIAPALLALCPAADEPWFWTLLELAATPATQRALTRTDILALLKRHRMRRLTAADVLAAFHAPAFTLAPGVVEATREAVELLIPQIRVVAAQLTRCERRQEALLTELRERPASEAEPGEHRDVGILESLPGVGRMVTVTMLVDATQPLATRDYATVRAHVGVAPITKASGKRRVVQMRYACHPRLREAAYHWGRVSLQHDAASAAYYHRLRARGHTHGRALRSVVDRLLRILVVMLRHRTLYDPHRFVTPVVVPV

SEQ ID NO: 54414 - protein, 412 aa, unidentified
MSHTAYAGVDVSQADLVVTLLDAQGQPLLSHLKRPNHIAGAREIADRLAQEAQAHGCTRLRLGLEATHVYWLPAALLWHDFTWPQDLEVEIGGLNPHAIKAFRDSLDADREKTDDLDAEAIALHLMVPCHRLSPPLPDPYLAWQRLTRTRFTLARQLGAEKTRALGWLWLLASDYTTHPPFSDLFGTAAQDLLLHFDFPEAVTNLAPQELSTFLQQHSRNHFPDPDGKAAQVQAALHTAYPLSPEFRQALRFVLRHTLQHLASLENLLQHLDQRIAQAVGDADRPLRSIPGLGPVLAAGLLAELGPPDRFPTEAAVARYAGLWWPRAQSGPVSAEDRRLSKAGNTYLRYYLIQAADRVRHHIPAYQQFYADKYRTARTHKHKRALVLTARKLVRLIVALLKSQQEFRMPDPN

SEQ ID NO: 54415 - protein, 416 aa, unidentified
MTDDARWFVGIDWASETHQVCLVDAGGKIVGERGFPHGGAGLAEMCIWLLVTTRAKPTVIAVAIEVPHGPIVETLLERGFLVYAINPKQLDRFRDRFTVAGAKDDRRDAHVLGDSLRTDRHCFRHLTAEDAVIVELREWSRMAEDLQQEHNRLANRVREQLWRYYPQALKISDDLGADWFLELWAAVPTPTKAARVRESSIDRVLKTHRIRRIAAAEVAQVLRQQPLTVAGGTVAAASAHIRAVAARLKLINRQIKEAHRRLDALCGKLAAREETTASGQEPEPRDVTILRSLPGVGRIVLATLLAEAAEPVRRRDYHALRTLSGVAPVTKRSGKRCIVIMRQACHMRLRSAVYHWARVAIQHDPLSRCRYAELRKRGHSHGRALRSVADRLLAVACAMLDQQTMFDPGRAEKQAA

SEQ ID NO: 54416 - protein, 322 aa, unidentified
MTSSKLATRVIGIDVSKDKLDISDSEGKIKKEVKNSTASIVKYIVKKIAEPGETFVVCEATGGYERTLVKAMQAAGVAACIANPFQVRQFAEGIGVLEKSDPIDAGKLRQFGEIVDLQPTAPKSAEHERHEALGRRREQLLSLISMEQNRRAQSYDPTVAAMIDKILKVLKTQQKSLENEIEVILKKEAETNPAVAVVQSVPGIGPVTTSTLICDLPELGKLNRTEIAKLAGVAPIVNQSGKRDKKRSTFGGRSHVRRVLYMAALVATRHNPVIKAFYTGLIARGKEKKVALVACMRKLLTILNCMVCNNETWRTEKVVTGT

SEQ ID NO: 54417 - protein, 364 aa, unidentified
MEIYAGLDVHSKNTVYCIQSKDGEVLAQGEIATDAQQLACMFKRHKVAPGTRVGLETGTQAHWMAETLFKLGMEPVVIDAGEVRRKARRRSQKCDSRDAFEICDGLRRQQWEKIVWLPPAEIRQMRELLSRRRSFVSLRAKQINCAKFILRSHGIATSRMTLQSDMAWQRVINAHPAHAQFVQLHREFWCQACKTIAQLDEQLQQCLECFGHRSELLQTCFGVGPVVAATFIAAIGDASRFATSNHVVSYLGLAPSTYDSGERQRRGRITHEGPRWARSALVESAHQARRRNHPLQPYYRRMAAKTGIKCAAVAVAARLARILWRMWSDNQAFDLSKLNVCRSPKTTLKTTIYQMKETTMAKAL

SEQ ID NO: 54418 - protein, 418 aa, unidentified
MNEEGNTRGTKRYVALDIHKHYCVIAGVDREGRVVLNPVRVEHVDLEGWLKKNLCSTDHVVIESTTNAWHVYDLLEPLVERVVVANPIKVKQIAQARVKTDIRDTLILARLLAANLVPEVWVPPAHVREMRQLLSQRRQLVETHTQIVNRMHSVAHRHHLKHERGKRFNEKNTLWQKDKQLSKTEQFQLELEMENRAYTEKQIGRIGKAVAKMSHQKPWAESMTYLMQLPGFGVITAMTVLAAIGDVQRFGSAKHLASYSGLTGGVDQSGTHLVQKGITKEGRKELRWAMVEVAQRAVKSDPRWTRKFQELHQRMHRNQAIVAVARQLLELVWYVLTRRQPYRHFSQERIAYKYLTWSWQMDEAARDGLTRQQFARYYMMRLGIGHDLTRIALNPKYPRRLASETELLALRPELNQTE

SEQ ID NO: 54419 - protein, 389 aa, unidentified
MLQTNDMSRSLAALNQDSTLVVVIEMGQSSWLVRGMIPGVARQPLKKVTPDEAGLLKLLHRWRSEAVRMSREIERIVVAYEAGRDGFWLARWLRARDIEVYVIHPSSVAVSREHRRAKTDRLDTELLMRAFVGWLRGEKRHCSMAAIPTIEEEDAKRPNRERQKLVGDRTRIVNRIKATLARLGICSFKPTLRNAVNRLTGLRARDGTPLPENTQAELRRDMVRLRLVSAQIKEIEEERLRKLAASASPQNSSHAMVCLIARVLGIGIETADMLVNEILSRHLRDSKAIARYAGLTGSPDESGRRRREKGLTRAGNTRVRRGMIQLAWRFLRFQKQSALAQWFQARTADGRSGTRKTMIVALARKLLIALWRLATTGEIPQGVSLRPAV

SEQ ID NO: 54420 - protein, 400 aa, unidentified
MAVMIGIDPHKGSHTAVAVGAAEEPLGRLRVRACPDQAGKLVAWAQAWPERTWAVEGARGLGRLLAQQLIAAGERVLDVQPKLAARVRLPEAGDTNKTDPNDARSVAVAALRSKGRQEVTADGHAVVLKVWAKRHRDLSRTRNQVVCRLHAMLCELIPGGVPDEITAGQAARILERVAPAGAVAQARCELAAELLADIRHLDAQRREVKKKLAAAVTASGTSLTEVFGVGPVIAATVIGGVITVARFPSRDHFAACNGTAPVEVSSGQRKIHRLSLRGNRRLNHAIHMAAITQIRHKHSDGHAYYQRKLAEGKTHKEALRCLKRRISDAIYAQLRADARKAGPGGQPGNDTGSSVTGSHPGHRLFGQATSGPEPSLRAPATFTQATPAPEPSAKKIQRAT

SEQ ID NO: 54421 - protein, 370 aa, unidentified
MKKRITFVGLDTHKNSIEAALADGGRNTEVRLYGTIGGDLASLDKMIRKLQTTRVELRFVYEAGPCGYEIYRHLRAHGFHCDVVAPSMVPKRSGDRIKTDRRDARNLARLYRAGELTAIYVPRADDEAMRDLVRGRQDAIHAQRKARQQLGGFLLRHGSRYPGKTAWSLAHRRWMAEIKMPHPSQQVILEDYVHSVEECTQRVHRLTEQILQLMPDWRMHPLVTALQALRGVAPVVAATAVAEIGPMGRFERPRQLMGYLGLVPSESSSGGSTRRGGITKTGNGHARRALIEAAQAYSHPARISRVILNRQEAVPEPIRQIAWKAQLRLCARFRKLTARGKSRNRAVTAIARELSGFMWAIAKQVPVPQD

SEQ ID NO: 54422 - protein, 430 aa, unidentified
MTTRQITPLDAVLVAIDIAKVRNEVLIEFPDRQRRRKLSIRNTRDDHDRLVGLLAETGKLVICGFEATGNYHRPIAWRLIQAGFDVRLVSSMAAARTREALHNSWDKNDPKDAQVILHMLRIGATQHYHDPLLAGINDVQELSKTHEAISRSKTEILHRIQTHYLPLYFPEVERFRQSSRSEWFFAFLEMFPTPASVTALEEDAFINAAWQVVGRKVAKATLLADIYQTSRASIALPIPLDAPAITMFRMVLAETRSLIRQRDTIEKMADAMLTQSADYQQLRKIPGIGPINALSIIAEAGDIRRFGHHRQFLKFCGLDLSTQQSGAFRGRTKLSKYGNARLRRTLWMAAQVAIRQRENSFRDKFERYIARDRDNPDLRRKALTAITAKMARVVHAVIKSGSDYRPFFEGAVPGGRTPLRGAVRAQSATL

SEQ ID NO: 54423 - protein, 419 aa, unidentified
MFKIFRKNCCGLDVHKTWIYACIGITDANGRTDYKQARFSSFSKGLRELADWLAKYDCKEVCMESSGKYWIPVFNVLEKTCWVTLAHPKYTKPQKGNKTDRKDAKWICDLFMCDMIKPSFIPPPDIRHLRDLVRYRFKLTNCLTGEKNRAQNCLTVSNLKLDDVFSDVFGKSARSITNHILQHPGEPFDVTPFVDARCKQPIEEIQAAVDGSVSREQAAKLREILSHMDEIEDHRKNIENEIYRLAEPYTHFLELLRTVPGFSANPMTAIAVLSEIGADMSVFPTAKNLSSWAGCCPRNDQSGGKRKSTRISRAGVYIKPLLVQVANAVVKSDKHPECKERYRRLKARRGHKKAIIAICRMLLTAIWNILSKLEPYSVDGYLADRPVNQSMVISKSQALNLLRLRGYIIKDDVPSADSA

SEQ ID NO: 54424 - protein, 366 aa, unidentified
MQKTSTMRRTANKIFKGRQLTIGMDLGDRWSFYCVLDESGGVLLEDKLATTPEAMKQTFAMIPRSRIALETGTHSPWVSRLLTQLGHEVIVAHAQKVDSITKSTRKDDRNDAKALARLARIDPELLGPVQHRSAKAQMYLTVIRARAELVRVRTALINGARGLTKSYGERLPKRGTQQINGEFGAELSTELREVLEPLFREIESLNERIKEYDRRIEKTAIETYPETELLKQVKGVGDLIALTYVLTIDDPHRFRKSRDAGCFVGLQPGRRNSGDSEPQMHISKQGDEYLRTLLVQGAHYILGPFGEDSDLRRWGRKLAERGGKNAKKRAVVAVARKLAVLLHRLWVSGEVYEPLRNSQKVIRAAA

SEQ ID NO: 54425 - protein, 401 aa, unidentified
MESPIVSIDVSNGNSHYMCFIKNNKRFGKVKKIDHDIEGFKRLLEDIQKLEAETNEKVYAVFEATGVYTKPLERFLSKNSIKTYIINPLESARKRKEEIHNKKTDKLDPISISKVYYDKEEMMELKKKDETYNWLRKKNRLYEDQLNHLRKYKVTFQNQLSICFPGYLDLFKDGYSDIPMTILKKYPHPNLLKNKKAETVARYLEKNTCHTHKVSLEYALKIIEFAKKTYPGCEKDDVEVEIFKILLDKVIETQRECEKTLNEMITVASTLEEYRYISSIDGIGPNLAARIIAEIGDIEEFKSREALVAYAGLDPHIYQSGDQDGKHLKISKKGNKYLRCLLFLAVGCSIRGAKDNPVNRFYQKKKQQSNPLNSKAAKTACTAKLLKIIYGICKNKTTYER

SEQ ID NO: 54426 - protein, 347 aa, unidentified
MEKLIRIGLDTSKHVYQLHGVNAAEETVLRKKLRRKELVAFFQELAPTTIAIEACGGSHYLARTIAAFGHEVKLIPPQYVKPYVKRGKNDAADAEALCEAMSRPSMRFVPVKTAEQQAALMLVGLRERLIRNRTQIANSIRGYAAEFGLVAATGLAKIGPLLERIATDHSLPALARELFAIQAKEYVLVEAELKVIDAKLAVWHRENACSRRLSQIPGVGLVGASMLVMKTPDPRQFRSGRQFAAWLGLTPKDHSTAGKVRLGVITRAGDEALRSILIVGATALLRRVREGSSRKASAWLQELLRRKPPKLVAVALANKIARIAWKLMVTGEPYRADAAPPVAASAA

SEQ ID NO: 54427 - protein, 430 aa, unidentified
MNCNTQNAKIAGITERTLVVGIDIGSELHYARAFDWRGYEYSKKAFAFSNTEAGFTSFVAWLQEFMEKYNKDTVLPGMEPTGHYWFNLGKFLQDNGMKPVLVNPHHVKKSKELDDNNPTKNDRKDPKVIAGLINEGRFSYPYLPEGVYAELRTASNLRFQAQEELTRVLNRIARWFSIYFPEYKDVYGKTDSVSGLMILKQAPLPSDIKALGVEGVNKVWRDAKLRGVGIKRAKTLVLAAEHSIGSREGLTVARMEIQNLLSDYEIYNRRVEELMILLTGLLESIPYIDKLLAIKGVGLKTVSGFIAEVGDLSRFDNPKQLQKLAGYALVENSSGKHKGETRISRRGRKRLRYVLFEVAMSVLGKNSEFREIHHYYTTRPENPLKKMQSLIAIACKLIRVFYVILTTGVDYDGSKMLLDIRRPCTQAQAA

SEQ ID NO: 54428 - protein, 380 aa, unidentified
MTESQMTPQPDTIKNDRLYIALELSNTKWKIAFGNGFKIRLKTIAARDREQFELELQGSRKHFGMAEDVPVYCCYEAGRDGFWIHRYLCSLGVRNLVVDSSSIEVNRRSRRAKTDRLDAAKLATMLIRYMNGETKVWSVLHVPEEDDEDARRLHREMQRLKKERTGHTNRIKSLLALHGISMEIRKSFSEDVNKVVMWNGKPLPSRIKEDMVREYRRYELIQQQVQVLEQEKKEALKQESESSKKVLTLQNLKGIGRVSSWDLTHEFFGWRVFRNGEEVGAAAGLAPTPYDSGGSQTEQGISKSGNRRVRALMTEVAWYWLMHQPGSKLSQWFMERYGHGSKRMRRIGIVALARKLLIALWKYLEQGIMPEGATVKALYN

SEQ ID NO: 54429 - protein, 372 aa, unidentified
MSTTSITPERMVIAIDPHKASWTAAVVDASQQPVATIRVPVSRDGYRALRRFANRWPDPTWAIEGASGLGAPLTARLRTDGIDVVDVPAKLAPRVRMLSTGHGRKNDDADAVSVAIAARSARTLNSAAVDGAVTALRAIVEHRDDLVKTRTQTVNRLHVVLTNLIPAGASRDLTAERAAELLRGIRPRDTAGRTLRSLATDLVAEIRQLDRRIAKAAADIQTAVTDSGTTLTELCGIGALTAGKILGRVGTINRFRSAAAFATYTGTAPIDVSSGDVVRHRLSRAGDRQLNLCLHVMALTQIRQDTPGRAYYSRKRTEGKSHKEAMRCLKRRLSDVVYRQLRHDANNGPEAGPGGHSGAALSSSAASSNPAH

SEQ ID NO: 54430 - protein, 340 aa, unidentified
MQAIRFGVDLAKSVFQIHGVCALGEVVVQRQLRREQMLRFFAKQPPALIGMEACGSAHYWARELARLGHDVRLMPASYVKAYVRRNKNDARDAEACCEAVSRPTMRFVPVKTVEQQSARAIHRARDLLVRQRTQAANAVRAMLYEMGLIACKGREGIAVLLERIEAADPALPPALLVSLRALAAQWRALDAEVARLDQAIACQVRQDPVARRLMTVPGVGPITAHAVICAVGDGRQFSSARDFAAWVGLTRRNRDTGGKTRLTGHISKAGDRSLRKLLVLGASSHLRRVRASHNVGSTWIQGVLARRPVKVAVIAQAAKTARIIWALLRSEQTYRAPAAA

SEQ ID NO: 54431 - protein, 332 aa, unidentified
MYLGIDVHKRYAQVAVMDETGEIVEEVRVENANLDDLAQRYAGAQAAIEATSNYYHIHDTLSKHLDVTVAHPKELNQIADTDKKTDRVDAKELARMVRLDSVPESYVPTDEVREARALVRGRQTLVENRTKYANKIHGLLSDHGITEDVKPLSVEGREFLWELSLPTPWDALLASYLEVIETLTEEIQKLEQTIEERAGSLKETQLLMTIPGVSYFTALTIYAELGEISRFDGDKSVVSYVGLNPVIRESGDSRIEGSISKRGSGRVRWLLVQAAHTAVHTSNDEYLSRFYERLAGRKNSQKAIVATARKMLVSIYYMLDRGEVYDPPGVTA

SEQ ID NO: 54432 - protein, 296 aa, unidentified
MAVLGEGCVWQVDNSSEGIASLVQQLQEFHPELIVVEATGGYQRGVAEGLFAAGLAVAVVNPARVRQFARACGLLAKTDKLDAQVLAVFGQKVQPRQYEGKSEVGKQLSALLVRRRQLEEMLKAEQNRLRTISQSVRGSVERIIACLKDEKKLLDAQIQQFVAEQESWQEPTNILGSAPGVGMVTTATLLAELPELGKMDRKKIAALVGVAPMNFDSGKKRGYRKTKGGRTNVRSVLYMSTLVATRYNPLIQAQYQQLLKRGKLKKVALTACMRKFLTILNAMLRDKQPFRYASSA

SEQ ID NO: 54433 - protein, 343 aa, unidentified
MQAVTTIGLDIAKSVFQVHGVDAEGKVLIRRQLKRRYVLAFFQKLSPCLVGIEACATSHHWSRELKALGHTVRLMPPAYVKPYVKRQKNDATDAEAICEAVTRANMRFVETKTPEQQSCLMLHRTRQLFIRQHTSVINAIRAHLAEFGIVAPVGRKGVEHLLAVVTDRSDQRVPELARACVAALGAHLGRLKAQILEFDRRIMAWHRSNEISQRLDELPGVGPALATALVASVADPKAFRSGRNFSAWLGLVPRQHSSGGKDRLGSISKQGDRYLRSLFTAGALAVIRYAKLHSTKHRPWLTALLARRPTKVAAIALANKIARMAWAMMVTGERYKEPVALAA

SEQ ID NO: 54434 - protein, 331 aa, unidentified
MKIKQTIGIDISKLTFDVRIHSNQCYQSFENNSKGFKALVKWVEKNNPISKEQTLFVLEHTGIYSEEISLFFDINNFYFALIPGLEIKKSLGISRGKDDKVDATKIALYGYRLRDEIKPYKLPSKNIHQLKRLLTLRERLVKQNAGYKATLKEQKRIYTRKENQLLIETQEKMIKYFTKQIKNIEAEMNVIIKANEQLKKQCKLIVSIKGVGSQTALFMIVTTNGFTKFASWRKFASYCGIAPFPNTSGTSIRGRTKVSNLANKKIKSLFDMCAKSAIQNNPEMKIFYHRRLEQGKNKMSTINIIRNKLLSRIFATIKRQTPYVDVLKYAA

SEQ ID NO: 54435 - protein, 398 aa, unidentified
MVGPVAHAIVGYTERLSRSVQSQYREDWSMYDPTRIRSVGLDVHKETIAIAVADGTLPAKVLATIPNDFTTLLKSLRRLGPPETIVCCYEAGPTGYGLYRRLKAAGYTCHVVAPSMVPVKSGCRIKTDRRDAAKLAHYLRSGDLTFIHVPDEATEAIRDLERTRDDAKIAERVTRHQLSKFLLRHGRIYPKKTAWNPAHMAWIAEQVFEQPAQRQVLADYREAVELGGARVARLTAQMVTASEAWEKAPLVKALQALRGVDMVTAVTVVAEVGDFRRFATAGELMAFVGLVPSEHTTGETRRQGRITRTGNTHVRRVVVEAAWHYRRQPRMSKAIRSRNDFVSAGVRAIAWKAQKRLHERLKRLLGRNKPACQAVVAVARELVGFLWAISREEVLLAE

SEQ ID NO: 54436 - protein, 390 aa, unidentified
MQALYPRPDEHAAVRTDLKAIFVSLELSRSTWVITSLAPGGGEKMSKHAVRSGDIAALLARLSQLKEKARARTGQVFPIIVIQEAGLDGFWIHRVLQQEGIESHVVDPASIATSRRRRRAKTDKIDGEALVRALLAYKRGEPRVCAMVQAPTPHEEDRRRISREREVLTAERVQHVNRIKGLLFAQGIGDYEPLHRNRRERLEELITGDGRPLPECLKAQISRELDRLELLIEQVKAVEAERDAVLAQAQASPGVPAPAAQLLALRGIGPEAAATLWTEGLFRTFNNRKQVAAYAGLAPTPWQSGAVHREQGVSKAGNPRLRTIMIQIAWLWLRHQPQSALAVWFRARMKRTGGRLGKTMIVALARKLLVALWKYATAGVLIEGAILKPA

SEQ ID NO: 54437 - protein, 357 aa, unidentified
MHINNENKLFVGMDLHKNTSTFCVKDYDGNVIKQAKVLTDRNQIREFFNDLRQPSSVALEPVSQWYTFADLIEALGHDVHIAHPQKVKAIASARIKTDKIDAGVLADLLRANLLPEAYFSPKEVRGWKEMTRFRASLINLRTQVKNKIHAILHKHALTHSFTDLFGVGGTKWLSNLTLEEPFKTSLTEYLSVVESLTGQIDAAEEKITQTVTDHPQAKLLTSIPGVKFVSALTIMAEIGDIARFPDAKRLMGYAGLVPSTYSSGDVTRHGRITKTGNKWLRYIMVEIAQHQQRCKRKPGFGSFYLKLKARHGANTAAVATARKLLAVVWRLLTDKREWSATPPDCGKAGPLAQNFSS

SEQ ID NO: 54438 - protein, 426 aa, unidentified
MRFIGLDVHKDFCEVAVVEGDACWSGPRVRSTPEDLEVFAQSLGRKDQVVLEATGGALAIARILEPHVGRVVMANPMAVRAIASAKAKTDRLDARTLARLLASGFLPAVWIGDERTRLLRRLVSRHAHLVRQRTRAKNEVHAVLQRTLKGRPPVSDLFGKRGRAWLGAQDLPADERETVEASLRHIDFLDGELRLVDRTVAEQVLSWPEVRRIMTIPGMGATAAAGVMAAIGDVRRFPTSRHLVGYLGLDARVRQSGSGPARHGRISKQGSAEARHLLVEAAWAAMRTPGPLRAFGERIRARRGANIATVAVARKLAVLCWHVLSREEDYAFGRPSLVREKIRRLELAAGAPNRNGYRNPVRVFATPAQRRLEREVGDQAEKAYRRFVKDFRSSGKKGAGATTGARISAARKGQAARQEQAPDPAL

SEQ ID NO: 54439 - protein, 432 aa, unidentified
MNPISVSSPPSKVAAWVGLDWADQQHLVCLYDVGTGQTELSCLEQKPEALQSWLGQLRQRFGGQPVAVVLEQARGAVIYALLSADFLVLYPVNPQSLASYRKAYVTSGAKSDSADAVLLMEMVRNSPQRFRSWTPDDADTRSLQLLTQNRRQLVDQCTAFTNQLTGWLKSYYPQALELAGELDSLQACDFLEKWPTLEALQQARPAQIRKLYLDYGKPRPESLEQRLEQIRRARPLTTDLAAVLSGTMMVRALIEQIRPLLATLERFDQQIAALFRKHPDRLLFESFPGAGAVLAPRLVAAFGTDRDRFESAQDMQQLSGIAPVTEQSGKQRWVHWRWACSKFLRQSFHEFADHSRKWCDWAKALYQRLKRTGKGHHAALRMLAFKWIRILFHCWKTRTCYDEQVYLKSLEKRNPTLWAETQALPPRKKKAA

SEQ ID NO: 54440 - protein, 423 aa, unidentified
MMRLTYPICCGLDVHKNVIVATIVTTDKNGISKYIQKSFSTFNSDIQKFHDWLIENNCYHVCMESTGKYWIPIFNYLENDIDVCLTHPKYVKAIKGKKTDKKDSKWIADLYKFDLVRCSFIPPKDFRQLSELARYRFKLVCMKSSERNRIQNCMTVSNIGIASVLYDPFGKTATEIMSYLLTNTKDTIEDKAVRKLIKKGAIAKSDKIIEAIKGYCIETDQAKKLELARGHLNYLEDMITQTEVELYVRIKPYYQIVEYLSSLPGITELSATIILAEIGVNMNIFDDAKHLCSWCGLSPANNESANKKKSVRIAKAGAYLKPLMVQCALAAIKSKRQPYFAIKYGHIKKRRGHKKAIIAIARMMMVCIYNMISKLQPFNPTDYEELLDPHFNQTKVVLNDSNVFAYLVAQGYDTSLLVKCNDN

SEQ ID NO: 54441 - protein, 453 aa, unidentified
MTPPPSVLPGSQTGFRKTRRRAPVSDRPVVDPLAGSLLPTRGALLSEQTPEIVYVGLDWAAVIHAVCVMSAAGKVLAQFTIEHTAQGVASLISRLAKYGDPADVQVGIERPNGRLVDLLLEAGHPVIPVSPNAIKTWREGEVVSGAKSDTGDALVIAEYLRLRHHRLHPVQPYSAKTKALRTVVRTRDDIVEMRVAATNQLTALLESYWPGAKEIFADVQSPISLAFLRRYPTAAAAAHLGEKHLAAFVTKHGYSGRRTAAELLARLRRAPAGATDPVLANAVHDAVLALITVLEALNTAGKQLDRSVITHLGEHPDEQIFTSLPRSGQINAAQVLAEWGDSRAAYDSPEAIAALAGVSPVTKASGKQHAVHFRWACNKRFRKAITTFADNSRHASPWAANIYAQARARGHDHPHAVRILARAWIRVIYRCWQNHQPYDPNLHGAAQRPPTAA

SEQ ID NO: 54442 - protein, 348 aa, unidentified
MIMIGCDYHPSWQQICWLDTATGETEERKLEHASGEAEKFYRGLSGPARIGMESTGNCQWFVELLLSLGHEVWIGDAAKIRASEVRQQKNDRRDAALILKLLVEGRFPRIWTPSSQERDLRQLMIHRYKLVQMRVQVKNELQHLAMNQGITRRRKLWSAAGEKVLCELPLRPWASRRREDLLKLRGILNEQIGLLDEAVRKAAEENERARLLMTQPGVGPITSMAFVLTMGDVNRFPRGKQVASYLGLIPREYSSGGHKRYGPISKQGNRFLRMLLVEAAQCVVRYDPGFRKEYLHRCHSRPKGVAKVAAARKLAVRLYWMLKTSTAYPEIVRVESSSRVPLIVRPGG

SEQ ID NO: 54443 - protein, 389 aa, unidentified
MFYYIGIDVGKFSHSICILDDSRTKKIFQINNDKEGFEVLRKKLPNLDNILIGMEATGHYFLNIYDFLLKLNINVEQIALLNPLQVKAFRNTNLRGAKSDNVDAERIAELLRFGDYNRCNVSTSSIADLRELTRLRADIVSNTSDVKRKIISLLDRMFPEFNEVFKNQFTFTAVSLLNDYPTPEDLCELSLEKLTSVIKGLSKRGLDKDKILRLYEGARNSIGISFGKEAFKIELNILLERLKVGKKQTDFIEERIDELVKNFDLNIFTIPGVGNTTGAVILSEIGDISKFSSSQKLIAFAGLDPKLKESGKYQGKTPISKRGSKYLRNALWSSAMVACRHNEKFKEDYKKRRDRGKTHRYAVTAAANKLTKIVYHILKNNVPFDSKLV

SEQ ID NO: 54444 - protein, 319 aa, unidentified
MNKEQTYVGVDISKENLDLAIIDSNQQWRFGNSPAGIKLAIKTIQAVKPALVIFEATGGLEVPFWAALSETGIDAASINPRQIRDFARAKGRLAKTDRIDAQVIAQYGRAMQPRSQPFPETEGLKEVMARRHQLVEMISAEKSRLKTARKADVKEDIQEHITWMEARLSKVEKELRKAIRASPAWREKDELLQSTPGVGPTLSATLLTQLPELGTLNRHQVAALAGVAPLNRDSGMMRGKRTVWGGRGRVRGALYMRTLVATRYNPLVKAFYQRLCAGGKPKKVALVACMRKLLAILNSIIKHHTPWRYRTPVLIGPCH

SEQ ID NO: 54445 - protein, 337 aa, unidentified
MRNVGLDVHQKYTYYTEVDDGGVVLRQGKVVNEALPALFADDQPRRVVLEAGRNWYHFFDSLEGLVEEVQLAHPLRTRAIAAAKVKTDKIDSATLAHLLRADLIPRAYTAPASVREEREVLRCRASLVSLRTRVKNKVHAVLAKRGMICPWSDLFGKSGRRWLSEAALPTVYQQTVDSNLRVLDSLNTEIGLVTEEVKRRVELSAEAKLLTTIPGIGTYSALLLLAEIGDIHRFPDRQHLVSYAGLAPIVRSSGGKTRYGPISKQGSPWLRWILVQAAHVAPRHDSDLRERYKTTAYRRGGKVATVALARHLLKVVYQVLKSRRPYEAASRSSSSCQ

SEQ ID NO: 54446 - protein, 321 aa, unidentified
MSAPCAVTVGIDVAKAHVDVSVLGANLDIRRFNNDAEGHSALAVALQPLNVQLVVMEATGGYETELACALQGAGLPVAVVNPRQARDFARSMGRLAKTDAIDARMLAELASVLLRRDDLSRLLRPVPDERQQWLAALVTRRRQLLTMLLSERQRLQITPVGLHPSLLAIIAAIQAQLDDIDAQMVAHVRQHFGELDRLLQPTHGIGPVSSACLIAELPELGRLNRRQIAALVGVAPIACDSGLRNGRRRVQGGRFAIRRVLYMATLTATRYNPAIRAFYQRLEAAGKLSKVALVACMRKLLTMLNAMVKANTPWDDSLHRA

SEQ ID NO: 54447 - protein, 467 aa, unidentified
MTPHKDYFLDPRPLAPTPTLPQSPMLAEALQVCHPHAAGIDIGEAEHWVAVPPGCDPQPVRRFGTFTADLEALADWLIDCGVTTVAMESTGVYWIPLFELLEARGMQVLLIDPRQAKRAPGRPKTDRLDCKWLQRLHAYGLLAGAFRPDDQVCVLRGYLRHRQMLLTYAAHHIQHMHKALEQMNLKLTQVVSEITGVTGMAILKAIIAGERDPQHLAQRRNPHCHHPEDDIAKALQGTWRAEHLFALRQAVELYAFSHQQITQCDQQINAHLETFGDTSAGQPLPPKARRHTKTNAPRFDARTPLSRLAGVDLTTIEGIEEGTALVMLSEIGTDMTRWPSVKHFCSWLGLCPQHKISGGKVLSRRVRPGAHRVTVALRLAARSLHHSQSALGAFFRRMKARLGTPKAITATAHKLARLVYHLLRHGSAYVQQGLEHYEAQYHERKVKTMAKQAKALGYTLVPLVAQG

SEQ ID NO: 54448 - protein, 321 aa, unidentified
MKEASTQRLVCGGIDIGKDRLDYALAGADRAMNCANTAKGRSQMIAFLKEKSVRRVGLEASGSYEIEVVDALRAAGFQVAVLQPNQVRAYGQFKRKRAKSDPIDAILIADCAAALDQLRDPPDPRLASLAEHLTFIEQIQEDIARLKTRRDRFRDPRVKEEIEGEIKRLAARKRQELRLLMKAVRAHTDLARKLHLLLSIQGVGEPTALALLIRMPELGTLSREEAASLLGVAPFVHDSGRYKGQRRTGGGRARARTSLFAAALAARQWNPALGAFYDRLTKAGKPYHLAIIACVRKLVIFANTVLARNQPWEVRTADARR

SEQ ID NO: 54449 - protein, 436 aa, unidentified
MHKCPGRLLQPTFNLLGKGVKAMLDTVFIGIDVSSQTNVVHVMDQAGNRIWADSFRNSRRGSEQMVSRLTADAALQDAFYCFGLEATGCFGKGLEMFLRETPLIPAKRKAVHVLNPKQVKRFHDAYADLQKDDYIDAFVIADSLRFGRLAIKEAAVEDKYLALQRVTRWRYQTAQELTREKNRYLQNLFLKFSAMAQLQGSQDALFSNTFGATALDFIEDFEDVDQIAYTHVEDLIQYLIDHGKNHFADPQQLAQDIQKAARTSYRLPKAVSDSVNQVLAMQINTIRFYEQQLKEIDKVIERQVQAIPNTLTSIPGIGPVYAAGLLAEIGDVKRFESEAALAKFAGLTWTKHQSGTFQQENTHLIQGGNRFLRYYFCQAANLVRQHDPDYQKYYLSKYRETAKSPHKRALVLTARKLVRLVFVLLRDGTLYKLQTR

SEQ ID NO: 54450 - protein, 497 aa, unidentified
MTTKSSIYSHSNPQLLKVFEAAGHPAKVMCVALDYAKAQHSVLICNGLGDLLKGAFAVDNAPTGAEALLHQVRRSAKQRKIRLEHVFFGGEDYPSYAQNFLRRLRQEKFLVVRVNAWEAKQQRSNFQASSDSLDLLGIARCCLNRRGQTVRDWPVAYTNLRIATRDRDQLVRNRTAVSNRIHSYVDRLFPSFLKVEKSGLAPFSAASLDLMVERFSPAQLRRRPRQGLADWLGRRNVEEPKKVADQLKQLAKAVLPPAPEQTVMLQRSLTQWVELYRGLEKSLTLLDREQAYWLARTPGALLTSIGGFGITLAAGWTAELGPPTQWQAVRRLCSYAGVVPRSKQTGGPDQEPVVGPVQQRCNKRLKNVVLQAVGKVRQYGPEDLRQAAQRLEAQGSHVEFALAKRLVRLGKYLATTGTLYRPKALLDPDTPKLTLATHYQHLWDKLLQKWKAKADLRDVFAPEHPLGQWRNMARELYALELRLPQQGVAHCPRALTP

SEQ ID NO: 54451 - protein, 341 aa, unidentified
MGQASTIGLDIAKRVFQAHGADERGRVVFRKRITRTALLRFFAAQPPCTVAMEACAGAHYWARELGKLGHTVRLIPPAYVKPYVKRQKNDMADAEAICEAAQRPSMRFVPVKSEAQQANGVVFRARDLLVRQRTQCINALRGHLSEYGYVFPQGITQADTLISCVEDPDTSLPENARAVLTVLVGTYTALEAQVRALDAEIAKRAKADPVARRLMTVPGIGPIAAAAITALVPAPEGFRTGRDFAAWLGLTPLQKSSGGKQKLGAVSKRGERTIRRLLILGASAVVRWASQRGGPEGSWLAQMLARKPKMLVTVALANKTARIAWALLVKGGVYRAPVAAA

SEQ ID NO: 54452 - protein, 371 aa, unidentified
MHQDSAVFVGLDASKLKISVALAEDGRQGEVRFLGDIEHTPGAVRRLVTKLAGKYRRLLFCYEAGPTGYGLQRQISDLGHDCAVIAPSLIPKRPGERVKTNRRDALTLARLHRAGELTAIWVPDPGHEAVRDLVRAREAAMEDLREKRQHLQAFLLRHGRIYPGLRPWTQVHARWLSNLSFAHPAQYLVLREYRQAIEDAEARLERLTQQVSEVVSSWSMAPVVEAYQAMRGVAFVTAVTFVAEIGDVRRFETPRQLMAYVGLVPSERSTGEQVRRGSITKAGNPRARRVLIEGAWTYRYPARLSRPLQVRQESLPQVVRAIAWKAQLRLCARYRRLTAAGKRQTLVTTAIARELAAFLWAIGHAVEPRSA

SEQ ID NO: 54453 - protein, 390 aa, unidentified
MSQPFDVSRSLTAFEQDNTLVAVIEMSQSKWLVAAMIPGVTRRPLKKLDADANALLKLLQRWCEEAHKAGRAVKRIVCAYEAGREGFWLARWLQARAIEAYVIHPASIAVSREHRRPKSDRIDTELLMRSLLGWLRGEKRHCSMATIPTMAEEDARRPGRERESLVSEQTRIVNRVKAVLALFGIGGFNPRLRKAAQQLETQRTAEGTPLPDNARAELRRDLERLCLLRDQIRAIESARLQRLTAAPATSQGPHAMVRLIARVLGIAIETADMLVNEILSRNLRDRRAVARYAGLTGAPDESGQRRREKGLARAGNGRVRRGMIQLAWRFLIFQKGSRLANWFRERTADGRRTTRKTMIVALARKLLIALWRLVTTGQLTEDIKLRPAGT

SEQ ID NO: 54454 - protein, 313 aa, unidentified
MEPQEINVGIDTSSKQLDISVRPTGQFFSVTNDKDGIKDAIKRLQPLKPKRVLIESTGRLELEFVCAAHKAGLPIVVCNPSQVRNFAKSAGRLAKTGKLDAVDIAHFGEAMKPRLSSIKSEKLRNISDLLVVRSQCLEMGTMQKNRLKRMPKSVHKPIQAILKAIKKELEVIDKQLDKLVSSIAEWRQKRDLLLSAKGVGNVLAYTLMSELPELGKLNRKEIAALVGIAPMNRDSGSFQGKRYIRGGRHRVRTVLFVSIMSAIQCHPKLKPMYKRLVDAGKPKKVALIAYMRKQLTILNTMVKNNTYWDENMA

SEQ ID NO: 54455 - protein, 350 aa, unidentified
MTTLTANDVVVTGGVDTHQDLHVAAALDQLGRVLGTHAFPTTAAGYRRLLAWLRGHGRLERVGVEGTGSYGAALARHLTDAGVQVIEVARPNRQVRRRYGKTDVVDAIAAARAVLSGEATGTPKSHDGPVEALRTLQAVQRSGNKARTQALNQIHQLLVTAPQQLRARLRPLNRTDLLATCAGFRIAADDDSLQAMTRLALRELARRVRHLDQQLALVTKRLHRITAEAAPKLVATTGVGPAVASALLITAGDNPHRMRSEAAFAALCGSNPIPASSGKTNRHRLNRGGDRNANAALWRIVIVRLACDERTRAYLARRQAEGKTKTEAIRCLKRYVAREIFNAMPSPVAI

SEQ ID NO: 54456 - protein, 354 aa, unidentified
MLAEMVDHVVGIDPDRDWVTAAVLEAGTARVVATGRFAANAAGYREVVAWADEYSTGTERAWVIEGTSSYGRGLTATLARCGEWVIEFDRPHEKPAKDGSKTDELDAIRAGRETLGRIKLATPRRHDGFREALRVHTVARDTAVQARTAAINELKAFVVTADDTLRAELRGLGTPALIKRCSGFRHSTNRSLDEQSTRAAMRAVAHRITHLNNEIATHDQALTSLVDQAAPQLVAEVGIGPVTAAAFYIAWSHPGRCRNEAAYARLAGVSPIPATSGQTQDRHRLNRRGDRQLNKALHQVAITRLRCHPPTRVYKQRRSAEGKTDREIRRCIKRYIARQVWRLLEHQPPPQTTP

SEQ ID NO: 54457 - protein, 307 aa, unidentified
MFAGIDVSKDDLEAQLDSKDAGINCPNTANGFPLLIDWLKSHQVRCVLLEATGGYERQVMKALQTDGFEVIRVNPSRARSFAKAMGQQAKTDPIDARLLAQFAATIKPPKTQPISPDQDDLRALVHQRENFVQQRSDDERRLKTAGSDAVKPLLKGHIDYLNKVIVLLDAQIRQSAESLDRKRVLRLCSVKGIGLITAASLMAYLPELGKVGRHEIAALAGLAPYNNDSGKQKGKRYISGGRFSVRRSLYMACWSVIRFQPEFNARYKALLDKGKCAKVALIACMRVLLIRLNAMIRDDSEWRDRVA

SEQ ID NO: 54458 - protein, 346 aa, unidentified
MIAIGSDVHKGRCLMAMLPAEGKLKVLEPIECTREAWRKRLAELPPGSEIALEVSTSGYFVMSVLEEAGWRQRSHWVHTAGIDSLRKHKSDRLDTRSLTQKLAVAHLEPLPEAWFPPAAIRELRLLARQRCWVAVLRAQVKNRVRSLLEMHGLRVKQSPFSGAGRAWVEAQELPEAVHECLRQMMRTYDFLKAERETAEASLIDYASRFPEVARLETVPGIGHILAAVIWSEIGDFSRFASADALVNYTGLVPSLYESGEVSVSGPITRQGPRWLRWALITAANAVTVSKSPLARRYHRLRRRKLPNVAKTALATSLARCIYGVLKHGEDYQEERWGRKTGDEMES

SEQ ID NO: 54459 - protein, 312 aa, unidentified
MSIVGAFDLHRRQLTYDYLELDSGVIHRGRVVPADRDHLRVFLSRLDGRGGAFAVEGCTGWRYVVEELEHAGIEAHLAEPAETANLRGRKRRAKTDRGDARHLRELLARGDLPESWIPPAHVLEARATVRLYKDLDEERTSWLQRVHATLYHQGVPVVGSLTSEEGRARLAGAHLSASARQAVTVGVRQIERLDEELLALRAQLAGLARRQPGCRELRNRHFGIGPVTSVAIWAEMGDTRRFSSSDDAVRHAGLDVTVWASDTKRAKGHLARQGPPTLRWALYEAAVCSSRPNSPDHQYFLAVKRRADATSP

SEQ ID NO: 54460 - protein, 414 aa, unidentified
MRIVYQNVAGLDVHKRLVVAAIIVLKATGEWYQEIRTFSTMTADLLALSDWLTSHGVTHVAMESTGEYWKPIFNILEEGFEVILVNAQHLSKVPGRKTDQSDAEWIAELMQCGLLKASFIPPVGQRELRELTRFRSTFVRERATLVNRIQKVLESANIKLASVASDVMGVSGRAMLEEIVRGQASPEEMADLAKGRLREKRESLVKAMEGRVKPHHRFVLTELLCQIDSLDETIARFDAEIVAYCRPFEEAVALLDTIPGVSREVAEIIVSEIGTDMSRFPSAQHLAAWAGVAPGNNESGGKRRSGRTRKGNKPLGAALNQAAHGAARTRNTYLSAQYHRLAARRGRKKAIVAVAHSILVIAYHLINRNEPYRELGADYFDKRQPQVTAKRLMKRLQQLGYQISIQAAPLPSAA
